United States Patent Application Publication US 2023/0026259 A1 - sequence listing, part 89

SEQ ID NO: 197435 - DNA, 7954 bp, Homo sapiens
  Payload ID: 18941
  Gene Name: ubiquitin specific peptidase 46
  Uniprot ID: P62068
  ENST ID: ENST00000441222
  CDS Start-End: 186-1286
cgctccctccccgccctccccgcgccgccgcctcctcctcccggcctccctctcccagccaaactgaaagccggaccccaggccgccgcgctgccgcccggcctccccgccagcgcgccaccatgggcagtcccggtttccccttgtaaagatggcggtgagggatcgctgcaacctttagactaatgactgtccgaaacatcgcctccatctgtaatatgggcaccaatgcctctgctctggaaaaagacattggtccagagcagtttccaatcaatgaacactatttcggattggtcaattttggaaacacatgctactgtaactccgtgcttcaggcattgtacttctgccgtccattccgggagaatgtgttggcatacaaggcccagcaaaagaagaaggaaaacttgctgacgtgcctggcggaccttttccacagcattgccacacagaagaagaaggttggcgtcatcccaccaaagaagttcatttcaaggctgagaaaagagaatgatctctttgataactacatgcagcaggatgctcatgaatttttaaattatttgctaaacactattgcggacatccttcaggaggagaagaaacaggaaaaacaaaatggaaaattaaaaaatggcaacatgaacgaacctgcggaaaataataaaccagaactcacctgggtccatgagatttttcagggaacgcttaccaatgaaactcgatgcttgaactgtgaaactgttagtagcaaagatgaagattttcttgacctttctgttgatgtggagcagaatacatccattacccactgtctaagagacttcagcaacacagaaacactgtgtagtgaacaaaaatattattgtgaaacatgctgcagcaaacaagaagcccagaaaaggatgagggtaaaaaagctgcccatgatcttggccctgcacctaaagcggttcaagtacatggagcagctgcacagatacaccaagctgtcttaccgtgtggtcttccctctggaactccggctcttcaacacctccagtgatgcagtgaacctggaccgcatgtatgacttggttgcggtggtcgttcactgtggcagtggtcctaatcgtgggcattatatcactattgtgaaaagtcacggcttctggcttttgtttgatgatgacattgtagagaaaatagatgctcaagctattgaagaattctatggcctgacgtcagatatatcaaaaaattcagaatctggatatattttattctatcagtcaagagagtaactgaaagacctgcgggactgattcacgtggggagaatgttcacagcactgtcacccggcttctccgcaggctttcctcttccccagtggcccactaatggtatcactccgagtctcaatggtctggctgtgttagactctctccttttgtgtttttacatgcagcactactcttggttttatttcagtctgacatagagttaactgcaatcagattgtagtctgatttatatgaataacggttgctaattttaggactgggtgaaagctatgccattcattatgtctggctgtattagaatgacatttcctatgaatgtctacggtctgttttaggtgtttgctaaacttctatggcttccagggtcttcttacaatgcattcctttaacttgtccctggaagcattgctacccattttcagcttctctgcctctcttctgatacaaggacagaagaattgggtagatattcaccttttaggggtgcaagtatagctttaagtttgtgcaagtgaaaatgttgaaaagtgagtaacctcgatattaaaatcatccttgacatgaaacagggtgaagagaagctgtccgtggcggctggtgttggctggcattggcactgggctgtgctgacctagccattacaattccaggggctaagaaggctcagggcagacaaagtcaagaggaggaagtttttgtggacaatgaaaagttattttcgtacctttctaccaaaaccaagtttcaggaaaataactctatgttgtttattttcagtgacacttatgtaaggccctgtgagttgtatttatcctgtatccggcactgctaagcttttcaaggtatctttccaatcctgctgatgtggcagtcaatggctgcagggctggcaaacctccccttagccagtcagcacggcattgttccttatcaggaataacaaaggtactacatctttccagccatcagcacgttgtacaacttaactttttaacatagtccgtctgtttactgaggcactggcgagtcccagggctgatacagaaccttccctagagggaataccagagttagctgggtatagaggtggctcaaaggaagtgtccgtgggcagggggaggaatgaacaaaatggcgctgtttctttggctcagactcctagaatgcttgacaagacagaatttttttggaagaacctcatctcactatagttacttttttcacttttgttatatatgtatttattagagcatttgaatattggtacctttaaaagggtcatttggtgttttgctgttgagctggtttttgagtcatagatcttggcttcctttagaagccacttaacttccatacactataataaactgtgaacatatttttgttacctaatgcatccactgatgaacatgcaaactttgggcataatgtgaactaaaattgaaatggaaaatgttagtggccattttgcaacaatgaagaggatagcactttatctagatgaaaactggatttcttatctttgaaatatcttgaactgtttattgctcagaacttaagtaagcatgccaacatttcgtttgtttatgcttgaagtgaaatgttttacttttcactggagaagacaaaacagggtgatcttcatgttattgttttatacaagtgatggaaatgtaccttgccttgtttagaggcaatttcacatttataaatatttttttttcctccatgaaacttacgcagtaatcactacctggaaggtgagttttgatctctttttaaggagaggcactttccaactgaaggtgattgatgtagggaaatgtttgtactatatagaatccatatatttgactgcaagttacaaagttttaagaacatgatggttggtctctaatatatttggaactgattcataagaaaagttattaaaattatctttgaaacacctcttgaagctaatttattagaaaaaatatttcagttggaaggctgtagaagtaatgtttaaatgctaagtcataagttcaggatatttcttttctatttggttgtgcaaaatgtttttcccagttatttaatcgaagtaattccttttaatagaaagagtcagttaaaattcagcattcatggatagatttttggaacgaaaaagggtaagtataagaaaatattgcaaacacattaaaacagttgtatggtgcaggaaaagaagattggaaaaagaccaaaacacacttctccagcaacactccatcagctttttaaaatttagagctatctgctaattttttccctcttccttctcaataaatgaaacaaacactgggcagctgcaggtttctcccaatcatgtctctttatgtaaagacagtaacatgcaaacacttttagtttacatccctcattcacagtgtaaagcaggaaatggtgtgggagatgtgagaccattctgaggtcagcgatagcccaaaggctctgcagtattccctccaatggccaaggattccgtgtgtcatctgcaggagtgagtaggcctgctgtatttcttgtaactgctgggtgttacaaaataagttacaatgttttacactttaaaaaaaaaacagaaggaacatttgctttattggttacttactagtttagcctctaggttatggcacagcatgctaaaaaatcatgtgtttaaaagtaaatgttggtaaaatgctggcatctggtcctattgtgttgatgcattttcacttctgtggtcataggaaatggactggtctaaagagagtgaggcacaacacaagcagggcattagtttgaataggaagtcaatcatatttggttttatggcctggtgtattttgggtttaagataaaatagggaaaaatgtcagaaatgatccctatgcatttattttcatggatacccttaatttcatgggcatgcctaataatgatctatgttctaactggagcttagggcttattttagatattggagtgtagctttattacagatggattttatctttcaacattgcattttgatcaactttgtatattcacgtgtattaaaatattgtgcactaaatgttttgcccttgtttgctattatatggtcaaggcatttatcagcactattgtaatgaactcatgtaagtggcatgggtcagggaaaattatttcctacttttctgcctaattaaatttctgttttccagtattacattaatttatttttggcttccatttctgtataaccaaaatagttactgtatttgtgtggcattcctattattttgttgctaaaaatattgtagtttttatttaaaataatctgtaccttaattttttaaaatgtaaccaattcaagcactttaagcaataatgtcaatcttgtgaaattttaatcagtttaacaccctgcctctaaaattgtttgcaaaaaataaataaatgaataaaatgggaattctctttctagagaattatatccgggtaatgctacacacatggacttaaaatcctttttataaagtgtgagtcagtggcaggtcttatgtccaagtaattattacaaacaattttgaagcagtggaaatgtacagaacattctgatcattataatatataaaggcagtattactctcaaggttgataaaaatcaatgttctggagataactcatcactttttttgagtgaaaaagatcaacagaatttaattcaggaaatggtatctggagaatagcaaattgagaatatcagtgaaaagaatttagggatagttaactaggcatcacagtgaatttatttttggggactttgcatataaaatccttttaaccagttatgaaatgaaagatccattccccaaataagaaggcagcttccagtatctggtttctaggaaggagtaggactgtgattggtccctggtgccctgacttctgggcctgtttctgagccatgggggaccccccagcttcagaaatactcacgtgggttcacaccactccctgccccagaaggagggcaggcacaggtccatgccatgtggcctcagtgaagcctacagtaactatgggtagggctgcttttccctgtcaatcacccagggcacctgtgggtggacagaagattgtcatcggaatacatgcttgggcccaattatgggaataaaacctcatagaccaagagcagggaatgtgccagtaagtgttgagtctcccagctgctgtccatcttctcggggcagtgcagttgaacctgactgagctggaacagagactgttgggaaggtcacttctgtctgccacgaaggccaaaggcagagaagaccttcttgggactgtgtttttctttcctaggcctcactttgtcctgggatttataggacaggcctgtcactaccaaggtgacacaaattctagagaatgtattttcccatttcttcaaatttcctttcctctctttttattgatacttaaaatacctttactaaaaaaatgaagccttccatttccattcccttatatttacatgaagataaaaatacttactaagtcgttgtatttgtccattctggcagtgctataaagacatacctgagcgtgggtcatttctgaagaaaagaggtttaattggctcatggttttatgggctgtacaggcttctgttctgggggaggcctcaggaaacttacaatcagcagaaggcaaagggaaagcaagcccatcttacatggcaggagcaagaggaagagagcaaagggggaggggttacacacttttctttccttttttttttttaagatggagtctcactgtcacccaggctggagtgcagtgatgagatctcagctcactgcaacctctgcctcccgagttcaagcgattcttctgcctcagcctcccaagtagctgggactacaggcatgtgccactatacccgggtaatttttgtattttcagtagatacaaagttttctcatattggccaagctggtctggaactcctgacttcaggtgcctcagcctcccaaagtgctgggattacaggcaagagccaccttgctcggctggggttacacacttttaaacaaccagatctcgtgagaactcagtcatgaggcagtactagggggatggtgcttaaccacctatgatgcaatcacctcccaccaggccccacctccaacactggggattacaattcaacatgggatttgggtggagacacagagccaaaccgtatcagtcatttttcttttactgaaggaaaattttggttgtggggttagtactaaagatagcccatgtagactttttctgaagataccccaagtggagagatttttaattaggcatttatttggcacctattgcattctaggcattgtgataggagctgggggataaaaaggtgacacagattgggtccctcttatggactcgttttttgtctcagaagacaagtctgggtgagaaagaaatttaaaatttaagttgtggaaataacacgtgtgggggaaactccttgcaattcagcacagtttggtattcagccccagcctcaacatgcagatggcactgttggatgaagccacaccatcttttttcctgggagccccacactcttcccagcctgccttctagctcagggacaacacattttgaaaaacaaagtataaatcgattatgttgcaacaatgaacttcacgttttgcctcttctcatgttaaaagagccagtatcatgaaagcctcaacagtgagctttatgaatcaaatatctgttatttctaaacaatctgtttacattatgaccaaataattagagcctatctagacttaccaaaataagatagggcataagcgatttattggtgcatcagcctttgtttgctttttaaggttcctttatgttttaaagggatttgaacaaaagacatcaggagcttacaaaggaaaaatagcttcattttggttatgagataccagagtcagaaatgacattagattgtatagaaaagacttctaattgtgtgcttacttcccacatgattataataaactatatattaacaaccttgggatcgtactcaggttgtcaattacacggatgcatctttcacttttttctttcccaagagtgagagaaagagtgaggttgtgcttaaggcagtgtggaattctacagaagctcttcttggaaaaggagttcaggcacttgtgttgtagactgcagtctgattctgttcttacttcctctcagcataagggagctttgaaaagaaaactcagacttgtatccgacttgaccagaagcaaaataacttgatcattgaagccactatttctgtgtatttgatcaagtcctcctctggaatccaatgcagccatattcatatttcggtctctcttaatggaccttgctggaaagaacattctgtgctaagaaaatggaaaataaacgtgagaaaactttaagaatgagccttcacacctcctgcagcaggtgatagctctgtacttcagagcttgtctccaggttgagaattacctgttttccactctgaggggattagaaagatactgttttaatgggttataaaacttgtgtgaagaagattggccttctccacctctcctgtgaaataaattgtttgaaaactc

SEQ ID NO: 197436 - DNA, 2437 bp, Homo sapiens
  Payload ID: 18941
  Gene Name: ubiquitin specific peptidase 46
  ENST ID: ENST00000503060
  CDS Start-End: 126-248
aaactgaaagccggaccccaggccgccgcgctgccgcccggcctccccgccagcgcgccaccatgggcagtcccggtttccccttgtaaagatggcggtgagggatcgctgcaacctttagactaatgactgtccgaaacatcgcctccatctgtaatatggaagaacctccagcccttgggtccccaggctggaccctgctggcgcctccacttgtcagagcctttggggagctcagattggagtaaggcattgctgtcccttgcagggtgtttaagggacagtggagatcatgccatttcagacctggtggaagcaaccactaatataaacacctcccatgtataggaaggctggagtgggaatccttaaccccgccccctgctcaggtcaatcccccacccaccgcccccactgtccctcccagtcttccttcccagaggagaaggctgggtatgaggaaactgctgtcttttcactggatcagacgtaaatattaactggacctctctttagattctttgctcaataatgaattgttttcagggcaccaatgcctctgctctggaaaaagacattggtccagagcagtttccaatcaatgaacactatttcggattggtcaattttggaaacacatgctactgtaactccgtgcttcaggcattgtacttctgccgtccattccgggagaatgtgttggcatacaaggcccagcaaaagaagaaggaaaacttgctgacgtgcctggcggaccttttccacagcattgccacacagaagaagaaggttggcgtcatcccaccaaagaagttcatttcaaggctgagaaaagagaatgatctctttgataactacatgcagcaggatgctcatgaatttttaaattatttgctaaacactattgcggacatccttcaggaggagaagaaacaggaaaaacaaaatggaaaattaaaaaatggcaacatgaacgaacctgcggaaaataataaaccagaactcacctgggtccatgagatttttcagggaacgcttaccaatgaaactcgatgcttgaactgtgaaactgttagtagcaaagatgaagattttcttgacctttctgttgatgtggagcagaatacatccattacccactgtctaagagacttcagcaacacagaaacactgtgtagtgaacaaaaatattattgtgaaacatgctgcagcaaacaagaagcccagaaaaggatgagggtaaaaaagctgcccatgatcttggccctgcacctaaagcggttcaagtacatggagcagctgcacagatacaccaagctgtcttaccgtgtggtcttccctctggaactccggctcttcaacacctccagtgatgcagtgaacctggaccgcatgtatgacttggttgcggtggtcgttcactgtggcagtggtcctaatcgtgggcattatatcactattgtgaaaagtcacggcttctggcttttgtttgatgatgacattgtagagaaaatagatgctcaagctattgaagaattctatggcctgacgtcagatatatcaaaaaattcagaatctggatatattttattctatcagtcaagagagtaactgaaagacctgcgggactgattcacgtggggagaatgttcacagcactgtcacccggcttctccgcaggctttcctcttccccagtggcccactaatggtatcactccgagtctcaatggtctggctgtgttagactctctccttttgtgtttttacatgcagcactactcttggttttatttcagtctgacatagagttaactgcaatcagattgtagtctgatttatatgaataacggttgctaattttaggactgggtgaaagctatgccattcattatgtctggctgtattagaatgacatttcctatgaatgtctacggtctgttttaggtgtttgctaaacttctatggcttccagggtcttcttacaatgcattcctttaacttgtccctggaagcattgctacccattttcagcttctctgcctctcttctgatacaaggacagaagaattgggtagatattcaccttttaggggtgcaagtatagctttaagtttgtgcaagtgaaaatgttgaaaagtgagtaacctcgatattaaaatcatccttgacatgaaacagggtgaagagaagctgtccgtggcggctggtgttggctggcattggcactgggctgtgctgacctagccattacaattccaggggctaagaaggctcagggcagacaaagtcaagaggaggaagtttttgtggacaatgaaaagttattttcgtacctttctaccaaaaccaagtttcaggaaaataactctatgttgtttattttcagtgacacttatgtaaggccctgtgagttgtatttatcctgtatccggcac

SEQ ID NO: 197437 - DNA, 1419 bp, Homo sapiens
  Payload ID: 18941
  Gene Name: ubiquitin specific peptidase 46
  Uniprot ID: P62068
  ENST ID: ENST00000508499
  CDS Start-End: 281-1360
tgttatgtcatctaccaggtgtttaagggacagtggagatcatgccatttcagacctggtggaagcaaccactaatataaacacctcccatgtataggaaggctggagtgggaatccttaaccccgccccctgctcaggtcaatcccccacccaccgcccccactgtccctcccagtcttccttcccagaggagaaggctgggtatgaggaaactgctgtcttttcactggatcagacgtaaatattaactggacctctctttagattctttgctcaataatgaattgttttcagggcaccaatgcctctgctctggaaaaagacattggtccagagcagtttccaatcaatgaacactatttcggattggtcaattttggaaacacatgctactgtaactccgtgcttcaggcattgtacttctgccgtccattccgggagaatgtgttggcatacaaggcccagcaaaagaagaaggaaaacttgctgacgtgcctggcggaccttttccacagcattgccacacagaagaagaaggttggcgtcatcccaccaaagaagttcatttcaaggctgagaaaagagaatgatctctttgataactacatgcagcaggatgctcatgaatttttaaattatttgctaaacactattgcggacatccttcaggaggagaagaaacaggaaaaacaaaatggaaaattaaaaaatggcaacatgaacgaacctgcggaaaataataaaccagaactcacctgggtccatgagatttttcagggaacgcttaccaatgaaactcgatgcttgaactgtgaaactgttagtagcaaagatgaagattttcttgacctttctgttgatgtggagcagaatacatccattacccactgtctaagagacttcagcaacacagaaacactgtgtagtgaacaaaaatattattgtgaaacatgctgcagcaaacaagaagcccagaaaaggatgagggtaaaaaagctgcccatgatcttggccctgcacctaaagcggttcaagtacatggagcagctgcacagatacaccaagctgtcttaccgtgtggtcttccctctggaactccggctcttcaacacctccagtgatgcagtgaacctggaccgcatgtatgacttggttgcggtggtcgttcactgtggcagtggtcctaatcgtgggcattatatcactattgtgaaaagtcacggcttctggcttttgtttgatgatgacattgtagagaaaatagatgctcaagctattgaagaattctatggcctgacgtcagatatatcaaaaaattcagaatctggatatattttattctatcagtcaagagagtaactgaaagacctgcgggactgattcacgtggggagaatgttcacagcactgtcacccggc

SEQ ID NO: 197438 - DNA, 467 bp, Homo sapiens
  Payload ID: 18941
  Gene Name: ubiquitin specific peptidase 46
  ENST ID: ENST00000512656
  CDS Start-End: 217-387
gcaaccactaatataaacacctcccatgtataggaaggctggagtgggaatccttaaccccgccccctgctcaggtcaatcccccacccaccgcccccactgtccctcccagtcttccttcccagaggagaaggctgggtatgaggaaactgctgtcttttcactggatcagacgtaaatattaactggacctctctttagattctttgctcaataatgaattgttttcagggcaccaatgcctctgctctggaaaaagacattggtccagagcagtttccaatcaatgaacactatttcggattggtcaatgagttgtccactgaattggggccaagcgttactgaagggtgtctggggaaagtttggaaacacatgctactgtaactccgtgcttcaggcattgtacttctgccgtccattccgggagaatgtgttggcatacaaggcccagcaaaagaagaagg

SEQ ID NO: 197439 - DNA, 1589 bp, Homo sapiens
  Payload ID: 18941
  Gene Name: ubiquitin specific peptidase 46
  ENST ID: ENST00000514536
  CDS Start-End: 149-271
ctcccggcctccctctcccagccaaactgaaagccggaccccaggccgccgcgctgccgcccggcctccccgccagcgcgccaccatgggcagtcccggtttccccttgtaaagatggcggtgagggatcgctgcaacctttagactaatgactgtccgaaacatcgcctccatctgtaatatggaagaacctccagcccttgggtccccaggctggaccctgctggcgcctccacttgtcagagcctttggggagctcagattggagtaaggcattgctgtcccttgcaggggcaccaatgcctctgctctggaaaaagacattggtccagagcagtttccaatcaatgaacactatttcggattggtcaattttggaaacacatgctactgtaactccgtgcttcaggcattgtacttctgccgtccattccgggagaatgtgttggcatacaaggcccagcaaaagaagaaggaaaacttgctgacgtgcctggcggaccttttccacagcattgccacacagaagaagaaggttggcgtcatcccaccaaagaagttcatttcaaggctgagaaaagagaatgatctctttgataactacatgcagcaggatgctcatgaatttttaaattatttgctaaacactattgcggacatccttcaggaggagaagaaacaggaaaaacaaaatggaaaattaaaaaatggcaacatgaacgaacctgcggaaaataataaaccagaactcacctgggtccatgagatttttcagggaacgcttaccaatgaaactcgatgcttgaactgtgaaactgttagtagcaaagatgaagattttcttgacctttctgttgatgtggagcagaatacatccattacccactgtctaagagacttcagcaacacagaaacactgtgtagtgaacaaaaatattattgtgaaacatgctgcagcaaacaagaagcccagaaaaggatgagggtaaaaaagctgcccatgatcttggccctgcacctaaagcggttcaagtacatggagcagctgcacagatacaccaagctgtcttaccgtgtggtcttccctctggaactccggctcttcaacacctccagtgatgcagtgaacctggaccgcatgtatgacttggttgcggtggtcgttcactgtggcagtggtcctaatcgtgggcattatatcactattgtgaaaagtcacggcttctggcttttgtttgatgatgacattgtagaggttggtttgcagattattctccagtagtcatagagcatcagtagtatttcggagaatgtaaaatagatgctcaagctattgaagaattctatggcctgacgtcagatatatcaaaaaattcagaatctggatatattttattctatcagtcaagagagtaactgaaagacctgcgggactgattcacgtggggagaatgttcacagcactgtcacccggcttctccgcaggctttcctcttccccagtggcccactaatggtatcactccgagtctcaatggtctggctgtgttagactctctccttttgtgtttttacatgcagcactactct

SEQ ID NO: 197440 - DNA, 7775 bp, Homo sapiens
  Payload ID: 18942
  Gene Name: ubiquitin specific peptidase 47
  Uniprot ID: Q96K76
  ENST ID: ENST00000339865
  CDS Start-End: 764-4627
agaggggaaaagaacgtcaggagagtgaacgggagcaaataaaacgctgtccattctgactggaagggccagagccgtgtctaagggcgggggccgggaggtggcccgcggtggtgtctctaccaggacgaggcctggggtatctgaagaggggatgacgtccaggcgctttgctaaagggaagccagaagggtatgagttgctagggtcagagatggggctttcggctcgagtctttccctgcagggcagagagtccgaagagcccgagaaggcagggaggacagtgggcctggtccttccccggccggcagagggagtcccgagatggaacgtccagctctcctctaacgaaaagcgtttgcatggctgtctcgccaattctgtacctcccggggctgaggaagagccgaggtgactagaagctagcgacaagtgccggccacctccgacgccaggcgccgggcttggagcccgacgggccgaattctcgcgagagcggccgccgccatttttccattgattgcagcgggctgggggaggggccgacgacgaaggcggctgtggtagcggcggcggcggcggcggagccctgggtcggtgtctgcgcgctggtgtctgaggcccaggctgaggcctccgctattgctggagcgcaggcggcggagaggatgactgccgctgccattctctcttgagctagcgagccgccgccaccctccaccctcccccggcagggcggagaggagcggccggagtcagcgatggtgcccggcgaggagaaccaactggtcccgaaagaggcaccactggatcataccagtgacaagtcacttctcgacgctaattttgagccaggaaagaagaactttctgcatttgacagataaagatggtgaacaacctcaaatactgctggaggattccagtgctggggaagacagtgttcatgacaggtttataggtccgcttccaagagaaggttctgggggttctaccagtgattatgtcagccaaagctactcctactcatctattttgaataaatcagaaactggatatgtgggactagtaaaccaagcaatgacttgctatttgaatagccttttgcaaacactttttatgactcctgaatttaggaatgcattatataagtgggaatttgaagaatctgaagaagatccagtgacaagtattccataccaacttcaaaggctttttgttttgttacaaaccagcaaaaagagagcaattgaaaccacagatgttacaaggagctttggatgggatagtagtgaggcttggcagcagcatgatgtacaagaactatgcagagtcatgtttgatgctttggaacagaaatggaagcaaacagaacaggctgatcttataaatgagctatatcaaggcaagctgaaggactacgtgagatgtctggaatgtggttatgagggctggcgaatcgacacatatcttgatattccattggtcatccgaccttatgggtccagccaagcatttgctagtgtggaagaagcattgcatgcatttattcagccagagattctggatggcccaaatcagtatttttgtgaacgttgtaagaagaagtgtgatgcacggaagggccttcggtttttgcattttccttatctgctgaccttacagctgaaaagattcgattttgattatacaaccatgcataggattaaactgaatgatcgaatgacatttcccgaggaactagatatgagtacttttattgatgttgaagatgagaaatctcctcagactgaaagttgcactgacagtggagcagaaaatgaaggtagttgtcacagtgatcagatgagcaacgatttctccaatgatgatggtgttgatgaaggaatctgtcttgaaaccaatagtggaactgaaaagatctcaaaatctggacttgaaaagaattccttgatctatgaacttttctctgttatggttcattctgggagcgctgctggtggtcattattatgcatgtataaagtcattcagtgatgagcagtggtacagcttcaatgatcaacatgtcagcaggataacacaagaggacattaagaaaacacatggtggatcttcaggaagcagaggatattattctagtgctttcgcaagttccacaaatgcatatatgctgatctatagactgaaggatccagccagaaatgcaaaatttctagaagtggatgaatacccagaacatattaaaaacttggtgcagaaagagagagagttggaagaacaagaaaagagacaacgagaaattgagcgcaatacatgcaagataaaattattctgtttgcatcctacaaaacaagtaatgatggaaaataaattggaggttcataaggataagacattaaaggaagcagtagaaatggcttataagatgatggatttagaagaggtaatacccctggattgctgtcgccttgttaaatatgatgagtttcatgattatctagaacggtcatatgaaggagaagaagatacaccaatggggcttctactaggtggcgtcaagtcaacatatatgtttgatctgctgttggagacgagaaagcctgatcaggttttccaatcttataaacctggagaagtgatggtgaaagttcatgttgttgatctaaaggcagaatctgtagctgctcctataactgttcgtgcttacttaaatcagacagttacagaattcaaacaactgatttcaaaggccatccatttacctgctgaaacaatgagaatagtgctggaacgctgctacaatgatttgcgtcttctcagtgtctccagtaaaaccctgaaagctgaaggattttttagaagtaacaaggtgtttgttgaaagctccgagactttggattaccagatggcctttgcagactctcatttatggaaactcctggatcggcatgcaaatacaatcagattatttgttttgctacctgaacaatccccagtatcttattccaaaaggacagcataccagaaagctggaggcgattctggtaatgtggatgatgactgtgaaagagtcaaaggacctgtaggaagcctaaagtctgtggaagctattctagaagaaagcactgaaaaactcaaaagcttgtcactgcagcaacagcaggatggagataatggggacagcagcaaaagtactgagacaagtgactttgaaaacatcgaatcacctctcaatgagagggactcttcagcatcagtggataatagagaacttgaacagcatattcagacttctgatccagaaaattttcagtctgaagaacgatcagactcagatgtgaataatgacaggagtacaagttcagtggacagtgatattcttagctccagtcatagcagtgatactttgtgcaatgcagacaatgctcagatccctttggctaatggacttgactctcacagtatcacaagtagtagaagaacgaaagcaaatgaagggaaaaaagaaacatgggatacagcagaagaagactctggaactgatagtgaatatgatgagagtggcaagagtaggggagaaatgcagtacatgtatttcaaagctgaaccttatgctgcagatgaaggttctggggaaggacataaatggttgatggtgcatgttgataaaagaattactctggcagctttcaaacaacatttagagccctttgttggagttttgtcctctcacttcaaggtctttcgagtgtatgccagcaatcaagagtttgagagcgtccggctgaatgagacactttcatcattttctgatgacaataagattacaattagactggggagagcacttaaaaaaggagaatacagagttaaagtataccagcttttggtcaatgaacaagagccatgcaagtttctgctagatgctgtgtttgctaaaggaatgactgtacggcaatcaaaagaggaattaattcctcagctcagggagcaatgtggtttagagctcagtattgacaggtttcgtctaaggaaaaaaacatggaagaatcctggcactgtctttttggattatcatatttatgaagaagatattaatatttccagcaactgggaggttttccttgaagttcttgatggggtagagaagatgaagtccatgtcacagcttgcagttttgtcaagacggtggaagccttcagagatgaagttggatcccttccaggaggttgtattggaaagcagtagtgtggacgaattgcgagagaagcttagtgaaatcagtgggattcctttggatgatattgaatttgctaagggtagaggaacatttccctgtgatatttctgtccttgatattcatcaggatttagactggaatcctaaagtttctaccctgaatgtctggcctctttatatctgtgatgatggtgcggtcatattttatagggataaaacagaagaattaatggaattgacagatgagcaaagaaatgaactgatgaaaaaagaaagcagtcgactccagaagactggacatcgtgtaacatactcacctcgtaaagagaaagcactaaaaatatatctggatggagcaccaaataaagatctgactcaagactgactctgatagtgtagcattttccctgggggagttttggttttaattagatggttcactaccactgggtagtgccattttggccggacatggttggggtaacccagtgacaccagcactgattggactgccctacaccaatcagaagctcagtgcccaatgggccactgttttgactcggaatcatgttgtgcactatagtcaaatgtactgtaaagtgaaaagggatgtgcaaaaaaataaaaaaaaacaacaaaaaaagctaaccttctattagaaaaggggacaggggaatgagtaaacttcttttattgcggacaaatgtgcacatagccgctagtaaaactagcctcaaacaggatgctcatagcttaataataaaagctgtgcaaaggccatgaatgaatgaattttctgtttatttcactgatgcacacattacctcattgacaattcagaagtaaatccaacgtgtgttgactcttggaaagcagcaaaaacaggagctgaagaaaagaaattcttggaaccagccgtaacccagtaaggaattgtgaagttgtgtttttattttgtttcattttttgcagagtattaagaacattattctggaacatcagaacgtttcccttagaccgatcccagcaggtggcagctcagattgctgcagtgttgtaattataactgattgtacttaagttatggatgtagagaatatgtttcattcatttattcagcatgtaaataaaattgatcctgttgagttatcataattgcagttcaactatctgccatgattattcttttcacgtatcattcattctgtacatttgtgtacattgagaagtatagcaatctatgtaaatgtaatcctcagtgaggttcctcagtgctaggtcccataggattgtcgttgcccttgttaatgaggtttctctgttcagcggcttcaatttttttctctttgtacatctagttttgaagatttacttcaagtttgaatcttctagaatgcttgtaagtccagttttaatttttagagtcaatttgtagttacatgtagtttaacttttgggaaacgtcttaacattgttctgaataaacttgctaatgaggtcaggtcatggtacagactgatgcagtcaacatgatttcattgcagagtttattagtatcagcaagtttttgctttgctaaataaaagtactcaatgaacacaattctacataaattttgacataccatctaatttataaaaatcaataaaaaaggttttggtaaaactttttcatgccagatgctgtttacaacaatgaacatgccaataaaacatttgttcattctgttgtgttattttagtcattaaacttctgtggatgaagaatctgggttaagaatagatttgtcatctttaaatatgacattttgtaatgtgtattggatatctcatttctatgataaaggtatatttacagtaaagttctcataagagaaatgaaaagctgtgttaatatctaactttggggaaccctgtcagtatttcagatccgatttttaccctttttttcttataagaaagataaaattagaaaatactgttagcaaatgtggctctgccatttgaatataatcaccgagaattccatgtcttaaaagtctcctggaatccacaatgaaaaaaaaaatcttttctaaggtatttttctggctaatttttatttgaagaaagctatagcatttagcgaaatttgactgaagtaatgttctgagtttgcattagtgggattggtgatgttctcagaagaaaattggaaacacttgtgatgaattgtctttcagatcacttagattttctgatgtaagaggacagctgtttggttctgatacaggcctgcttacttgggatgtagggttagtaaatggggtttctgctttaaaggactgacttgctatcacacaaaagaggcagacttgtaaacacaatgggctttggagtttggtctgattgggtttggtttagtattcctatgagcgtaaatggtaaaattcttctgatacccactctttagactgtgccttctgctctgttctttgttttatgtttaactgctgtttctaattgcaggtgtattacagatacaaataagagtaaagaaaatatatttcattatagaaaagaaaaaattaaaagcttcttgcttttcagtgcctgatagagtgaaaacacaaagttgcactttaataatttcaataaaagctaatctgtgtcagcctccctctgcttcagagagtcaggtgagcatccataacctaacaggcagagccctagcgatgtggatcaagtttcctgagcccgggggcggtggagcctcatgatctcttatcttttgaggctgaggcaggtcacatgcaacaaattgtgaccctgctccccacaagtcatgcaaaggttttgaagagcttttaccgtggggcagatgaacttgtgtcaaccatgcacaccctgtgagaaccaagtacctgtgtttctaaggcgggcactcaaggtgaggggtgcattctggccaaagaaacaaaagctgtggtttcaggaccatgccgtgtgtagctgatctgtacgggacgtgtatgtaaggaagagcaatcatgatagataagaacagtgtgtgaagcagccttcacactagagtgtttggtcatctcttataatgtaagggaaggtactttaaaattctgggaagatgcgatgaactcatgtcccagtcagaaaataatccaatgaaataagcattggttgccaggccacagttaggaattgtattgtgatacatctagaggccaagagagcaggagagagctaccaacttacactgtggtttaagctaaatgaccgcacagcatcatagcattgcagtgttgttactaaatctggaagtgacctgtgaatgtatggaatacaataaagtcttttattctggttcatttgctagtacttcctttttgattggatactgtagttcttcctctggattttattttgttcagcgtcaaggccctaattttgcaaatgtagtctaaaccacattacgtggactagaggatactctgaattagcaagttttttgtttgctgaataaaactattccatctt

SEQ ID NO: 197441 - DNA, 7396 bp, Homo sapiens
  Payload ID: 18942
  Gene Name: ubiquitin specific peptidase 47
  Uniprot ID: Q96K76
  ENST ID: ENST00000399455
  CDS Start-End: 121-4248
attgctggagcgcaggcggcggagaggatgactgccgctgccattctctcttgagctagcgagccgccgccaccctccaccctcccccggcagggcggagaggagcggccggagtcagcgatggtgcccggcgaggagaaccaactggtcccgaaagaggatgtgttttggagatgcagacaaaatatctttgatgaaatgaagaagaaatttttacagatagaaaatgctgctgaagaacctagagtcttatgtattatacaagatactactaattcaaagacagtgaatgaacggatcactttaaatttaccagcatctactccagtcagaaagctctttgaagatgtggccaacaaagtaggctacataaatggaacctttgacttggtgtggggaaatggaatcaatactgctgatatggcaccactggatcataccagtgacaagtcacttctcgacgctaattttgagccaggaaagaagaactttctgcatttgacagataaagatggtgaacaacctcaaatactgctggaggattccagtgctggggaagacagtgttcatgacaggtttataggtccgcttccaagagaaggttctgggggttctaccagtgattatgtcagccaaagctactcctactcatctattttgaataaatcagaaactggatatgtgggactagtaaaccaagcaatgacttgctatttgaatagccttttgcaaacactttttatgactcctgaatttaggaatgcattatataagtgggaatttgaagaatctgaagaagatccagtgacaagtattccataccaacttcaaaggctttttgttttgttacaaaccagcaaaaagagagcaattgaaaccacagatgttacaaggagctttggatgggatagtagtgaggcttggcagcagcatgatgtacaagaactatgcagagtcatgtttgatgctttggaacagaaatggaagcaaacagaacaggctgatcttataaatgagctatatcaaggcaagctgaaggactacgtgagatgtctggaatgtggttatgagggctggcgaatcgacacatatcttgatattccattggtcatccgaccttatgggtccagccaagcatttgctagtgtggaagaagcattgcatgcatttattcagccagagattctggatggcccaaatcagtatttttgtgaacgttgtaagaagaagtgtgatgcacggaagggccttcggtttttgcattttccttatctgctgaccttacagctgaaaagattcgattttgattatacaaccatgcataggattaaactgaatgatcgaatgacatttcccgaggaactagatatgagtacttttattgatgttgaagatgagaaatctcctcagactgaaagttgcactgacagtggagcagaaaatgaaggtagttgtcacagtgatcagatgagcaacgatttctccaatgatgatggtgttgatgaaggaatctgtcttgaaaccaatagtggaactgaaaagatctcaaaatctggacttgaaaagaattccttgatctatgaacttttctctgttatggttcattctgggagcgctgctggtggtcattattatgcatgtataaagtcattcagtgatgagcagtggtacagcttcaatgatcaacatgtcagcaggataacacaagaggacattaagaaaacacatggtggatcttcaggaagcagaggatattattctagtgctttcgcaagttccacaaatgcatatatgctgatctatagactgaaggatccagccagaaatgcaaaatttctagaagtggatgaatacccagaacatattaaaaacttggtgcagaaagagagagagttggaagaacaagaaaagagacaacgagaaattgagcgcaatacatgcaagataaaattattctgtttgcatcctacaaaacaagtaatgatggaaaataaattggaggttcataaggataagacattaaaggaagcagtagaaatggcttataagatgatggatttagaagaggtaatacccctggattgctgtcgccttgttaaatatgatgagtttcatgattatctagaacggtcatatgaaggagaagaagatacaccaatggggcttctactaggtggcgtcaagtcaacatatatgtttgatctgctgttggagacgagaaagcctgatcaggttttccaatcttataaacctggagaagtgatggtgaaagttcatgttgttgatctaaaggcagaatctgtagctgctcctataactgttcgtgcttacttaaatcagacagttacagaattcaaacaactgatttcaaaggccatccatttacctgctgaaacaatgagaatagtgctggaacgctgctacaatgatttgcgtcttctcagtgtctccagtaaaaccctgaaagctgaaggattttttagaagtaacaaggtgtttgttgaaagctccgagactttggattaccagatggcctttgcagactctcatttatggaaactcctggatcggcatgcaaatacaatcagattatttgttttgctacctgaacaatccccagtatcttattccaaaaggacagcataccagaaagctggaggcgattctggtaatgtggatgatgactgtgaaagagtcaaaggacctgtaggaagcctaaagtctgtggaagctattctagaagaaagcactgaaaaactcaaaagcttgtcactgcagcaacagcaggatggagataatggggacagcagcaaaagtactgagacaagtgactttgaaaacatcgaatcacctctcaatgagagggactcttcagcatcagtggataatagagaacttgaacagcatattcagacttctgatccagaaaattttcagtctgaagaacgatcagactcagatgtgaataatgacaggagtacaagttcagtggacagtgatattcttagctccagtcatagcagtgatactttgtgcaatgcagacaatgctcagatccctttggctaatggacttgactctcacagtatcacaagtagtagaagaacgaaagcaaatgaagggaaaaaagaaacatgggatacagcagaagaagactctggaactgatagtgaatatgatgagagtggcaagagtaggggagaaatgcagtacatgtatttcaaagctgaaccttatgctgcagatgaaggttctggggaaggacataaatggttgatggtgcatgttgataaaagaattactctggcagctttcaaacaacatttagagccctttgttggagttttgtcctctcacttcaaggtctttcgagtgtatgccagcaatcaagagtttgagagcgtccggctgaatgagacactttcatcattttctgatgacaataagattacaattagactggggagagcacttaaaaaaggagaatacagagttaaagtataccagcttttggtcaatgaacaagagccatgcaagtttctgctagatgctgtgtttgctaaaggaatgactgtacggcaatcaaaagaggaattaattcctcagctcagggagcaatgtggtttagagctcagtattgacaggtttcgtctaaggaaaaaaacatggaagaatcctggcactgtctttttggattatcatatttatgaagaagatattaatatttccagcaactgggaggttttccttgaagttcttgatggggtagagaagatgaagtccatgtcacagcttgcagttttgtcaagacggtggaagccttcagagatgaagttggatcccttccaggaggttgtattggaaagcagtagtgtggacgaattgcgagagaagcttagtgaaatcagtgggattcctttggatgatattgaatttgctaagggtagaggaacatttccctgtgatatttctgtccttgatattcatcaggatttagactggaatcctaaagtttctaccctgaatgtctggcctctttatatctgtgatgatggtgcggtcatattttatagggataaaacagaagaattaatggaattgacagatgagcaaagaaatgaactgatgaaaaaagaaagcagtcgactccagaagactggacatcgtgtaacatactcacctcgtaaagagaaagcactaaaaatatatctggatggagcaccaaataaagatctgactcaagactgactctgatagtgtagcattttccctgggggagttttggttttaattagatggttcactaccactgggtagtgccattttggccggacatggttggggtaacccagtgacaccagcactgattggactgccctacaccaatcagaagctcagtgcccaatgggccactgttttgactcggaatcatgttgtgcactatagtcaaatgtactgtaaagtgaaaagggatgtgcaaaaaaataaaaaaaaacaacaaaaaaagctaaccttctattagaaaaggggacaggggaatgagtaaacttcttttattgcggacaaatgtgcacatagccgctagtaaaactagcctcaaacaggatgctcatagcttaataataaaagctgtgcaaaggccatgaatgaatgaattttctgtttatttcactgatgcacacattacctcattgacaattcagaagtaaatccaacgtgtgttgactcttggaaagcagcaaaaacaggagctgaagaaaagaaattcttggaaccagccgtaacccagtaaggaattgtgaagttgtgtttttattttgtttcattttttgcagagtattaagaacattattctggaacatcagaacgtttcccttagaccgatcccagcaggtggcagctcagattgctgcagtgttgtaattataactgattgtacttaagttatggatgtagagaatatgtttcattcatttattcagcatgtaaataaaattgatcctgttgagttatcataattgcagttcaactatctgccatgattattcttttcacgtatcattcattctgtacatttgtgtacattgagaagtatagcaatctatgtaaatgtaatcctcagtgaggttcctcagtgctaggtcccataggattgtcgttgcccttgttaatgaggtttctctgttcagcggcttcaatttttttctctttgtacatctagttttgaagatttacttcaagtttgaatcttctagaatgcttgtaagtccagttttaatttttagagtcaatttgtagttacatgtagtttaacttttgggaaacgtcttaacattgttctgaataaacttgctaatgaggtcaggtcatggtacagactgatgcagtcaacatgatttcattgcagagtttattagtatcagcaagtttttgctttgctaaataaaagtactcaatgaacacaattctacataaattttgacataccatctaatttataaaaatcaataaaaaaggttttggtaaaactttttcatgccagatgctgtttacaacaatgaacatgccaataaaacatttgttcattctgttgtgttattttagtcattaaacttctgtggatgaagaatctgggttaagaatagatttgtcatctttaaatatgacattttgtaatgtgtattggatatctcatttctatgataaaggtatatttacagtaaagttctcataagagaaatgaaaagctgtgttaatatctaactttggggaaccctgtcagtatttcagatccgatttttaccctttttttcttataagaaagataaaattagaaaatactgttagcaaatgtggctctgccatttgaatataatcaccgagaattccatgtcttaaaagtctcctggaatccacaatgaaaaaaaaaatcttttctaaggtatttttctggctaatttttatttgaagaaagctatagcatttagcgaaatttgactgaagtaatgttctgagtttgcattagtgggattggtgatgttctcagaagaaaattggaaacacttgtgatgaattgtctttcagatcacttagattttctgatgtaagaggacagctgtttggttctgatacaggcctgcttacttgggatgtagggttagtaaatggggtttctgctttaaaggactgacttgctatcacacaaaagaggcagacttgtaaacacaatgggctttggagtttggtctgattgggtttggtttagtattcctatgagcgtaaatggtaaaattcttctgatacccactctttagactgtgccttctgctctgttctttgttttatgtttaactgctgtttctaattgcaggtgtattacagatacaaataagagtaaagaaaatatatttcattatagaaaagaaaaaattaaaagcttcttgcttttcagtgcctgatagagtgaaaacacaaagttgcactttaataatttcaataaaagctaatctgtgtcagcctccctctgcttcagagagtcaggtgagcatccataacctaacaggcagagccctagcgatgtggatcaagtttcctgagcccgggggcggtggagcctcatgatctcttatcttttgaggctgaggcaggtcacatgcaacaaattgtgaccctgctccccacaagtcatgcaaaggttttgaagagcttttaccgtggggcagatgaacttgtgtcaaccatgcacaccctgtgagaaccaagtacctgtgtttctaaggcgggcactcaaggtgaggggtgcattctggccaaagaaacaaaagctgtggtttcaggaccatgccgtgtgtagctgatctgtacgggacgtgtatgtaaggaagagcaatcatgatagataagaacagtgtgtgaagcagccttcacactagagtgtttggtcatctcttataatgtaagggaaggtactttaaaattctgggaagatgcgatgaactcatgtcccagtcagaaaataatccaatgaaataagcattggttgccaggccacagttaggaattgtattgtgatacatctagaggccaagagagcaggagagagctaccaacttacactgtggtttaagctaaatgaccgcacagcatcatagcattgcagtgttgttactaaatctggaagtgacctgtgaatgtatggaatacaataaagtcttttattctggttcatttgctagtacttcctttttgattggatactgtagttcttcctctggattttattttgttcagcgtcaaggccctaattttgcaaatgtagtctaaaccacattacgtggactagaggatactctgaattagcaagttttttgtttgctgaataaaactattccatctt

SEQ ID NO: 197442 - DNA, 4525 bp, Homo sapiens
  Payload ID: 18942
  Gene Name: ubiquitin specific peptidase 47
  Uniprot ID: Q96K76
  ENST ID: ENST00000527733
  CDS Start-End: 212-4279
gaaggcggctgtggtagcggcggcggcggcggcggagccctgggtcggtgtctgcgcgctggtgtctgaggcccaggctgaggcctccgctattgctggagcgcaggcggcggagaggatgactgccgctgccattctctcttgagctagcgagccgccgccaccctccaccctcccccggcagggcggagaggagcggccggagtcagcgatggtgcccggcgaggagaaccaactggtcccgaaagagatagaaaatgctgctgaagaacctagagtcttatgtattatacaagatactactaattcaaagacagtgaatgaacggatcactttaaatttaccagcatctactccagtcagaaagctctttgaagatgtggccaacaaagtaggctacataaatggaacctttgacttggtgtggggaaatggaatcaatactgctgatatggcaccactggatcataccagtgacaagtcacttctcgacgctaattttgagccaggaaagaagaactttctgcatttgacagataaagatggtgaacaacctcaaatactgctggaggattccagtgctggggaagacagtgttcatgacaggtttataggtccgcttccaagagaaggttctgggggttctaccagtgattatgtcagccaaagctactcctactcatctattttgaataaatcagaaactggatatgtgggactagtaaaccaagcaatgacttgctatttgaatagccttttgcaaacactttttatgactcctgaatttaggaatgcattatataagtgggaatttgaagaatctgaagaagatccagtgacaagtattccataccaacttcaaaggctttttgttttgttacaaaccagcaaaaagagagcaattgaaaccacagatgttacaaggagctttggatgggatagtagtgaggcttggcagcagcatgatgtacaagaactatgcagagtcatgtttgatgctttggaacagaaatggaagcaaacagaacaggctgatcttataaatgagctatatcaaggcaagctgaaggactacgtgagatgtctggaatgtggttatgagggctggcgaatcgacacatatcttgatattccattggtcatccgaccttatgggtccagccaagcatttgctagtgtggaagaagcattgcatgcatttattcagccagagattctggatggcccaaatcagtatttttgtgaacgttgtaagaagaagtgtgatgcacggaagggccttcggtttttgcattttccttatctgctgaccttacagctgaaaagattcgattttgattatacaaccatgcataggattaaactgaatgatcgaatgacatttcccgaggaactagatatgagtacttttattgatgttgaagatgagaaatctcctcagactgaaagttgcactgacagtggagcagaaaatgaaggtagttgtcacagtgatcagatgagcaacgatttctccaatgatgatggtgttgatgaaggaatctgtcttgaaaccaatagtggaactgaaaagatctcaaaatctggacttgaaaagaattccttgatctatgaacttttctctgttatggttcattctgggagcgctgctggtggtcattattatgcatgtataaagtcattcagtgatgagcagtggtacagcttcaatgatcaacatgtcagcaggataacacaagaggacattaagaaaacacatggtggatcttcaggaagcagaggatattattctagtgctttcgcaagttccacaaatgcatatatgctgatctatagactgaaggatccagccagaaatgcaaaatttctagaagtggatgaatacccagaacatattaaaaacttggtgcagaaagagagagagttggaagaacaagaaaagagacaacgagaaattgagcgcaatacatgcaagataaaattattctgtttgcatcctacaaaacaagtaatgatggaaaataaattggaggttcataaggataagacattaaaggaagcagtagaaatggcttataagatgatggatttagaagaggtaatacccctggattgctgtcgccttgttaaatatgatgagtttcatgattatctagaacggtcatatgaaggagaagaagatacaccaatggggcttctactaggtggcgtcaagtcaacatatatgtttgatctgctgttggagacgagaaagcctgatcaggttttccaatcttataaacctggagaagtgatggtgaaagttcatgttgttgatctaaaggcagaatctgtagctgctcctataactgttcgtgcttacttaaatcagacagttacagaattcaaacaactgatttcaaaggccatccatttacctgctgaaacaatgagaatagtgctggaacgctgctacaatgatttgcgtcttctcagtgtctccagtaaaaccctgaaagctgaaggattttttagaagtaacaaggtgtttgttgaaagctccgagactttggattaccagatggcctttgcagactctcatttatggaaactcctggatcggcatgcaaatacaatcagattatttgttttgctacctgaacaatccccagtatcttattccaaaaggacagcataccagaaagctggaggcgattctggtaatgtggatgatgactgtgaaagagtcaaaggacctgtaggaagcctaaagtctgtggaagctattctagaagaaagcactgaaaaactcaaaagcttgtcactgcagcaacagcaggatggagataatggggacagcagcaaaagtactgagacaagtgactttgaaaacatcgaatcacctctcaatgagagggactcttcagcatcagtggataatagagaacttgaacagcatattcagacttctgatccagaaaattttcagtctgaagaacgatcagactcagatgtgaataatgacaggagtacaagttcagtggacagtgatattcttagctccagtcatagcagtgatactttgtgcaatgcagacaatgctcagatccctttggctaatggacttgactctcacagtatcacaagtagtagaagaacgaaagcaaatgaagggaaaaaagaaacatgggatacagcagaagaagactctggaactgatagtgaatatgatgagagtggcaagagtaggggagaaatgcagtacatgtatttcaaagctgaaccttatgctgcagatgaaggttctggggaaggacataaatggttgatggtgcatgttgataaaagaattactctggcagctttcaaacaacatttagagccctttgttggagttttgtcctctcacttcaaggtctttcgagtgtatgccagcaatcaagagtttgagagcgtccggctgaatgagacactttcatcattttctgatgacaataagattacaattagactggggagagcacttaaaaaaggagaatacagagttaaagtataccagcttttggtcaatgaacaagagccatgcaagtttctgctagatgctgtgtttgctaaaggaatgactgtacggcaatcaaaagaggaattaattcctcagctcagggagcaatgtggtttagagctcagtattgacaggtttcgtctaaggaaaaaaacatggaagaatcctggcactgtctttttggattatcatatttatgaagaagatattaatatttccagcaactgggaggttttccttgaagttcttgatggggtagagaagatgaagtccatgtcacagcttgcagttttgtcaagacggtggaagccttcagagatgaagttggatcccttccaggaggttgtattggaaagcagtagtgtggacgaattgcgagagaagcttagtgaaatcagtgggattcctttggatgatattgaatttgctaagggtagaggaacatttccctgtgatatttctgtccttgatattcatcaggatttagactggaatcctaaagtttctaccctgaatgtctggcctctttatatctgtgatgatggtgcggtcatattttatagggataaaacagaagaattaatggaattgacagatgagcaaagaaatgaactgatgaaaaaagaaagcagtcgactccagaagactggacatcgtgtaacatactcacctcgtaaagagaaagcactaaaaatatatctggatggagcaccaaataaagatctgactcaagactgactctgatagtgtagcattttccctgggggagttttggttttaattagatggttcactaccactgggtagtgccattttggccggacatggttggggtaacccagtgacaccagcactgattggactgccctacaccaatcagaagctcagtgcccaatgggccactgttttgactcggaatcatgttgtgcactatagtcaaatgtactgtaaagtgaaaagggatgtgcaaaaaaataaaaaaaa

SEQ ID NO: 197443 - DNA, 4595 bp, Homo sapiens
  Payload ID: 18943
  Gene Name: ubiquitin specific peptidase 48
  Uniprot ID: Q86UV5
  ENST ID: ENST00000308271
  CDS Start-End: 650-3757
gctcgggaaaggggttcggaaccggtctaggctcaagttaaatctccctctaaagagccaacactggtttctttggcgactcggtttctactctaaacaggtcccgctccacagtctgggcgggcctgtgtgtgcgttgagtagcctctagcgtgaaaacttcatggttaaaagggaagtaccggaggcaagaaatagctttcgaggcactggtttgttagagtagtggtacgtagtgcgccgccctgaacgggggctgagacgctgcttttccagaagtgccagtgaggacgtggcaagaccgcctcggacgtacgcttcctctacctcagcccgtcgggttaggggcgcgggaggcgcagaggctgctgggaacgcgcatgcgctcagcgcggcggggagtccacctttaacgtccgcgggcgcggggtgtgtcgggtgtcgacggcggcgctttgcggccggtcgtgcgggtcgggcgcgggcgggcgcggcggcagtggcgcgcacaggtgattgactggccagctgcctgaaggagcgccaggtcctccttgctggcaggtggcgaagcccattggggcggcggtgcagaccgcggcggcggctgcggcggtctggctcgggaggcgttcctggggccaaggccatggccccgcggctgcagctggagaaggcggcctggcgctgggcggagacggtgcggcccgaggaggtgtcgcaggagcacatcgagaccgcttaccgcatctggctggagccctgcattcgcggcgtgtgcagacgaaactgcaaaggaaatccgaattgcttggttggtattggtgagcatatttggttaggagaaatagatgaaaatagttttcataacatcgatgatcccaactgtgagaggagaaaaaagaactcatttgtgggcctgactaaccttggagccacttgttatgtcaacacatttcttcaagtgtggtttctcaacttggagcttcggcaggcactctacttatgtccaagcacttgtagtgactacatgctgggagacggcatccaagaagaaaaagattatgagcctcaaacaatttgtgagcatctccagtacttgtttgccttgttgcaaaacagtaataggcgatacattgatccatcaggatttgttaaagccttgggcctggacactggacaacagcaggatgctcaagaattttcaaagctctttatgtctctattggaagatactttgtctaaacaaaagaatccagatgtgcgcaatattgttcaacagcagttctgtggagaatatgcctatgtaactgtttgcaaccagtgtggcagagagtctaagcttttgtcaaaattttatgagctggagttaaatatccaaggccacaaacagttaacagattgtatctcggaatttttgaaggaagaaaaattagaaggagacaatcgctatttttgcgagaactgtcaaagcaaacagaatgcaacaagaaagattcgacttcttagccttccttgcactctgaacttgcagctaatgcgttttgtctttgacaggcaaactggacataagaaaaagctgaatacctacattggcttctcagaaattttggatatggagccttatgtggaacataaaggtgggtcctacgtgtatgaactcagcgcagtcctcatacacagaggagtgagtgcttattctggccactacatcgcccacgtgaaagatccacagtctggtgaatggtataagtttaatgatgaagacatagaaaagatggaggggaagaaattacaactagggattgaggaagatctagcagaaccttctaagtctcagacacgtaaacccaagtgtggcaaaggaactcattgctctcgaaatgcatatatgttggtttatagactgcaaactcaagaaaagcccaacactactgttcaagttccagcctttcttcaagagctggtagatcgggataattccaaatttgaggagtggtgtattgaaatggctgagatgcgtaagcaaagtgtggataaaggaaaagcaaaacacgaagaggttaaggagctgtaccaaaggttacctgctggagctgagccctatgagtttgtctctctggaatggctgcaaaagtggttggatgaatcaacacctaccaaacctattgataatcacgcttgcctgtgttcccatgacaagcttcacccggataaaatatcaattatgaagaggatatctgaatatgcagctgacattttctatagtagatatggaggaggtccaagactaactgtgaaagccctgtgtaaggaatgtgtagtagaacgttgtcgcatattgcgtctgaagaaccaactaaatgaagattataaaactgttaataatctgctgaaagcagcagtaaagggcagcgatggattttgggtggggaagtcctccttgcggagttggcgccagctagctcttgaacagctggatgagcaagatggtgatgcagaacaaagcaacggaaagatgaacggtagcaccttaaataaagatgaatcaaaggaagaaagaaaagaagaggaggaattaaattttaatgaagatattctgtgtccacatggtgagttatgcatatctgaaaatgaaagaaggcttgtttctaaagaggcttggagcaaactgcagcagtactttccaaaggctcctgagtttccaagttacaaagagtgctgttcacagtgcaagattttagaaagagaaggggaagaaaatgaagccttacataagatgattgcaaacgagcaaaagacttctctcccaaatttgttccaggataaaaacagaccgtgtctcagtaactggccagaggatacggatgtcctctacatcgtgtctcagttctttgtagaagagtggcggaaatttgttagaaagcctacaagatgcagccctgtgtcatcagttgggaacagtgctcttttgtgtccccacgggggcctcatgtttacatttgcttccatgaccaaagaagattctaaacttatagctctcatatggcccagtgagtggcaaatgatacaaaagctctttgttgtggatcatgtaattaaaatcacgagaattgaagtgggagatgtaaacccttcagaaacacagtatatttctgagcccaaactctgtccagaatgcagagaaggcttattgtgtcagcagcagagggacctgcgtgaatacactcaagccaccatctatgtccataaagttgtggataataaaaaggtgatgaaggattcggctccggaactgaatgtgagtagttctgaaacagaggaggacaaggaagaagctaaaccagatggagaaaaagatccagattttaatcaaagcaatggtggaacaaagcggcaaaagatatcccatcaaaattatatagcctatcaaaagcaagttattcgccgaagtatgcgacatagaaaagttcgtggtgagaaagcacttctcgtttctgctaatcagacgttaaaagaattgaaaattcagatcatgcatgcattttcagttgctccttttgaccagaatttgtcaattgatggaaagattttaagtgatgactgtgccaccctaggcacccttggcgtcattcctgaatctgtcattttattgaaggctgatgaaccaattgcagattatgctgcaatggatgatgtcatgcaagtttgtatgccagaagaagggtttaaaggtactggtcttcttggacattaatctttgaatacttgctgactgctaagaaatgaccagaggggaagaggagtttgacatgttagggcattaaagcaaaggtggatttaagaattaaaccattacatgccccttccaaaaggcagaaatccattcaaacgtgactgtcccaaatgccttatgtcaaataaagcagattgcactgatggacatcagacttgaaggaaatgtttccaattttatatttaaggggggtggtgggtgggagggggcaagtaaagacggaacaagtttagtagcagtaatagtaaatcatgtttacatatgagatttatagtcgtgggaggggaataaagttctgttatatttccttgctcgagtttcataccagatgcgttggtccataaaggattgtatcaagtagatgggacaacattctgctctgaacgaaaagtaattttagagacataacctgcttaccaatgcctgtctttgattcatattctactttcaataaagcatgaaagtgaagaacttgtcctaagtgtggaaaagtgtcttcagatttagactcttctccatgtcagctgcagcgccacccgccttacacctgcccggccgtctgtctcttggtattgggtaaaggagggggcacctgcatgtctcctgcaatgagcaaggaattatgtctcatgttttgacttcagaggctttttgctttggtgcatttcagaaaggatggagaacatttattatgtgtgaaagcatcctcttccggttttgctgttattcaaaagtgggaaatgtacctggcacgtttgaaaataaaaaatctgactacctatcagaagagtaaatcaga

SEQ ID NO: 197444 - DNA, 570 bp, Homo sapiens
  Payload ID: 18943
  Gene Name: ubiquitin specific peptidase 48
  ENST ID: ENST00000374730
  CDS Start-End: 1-346
tcttagccttccttgcactctgaacttgcagctaatgcgttttgtctttgacaggcaaactggacataagaaaaagctgaatacctacattggcttctcagaaattttggatatggagccttatgtggaacataaaggtgggtcctacgtgtatgaactcagcgcagtcctcatacacagaggagtgagtgcttattctggccactacatcgcccacgtgaaagatccacagtctggtgaatggtataagtttaatgatgaagacatagaaaagatggaggggaagaaattacaactagggattgaggaagatctaggtaaaacctttaagttcagaaccttctaagtctcagacacgtaaacccaagtgtggcaaaggaactcattgctctcgaaatgcatatatgttggtttatagactgcaaactcaagaaaagcccaacactactgttcaagttccagcctttcttcaagagctggtagatcgggataattccaaatttgaggagtggtgtattgaaatggctgagatgcgtaagcaaagtgtggataaaggaaaagcaaaacacg

SEQ ID NO: 197445 - DNA, 3037 bp, Homo sapiens
  Payload ID: 18943
  Gene Name: ubiquitin specific peptidase 48
  ENST ID: ENST00000374732
  CDS Start-End: 958-2523
aattgagatggtttactgtaaaattaaaatgggagttagttttctagacatgtaactctctggggagtataaaactggtcacaatgggctttgcgttgaagtatctgtccctcagatctcatcagaaggagtatataatacaaaaatataaattcaacctctgtatgttttcttctatgttttatgctgggactcactggagatctttgtaagtaatcaaagctggccctttatctttgattttggcttttagggaattctagggacttcctttccccaaattaaaactcattttgaggtgtttggttttgtcttttaatttttgcaacttcaaaattgatgactcagttctagtgtactttatcctcgaacttgtttaaaataggttactttcttgaaataaataataatataatgaagagatcatgacttggatttgggtgggggaattaaataccttttcaaaattgccatcagtatcatcttggatgaagaaagttcagtggttaaaagcgtcttctgaagtgtggtcatagtcggtgaggtttatttcagtttggcttctcattttaattttcagatgtatatcacatatatgtgaaaagtactgacaaaaataatttatgaaataaacacagtagggcatgaggttgtgttatttgtgaggcagcaatggagcatgacttgtagtcaacaaacatgggtgtcctgatcaaagctctgctgtgctattcggcaagactctatgtggatgcctcttgtagaatgtggttaataataccagccgatctcatagggcactgtgcagactcagcattatggtgcacagctccttgaactcataggagtggcacttaactggagctttgtgtcgtactcatcaaacatcttcccccagacaatgattcttctgattctgctaactctggacagagtttgcattgtcttttgagaaaaatgaatgtatcacttagtcaaaaaactgtaaaaatacataggctctttccgatgcttgctttctcagagccctatgagtttgtctctctggaatggctgcaaaagtggttggatgaatcaacacctaccaaacctattgataatcacgcttgcctgtgttcccatgacaagcttcacccggataaaatatcaattatgaagaggatatctgaatatgcagctgacattttctatagtagatatggaggaggtccaagactaactgtgaaagccctgtgtaaggaatgtgtagtagaacgttgtcgcatattgcgtctgaagaaccaactaaatgaagattataaaactgttaataatctgctgaaagcagcagtaaagggcgatggattttgggtggggaagtcctccttgcggagttggcgccagctagctcttgaacagctggatgagcaagatggtgatgcagaacaaagcaacggaaagatgaacggtagcaccttaaataaagatgaatcaaaggaagaaagaaaagaagaggaggaattaaattttaatgaagatattctgtgtccacatggtgagttatgcatatctgaaaatgaaagaaggcttgtttctaaagaggcttggagcaaactgcagcagtactttccaaaggctcctgagtttccaagttacaaagagtgctgttcacagtgcaagattttagaaagagaaggggaagaaaatgaagccttacataagatgattgcaaacgagcaaaagacttctctcccaaatttgttccaggataaaaacagaccgtgtctcagtaactggccagaggatacggatgtcctctacatcgtgtctcagttctttgtagaagagtggcggaaatttgttagaaagcctacaagatgcagccctgtgtcatcagttgggaacagtgctcttttgtgtccccacgggggcctcatgtttacatttgcttccatgaccaaagaagattctaaacttatagctctcatatggcccagtgagtggcaaatgatacaaaagctctttgttgtggatcatgtaattaaaatcacgagaattgaagtgggagatgtaaacccttcagaaacacagtatatttctgagcccaaactctgtccagaatgcagagaaggcttattgtgtcagcagcagagggacctgcgtgaatacactcaagccaccatctatgtccataaagttgtggataataaaaaggtgatgaaggattcggctccggaactgaatgtgagtagttctgaaacagaggaggacaaggaagaagctaaaccagatggagaaaaagatccagattttaatcaaatcatgcatgcattttcagttgctccttttgaccagaatttgtcaattgatggaaagattttaagtgatgactgtgccaccctaggcacccttggcgtcattcctgaatctgtcattttattgaaggctgatgaaccaattgcagattatgctgcaatggatgatgtcatgcaagtttgtatgccagaagaagggtttaaaggtactggtcttcttggacattaatctttgaatacttgctgactgctaagaaatgaccagaggggaagaggagtttgacatgttagggcattaaagcaaaggtggatttaagaattaaaccattacatgccccttccaaaaggcagaaatccattcaaacgtgactgtcccaaatgccttatgtcaaataaagcagattgcactgatggacatcagacttgaaggaaatgtttccaattttatatttaaggggggtggtgggtgggagggggcaagtaaagacggaacaagtttagtagcagtaatagtaaatcatgtttacatatgagatttatagtcgtgggaggggaataaagttctgttatatttccttgctcgagtttcataccagatgcgttggtccataaaggattgtatcaagtagatgggacaacattctgctctgaacgaaaagtaattttagagacataacctgcttaccaatgcctgtctttgattcatattctactttcaataaagcatgaaagtgaagaacttg

SEQ ID NO: 197446 - DNA, 4309 bp, Homo sapiens
  Payload ID: 18943
  Gene Name: ubiquitin specific peptidase 48
  Uniprot ID: Q86UV5
  ENST ID: ENST00000400301
  CDS Start-End: 239-3190
aacgtccgcgggcgcggggtgtgtcgggtgtcgacggcggcgctttgcggccggtcgtgcgggtcgggcgcgggcgggcgcggcggcagtggcgcgcacaggtgattgactggccagctgcctgaaggagcgccaggtcctccttgctggcaggtggcgaagcccattggggcggcggtgcagaccgcggcggcggctgcggcggtctggctcgggaggcgttcctggggccaaggccatggccccgcggctgcagctggagaaggcggcctggcgctgggcggagacggtgcggcccgaggaggtgtcgcaggagcacatcgagaccgcttaccgcatctggctggagccctgcattcgcggcgtgtgcagacgaaactgcaaaggaaatccgaattgcttggttggtattggtgagcatatttggttaggagaaatagatgaaaatagttttcataacatcgatgatcccaactgtgagaggagaaaaaagaactcatttgtgggcctgactaaccttggagccacttgttatgtcaacacatttcttcaagtgtggtttctcaacttggagcttcggcaggcactctacttatgtccaagcacttgtagtgactacatgctgggagacggcatccaagaagaaaaagattatgagcctcaaacaatttgtgagcatctccagtacttgtttgccttgttgcaaaacagtaataggcgatacattgatccatcaggatttgttaaagccttgggcctggacactggacaacagcaggatgctcaagaattttcaaagctctttatgtctctattggaagatactttgtctaaacaaaagaatccagatgtgcgcaatattgttcaacagcagttctgtggagaatatgcctatgtaactgtttgcaaccagtgtggcagagagtctaagcttttgtcaaaattttatgagctggagttaaatatccaaggccacaaacagttaacagattgtatctcggaatttttgaaggaagaaaaattagaaggagacaatcgctatttttgcgagaactgtcaaagcaaacagaatgcaacaagaaagattcgacttcttagccttccttgcactctgaacttgcagctaatgcgttttgtctttgacaggcaaactggacataagaaaaagctgaatacctacattggcttctcagaaattttggatatggagccttatgtggaacataaaggtgggtcctacgtgtatgaactcagcgcagtcctcatacacagaggagtgagtgcttattctggccactacatcgcccacgtgaaagatccacagtctggtgaatggtataagtttaatgatgaagacatagaaaagatggaggggaagaaattacaactagggattgaggaagatctagcagaaccttctaagtctcagacacgtaaacccaagtgtggcaaaggaactcattgctctcgaaatgcatatatgttggtttatagactgcaaactcaagaaaagcccaacactactgttcaagttccagcctttcttcaagagctggtagatcgggataattccaaatttgaggagtggtgtattgaaatggctgagatgcgtaagcaaagtgtggataaaggaaaagcaaaacacgaagaggttaaggagctgtaccaaaggttacctgctggagctgagccctatgagtttgtctctctggaatggctgcaaaagtggttggatgaatcaacacctaccaaacctattgataatcacgcttgcctgtgttcccatgacaagcttcacccggataaaatatcaattatgaagaggatatctgaatatgcagctgacattttctatagtagatatggaggaggtccaagactaactgtgaaagccctgtgtaaggaatgtgtagtagaacgttgtcgcatattgcgtctgaagaaccaactaaatgaagattataaaactgttaataatctgctgaaagcagcagtaaagggcagcgatggattttgggtggggaagtcctccttgcggagttggcgccagctagctcttgaacagctggatgagcaagatggtgatgcagaacaaagcaacggaaagatgaacggtagcaccttaaataaagatgaatcaaaggaagaaagaaaagaagaggaggaattaaattttaatgaagatattctgtgtccacatggtgagttatgcatatctgaaaatgaaagaaggcttgtttctaaagaggcttggagcaaactgcagcagtactttccaaaggctcctgagtttccaagttacaaagagtgctgttcacagtgcaagattttagaaagagaaggggaagaaaatgaagccttacataagatgattgcaaacgagcaaaagacttctctcccaaatttgttccaggataaaaacagaccgtgtctcagtaactggccagaggatacggatgtcctctacatcgtgtctcagttctttgtagaagagtggcggaaatttgttagaaagcctacaagatgcagccctgtgtcatcagttgggaacagtgctcttttgtgtccccacgggggcctcatgtttacatttgcttccatgaccaaagaagattctaaacttatagctctcatatggcccagtgagtggcaaatgatacaaaagctctttgttgtggatcatgtaattaaaatcacgagaattgaagtgggagatgtaaacccttcagaaacacagtatatttctgagcccaaactctgtccagaatgcagagaaggcttattgtgtcagcagcagagggacctgcgtgaatacactcaagccaccatctatgtccataaagttgtggataataaaaaggtgatgaaggattcggctccggaactgaatgtgagtagttctgaaacagaggaggacaaggaagaagctaaaccagatggagaaaaagatccagattttaatcaaatcatgcatgcattttcagttgctccttttgaccagaatttgtcaattgatggaaagattttaagtgatgactgtgccaccctaggcacccttggcgtcattcctgaatctgtcattttattgaaggctgatgaaccaattgcagattatgctgcaatggatgatgtcatgcaagtttgtatgccagaagaagggtttaaaggtactggtcttcttggacattaatctttgaatacttgctgactgctaagaaatgaccagaggggaagaggagtttgacatgttagggcattaaagcaaaggtggatttaagaattaaaccattacatgccccttccaaaaggcagaaatccattcaaacgtgactgtcccaaatgccttatgtcaaataaagcagattgcactgatggacatcagacttgaaggaaatgtttccaattttatatttaaggggggtggtgggtgggagggggcaagtaaagacggaacaagtttagtagcagtaatagtaaatcatgtttacatatgagatttatagtcgtgggaggggaataaagttctgttatatttccttgctcgagtttcataccagatgcgttggtccataaaggattgtatcaagtagatgggacaacattctgctctgaacgaaaagtaattttagagacataacctgcttaccaatgcctgtctttgattcatattctactttcaataaagcatgaaagtgaagaacttgtcctaagtgtggaaaagtgtcttcagatttagactcttctccatgtcagctgcagcgccacccgccttacacctgcccggccgtctgtctcttggtattgggtaaaggagggggcacctgcatgtctcctgcaatgagcaaggaattatgtctcatgttttgacttcagaggctttttgctttggtgcatttcagaaaggatggagaacatttattatgtgtgaaagcatcctcttccggttttgctgttattcaaaagtgggaaatgtacctggcacgtttgaaaataaaaaatctgactacctatcagaagagtaaatcagactgaagtacatttggataacacaaggtttctataaaatttgttcttcctgtcctccatgtcactgtttcttggacctcagttctctttttgaaagcattattccaaaatgccctgagagggtctcttagatcattgtttaaaaaaggaaaaaagtatatggatgtgctgtccatccaactcaggattatcattcttagcaacacgtaaccgaagcaatattcttaagaatattgaaggggtttttttaattgaacttaagactggagtttttcctttgaaa

SEQ ID NO: 197447 - DNA, 2818 bp, Homo sapiens
  Payload ID: 18943
  Gene Name: ubiquitin specific peptidase 48
  Uniprot ID: Q86UV5
  ENST ID: ENST00000421625
  CDS Start-End: 650-2107
gctcgggaaaggggttcggaaccggtctaggctcaagttaaatctccctctaaagagccaacactggtttctttggcgactcggtttctactctaaacaggtcccgctccacagtctgggcgggcctgtgtgtgcgttgagtagcctctagcgtgaaaacttcatggttaaaagggaagtaccggaggcaagaaatagctttcgaggcactggtttgttagagtagtggtacgtagtgcgccgccctgaacgggggctgagacgctgcttttccagaagtgccagtgaggacgtggcaagaccgcctcggacgtacgcttcctctacctcagcccgtcgggttaggggcgcgggaggcgcagaggctgctgggaacgcgcatgcgctcagcgcggcggggagtccacctttaacgtccgcgggcgcggggtgtgtcgggtgtcgacggcggcgctttgcggccggtcgtgcgggtcgggcgcgggcgggcgcggcggcagtggcgcgcacaggtgattgactggccagctgcctgaaggagcgccaggtcctccttgctggcaggtggcgaagcccattggggcggcggtgcagaccgcggcggcggctgcggcggtctggctcgggaggcgttcctggggccaaggccatggccccgcggctgcagctggagaaggcggcctggcgctgggcggagacggtgcggcccgaggaggtgtcgcaggagcacatcgagaccgcttaccgcatctggctggagccctgcattcgcggcgtgtgcagacgaaactgcaaaggaaatccgaattgcttggttggtattggtgagcatatttggttaggagaaatagatgaaaatagttttcataacatcgatgatcccaactgtgagaggagaaaaaagaactcatttgtgggcctgactaaccttggagccacttgttatgtcaacacatttcttcaagtgtggtttctcaacttggagcttcggcaggcactctacttatgtccaagcacttgtagtgactacatgctgggagacggcatccaagaagaaaaagattatgagcctcaaacaatttgtgagcatctccagtacttgtttgccttgttgcaaaacagtaataggcgatacattgatccatcaggatttgttaaagccttgggcctggacactggacaacagcaggatgctcaagaattttcaaagctctttatgtctctattggaagatactttgtctaaacaaaagaatccagatgtgcgcaatattgttcaacagcagttctgtggagaatatgcctatgtaactgtttgcaaccagtgtggcagagagtctaagcttttgtcaaaattttatgagctggagttaaatatccaaggccacaaacagttaacagattgtatctcggaatttttgaaggaagaaaaattagaaggagacaatcgctatttttgcgagaactgtcaaagcaaacagaatgcaacaagaaagattcgacttcttagccttccttgcactctgaacttgcagctaatgcgttttgtctttgacaggcaaactggacataagaaaaagctgaatacctacattggcttctcagaaattttggatatggagccttatgtggaacataaaggtgggtcctacgtgtatgaactcagcgcagtcctcatacacagaggagtgagtgcttattctggccactacatcgcccacgtgaaagatccacagtctggtgaatggtataagtttaatgatgaagacatagaaaagatggaggggaagaaattacaactagggattgaggaagatctagcagaaccttctaagtctcagacacgtaaacccaagtgtggcaaaggaactcattgctctcgaaatgcatatatgttggtttatagactgcaaactcaagaaaagcccaacactactgttcaagttccagcctttcttcaagagctggtagatcgggataattccaaatttgaggagtggtgtattgaaatggctgagatgcgtaagcaaagtgtggataaaggaaaagcaaaacacgaagaggttaaggagctgtaccaaaggttacctgctggagctggtctgtaagatattctgggacagcactgttgccattaagtgccttgtttttttatgttcacaaatgtatatgaagaaactttctcaaacttactctttctaataacccactaaagccagcttaaacactctaaaagtactttgtaaaccaacaataacttgatgtgtagcattccatattatttcattacgttgtactcctaaaaatgggaagctgttaataaattataacatttaggtcagcactctgcatccatgagtattgtagatatttatattttgtgagatattaacttgtttaagaaaaatccgattggattactatggaaaaagcaacttgcctgttctgtttctttgcatactttgtgacctaacagttttaacagacattctattatatgaatacagtttttttgatactattagattaacttgaagtttaataccaaatattatgctaagagtagaaaagctttctgctgacccctgatttcttagaaatatcccacataatccagcttatcccttttctgtatatgtttattcaggtttacctgatgtctcaaaatgaaaccaaattaagcctttttaaaggctgatgtgccatttgtattaagttatctttgtcattttaaagacatgaattccccaagcctaattcctacttaaggaagagagacaatttagtccttactttagaaaataaatacttaagcataa

SEQ ID NO: 197448 - DNA, 549 bp, Homo sapiens
  Payload ID: 18943
  Gene Name: ubiquitin specific peptidase 48
  ENST ID: ENST00000526044
  CDS Start-End: 144-549
aagaatgtccagattatattaaataccatagaggttttatatccaccagcatccttttcaaggataactgaacagaaccttctaagtctcagacacgtaaacccaagtgtggcaaaggaactcattgctctcgaaatgcatatatgttggtttatagactgcaaactcaagaaaagcccaacactactgttcaagttccagcctttcttcaagagctggtagatcgggataattccaaatttgaggagtggtgtattgaaatggctgagatgcgtaagcaaagtgtggataaaggaaaagcaaaacacgaagaggttaaggagctgtaccaaaggttacctgctggagctgagccctatgagtttgtctctctggaatggctgcaaaagtggttggatgaatcaacacctaccaaacctattgataatcacgcttgcctgtgttcccatgacaagcttcacccggataaaatatcaattatgaagaggatatctgaatatgcagctgacattttctatagtagatatggaggaggtccaagactaactg

SEQ ID NO: 197449 - DNA, 3228 bp, Homo sapiens
  Payload ID: 18943
  Gene Name: ubiquitin specific peptidase 48
  Uniprot ID: Q86UV5
  ENST ID: ENST00000529637
  CDS Start-End: 35-3178
gtctggctcgggaggcgttcctggggccaaggccatggccccgcggctgcagctggagaaggcggcctggcgctgggcggagacggtgcggcccgaggaggtgtcgcaggagcacatcgagaccgcttaccgcatctggctggagccctgcattcgcggcgtgtgcagacgaaactgcaaaggaaatccgaattgcttggttggtattggtgagcatatttggttaggagaaatagatgaaaatagttttcataacatcgatgatcccaactgtgagaggagaaaaaagaactcatttgtgggcctgactaaccttggagccacttgttatgtcaacacatttcttcaagtgtggtttctcaacttggagcttcggcaggcactctacttatgtccaagcacttgtagtgactacatgctgggagacggcatccaagaagaaaaagattatgagcctcaaacaatttgtgagcatctccagtacttgtttgccttgttgcaaaacagtaataggcgatacattgatccatcaggatttgttaaagccttgggcctggacactggacaacagcaggatgctcaagaattttcaaagctctttatgtctctattggaagatactttgtctaaacaaaagaatccagatgtgcgcaatattgttcaacagcagttctgtggagaatatgcctatgtaactgtttgcaaccagtgtggcagagagtctaagcttttgtcaaaattttatgagctggagttaaatatccaaggccacaaacagttaacagattgtatctcggaatttttgaaggaagaaaaattagaaggagacaatcgctatttttgcgagaactgtcaaagcaaacagaatgcaacaagaaagattcgacttcttagccttccttgcactctgaacttgcagctaatgcgttttgtctttgacaggcaaactggacataagaaaaagctgaatacctacattggcttctcagaaattttggatatggagccttatgtggaacataaaggtgggtcctacgtgtatgaactcagcgcagtcctcatacacagaggagtgagtgcttattctggccactacatcgcccacgtgaaagatccacagtctggtgaatggtataagtttaatgatgaagacatagaaaagatggaggggaagaaattacaactagggattgaggaagatctagaaccttctaagtctcagacacgtaaacccaagtgtggcaaaggaactcattgctctcgaaatgcatatatgttggtttatagactgcaaactcaagaaaagcccaacactactgttcaagttccagcctttcttcaagagctggtagatcgggataattccaaatttgaggagtggtgtattgaaatggctgagatgcgtaagcaaagtgtggataaaggaaaagcaaaacacgaagaggttaaggagctgtaccaaaggttacctgctggagctgagccctatgagtttgtctctctggaatggctgcaaaagtggttggatgaatcaacacctaccaaacctattgataatcacgcttgcctgtgttcccatgacaagcttcacccggataaaatatcaattatgaagaggatatctgaatatgcagctgacattttctatagtagatatggaggaggtccaagactaactgtgaaagccctgtgtaaggaatgtgtagtagaacgttgtcgcatattgcgtctgaagaaccaactaaatgaagattataaaactgttaataatctgctgaaagcagcagtaaagggcagcgatggattttgggtggggaagtcctccttgcggagttggcgccagctagctcttgaacagctggatgagcaagatggtgatgcagaacaaagcaacggaaagatgaacggtagcaccttaaataaagatgaatcaaaggaagaaagaaaagaagaggaggaattaaattttaatgaagatattctgtgtccacatgctgttttttttttttccaaatatatttttttaaactcaggtgagttatgcatatctgaaaatgaaagaaggcttgtttctaaagaggcttggagcaaactgcagcagtactttccaaaggctcctgagtttccaagttacaaagagtgctgttcacagtgcaagattttagaaagagaaggggaagaaaatgaagccttacataagatgattgcaaacgagcaaaagacttctctcccaaatttgttccaggataaaaacagaccgtgtctcagtaactggccagaggatacggatgtcctctacatcgtgtctcagttctttgtagaagagtggcggaaatttgttagaaagcctacaagatgcagccctgtgtcatcagttgggaacagtgctcttttgtgtccccacgggggcctcatgtttacatttgcttccatgaccaaagaagattctaaacttatagctctcatatggcccagtgagtggcaaatgatacaaaagctctttgttgtggatcatgtaattaaaatcacgagaattgaagtgggagatgtaaacccttcagaaacacagtatatttctgagcccaaactctgtccagaatgcagagaaggcttattgtgtcagcagcagagggacctgcgtgaatacactcaagccaccatctatgtccataaagttgtggataataaaaaggtgatgaaggattcggctccggaactgaatgtgagtagttctgaaacagaggaggacaaggaagaagctaaaccagatggagaaaaagatccagattttaatcaaagcaatggtggaacaaagcggcaaaagatatcccatcaaaattatatagcctatcaaaagcaagttattcgccgaagtatgcgacatagaaaagttcgtggtgagaaagcacttctcgtttctgctaatcagacgttaaaagaattgaaaattcagatcatgcatgcattttcagttgctccttttgaccagaatttgtcaattgatggaaagattttaagtgatgactgtgccaccctaggcacccttggcgtcattcctgaatctgtcattttattgaaggctgatgaaccaattgcagattatgctgcaatggatgatgtcatgcaagtttgtatgccagaagaagggtttaaaggtactggtcttcttggacattaatctttgaatacttgctgactgctaagaaatgaccagaggggaagaggagt

SEQ ID NO: 197450 - DNA, 554 bp, Homo sapiens
  Payload ID: 18943
  Gene Name: ubiquitin specific peptidase 48
  ENST ID: ENST00000527823
  CDS Start-End: 411-554
attccgctgggggatccggaaggaatggaagtcatggtctctggctttggagcttaaagtctagtatgagaagtgaaataagttagggagtttctataaagcaaacgaataagtccaagctctgggcgtctgtctcacaaggagggtaaatctgactttaacaacgaaactgcaaaggaaatccgaattgcttggttggtattggtgagcatatttggttaggagaaatagatgaaaatagttttcataacatcgatgatcccaactgtgagaggagaaaaaagaactcatttgtgggcctgactaaccttggagccacttgttatgtcaacacatttcttcaagtgtggtttctcaacttggagcttcggcaggcactctacttatgtccaagcacttgtagtgactacatgctgggagacggcatccaagaagaaaaagattatgagcctcaaacaatttgtgagcatctccagtacttgtttgccttgttgcaaaacagtaataggcgatacattgatccatcaggatttgttaaagccttgggcctggac

SEQ ID NO: 197451 - DNA, 566 bp, Homo sapiens
  Payload ID: 18943
  Gene Name: ubiquitin specific peptidase 48
  ENST ID: ENST00000534705
  CDS Start-End: 127-566
agattatattaaataccatagaggttttatatccaccagcatccttttcaaggataactgaacaggtcttgttttatagtaggcatttttaacaattctattttcttctgtactactatttccattatgtttaccctacagaattttattctaatggaatatacagaaccttctaagtctcagacacgtaaacccaagtgtggcaaaggaactcattgctctcgaaatgcatatatgttggtttatagactgcaaactcaagaaaagcccaacactactgttcaagttccagcctttcttcaagagctggtagatcgggataattccaaatttgaggagtggtgtattgaaatggctgagatgcgtaagcaaagtgtggataaaggaaaagcaaaacacgaagaggttaaggagctgtaccaaaggttacctgctggagctgagccctatgagtttgtctctctggaatggctgcaaaagtggttggatgaatcaacacctaccaaacctattgataatcacgcttgcctgtgttcccatgacaagcttcacccggataaaatatc

SEQ ID NO: 197452 - DNA, 680 bp, Homo sapiens
  Payload ID: 18943
  Gene Name: ubiquitin specific peptidase 48
  ENST ID: ENST00000532737
  CDS Start-End: 565-680
atgcgctcagcgcggcggggagtccacctttaacgtccgcgggcgcggggtgtgtcgggtgtcgacggcggcgctttgcggccggtcgtgcgggtcgggcgcgggcgggcgcggcggcagtggcgcgcacaggtgattgactggccagctgcctgaaggagcgccaggtcctccttgctggcaggtggcgaagcccattggggcggcggtgcagaccgcggcggcggctgcggcggtctggctcgggaggtgtcgcaggagcacatcgagaccgcttaccgcatctggctggagccctgcattcgcggcgtgtgcagacgaaactgcaaaggaaatccgaattgcttggttggtattggtgagcatatttggttaggagaaatagatgaaaatagttttcataacatcgatgatcccaactgtgagaggagaaaaaagaactcatttgtgggcctgactaaccttggagccacttgttatgtcaacacatttcttcaagtgtggtttctcaacttggagcttcggcaggcactctacttatgtccaagcacttgtagtgactacatgctgggagacggcatccaagaagaaaaagattatgagcctcaaacaatttgtgagcatctccagtacttgtttgccttgttgcaaaacagtaataggcgatacattgatccatc

SEQ ID NO: 197453 - DNA, 3177 bp, Homo sapiens
  Payload ID: 18944
  Gene Name: ubiquitin specific peptidase 49
  Uniprot ID: Q70CQ1
  ENST ID: ENST00000373006
  CDS Start-End: 223-2145
cgcgccctggtgacagctcgcgcgtgctgatgatggcgattctttggatgggaagagaccttgaaaggacctctagtttatcctgcaactccagtcaatatcccacttaaatcattccaggtaatagagaagaggaaacctaaccaatgactgtggaataatatggaagaagatggaaaaaacttgtttaatgggttgagaaagtggcgacttctataagacatggatagatgcaaacatgtagggcggttacggctcgcccaggaccactccatcctgaaccctcagaagtggtgctgcttagagtgtgccaccaccgagtccgtgtgggcctgcctcaagtgctcccacgtggcctgcggccgctatattgaggaccacgccctgaaacactttgaggagacgggacacccgctagccatggaagtccgggatctctacgtgttctgttacctgtgcaaggactacgtgctcaatgataacccagagggggacctgaagctgctaagaagctccctcctggcggtccggggccagaaacaggacacgccggtgagacgtgggcggacgctgcggtccatggcttcgggtgaggacgtggtcctgccgcagcgcgctcctcagggacagccgcagatgctcacggctctgtggtaccggcgtcagcgcctgctggccaggacgctgcggctgtggttcgagaagagctcccggggccaggcgaagctggagcagcggcggcaggaggaggccctggagcgcaagaaggaggaggcgcggaggcggcggcgcgaggtgaaacggcggctgctggaggagctggccagcacccctccgcgcaagagtgcacggctgctcctgcacacgccccgcgacgcgggcccggctgcctcgcgccccgccgccctccctacctcacgcagagtgcccgccgccacactcaagctgcgtcgccagccggccatggccccaggcgtcacgggcctgcgcaacctgggcaacacctgctacatgaactccatcctccaggtgctcagccacctccagaagttccgagaatgtttcctcaaccttgacccttccaaaacggaacatctgtttcccaaagccaccaacgggaagactcagctttctggcaagccaaccaacagctcggccacggagctgtccttgagaaatgacagggccgaggcatgcgagcgggagggcttctgctggaacggcagggcctccattagtcggagtctggagctcatccagaacaaggagccgagttcaaagcacatttccctctgccgtgaactgcacaccctcttccgagtcatgtggtccgggaagtgggccctagtgtcgcccttcgccatgctccactcagtgtggagcctgatccctgccttccgcggctacgaccaacaggacgcgcaggaatttctctgcgagctgctgcacaaggtgcagcaggaactcgagtctgagggcaccacacgccggatcctcatccccttctcccagaggaagctcaccaaacaggtcttaaaggtggtgaataccatatttcatgggcagctgctcagtcaggtcacatgtatatcatgcaattacaaatccaataccattgagcccttttgggacctatccctggaattccctgaacgctatcactgcatagaaaaggggtttgtccctttgaatcaaacagagtgcttgctcactgagatgctggccaaattcacagagacagaggccctggaagggagaatctacgcttgtgaccagtgtaacagcaaacgacgaaaatccaatcccaaaccccttgttctgagtgaagctagaaagcagttaatgatctacagactacctcaggttctccggctgcaccttaaaagattcaggtggtctggccgtaatcatcgagagaagattggggtccatgtcgtctttgaccaggtattaaccatggaaccttactgctgcagggacatgctctcctctcttgacaaagagacctttgcctatgatctctccgcagtggtcatgcatcacgggaaagggtttggctcaggacactacacagcctattgctacaacacagagggaggtgcgtgcgctttactctgtggggtgggggacacggaaaggggttgatttgtccacattttattgttttccttttatttccatcccatggattacctagagggaaattacatacatcaaaaatccagtggaaagaattgtgaaaattgggttgggcgccgtggctcacacctgtaatcctagcgctttgggaggccgcggtgggtggatcacctgaggtcaggagttcgagaccagcctggccaacatggttaaaccccgtctctactaaaatagtacaaaaattagccgggcgtggtggtgggcactggtaatcccaggtactcaagaggctgaggcaggagaatcgcttgaacctgggaggcagaggttgcagtgagccaagattatgccactgcacttcagcctgggtgacagagcaagactcttatctcaaaaaaaataaaaagaattatgaaagttggattcaaattttgggtatattactaagtaacaacatatggttgttctaagaattaaaaggaactgacatgtaaaagtgcttagaacaggacctaggccctgtgcaatggctcacacctgtaattccaacactttgggaggcagaggcgggaggattgcttgaggccgagggttcaagactagcctgggcaacatagcgagactgcatctctacaaaaaatttaaaaattatccaggtgtaatggtgtgcacctgtgatcctagctacttgggaggctgaggtgggagaattgctcaagcccaggagtttgaagttgcaatgagctatgatttcaccactgcattctagcctgggcaacagagtgagatcctgactcaaataaataaataagaagagcagttgcctaccacatagtacttattcagtcagtgttagaggatattgtagtattatcaaaagtattggttattgataatattactgttttgtggtaatgctacttctgcacaccccagtttccttcttggttatgcagaaacagtagaacctgtgtaacctcaaggagatattgtatgaatctcactagccgcagcttataataaagccgagaacattta

SEQ ID NO: 197454 - DNA, 8804 bp, Homo sapiens
  Payload ID: 18944
  Gene Name: ubiquitin specific peptidase 49
  Uniprot ID: Q70CQ1
  ENST ID: ENST00000373009
  CDS Start-End: 103-2169
gtaatagagaagaggaaacctaaccaatgactgtggaataatatggaagaagatggaaaaaacttgtttaatgggttgagaaagtggcgacttctataagacatggatagatgcaaacatgtagggcggttacggctcgcccaggaccactccatcctgaaccctcagaagtggtgctgcttagagtgtgccaccaccgagtccgtgtgggcctgcctcaagtgctcccacgtggcctgcggccgctatattgaggaccacgccctgaaacactttgaggagacgggacacccgctagccatggaagtccgggatctctacgtgttctgttacctgtgcaaggactacgtgctcaatgataacccagagggggacctgaagctgctaagaagctccctcctggcggtccggggccagaaacaggacacgccggtgagacgtgggcggacgctgcggtccatggcttcgggtgaggacgtggtcctgccgcagcgcgctcctcagggacagccgcagatgctcacggctctgtggtaccggcgtcagcgcctgctggccaggacgctgcggctgtggttcgagaagagctcccggggccaggcgaagctggagcagcggcggcaggaggaggccctggagcgcaagaaggaggaggcgcggaggcggcggcgcgaggtgaaacggcggctgctggaggagctggccagcacccctccgcgcaagagtgcacggctgctcctgcacacgccccgcgacgcgggcccggctgcctcgcgccccgccgccctccctacctcacgcagagtgcccgccgccacactcaagctgcgtcgccagccggccatggccccaggcgtcacgggcctgcgcaacctgggcaacacctgctacatgaactccatcctccaggtgctcagccacctccagaagttccgagaatgtttcctcaaccttgacccttccaaaacggaacatctgtttcccaaagccaccaacgggaagactcagctttctggcaagccaaccaacagctcggccacggagctgtccttgagaaatgacagggccgaggcatgcgagcgggagggcttctgctggaacggcagggcctccattagtcggagtctggagctcatccagaacaaggagccgagttcaaagcacatttccctctgccgtgaactgcacaccctcttccgagtcatgtggtccgggaagtgggccctagtgtcgcccttcgccatgctccactcagtgtggagcctgatccctgccttccgcggctacgaccaacaggacgcgcaggaatttctctgcgagctgctgcacaaggtgcagcaggaactcgagtctgagggcaccacacgccggatcctcatccccttctcccagaggaagctcaccaaacaggtcttaaaggtggtgaataccatatttcatgggcagctgctcagtcaggtcacatgtatatcatgcaattacaaatccaataccattgagcccttttgggacctatccctggaattccctgaacgctatcactgcatagaaaaggggtttgtccctttgaatcaaacagagtgcttgctcactgagatgctggccaaattcacagagacagaggccctggaagggagaatctacgcttgtgaccagtgtaacagcaaacgacgaaaatccaatcccaaaccccttgttctgagtgaagctagaaagcagttaatgatctacagactacctcaggttctccggctgcaccttaaaagattcaggtggtctggccgtaatcatcgagagaagattggggtccatgtcgtctttgaccaggtattaaccatggaaccttactgctgcagggacatgctctcctctcttgacaaagagacctttgcctatgatctctccgcagtggtcatgcatcacgggaaagggtttggctcaggacactacacagcctattgctacaacacagagggaggtttttgggtccactgcaatgactcaaagctgaatgtatgcagtgtcgaggaagtgtgcaaaacccaggcctacatccttttttacactcaaagaacagtgcagggcaatgcaagaatctcagaaacccatctccaagctcaggtgcagtccagcaacaatgatgaaggcagaccacagacattttcctgaatgggaggcatgtatcaaagactggcttttgtgtattggtgtccatacatctttcctcttataggaaataaggctactgcaggaacagattactaggtttgccttgctgggtctagagtagaaggtgccaggtgattcgtgtcctgtcgtaaattttatagtctctttcttttgaatgagtttgggagttccctcctttcctaaaaacaaaagaagtaacttctatgaagatcctttcatcagttgcttctgaatatagagggatctgggtggaggaaagcggggcgggggggtaaatcaatcatatccacacaggagagcagccatgttttctctccatgatgtgattcccctgctaatcaggacctccttgcagcaccagaagaaccctccggatgtgagcagtcctggacagagcacgtgaggaggggccctgggctagcagtttgctggatgggattggctccaagatgggagatgaagtctaaagggtttattcccacaaaggaagtaaccttcaagggtttaaaacaaacttccttttttggggatagcagctgaagagtggagtgagatgcatggaacaaatttccccatgcaaagtgggatggttttcatatgtcataccctccctacttgctgctgtcatataatcattccatacttctgagactggcatgaataccccttcattctaaagaaggggcaggtcatataaagaagcaatagactagcacatgttccatgctgagccaaaggacactcctggctatctcagttctgtagcagatccctggttcaggtctagggcaagcacatggtttggtttaaattgattcttaggttttctcagaactcaattgagggtgggcagagatagctgatgctccagggcttattgaaggcctgtcacccgttctcacttcagtgcggcatgcagcttcttagcctgcagcttctttcttgctcctggagagctagaacattcatgttcacagggtttgggagcttttggttctctagggtatgttaactgcttaggagtccacctcgtacatatctgaagagttgattaccaatggccttgacctgtttcctcccaaatctgataatccctactgttgctttaccccccatactcagtccatcagagaaaaaaacaagagtgccccgtcctttcccccagtgctagtaaaatacatcttcctttttaaattgggtcagtttctaaacagaatgaaattgcccagataaaaacccttgtccccatcaggcaccacttcattcttagttcttcacttagatttgctggtgaaagtgaatgcaaaccctaacttttgttgctgtggtcactgcagtgagcctcactcaacctgtcactatgaatgctcatcttttgactgagtatatcatattaatgtttgaattcaggtagaagtacagttgtcacttgaagggagtagatgtggaagggcgttcggggaggagtgggaagtggggaaagccaggctaaagaatgagggttatagctttagcaatgttgatgagccacatttcccacacagatctgtagcatttgctgttgacctcttttgagatgaactctcccataggccctgccaggcagcactgagacatggaggaaattcagacaaaaaatggctcaccctgatagggaaggagtgactatattttaaattaaacttgctttttccaacactgtgaggtttctgtaatatttagcttttatttggaagcgatagcgtatggcattttttatgctgtttggtttatattgtctactgcaggcttctttgtataagctttgcctgggctcaccctctcctggacactgttttaaagtgtcaccgctgtccatgctgccagaggctctgatgtgaagctgtactctcaagatccacgtttttaagtcggcatgattagtaatgactttttgtggcaatagaaaagcccattaactcaaaaaaaccaaggagagtaaaaaggaaaggaaactatgaatcgtgcctcatctttcattgaatcctatatttattattctagaaaaaaagaacttacaagatagagaagaactaatagagcatctactttacccctcaggctgtccagtggggataattattaataaacatttaatggaaaattcaaagatcttccaatttaatttttaaaaatagttttataccaaatattataaggatttattaagcagattaaggactttgtgaaataagtgcttaacttagctgagcacgcatatatcaaagtaataaaagaaactaacatcagagtctccactgagctacacatttgtgaaaggtgcccactgcagttacagacacctcaggtacccagaggcggcagcactggacacttaggacgttagtatttaaggagatttttattaaagaagagttccctgctgcataagccaatggctattgtgagggaaatgtccctttgcctttaatttatttacgtactgggtatagatgaatgtctcagttgcatctgaaattgaatcattctaaagagaagaaaataagaaccaggtaaaaactgactagatgctgccaaatcaaacccaaggtctcctaaccgaaccttaatgggcctgcttctctcccagggcaagtagttaagagtctcattccaggaaccctttgtagttagttggctggcatgtttacttgctgctgtagccagccaagatgagtgcacctaggccctcaaaaaggatttttttttacctcaatctagcctgaccctcatatctgtggttgcctctgagacgaacatccatgctagtataaaaatagttaggaatgcccttggcagaactgaagctcttattaaatggtggacagagctcttgccagctttgatccagcccctcagtctcggagttatggggcagggttggggggcagtgctacactgtaaagaatttccaggctgggcgcggtggctcatgcctgtaatcccagcactttgggaggccgaggagggcggatcacaaggtcaagagattgagatcatcctggccaacatggtgaaactccgtctctactaaaaatacaaaaattagctgggcatggtggcacgtgcctgtagtcccagctacttgggaggctgaggcaggagaatcgctggaacccaggaggcagaaggggcagtgagccgagatcgtgccactgcactccagcctggcgacagagcgagactctgtcttaaaaaaaaaacaaaaacaaaaacaaaaaaaaaaaaagaatttccagatgtctcttaaaatgtcatgaataaaattggaaactgtagaagtgttaatgtgtcctatggactcaatagcagagtttatttttgtttttaatggcaaggcttctagagtcaatgattgtatgagtttgctactctggctgtgcttacagcttcatccaagtacaagggaagaaccaatgaggtggattggctgacagtggggcatgccccagcataagccctagagaggtcgacagtagtgcagaatgaaaacttggtcggggatggcgggtggtgggtgggaggagggtgggctggccgggagggagaaatggagtttgttctacttactgataaagctttgtgaactaattttatacaattcataaaatttggtgccttgtactcaattacggtttgcatggaattgaaaagattaagggaaaggatttcttcttgtcatttcaagtggcaaatgggtctgtgtagtgtttaaaggacatctggtatcacagacttttaaaaagcatttcatgtctcttgtgtgtgaatgcaaattattcttaccagcaagttctgaaattatgttacaatgtccaaattctttgtatttgtgactgttcatcaaatggctgcttttcaaggcagactgtgtactccattgtttttcacttcccttgtcatgttccatacattgacttgggcctttttaaatcaggctggggggctaccccttcttaaatgaatactatatccctatctgaggttacctcttgtgagtggaagggttgctttcccaggtggttgggagagcacaaatgttgagaaaaggccttttagtctttatcaaaacaatgactaatgctgggcaacatatagcagaagtcaaacaaaaatgattcctcctgaaatggtaccttcattggttctgatgttcttttgcaaaaaatgtccggaagcagtatagaaaaccccctgtatgtgaaccttagattgtaaggcaagccagtgcactgtgtaatatgcaaagggagtggtgcaaaagagaaggcacccgtcccagctctccatgccctttccctggcaggcgctgactgagatggcgctgagtgaatgtggaaggtgctaagacccagtctcttcactgcagggctgtttacagccagtttcttttactctgaccttaaggtttccactgagctcatgaaacttcaacatatggtgtttaaaagtttcccactcaaatgcacacttgaaaattgggtccctcagcctcattactgaactaaataagtgaagaagttgtatctttggggtaaaactttccagggccacttaattttttaaccagttaagtacgcatcttcctggtggttcagactttttaagtcagtgctaaagctgaaaagcgccttctaaatatgactgtgagtttagtttgtatcttacatttagtaactgttctgttgggccaggactatgactttaattactatgtacttattcatcccacactctgcactaaatacaccatagctactatagcattgtggcaggcactcatttttgtggactcattccatacttctgctggcatatttcgtttaaaatctagctaaagattttcatagtactgtgttaactagccagggctgaaaagtgtgacaggatatcaaattgactttccttggggaaaatgttgctttggcaatagtgaagtccaactccttcatttacagaattagtgattactcatcaatttttgaaagttgtagattaagtagttttatttactaaattcttaaccactttgaagatttaagccagttgaaatgaaacattggctggatgcagttggctagcacctgtaatcccaacactttgggaggccaaggtgggaggattgcttgaggccaggagctcaagaccagcctgggaaacatagatttgaaatcttttcaaaaatgtataaaaatttaataaataaataaatgaatccttactcaaccataattatggctttaaaacccaaccaacagtaaacacttacttgaagccaaaacagtaaattttgaatgaaatttgaattatgcttttggaagctgccatgtcttaattcttgctggattttgattttcaattttggaagtttttatcaaaactgtccagtcatgagtatatcaggtagcagcctttaaggatctaagtttcattcctataaagaacaggaggtgctggtatttcttgtcttagcaagtgatctgatgcaggtctaaatgggggttagcatctatactatggcttaaaagtttcctccttggtcaccatttgggaggtgatggcttcaaagctaagctttgctctcatgtgacccttctttatcttaatacccaataagatataaacctctcagagtcaacccagtgtagactcaaagggtcttagcttcatctatcagataagatctatctgatttatacaaagaatggtgctgtttttatatacatactaaaaaaatctaattctcaaacaattttcttaatatttatgccagcaaggtcaggaaagactattttgtcctgtttaactttagtagtgaacaaactgctagagacatctgtcatccttaacaggccactgtggtccttatatactgaccctcctttccaattaacgtcctttaatcccatactagttccataagagacttggcacataaaagcagtattttttttaatgcctagtaaactggccagaaaaaaatattgccatggtggacctgtttctatccacctctttctatggctatataagtctatacatgccagttccgtacatactccatttccaaagagcccccaaaccctggacagtagcactaccatgaattttagggtcacaaaacatttccttctgaaggaagcagctgcctcagcagtgtcactttagtgaccactgcccaggcttacttcactttgcctccccctacacatcactgccctctttctgccaccaaacctcactattccagcaatgatgcctccctggtgtctggaaaacccatctggtgcactaaaatgctatgcaacaccaaatggcttcttcccctaatattgctcaacaatgtaaattcttcaagaataaacttcatgctaggttaacatcaatgtatggttacagcttccttttttttttttcccttttaaaatgaagcaaaccacctccattaaaatccatgttttggggcttgtttttgtctctcaagtgtgaaatataaatcatgtttttatgatttttgtaaatctttttacaccttgtttttgtaagcaaaagtttcttattaaaagaataaaatg

SEQ ID NO: 197455 - DNA, 2446 bp, Homo sapiens
  Payload ID: 18944
  Gene Name: ubiquitin specific peptidase 49
  ENST ID: ENST00000373010
  CDS Start-End: 496-2253
agtgcttcttttgctgggcaaattgtgtgaaagatgggagggcagcactgttgctattatggatattaacttatcaggacaataaggtcaaagtccctgttagagctaattagattctccttgacaaaaattggaggtagcaacaaagaaaatcaatgctgtgaagtagattagaaaacaggctcggagaagttaaggaaggtcttgtaataaatggacaccatgatgttgactggtctctgttactccacatcatgtgctcttcttgcatgagccagacagcccctgagagttcagcatgtttcagtaacaggatcttgacagccagccattctgcagcaaaccacctactccaaggggactggacatgagtgatgggagcccatattatgggtaatagagaagaggaaacctaaccaatgactgtggaataatatggaagaagatggaaaaaacttgtttaatgggttgagaaagtggcgacttctataagacatggatagatgcaaacatgtagggcggttacggctcgcccaggaccactccatcctgaaccctcagaagtggtgctgcttagagtgtgccaccaccgagtccgtgtgggcctgcctcaagtgctcccacgtggcctgcggccgctatattgaggaccacgccctgaaacactttgaggagacgggacacccgctagccatggaagtccgggatctctacgtgttctgttacctgtgcaaggactacgtgctcaatgataacccagagggggacctgaagctgctaagaagctccctcctggcggtccggggccagaaacaggacacgccggtgagacgtgggcggacgctgcggtccatggcttcgggtgaggacgtggtcctgccgcagcgcgctcctcagggacagccgcagatgctcacggctctgtggtaccggcgtcagcgcctgctggccaggacgctgcggctgtggttcgagaagagctcccggggccaggcgaagctggagcagcggcggcaggaggaggccctggagcgcaagaaggaggaggcgcggaggcggcggcgcgaggtgaaacggcggctgctggaggagctggccagcacccctccgcgcaagagtgcacggctgctcctgcacacgccccgcgacgcgggcccggctgcctcgcgccccgccgccctccctacctcacgcagagtgcccgccgccacactcaagctgcgtcgccagccggccatggccccaggcgtcacgggcctgcgcaacctgggcaacacctgctacatgaactccatcctccaggtgctcagccacctccagaagttccgagaatgtttcctcaaccttgacccttccaaaacggaacatctgtttcccaaagccaccaacgggaagactcagctttctggcaagccaaccaacagctcggccacggagctgtccttgagaaatgacagggccgaggcatgcgagcgggagggcttctgctggaacggcagggcctccattagtcggagtctggagctcatccagaacaaggagccgagttcaaagcacatttccctctgccgtgaactgcacaccctcttccgagtcatgtggtccgggaagtgggccctagtgtcgcccttcgccatgctccactcagtgtggagcctgatccctgccttccgcggctacgaccaacaggacgcgcaggaatttctctgcgagctgctgcacaaggtgcagcaggaactcgagtctgagggcaccacacgccggatcctcatccccttctcccagaggaagctcaccaaacaggtcttaaaggtggtgaataccatatttcatgggcagctgctcagtcaggtcacatgtatatcatgcaattacaaatccaataccattgagcccttttgggacctatccctggaattccctgaacgctatcactgcatagaaaaggggtttgtccctttgaatcaaacagagtgcttgctcactgagatgctggccaaattcacagagacagaggccctggaagggagaatctacgcttgtgaccagtgtaacagcaaacgacgaaaatccaatcccaaaccccttgttctgagtgaagctagaaagcagttaatgatctacagactacctcaggttctccggctgcaccttaaaagattcaggtggtctggccgtaatcatcgagagaagattggggtccatgtcgtctttgaccaggtttttgggtccactgcaatgactcaaagctgaatgtatgcagtgtcgaggaagtgtgcaaaacccaggcctacatccttttttacactcaaagaacagtgcagggcaatgcaagaatctcagaaacccatctccaagctcaggtgcagtccagcaacaatgatgaaggcagaccacagacattttcctgaatgggaggcatgtatcaaagactggcttttgtgta

SEQ ID NO: 197456 - DNA, 9034 bp, Homo sapiens
  Payload ID: 18944
  Gene Name: ubiquitin specific peptidase 49
  Uniprot ID: Q70CQ1
  ENST ID: ENST00000394253
  CDS Start-End: 331-2397
gggccccagaatttaaaggatgagatggggagtaagggaagagagggggctaagagaagctgggggagtcctgatggatgtagaactggggtagactgcaggggggtgggaatcgaatgtgcgtgttatggggagttgctccagaaggtctgcaagggtcagggcagaaatgctgtagtgaaagatcaagtgtaagagagcctttggtgcagaagacgaggaaccatggtaatagagaagaggaaacctaaccaatgactgtggaataatatggaagaagatggaaaaaacttgtttaatgggttgagaaagtggcgacttctataagacatggatagatgcaaacatgtagggcggttacggctcgcccaggaccactccatcctgaaccctcagaagtggtgctgcttagagtgtgccaccaccgagtccgtgtgggcctgcctcaagtgctcccacgtggcctgcggccgctatattgaggaccacgccctgaaacactttgaggagacgggacacccgctagccatggaagtccgggatctctacgtgttctgttacctgtgcaaggactacgtgctcaatgataacccagagggggacctgaagctgctaagaagctccctcctggcggtccggggccagaaacaggacacgccggtgagacgtgggcggacgctgcggtccatggcttcgggtgaggacgtggtcctgccgcagcgcgctcctcagggacagccgcagatgctcacggctctgtggtaccggcgtcagcgcctgctggccaggacgctgcggctgtggttcgagaagagctcccggggccaggcgaagctggagcagcggcggcaggaggaggccctggagcgcaagaaggaggaggcgcggaggcggcggcgcgaggtgaaacggcggctgctggaggagctggccagcacccctccgcgcaagagtgcacggctgctcctgcacacgccccgcgacgcgggcccggctgcctcgcgccccgccgccctccctacctcacgcagagtgcccgccgccacactcaagctgcgtcgccagccggccatggccccaggcgtcacgggcctgcgcaacctgggcaacacctgctacatgaactccatcctccaggtgctcagccacctccagaagttccgagaatgtttcctcaaccttgacccttccaaaacggaacatctgtttcccaaagccaccaacgggaagactcagctttctggcaagccaaccaacagctcggccacggagctgtccttgagaaatgacagggccgaggcatgcgagcgggagggcttctgctggaacggcagggcctccattagtcggagtctggagctcatccagaacaaggagccgagttcaaagcacatttccctctgccgtgaactgcacaccctcttccgagtcatgtggtccgggaagtgggccctagtgtcgcccttcgccatgctccactcagtgtggagcctgatccctgccttccgcggctacgaccaacaggacgcgcaggaatttctctgcgagctgctgcacaaggtgcagcaggaactcgagtctgagggcaccacacgccggatcctcatccccttctcccagaggaagctcaccaaacaggtcttaaaggtggtgaataccatatttcatgggcagctgctcagtcaggtcacatgtatatcatgcaattacaaatccaataccattgagcccttttgggacctatccctggaattccctgaacgctatcactgcatagaaaaggggtttgtccctttgaatcaaacagagtgcttgctcactgagatgctggccaaattcacagagacagaggccctggaagggagaatctacgcttgtgaccagtgtaacagcaaacgacgaaaatccaatcccaaaccccttgttctgagtgaagctagaaagcagttaatgatctacagactacctcaggttctccggctgcaccttaaaagattcaggtggtctggccgtaatcatcgagagaagattggggtccatgtcgtctttgaccaggtattaaccatggaaccttactgctgcagggacatgctctcctctcttgacaaagagacctttgcctatgatctctccgcagtggtcatgcatcacgggaaagggtttggctcaggacactacacagcctattgctacaacacagagggaggtttttgggtccactgcaatgactcaaagctgaatgtatgcagtgtcgaggaagtgtgcaaaacccaggcctacatccttttttacactcaaagaacagtgcagggcaatgcaagaatctcagaaacccatctccaagctcaggtgcagtccagcaacaatgatgaaggcagaccacagacattttcctgaatgggaggcatgtatcaaagactggcttttgtgtattggtgtccatacatctttcctcttataggaaataaggctactgcaggaacagattactaggtttgccttgctgggtctagagtagaaggtgccaggtgattcgtgtcctgtcgtaaattttatagtctctttcttttgaatgagtttgggagttccctcctttcctaaaaacaaaagaagtaacttctatgaagatcctttcatcagttgcttctgaatatagagggatctgggtggaggaaagcggggcgggggggtaaatcaatcatatccacacaggagagcagccatgttttctctccatgatgtgattcccctgctaatcaggacctccttgcagcaccagaagaaccctccggatgtgagcagtcctggacagagcacgtgaggaggggccctgggctagcagtttgctggatgggattggctccaagatgggagatgaagtctaaagggtttattcccacaaaggaagtaaccttcaagggtttaaaacaaacttccttttttggggatagcagctgaagagtggagtgagatgcatggaacaaatttccccatgcaaagtgggatggttttcatatgtcataccctccctacttgctgctgtcatataatcattccatacttctgagactggcatgaataccccttcattctaaagaaggggcaggtcatataaagaagcaatagactagcacatgttccatgctgagccaaaggacactcctggctatctcagttctgtagcagatccctggttcaggtctagggcaagcacatggtttggtttaaattgattcttaggttttctcagaactcaattgagggtgggcagagatagctgatgctccagggcttattgaaggcctgtcacccgttctcacttcagtgcggcatgcagcttcttagcctgcagcttctttcttgctcctggagagctagaacattcatgttcacagggtttgggagcttttggttctctagggtatgttaactgcttaggagtccacctcgtacatatctgaagagttgattaccaatggccttgacctgtttcctcccaaatctgataatccctactgttgctttaccccccatactcagtccatcagagaaaaaaacaagagtgccccgtcctttcccccagtgctagtaaaatacatcttcctttttaaattgggtcagtttctaaacagaatgaaattgcccagataaaaacccttgtccccatcaggcaccacttcattcttagttcttcacttagatttgctggtgaaagtgaatgcaaaccctaacttttgttgctgtggtcactgcagtgagcctcactcaacctgtcactatgaatgctcatcttttgactgagtatatcatattaatgtttgaattcaggtagaagtacagttgtcacttgaagggagtagatgtggaagggcgttcggggaggagtgggaagtggggaaagccaggctaaagaatgagggttatagctttagcaatgttgatgagccacatttcccacacagatctgtagcatttgctgttgacctcttttgagatgaactctcccataggccctgccaggcagcactgagacatggaggaaattcagacaaaaaatggctcaccctgatagggaaggagtgactatattttaaattaaacttgctttttccaacactgtgaggtttctgtaatatttagcttttatttggaagcgatagcgtatggcattttttatgctgtttggtttatattgtctactgcaggcttctttgtataagctttgcctgggctcaccctctcctggacactgttttaaagtgtcaccgctgtccatgctgccagaggctctgatgtgaagctgtactctcaagatccacgtttttaagtcggcatgattagtaatgactttttgtggcaatagaaaagcccattaactcaaaaaaaccaaggagagtaaaaaggaaaggaaactatgaatcgtgcctcatctttcattgaatcctatatttattattctagaaaaaaagaacttacaagatagagaagaactaatagagcatctactttacccctcaggctgtccagtggggataattattaataaacatttaatggaaaattcaaagatcttccaatttaatttttaaaaatagttttataccaaatattataaggatttattaagcagattaaggactttgtgaaataagtgcttaacttagctgagcacgcatatatcaaagtaataaaagaaactaacatcagagtctccactgagctacacatttgtgaaaggtgcccactgcagttacagacacctcaggtacccagaggcggcagcactggacacttaggacgttagtatttaaggagatttttattaaagaagagttccctgctgcataagccaatggctattgtgagggaaatgtccctttgcctttaatttatttacgtactgggtatagatgaatgtctcagttgcatctgaaattgaatcattctaaagagaagaaaataagaaccaggtaaaaactgactagatgctgccaaatcaaacccaaggtctcctaaccgaaccttaatgggcctgcttctctcccagggcaagtagttaagagtctcattccaggaaccctttgtagttagttggctggcatgtttacttgctgctgtagccagccaagatgagtgcacctaggccctcaaaaaggatttttttttacctcaatctagcctgaccctcatatctgtggttgcctctgagacgaacatccatgctagtataaaaatagttaggaatgcccttggcagaactgaagctcttattaaatggtggacagagctcttgccagctttgatccagcccctcagtctcggagttatggggcagggttggggggcagtgctacactgtaaagaatttccaggctgggcgcggtggctcatgcctgtaatcccagcactttgggaggccgaggagggcggatcacaaggtcaagagattgagatcatcctggccaacatggtgaaactccgtctctactaaaaatacaaaaattagctgggcatggtggcacgtgcctgtagtcccagctacttgggaggctgaggcaggagaatcgctggaacccaggaggcagaaggggcagtgagccgagatcgtgccactgcactccagcctggcgacagagcgagactctgtcttaaaaaaaaaacaaaaacaaaaacaaaaaaaaaaaaagaatttccagatgtctcttaaaatgtcatgaataaaattggaaactgtagaagtgttaatgtgtcctatggactcaatagcagagtttatttttgtttttaatggcaaggcttctagagtcaatgattgtatgagtttgctactctggctgtgcttacagcttcatccaagtacaagggaagaaccaatgaggtggattggctgacagtggggcatgccccagcataagccctagagaggtcgacagtagtgcagaatgaaaacttggtcggggatggcgggtggtgggtgggaggagggtgggctggccgggagggagaaatggagtttgttctacttactgataaagctttgtgaactaattttatacaattcataaaatttggtgccttgtactcaattacggtttgcatggaattgaaaagattaagggaaaggatttcttcttgtcatttcaagtggcaaatgggtctgtgtagtgtttaaaggacatctggtatcacagacttttaaaaagcatttcatgtctcttgtgtgtgaatgcaaattattcttaccagcaagttctgaaattatgttacaatgtccaaattctttgtatttgtgactgttcatcaaatggctgcttttcaaggcagactgtgtactccattgtttttcacttcccttgtcatgttccatacattgacttgggcctttttaaatcaggctggggggctaccccttcttaaatgaatactatatccctatctgaggttacctcttgtgagtggaagggttgctttcccaggtggttgggagagcacaaatgttgagaaaaggccttttagtctttatcaaaacaatgactaatgctgggcaacatatagcagaagtcaaacaaaaatgattcctcctgaaatggtaccttcattggttctgatgttcttttgcaaaaaatgtccggaagcagtatagaaaaccccctgtatgtgaaccttagattgtaaggcaagccagtgcactgtgtaatatgcaaagggagtggtgcaaaagagaaggcacccgtcccagctctccatgccctttccctggcaggcgctgactgagatggcgctgagtgaatgtggaaggtgctaagacccagtctcttcactgcagggctgtttacagccagtttcttttactctgaccttaaggtttccactgagctcatgaaacttcaacatatggtgtttaaaagtttcccactcaaatgcacacttgaaaattgggtccctcagcctcattactgaactaaataagtgaagaagttgtatctttggggtaaaactttccagggccacttaattttttaaccagttaagtacgcatcttcctggtggttcagactttttaagtcagtgctaaagctgaaaagcgccttctaaatatgactgtgagtttagtttgtatcttacatttagtaactgttctgttgggccaggactatgactttaattactatgtacttattcatcccacactctgcactaaatacaccatagctactatagcattgtggcaggcactcatttttgtggactcattccatacttctgctggcatatttcgtttaaaatctagctaaagattttcatagtactgtgttaactagccagggctgaaaagtgtgacaggatatcaaattgactttccttggggaaaatgttgctttggcaatagtgaagtccaactccttcatttacagaattagtgattactcatcaatttttgaaagttgtagattaagtagttttatttactaaattcttaaccactttgaagatttaagccagttgaaatgaaacattggctggatgcagttggctagcacctgtaatcccaacactttgggaggccaaggtgggaggattgcttgaggccaggagctcaagaccagcctgggaaacatagatttgaaatcttttcaaaaatgtataaaaatttaataaataaataaatgaatccttactcaaccataattatggctttaaaacccaaccaacagtaaacacttacttgaagccaaaacagtaaattttgaatgaaatttgaattatgcttttggaagctgccatgtcttaattcttgctggattttgattttcaattttggaagtttttatcaaaactgtccagtcatgagtatatcaggtagcagcctttaaggatctaagtttcattcctataaagaacaggaggtgctggtatttcttgtcttagcaagtgatctgatgcaggtctaaatgggggttagcatctatactatggcttaaaagtttcctccttggtcaccatttgggaggtgatggcttcaaagctaagctttgctctcatgtgacccttctttatcttaatacccaataagatataaacctctcagagtcaacccagtgtagactcaaagggtcttagcttcatctatcagataagatctatctgatttatacaaagaatggtgctgtttttatatacatactaaaaaaatctaattctcaaacaattttcttaatatttatgccagcaaggtcaggaaagactattttgtcctgtttaactttagtagtgaacaaactgctagagacatctgtcatccttaacaggccactgtggtccttatatactgaccctcctttccaattaacgtcctttaatcccatactagttccataagagacttggcacataaaagcagtattttttttaatgcctagtaaactggccagaaaaaaatattgccatggtggacctgtttctatccacctctttctatggctatataagtctatacatgccagttccgtacatactccatttccaaagagcccccaaaccctggacagtagcactaccatgaattttagggtcacaaaacatttccttctgaaggaagcagctgcctcagcagtgtcactttagtgaccactgcccaggcttacttcactttgcctccccctacacatcactgccctctttctgccaccaaacctcactattccagcaatgatgcctccctggtgtctggaaaacccatctggtgcactaaaatgctatgcaacaccaaatggcttcttcccctaatattgctcaacaatgtaaattcttcaagaataaacttcatgctaggttaacatcaatgtatggttacagcttccttttttttttttcccttttaaaatgaagcaaaccacctccattaaaatccatgttttggggcttgtttttgtctctcaagtgtgaaatataaatcatgtttttatgatttttgtaaatctttttacaccttgtttttgtaagcaaaagtttcttattaaaagaataaaatgac

SEQ ID NO: 197457 - DNA, 480 bp, Homo sapiens
  Payload ID: 18944
  Gene Name: ubiquitin specific peptidase 49
  ENST ID: ENST00000448078
  CDS Start-End: 1-157
ggaactcgagtctgagggcaccacacgccggatcctcatccccttctcccagaggaagctcaccaaacaggtcttaaaggtggtgaataccatatttcatgggcagctgctcagtcaggcaaacgacgaaaatccaatcccaaaccccttgttctgagtgaagctagaaagcagttaatgatctacagactacctcaggttctccggctgcaccttaaaagattcaggtggtctggccgtaatcatcgagagaagattggggtccatgtcgtctttgaccaggtattaaccatggaaccttactgctgcagggacatgctctcctctcttgacaaagagacctttgcctatgatctctccgcagtggtcatgcatcacgggaaagggtttggctcaggacactacacagcctattgctacaacacagagggaggtttttgggtccactgcaatgactcaaagctgaatgtatgcagtgtc

SEQ ID NO: 197458 - DNA, 752 bp, Homo sapiens
  Payload ID: 18944
  Gene Name: ubiquitin specific peptidase 49
  ENST ID: ENST00000423567
  CDS Start-End: 708-752
attctgtaaagtgagggagggcaaatgagacctggactggaaccaggtggagtcaggaataagagtgtggtggaagggcgaaaggaaacagataagagatgggtgtctgtaggacgattctgggaccagaagagctgaaaggagactagagttagggtgtaagaagtgatggccatctgggacaaggataactgggtaattacgttaattgaagaggttcagcaagatccaaggtgaaaacagtgaggtaaagagacagggctaaaagcaaatggtgagaggagcaggaagagatgggccccagaatttaaaggatgagatggggagtaagggaagagagggggctaagagaagctgggggagtcctgatggatgtagaactggggtagactgcaggggggtgggaatcgaatgtgcgtgttatggggagttgctccagaaggtctgcaagggtcagggcagaaatgctgtagtgaaagatcaagtgtaagagagcctttggtgcagaagacgaggaaccatgattctttggatgggaagagaccttgaaaggacctctagtttatcctgcaactccagtcaatatcccacttaaatcattccaggtaatagagaagaggaaacctaaccaatgactgtggaataatatggaagaagatggaaaaaacttgtttaatgggttgagaaagtggcgacttctataagacatggatagatgcaaacatgtagggcggttacggctcgcccaggac

SEQ ID NO: 197459 - DNA, 3181 bp, Homo sapiens
  Payload ID: 18945
  Gene Name: ubiquitin specific peptidase 5 (isopeptidase T)
  Uniprot ID: P45974
  ENST ID: ENST00000229268
  CDS Start-End: 53-2629
gggactgggaacggtgggagccgccgtgtgtggagaagctgctgccggtgtcatggcggagctgagtgaggaggcgctgctgtcagtattaccgacgatccgggtccctaaggctggagaccgggtccacaaagacgagtgcgccttctccttcgacacgccggagtctgaggggggcctctacatctgtatgaacacgtttctgggctttgggaaacagtatgtggagagacatttcaataagaccggccagcgagtctacttgcacctccggcggacccggcgcccgaaagaggaggaccctgctacaggcactggagacccaccccggaagaagcccacgcggctggctattggtgttgaaggcggatttgaccttagcgaggagaagtttgaattagacgaggatgtgaagattgtcattttgccagattacctggagattgcccgggatggactggggggactgcctgacattgtcagagatcgggtgaccagtgcagtggaggccctactgtcggccgactcagcctcccgcaagcaggaggtgcaggcatgggatggggaagtacggcaggtgtctaagcatgccttcagcctcaagcagttggacaaccctgctcgaatccctccctgtggctggaagtgctccaagtgtgacatgagagagaacctgtggctcaacctgactgatggctccatcctctgtgggcgacgctacttcgatggcagtgggggcaacaaccacgctgtggagcactaccgagagacaggctacccgttagctgtcaagctgggcaccatcacccctgatggagctgacgtgtactcatatgatgaggatgacatggtcctggaccccagcctggctgagcacctgtcccacttcggcatcgacatgctgaagatgcagaagacagacaagacgatgactgagttggagatagacatgaaccagcggattggtgaatgggagctgatccaggagtcaggtgtgccactcaagcccctgtttgggcctggctacacaggcatccggaacctgggtaacagctgctacctcaactctgtggtccaggtgctcttcagcatccctgacttccagaggaagtatgtggataagctggagaagatcttccagaatgccccgacggaccctacccaggatttcagcacccaggtggccaagctgggccatggccttctctccggggagtattccaagccagtaccggagtcgggcgatggggagcgggtgccagaacagaaggaagttcaagatggcattgcccctcggatgttcaaggccctcatcggcaagggccaccctgaattctccaccaaccggcagcaggatgcccaggagttcttccttcaccttatcaacatggtggagaggaattgccggagctctgaaaatcctaatgaagtgttccgcttcttggtggaggaaaagatcaagtgcctggccacagagaaggtgaagtacacccagcgagttgactacatcatgcagctgcctgtgcccatggatgcagcccttaacaaagaggagcttctggagtacgaggagaagaagcggcaagccgaagaggagaagatggcactgccagaactggttcgggcccaggtgcccttcagctcttgcctggaggcctacggggcccctgagcaggtcgatgacttctggagcacggccctgcaggccaagtcagtagctgtcaagaccacacgatttgcctcattccctgactacctggtcatccagatcaagaagttcaccttcggcttagactgggtgcccaagaaactggatgtgtccatcgagatgccagaggagctcgacatctcccagttgaggggcacagggctgcagcccggagaggaggagctgccagacattgccccacccctggtcactccggatgagcccaaaggtagccttggtttctatggcaacgaagacgaagactccttctgctcccctcacttctcctctccgacatcgcccatgctggatgaatcagtcatcatccagctggtggagatgggattccctatggacgcctgccgcaaagctgtctactacacgggcaacagcggggctgaggccgccatgaactgggtcatgtcacacatggatgatccagattttgcaaaccccctcatcctgcctggctctagtgggccgggctccacaagcgcagcagccgacccccctcctgaggactgtgtgaccaccattgtctccatgggcttctcccgggaccaggccttgaaagcgctgcgggccacgaacaatagtttagaacgggctgtggactggatcttcagtcacattgacgacctggatgctgaagctgccatggacatctcagagggccgctcagctgccgactccatctctgagtctgtgccagtgggacctaaagtccgggatggtcctggaaagtatcagctctttgccttcattagtcacatgggcacctctaccatgtgtggtcactacgtctgccacatcaagaaagaaggcagatgggtgatctacaatgaccagaaagtgtgtgcctccgagaagccgcccaaggacctgggctacatctacttctaccagagagtggccagctaagagcctgcctcaccccttaccaatgagggcaggggaagaccacctggcatgagggagaggggctgagggatggacttcagcccctctgctctgtaccctttttccttttgtccccggcagcagggaagaagctggaggccgtgggagaatggctgggcagagcagaggggcagcgatagactctggggatggagcaggacggggacgggaggggccggccacctgtctgtaaggagactttgttgcttcccctgcccccggaatccacagtgctctgcttctctgtgtcgccccgcccagccccctggtgtggagggaggggtctcgtttgtgcgcgtgggtgtagctttgtgcatcctctcccagtggagcgatcacctgtgcctcccctccccctttgtttgcccctgtgtggttggtcaaggagggatgtgagggaaatagggaccccccgacttgccctcctgcctcagtctttcccccaccctgtctcttccttgtccttctctggaaaatgccaaaatacacgatgtgaataaaagtacaacggct

SEQ ID NO: 197460 - DNA, 3083 bp, Homo sapiens
  Payload ID: 18945
  Gene Name: ubiquitin specific peptidase 5 (isopeptidase T)
  Uniprot ID: P45974
  ENST ID: ENST00000389231
  CDS Start-End: 33-2540
ccgccgtgtgtggagaagctgctgccggtgtcatggcggagctgagtgaggaggcgctgctgtcagtattaccgacgatccgggtccctaaggctggagaccgggtccacaaagacgagtgcgccttctccttcgacacgccggagtctgaggggggcctctacatctgtatgaacacgtttctgggctttgggaaacagtatgtggagagacatttcaataagaccggccagcgagtctacttgcacctccggcggacccggcgcccgaaagaggaggaccctgctacaggcactggagacccaccccggaagaagcccacgcggctggctattggtgttgaaggcggatttgaccttagcgaggagaagtttgaattagacgaggatgtgaagattgtcattttgccagattacctggagattgcccgggatggactggggggactgcctgacattgtcagagatcgggtgaccagtgcagtggaggccctactgtcggccgactcagcctcccgcaagcaggaggtgcaggcatgggatggggaagtacggcaggtgtctaagcatgccttcagcctcaagcagttggacaaccctgctcgaatccctccctgtggctggaagtgctccaagtgtgacatgagagagaacctgtggctcaacctgactgatggctccatcctctgtgggcgacgctacttcgatggcagtgggggcaacaaccacgctgtggagcactaccgagagacaggctacccgttagctgtcaagctgggcaccatcacccctgatggagctgacgtgtactcatatgatgaggatgacatggtcctggaccccagcctggctgagcacctgtcccacttcggcatcgacatgctgaagatgcagaagacagacaagacgatgactgagttggagatagacatgaaccagcggattggtgaatgggagctgatccaggagtcaggtgtgccactcaagcccctgtttgggcctggctacacaggcatccggaacctgggtaacagctgctacctcaactctgtggtccaggtgctcttcagcatccctgacttccagaggaagtatgtggataagctggagaagatcttccagaatgccccgacggaccctacccaggatttcagcacccaggtggccaagctgggccatggccttctctccggggagtattccaagccagtaccggagtcgggcgatggggagcgggtgccagaacagaaggaagttcaagatggcattgcccctcggatgttcaaggccctcatcggcaagggccaccctgaattctccaccaaccggcagcaggatgcccaggagttcttccttcaccttatcaacatggtggagaggaattgccggagctctgaaaatcctaatgaagtgttccgcttcttggtggaggaaaagatcaagtgcctggccacagagaaggtgaagtacacccagcgagttgactacatcatgcagctgcctgtgcccatggatgcagcccttaacaaagaggagcttctggagtacgaggagaagaagcggcaagccgaagaggagaagatggcactgccagaactggttcgggcccaggtgcccttcagctcttgcctggaggcctacggggcccctgagcaggtcgatgacttctggagcacggccctgcaggccaagtcagtagctgtcaagaccacacgatttgcctcattccctgactacctggtcatccagatcaagaagttcaccttcggcttagactgggtgcccaagaaactggatgtgtccatcgagatgccagaggagctcgacatctcccagttgaggggcacagggctgcagcccggagaggaggagctgccagacattgccccacccctggtcactccggatgagcccaaagcgcccatgctggatgaatcagtcatcatccagctggtggagatgggattccctatggacgcctgccgcaaagctgtctactacacgggcaacagcggggctgaggccgccatgaactgggtcatgtcacacatggatgatccagattttgcaaaccccctcatcctgcctggctctagtgggccgggctccacaagcgcagcagccgacccccctcctgaggactgtgtgaccaccattgtctccatgggcttctcccgggaccaggccttgaaagcgctgcgggccacgaacaatagtttagaacgggctgtggactggatcttcagtcacattgacgacctggatgctgaagctgccatggacatctcagagggccgctcagctgccgactccatctctgagtctgtgccagtgggacctaaagtccgggatggtcctggaaagtatcagctctttgccttcattagtcacatgggcacctctaccatgtgtggtcactacgtctgccacatcaagaaagaaggcagatgggtgatctacaatgaccagaaagtgtgtgcctccgagaagccgcccaaggacctgggctacatctacttctaccagagagtggccagctaagagcctgcctcaccccttaccaatgagggcaggggaagaccacctggcatgagggagaggggctgagggatggacttcagcccctctgctctgtaccctttttccttttgtccccggcagcagggaagaagctggaggccgtgggagaatggctgggcagagcagaggggcagcgatagactctggggatggagcaggacggggacgggaggggccggccacctgtctgtaaggagactttgttgcttcccctgcccccggaatccacagtgctctgcttctctgtgtcgccccgcccagccccctggtgtggagggaggggtctcgtttgtgcgcgtgggtgtagctttgtgcatcctctcccagtggagcgatcacctgtgcctcccctccccctttgtttgcccctgtgtggttggtcaaggagggatgtgagggaaatagggaccccccgacttgccctcctgcctcagtctttcccccaccctgtctcttccttgtccttctctggaaaatgccaaaatacacgatgtgaataaaagt

SEQ ID NO: 197461 - DNA, 438 bp, Homo sapiens
  Payload ID: 18945
  Gene Name: ubiquitin specific peptidase 5 (isopeptidase T)
  ENST ID: ENST00000542087
  CDS Start-End: 28-438
gtgtgtggagaagctgctgccggtgtcatggcggagctgagtgaggaggcgctgctgtcagtattaccgacgatccgggtccctaaggctggagaccgggtccacaaagacgagtgcgccttctccttcgacacgccggagtctgaggggggcctctacatctgtatgaacacgtttctgggctttgggaaacagtatgtggagagacatttcaataagaccggccagcgagtctacttgcacctccggcggacccggcgcccgaaagaggaggaccctgctacaggcactggagacccaccccggaagaagcccacgcggctggctattggtgttgaaggcggatttgaccttagcgaggagaagtttgaattagacgaggatgtgaagtacacccagcgagttgactacatcatgcagctgcctgtgcccatggat

SEQ ID NO: 197462 - DNA, 580 bp, Homo sapiens
  Payload ID: 18946
  Gene Name: ubiquitin specific peptidase 50
  ENST ID: ENST00000529349
  CDS Start-End: 1-258
ttttttcaacaagacgcactgacctggaacaacgaaattcactgctccttttgtgaaaccaagcaagaaactgctgtgagggccagtatttccaaagcaccaaaaataattattttccacctaaaaagaagcatgaggagatttgtctctaatatttaccgtgcgagtgtggttgggctcctggaaggaaaattcacaaagtgtggtccccctgtgactggattctttggagtttttaactctcagactctgcactgagcctctagcaattcatcaattacagttcaggttttcctacgcagacctgttccctcagaggtttctgctcggcagttttggctctggtttgacattcagggtacaacaaaaaggaagctgagaacggatattcattacccactcactaacttggacctcactccttatatttgctcaattttccggaaatatcctaaatacaacctctgtgcagtggtgtttcgctcttgtctcgaactcatgacctcaggtgatccacctccctcatcctcccaaagtgctgggattacaggtgtgagctaccgcgccaagcatacttttt

SEQ ID NO: 197463 - DNA, 1386 bp, Homo sapiens
  Payload ID: 18946
  Gene Name: ubiquitin specific peptidase 50
  Uniprot ID: Q70EL3
  ENST ID: ENST00000532404
  CDS Start-End: 175-1179
aagttggagtggtgcctgatacaggtgaaaatcagttcgcagctactggaagagagaggagcatatcaattgtttaaaacaaaaagccagcgttaacaggctcagagaaatgaagttgaaaggaatagatgtagctcctgaatagaagcaaaagtccaacgtggttccattaaaatgacttctcagccgtctctccctgcagatgacttcgatatctaccacgtccttgcagagtgcacagattactatgatacccttccagttaaggaggctgatgggaaccagccccattttcagggtgtcactggcttgtggaacttgggcaacacatgctgcgtgaatgccatctcacagtgtctctgcagcatcttgccgctggtggaatactttctcaccgggaagtatatcaccgctctgcaaaacgattgcagtgaagttgccactgcttttgcctatctgatgacagacatgtggctgggagactcagactgtgtctcaccagaaatattctggtcagctcttggcaacctctacccagcatttacgaaaaagatgcaacaagatgctcaggaattcttgatttgtgtcctaaatgaacttcatgaagctctaaaaaagtaccactactcccggagaagatcatatgagaaaggatctactcagagatgctgcaggaagtggattaccactgagacatccatcatcacccagctgtttgaagagcagctcaattatagcatcgtatgtttaaagtgtgagaaatgcacctacaagaacgaagtcttcactgtcttctcactccccattccatccaaatatgaatgctcccttcgggactgtctccaatgtttttttcaacaagacgcactgacctggaacaacgaaattcactgctccttttgtgaaaccaagcaagaaactgctgtgagggccagtatttccaaagcaccaaaaataattattttccacctaaaaaggtttgacattcagggtacaacaaaaaggaagctgagaacggatattcattacccactcactaacttggacctcactccttatatttgctcaattttccggaaatatcctaaatacaacctctgtgcagtggtgaaccattttggtgatttggatggtggccactacactgctttctgcaagaattcagtcacccaggcctgatatagctttgataacacacgagtcagtgagattccagatacttctgttcaaaatgctatggatctcctgttctatagctgccagcccttttccataccaatacaaaagcgttaagagccaggaaaatggtgtttcctgaacactgcaaaacaagcagtcagcatctggtggtagagttttgcttggtcattaaactcttagaactta

SEQ ID NO: 197464 - DNA, 725 bp, Homo sapiens
  Payload ID: 18946
  Gene Name: ubiquitin specific peptidase 50
  ENST ID: ENST00000559105
  CDS Start-End: 142-327
agttcgcagctactggaagagagaggagcatatcaattgtttaaaacaaaaagccagcgttaacaggctcagagaaatgaagttgaaaggaatagatgtagctcctgaatagaagcaaaagtccaacgtggttccattaaaatgacttctcagccgtctctccctgcagatgacttcgatatctaccacgtccttaccactactcccggagaagatcatatgagaaaggatctactcagagatgctgcaggaagtggattaccactgagacatccatcatcacccagctgtttgaagagcagctcaattatagcatcgtatgtttaaagtgtgagaaatgcacctacaagaacgaagtcttcactgtcttctcactccccattccatccaaatatgaatgctcccttcgggactgtctccaatgtttttttcaacaagacgcactgacctggaacaacgaaattcactgctccttttgtgaaaccaagcaagaaactgctgtgagggccagtatttccaaagcaccaaaaataattattttccacctaaaaaggtttgacattcagggtacaacaaaaaggaagctgagaacggatattcattacccactcactaacttggacctcactccttatatttgctcaattttccggaaatatcctaaatacaacctctgtgcagtggtgaaccattttggtgatttggatggtggccactacactgct

SEQ ID NO: 197465 - DNA, 1419 bp, Homo sapiens
  Payload ID: 18946
  Gene Name: ubiquitin specific peptidase 50
  ENST ID: ENST00000616326
  CDS Start-End: 181-1212
aaatccaagttggagtggtgcctgatacaggtgaaaatcagttcgcagctactggaagagagaggagcatatcaattgtttaaaacaaaaagccagcgttaacaggctcagagaaatgaagttgaaaggaatagatgtagctcctgaatagaagcaaaagtccaacgtggttccattaaaatgacttctcagccgtctctccctgcagatgacttcgatatctaccacgtccttgcagagtgcacagattactatgatacccttccagttaaggaggctgatgggaaccagccccattttcagggtgtcactggcttgtggaacttgggcaacacatgctgcgtgaatgccatctcacagtgtctctgcagcatcttgccgctggtggaatactttctcaccgggaagtatatcaccgctctgcaaaataaaacatatccctttcttcttccaagcgattgcagtgaagttgccactgcttttgcctatctgatgacagacatgtggctgggagactcagactgtgtctcaccagaaatattctggtcagctcttggcaacctctacccagcatttacgaaaaagatgcaacaagatgctcaggaattcttgatttgtgtcctaaatgaacttcatgaagctctaaaaaagtaccactactcccggagaagatcatatgagaaaggatctactcagagatgctgcaggaagtggattaccactgagacatccatcatcacccagctgtttgaagagcagctcaattatagcatcgtatgtttaaagtgtgagaaatgcacctacaagaacgaagtcttcactgtcttctcactccccattccatccaaatatgaatgctcccttcgggactgtctccaatgtttttttcaacaagacgcactgacctggaacaacgaaattcactgctccttttgtgaaaccaagcaagaaactgctgtgagggccagtatttccaaagcaccaaaaataattattttccacctaaaaaggtttgacattcagggtacaacaaaaaggaagctgagaacggatattcattacccactcactaacttggacctcactccttatatttgctcaattttccggaaatatcctaaatacaacctctgtgcagtggtgaaccattttggtgatttggatggtggccactacactgctttctgcaagaattcagtcacccaggcctgatatagctttgataacacacgagtcagtgagattccagatacttctgttcaaaatgctatggatctcctgttctatagctgccagcccttttccataccaatacaaaagcgttaagagccaggaaaatggtgtttcctgaacactgcaaaacaagcagtcagcatctggtggtagagttttgcttggtcattaaactcttagaactta

SEQ ID NO: 197466 - DNA, 4407 bp, Homo sapiens
  Payload ID: 18947
  Gene Name: ubiquitin specific peptidase 51
  Uniprot ID: Q70EK9
  ENST ID: ENST00000500968
  CDS Start-End: 84-2219
gtcccctggcatgatctgatcgcctttgaagcagtcgcagctgttttccagacgccttgctcctcaggtcggggagtgatctgatggcccaggttcgagaaacttctttgccctccggctctggggtccgctggatctccggaggtgggggaggagcctctcctgaggaggcggttgagaaggcggggaaaatggaggaggcggcggcgggggctacgaaggcgtcttcgagacgtgaagccgaggagatgaagctggagccattacaagagcgtgagcccgcgccggaggagaacttgacgtggagcagcagcggcggcgacgagaaggtgctcccttcaatcccccttcgctgtcacagcagctcctcgcccgtttgcccgcgccgcaagccccgccctcggccccagccccgggcccgctcccgcagccagcctgggctctcggccccacccccgcctccagcccggcccccgcccccgccgccacccccgcccccacccgcaccgcggcccagggcctggcgtggatcccggcgcagatcccggcctgggtccaggcctcagacacggagaagctgctctggtgacctagacgggtcgggggatcctggcggcttaggggactggttgctggaggtcgagtttggtcagggtcccacaggctgctctcatgtggagagctttaaagtaggtaagaactggcagaagaacctgaggttgatctaccagcgtttcgtttggagtgggaccccagagactaggaaacgtaaagcaaagtcatgcatctgtcacgtatgtagtacccatatgaacagactccactcttgtctctcctgtgtcttttttggctgcttcactgagaaacatattcacaaacatgcagaaacaaagcagcaccatttagctgtagacctttatcatggggtcatatattgcttcatgtgtaaggattatgtatatgacaaagacatagaacagattgccaaagaaacaaaagaaaaaattttgagattattaacttccacctcaacagatgtttctcatcaacagtttatgacatcagggtttgaagacaagcaatcaacctgtgagacaaaggaacaggagccaaaattggtgaaacccaagaaaaagagaagaaaaaagtcagtctatactgtaggcctgagagggctaatcaatcttgggaacacttgttttatgaattgtattgtccaggcacttacccatattcctctactgaaagatttcttcctctctgacaagcacaaatgtataatgacaagccccagcttgtgtctggtctgtgaaatgtcttcgctttttcatgctatgtactctgggagccgaactcctcacattccctataagttactgcatctgatatggatccatgcagaacatttagcagggtacaggcagcaggatgcccatgagttccttattgcaatattagacgtgctacatagacacagcaaagatgatagtggtgggcaggaggccaataaccccaactgctgtaactgcatcatagaccaaatctttacaggtggcctgcaatcagatgtcacatgtcaagcctgccatagtgtttctaccaccatagacccatgctgggacatcagtttggacttgcctggctcttgtgccacattcgattcccagaacccagagagggctgacagcacagtgagcagggatgaccacataccaggaatcccctcacttacagactgtctacagtggtttacaaggccagagcacctaggaagcagtgccaaaatcaaatgcaatagttgccaaagctaccaggagtctactaaacagctcacaatgaaaaaattacccattgtggcttgttttcatctcaagcggtttgagcatgtaggcaaacagaggcgaaagattaatacctttatctcctttcccttggagctggacatgactccgtttttggcctctactaaagagagcagaatgaaagaaggccagccaccaacagattgtgtgcccaatgagaataagtattccttgtttgcagtgattaatcaccatggaactttggaaagtggccactataccagcttcatccggcaacaaaaggaccagtggttcagctgtgatgatgccatcatcaccaaggctaccattgaggacttactctacagtgaagggtatttactgttctatcacaaacagggtctagagaaagactagtcttaccagaccacttactgaaaaaaaagtaaatgattaggcaaggattttgaagtgacacacagacctacttggaatggacaatgacagtaacacctatgtgacagctagtatcttgatataaagaacctattttagcatggcccatgggtctgtcggaagaaaaaaatgaatactaaccagtgaccattcaaccttaagaaatggggagagggagaagaggttgaaaatggtcacataaagcataatgaaatgaaaagaatgctttaggtggggacaacgggagtagaagtgttctgatgctactctatgtcatttgtttttacagaaatatcttgtgaagtcagggagtattcctttatcagcaaaaacttcacaattggtgttccagctgtggctgaccagctaaatagtttgaaagaaaaataatattttaaaataaagtttaaagagctttaaaagaaaaacatttaaaaaggaaaaaatcatttttaagattttaaaagaaaaaaacttttaaatgttgaaaaaaatttaagttgttatttttaaaagaaatattttaaaagttaaaaataattttttaatttaaagaagtttcagaattttaaaaattaaaagcaaagaaaattaaattcttaaagtttaaaaatgtaaaataaattaaggaacaaggttaaaaatgaaagtttaccaaaaaaaggaagaaaatactgttaaaaattaaagttagaaacaaaggaacatcttaaaagtttcaaatgaaggaaaataatataaatagatatttcaaaattaaagcataaaatatacgtatttaaaaagtgttaacaaaattactactataatgattaagaaataaattttcaaaaatacagaatggaatgcaattcagattttagagaaaagttttaaaagaggcaagtttagaataattcaagacaaaaagacaaaatgtgtttaaagacaaaaattgaaaaaatacaggaagaaaatagagacttgtaaaataaaaagaaccttagataagttcaagagatttaaatgaaaactttaaatatttaaataaagatttaaaaatttaagcttttaaaaagaaaaacagttacataaaaattgaccagtgaaaaaatgtgaaagattcaagtagaaaaaattattaaaattaaaagtttaagaagttctatttttttatttaagcatattaaaatacagacgggtatgaaagaaataaatggaggagacaggaataacgacagcggtgtgtgagtatatatatatatatatatttttttttttgagctttatgttgatatatcaatatacgttggaaaaggaaatagacattttaatcattatcttaccatccaattgtgaaatggctgcaaggcctaaacactaactaacccaccttcccctcttgagattccatgccccatctcatatcctgaaggaagtcaaattacttcctaggcagaatcaattcatctgagaaaaatgaaaacattagggactttcccatttagaactgcattattcatacaaattcttagcttctgaaaaggggctcttgataatttggtggcttagagaagttagatcacagctgtgaagctctggctttggtatttgagccccatggcctgattgaggaagtggcagggacccatatctgaggccttcccaccttcctttttccctcttccccctccaaggagaaacaagacctttaatttccacagtagagcaatgggtttgtgcttgcagtccttctgctcattctttattccctctttatttcctttttttgtcactcatgcctagttccctgaaccccttacttacctggccttacctacatctctgagccccagcctgcagggctccttctttgactattcacctggtggcttttactcctccttcaagacccaactcacagatgacttctctggagtcttccctgaatgctctaggcaggtataaatgagaaaattgttcctctcttcccctctttattcctctcactgtgcctccaaagtactttgtccatacctcggtgatagtacttattctactgtgattttattgtagctttgtgattgtctgcccctctgcactgagcatctaagaacagggggccaagccttattcatttctgtgttaataaatatttgttaaatgtgaa

SEQ ID NO: 197467 - DNA, 5936 bp, Homo sapiens
  Payload ID: 18948
  Gene Name: ubiquitin specific peptidase 53
  Uniprot ID: Q70EK8
  ENST ID: ENST00000274030
  CDS Start-End: 1180-4401
ctgggtattggggcgtatgcgcatgctccgctcacagggtcgggctctgggcggcggagaccagccgcctgtgctccagttcccggtgagcctcggtactgtggcagcagtcagtgtgtctggcgggtgtcggcgtgaagcggggctgggccagcgggaggtagctctgtgggagtggaaggcctgtatttctctacctggaccgcacgctcctcgcgcaaggagggtagagctcaagttccgtgatgatggtctaagcaaagacccttcgtcctgttaaagataaattaaaaaaaaaaaaaaaaaaccaaagggaacaaaacttactctgcaaaagtaatatatgatttacctgctgttgtcataagaattccaaatagacaaactcggtatgcttgggatttgctttacattctaagtggatttggagaagagacaataaagaataagcagtcaattctataatatatttagaaggagaaaagtgccaaggaggaatgaaaaagtagaacaagagacagcatcttgctgccacccaggctggagtgcagtggtgcagtcttagcttactgcagcctcaaacttctgggctcaagtaatcctcccgcctcagcttcctgagtagctgagattacagatttgctttgaggtcacattgatatgaaatatggagtcaccttttataacttcacctgggaaagagagagaaaactttcttgttaaaaaaacataaggaaaacaaacaaccaaaggaatcatgccaaatgccaactctacatctttttgtattattaacatattttatgcatcaagacaaatggcttatgcattaaaggggatgattcgttcatcagtatttttagccattaaaaaaaatcgttttcatattaaccttatacagctcccataaaatttaacacatataaacatctttaacgccttgtttaaaatagctttcttttttagtgcttagaacttcaatgtttatgcaccctattgttacttgtcagagtctttaagagtttataacatcaggaaagatatggacttggaaacttacattattaaaatagactgcagtggatttaattggacaattcaagacatccattttattgtccaaaatattacataaaagtgtacagtttttagcctaaatgcaaacaaagttgcttgaaaatggcatgggtaaaattcttacggaaacctggtggcaatcttggaaaagtttatcagcctggaagtatgctatcactagcccctaccaaaggcttgttaaatgaaccaggacaaaacagctgctttcttaatagcgctgtacaggttttatggcaattggatatattccgacgaagcttgcgggttttgactggacatgtttgtcagggagatgcctgtatattttgtgcattgaagacgatatttgcacagttccaacacagtcgagaaaaagcacttccctcagataacataaggcatgctcttgcagaaagtttcaaagatgagcagcgatttcaacttggccttatggatgatgctgcggagtgctttgaaaatatgttggagaggattcattttcacatagtgccaagcagagatgcagacatgtgtacctctaaatcttgtatcactcaccagaagtttgctatgactctgtatgaacagtgtgtgtgtcgtagctgtggagcatcgtcagatcctctaccttttacagaatttgtgcggtacatttctacaacagccttatgcaatgaggttgaaagaatgttggaaaggcatgaacgctttaaacctgaaatgtttgcagaattgctacaagcagcaaatacaacagatgactataggaaatgtcctagtaactgtggccaaaaaataaaaattcgccgtgttttaatgaattgcccagagattgttacaattggtttagtctgggactccgagcattctgacttgaccgaagctgttgttcggaatctagcaacacatctttatcttcctgggcttttttatagagttactgatgaaaatgccaaaaatagtgaacttaaccttgttggtatgatctgctacaccagccaacattattgtgcctttgcatttcacaccaaaagttccaaatgggtattttttgatgatgcaaatgtgaaagagattggaactagatggaaagatgttgtctccaaatgcattcgatgccactttcagccactacttttgttttatgcaaacccagatggcacagcagtttctactgaggatgcactcaggcaggtcatcagctggtcacattacaaatctgttgcagaaaatatgggatgtgaaaagcctgtaattcataagtcagataatttaaaagaaaatggatttggtgatcaggcaaagcagagagaaaatcagaaatttccaactgataatatttcatcatctaatcggagccacagtcacacaggtgtagggaaaggaccagctaagttaagtcacattgatcaaagggaaaagataaaagacatttccagagaatgtgctctgaaagctattgaacagaaaaacttactttcttcacaaaggaaagatttagagaagggacaaagaaaagatttaggacgacatagagatttggttgatgaagacctttcacatttccaatctggatcacctcctgccccaaatggttttaaacaacatgggaatccacatctatatcatagtcaaggaaaaggatcatataaacatgaccgagttgtacctcagagtcgagcttctgcacaaataataagttcaagtaaatcccagattcttgctccaggagagaaaataactggcaaagttaagagtgacaatggcactggatatgacacagacagcagccaagattctagggatagaggaaacagctgtgatagcagcagtaaaagccggaaccgaggttggaaacctatgagagaaacattaaatgttgatagtatttttagtgaaagtgaaaaaagacagcatagtccaagacataaaccaaatatcagtaataagcctaaatctagcaaggatccgagttttagtaattggccaaaagagaatccaaagcaaaaaggtttaatgaccatatatgaagatgaaatgaagcaggaaataggaagcagaagttcccttgaatctaatggaaaaggagcagagaaaaataaaggccttgtagagggtaaagtgcatggtgataattggcagatgcaaaggactgagtctggatatgaaagcagtgatcacatcagtaatggttctactaatttggactcacctgttatcgatggaaatggtacagtaatggatatcagtggtgttaaagaaacagtatgcttcagtgaccagattacgacaagcaacctaaataaagaacgtggggactgtacctcccttcagagccaacatcacttagaaggctttagaaaagaactcaggaatttggaagcaggctataaatctcatgaattccacccagaatcacatttacaaataaaaaatcatttgataaaaagatcacatgtacatgaagacaatggaaagttatttccttcatccagtctacaaatacccaaggaccataatgcaagagaacatatccaccagtcagatgaacagaaacttgaaaaaccgaatgaatgcaaattttctgagtggcttaatatagaaaattctgagagaacaggtttgccttttcacgttgataactctgcttctgggaagagagtgaacagtaatgaaccatcttcattatggtcttcacacctaagaactgttgggttaaagccagaaactgctcctctcatccagcaacaaaatatcatggatcaatgttactttgagaactctctatccacagaatgtataattcggtcagccagcagatctgatgggtgtcagatgccaaaacttttttgccagaatctaccaccccctttgccaccaaagaaatatgctataaccagtgtgccacagtcagagaaaagcgaatctacacctgatgtcaaacttacagaggtgtttaaagctacctctcatcttccgaagcacagtttaagtacagcttcagaaccaagtttagaagtgagtacacatatgaatgatgaaagacataaagaaacatttcaagtgagagaatgttttggcaacacaccaaactgtccatccagctcctcaactaacgattttcaggcaaactcaggtgccattgatgcattttgccaaccagaactagactctatttctacctgtccaaatgagacagtttcattaactacctatttttcagttgatagctgcatgacggatacatatagattgaaataccatcagaggcccaagctctcttttccagagagcagtggcttttgtaataattcactatcttagagtgaaaaaggactagacctgtgttacataataatcttggttcaagctgcccttctgaacaaagatataaacctagcatacattgtaatagataactggtaaaactgaccaacttttacttctcagaggccatttaaatataataggaacctactgaccaaacctagtgatacataaaattaaagcctgtggcatttttaaagttgttaatcactatacatatgtatgtgtatatgtgtatacacatatataattttatgatcaatatcttagatattttagaaattccctttgaatagtcttggcgtgccgtgaaaaatagaaaatcagggagatataataattcatttgtcatatgctacagttgaataaaaattaaatttgtccccctattttgtggccagtagactgggaagtattaaactaaccagtactcatgtatggagattataaactatgctaattgaaaagtaccaggtgatacatagcctggtacttttttgtcaaagaattgctttatgaagaagcactttctaatgggtaaccagaaaagggcttcacccatttgtttttgacttctatgatagtcactgcatatgatccctttaagtgtctttaaaaaaaatgacttatgaatttgatagcatttggggaaaaaaagccttatatgattaacaatttgtaagttttcaagatcggatggaatttaattttgctcctagaatttttgtcttcagaatatctagttaagataaattaggcctttgactattataggtattcataaatgctactttagccatgtaagttaaaaagttaaaatacttaaactttagtgtatttatttatctcgttactttttttctaattttatatgaaatgtgaaaggtctttattttggtttggtttactttgggctgctaaccaccagtgttaggaattaatgtagggcaccctcttattgggaatgtcactgtaattgcctacattttctttgctgtaatattacctgcttataggttgtcaacccattttatctgaatttgaaaatctatctaggtttccagattaaatttctacctttcatatagagagtttaattttaataaaatgtttaattagagcatccttcccttttattctactttgaacaaatagtaattttaccccaactacttttcatgaagagtgctttgaaaattaaaggaatttttattattatggtaaccttatgagtaaaaataagttactttaattgctttatttcgttagttgtcattttattttgtactatgctggtaaactaattgtggtttagaatagttttatgttcactcctgataactgagaaacagaactaaagttttccttacattgctaaatggataaacctcatattcaataaactagtaaatgtagccacttgactgattgcgtaaatcgtgttaaaacattctaaaatgttgtaactaatttaatgtgaatactgttaaacagaaaataattgcttataaaagtctaacttcacccagtta

SEQ ID NO: 197468 - DNA, 6072 bp, Homo sapiens
  Payload ID: 18948
  Gene Name: ubiquitin specific peptidase 53
  Uniprot ID: Q70EK8
  ENST ID: ENST00000450251
  CDS Start-End: 545-3766
agatttgctttgaggtcacattgatatgaaatatggagtcaccttttataacttcacctgggaaagagagagaaaactttcttgttaaaaaaacataaggaaaacaaacaaccaaaggaatcatgccaaatgccaactctacatctttttgtattattaacatattttatgcatcaagacaaatggcttatgcattaaaggggatgattcgttcatcagtatttttagccattaaaaaaaatcgttttcatattaaccttatacagctcccataaaatttaacacatataaacatctttaacgccttgtttaaaatagctttcttttttagtgcttagaacttcaatgtttatgcaccctattgttacttgtcagagtctttaagagtttataacatcaggaaagatatggacttggaaacttacattattaaaatagactgcagtggatttaattggacaattcaagacatccattttattgtccaaaatattacataaaagtgtacagtttttagcctaaatgcaaacaaagttgcttgaaaatggcatgggtaaaattcttacggaaacctggtggcaatcttggaaaagtttatcagcctggaagtatgctatcactagcccctaccaaaggcttgttaaatgaaccaggacaaaacagctgctttcttaatagcgctgtacaggttttatggcaattggatatattccgacgaagcttgcgggttttgactggacatgtttgtcagggagatgcctgtatattttgtgcattgaagacgatatttgcacagttccaacacagtcgagaaaaagcacttccctcagataacataaggcatgctcttgcagaaagtttcaaagatgagcagcgatttcaacttggccttatggatgatgctgcggagtgctttgaaaatatgttggagaggattcattttcacatagtgccaagcagagatgcagacatgtgtacctctaaatcttgtatcactcaccagaagtttgctatgactctgtatgaacagtgtgtgtgtcgtagctgtggagcatcgtcagatcctctaccttttacagaatttgtgcggtacatttctacaacagccttatgcaatgaggttgaaagaatgttggaaaggcatgaacgctttaaacctgaaatgtttgcagaattgctacaagcagcaaatacaacagatgactataggaaatgtcctagtaactgtggccaaaaaataaaaattcgccgtgttttaatgaattgcccagagattgttacaattggtttagtctgggactccgagcattctgacttgaccgaagctgttgttcggaatctagcaacacatctttatcttcctgggcttttttatagagttactgatgaaaatgccaaaaatagtgaacttaaccttgttggtatgatctgctacaccagccaacattattgtgcctttgcatttcacaccaaaagttccaaatgggtattttttgatgatgcaaatgtgaaagagattggaactagatggaaagatgttgtctccaaatgcattcgatgccactttcagccactacttttgttttatgcaaacccagatggcacagcagtttctactgaggatgcactcaggcaggtcatcagctggtcacattacaaatctgttgcagaaaatatgggatgtgaaaagcctgtaattcataagtcagataatttaaaagaaaatggatttggtgatcaggcaaagcagagagaaaatcagaaatttccaactgataatatttcatcatctaatcggagccacagtcacacaggtgtagggaaaggaccagctaagttaagtcacattgatcaaagggaaaagataaaagacatttccagagaatgtgctctgaaagctattgaacagaaaaacttactttcttcacaaaggaaagatttagagaagggacaaagaaaagatttaggacgacatagagatttggttgatgaagacctttcacatttccaatctggatcacctcctgccccaaatggttttaaacaacatgggaatccacatctatatcatagtcaaggaaaaggatcatataaacatgaccgagttgtacctcagagtcgagcttctgcacaaataataagttcaagtaaatcccagattcttgctccaggagagaaaataactggcaaagttaagagtgacaatggcactggatatgacacagacagcagccaagattctagggatagaggaaacagctgtgatagcagcagtaaaagccggaaccgaggttggaaacctatgagagaaacattaaatgttgatagtatttttagtgaaagtgaaaaaagacagcatagtccaagacataaaccaaatatcagtaataagcctaaatctagcaaggatccgagttttagtaattggccaaaagagaatccaaagcaaaaaggtttaatgaccatatatgaagatgaaatgaagcaggaaataggaagcagaagttcccttgaatctaatggaaaaggagcagagaaaaataaaggccttgtagagggtaaagtgcatggtgataattggcagatgcaaaggactgagtctggatatgaaagcagtgatcacatcagtaatggttctactaatttggactcacctgttatcgatggaaatggtacagtaatggatatcagtggtgttaaagaaacagtatgcttcagtgaccagattacgacaagcaacctaaataaagaacgtggggactgtacctcccttcagagccaacatcacttagaaggctttagaaaagaactcaggaatttggaagcaggctataaatctcatgaattccacccagaatcacatttacaaataaaaaatcatttgataaaaagatcacatgtacatgaagacaatggaaagttatttccttcatccagtctacaaatacccaaggaccataatgcaagagaacatatccaccagtcagatgaacagaaacttgaaaaaccgaatgaatgcaaattttctgagtggcttaatatagaaaattctgagagaacaggtttgccttttcacgttgataactctgcttctgggaagagagtgaacagtaatgaaccatcttcattatggtcttcacacctaagaactgttgggttaaagccagaaactgctcctctcatccagcaacaaaatatcatggatcaatgttactttgagaactctctatccacagaatgtataattcggtcagccagcagatctgatgggtgtcagatgccaaaacttttttgccagaatctaccaccccctttgccaccaaagaaatatgctataaccagtgtgccacagtcagagaaaagcgaatctacacctgatgtcaaacttacagaggtgtttaaagctacctctcatcttccgaagcacagtttaagtacagcttcagaaccaagtttagaagtgagtacacatatgaatgatgaaagacataaagaaacatttcaagtgagagaatgttttggcaacacaccaaactgtccatccagctcctcaactaacgattttcaggcaaactcaggtgccattgatgcattttgccaaccagaactagactctatttctacctgtccaaatgagacagtttcattaactacctatttttcagttgatagctgcatgacggatacatatagattgaaataccatcagaggcccaagctctcttttccagagagcagtggcttttgtaataattcactatcttagagtgaaaaaggactagacctgtgttacataataatcttggttcaagctgcccttctgaacaaagatataaacctagcatacattgtaatagataactggtaaaactgaccaacttttacttctcagaggccatttaaatataataggaacctactgaccaaacctagtgatacataaaattaaagcctgtggcatttttaaagttgttaatcactatacatatgtatgtgtatatgtgtatacacatatataattttatgatcaatatcttagatattttagaaattccctttgaatagtcttggcgtgccgtgaaaaatagaaaatcagggagatataataattcatttgtcatatgctacagttgaataaaaattaaatttgtccccctattttgtggccagtagactgggaagtattaaactaaccagtactcatgtatggagattataaactatgctaattgaaaagtaccaggtgatacatagcctggtacttttttgtcaaagaattgctttatgaagaagcactttctaatgggtaaccagaaaagggcttcacccatttgtttttgacttctatgatagtcactgcatatgatccctttaagtgtctttaaaaaaaatgacttatgaatttgatagcatttggggaaaaaaagccttatatgattaacaatttgtaagttttcaagatcggatggaatttaattttgctcctagaatttttgtcttcagaatatctagttaagataaattaggcctttgactattataggtattcataaatgctactttagccatgtaagttaaaaagttaaaatacttaaactttagtgtatttatttatctcgttactttttttctaattttatatgaaatgtgaaaggtctttattttggtttggtttactttgggctgctaaccaccagtgttaggaattaatgtagggcaccctcttattgggaatgtcactgtaattgcctacattttctttgctgtaatattacctgcttataggttgtcaacccattttatctgaatttgaaaatctatctaggtttccagattaaatttctacctttcatatagagagtttaattttaataaaatgtttaattagagcatccttcccttttattctactttgaacaaatagtaattttaccccaactacttttcatgaagagtgctttgaaaattaaaggaatttttattattatggtaaccttatgagtaaaaataagttactttaattgctttatttcgttagttgtcattttattttgtactatgctggtaaactaattgtggtttagaatagttttatgttcactcctgataactgagaaacagaactaaagttttccttacattgctaaatggataaacctcatattcaataaactagtaaatgtagccacttgactgattgcgtaaatcgtgttaaaacattctaaaatgttgtaactaatttaatgtgaatactgttaaacagaaaataattgcttataaaagtctaacttcacccagttaccaagtcttggccaaattttatcttctgcctatagtttttactagcctttttaaactataatagtgagtgatcattactttatattctcgtaagttagaaatacttgaatgccaaattaattttgttttaagaaagcttatttttaacataattttttagtgtggagggtttgtaaataatgtaaagtttgtaaacctgtatttaaaataccaaagtttttcttcttttataacattgtaagatactagaaaaatgggcttcaagttttttaatagctttcacagtttgtgtagttttttttttctatttggttaagatgtgagttggaaatgtattatttgaaacatttaaactaatttttgtatttaacagcagtctcagacatttgtcttttcaactcagttgagttgtagatatcaaatagaaatgtccagttttgcctcttttaagtactgtccagttgaaacctcctgactcatgtactactacacaaactagaaaatgcccatttatttttgttgattcaacactccagatacagattgatacatatatactaatcattttatttcatgtaaaagttttacatctagggtgcctatttatttttatagatgctttcatccagttataagcttattataactttgtaaatatttcagccaacagttgtaatgtttaaaatacttaccttcagaatgttatattttcatgtgaaatcaatttcttctaattcaaaaaaattttaagataaactgatttttaagttt

SEQ ID NO: 197469 - DNA, 546 bp, Homo sapiens
  Payload ID: 18948
  Gene Name: ubiquitin specific peptidase 53
  ENST ID: ENST00000507906
  CDS Start-End: 1-195
cattattgtgcctttgcatttcacaccaaaagttccaaatgggtattttttgatgatgcaaatgtgaaagagattggaactagatggaaagatgttgtctccaaatgcattcgatgccactttcagccactacttttgttttatgcaaacccagatggcacagcagtttctactgaggatgcactcaggatgtgaaaagcctgtaattcataagtcagataatttaaaagaaaatggatttggtgatcaggcaaagcagagagaaaatcagaaatttccaactgataatatttcatcatctaatcggagccacagtcacacaggtgtagggaaaggaccagctaagttaagtcacattgatcaaagggaaaagataaaagacatttccagagaatgtgctctgaaagctattgaacagaaaaacttactttcttcacaaaggaaagatttagagaagggacaaagaaaagatttaggacgacatagagatttggttgatgaagacctttcacatttccaatctggatcacctcctgccccaaatgg

SEQ ID NO: 197470 - DNA, 4803 bp, Homo sapiens
  Payload ID: 18948
  Gene Name: ubiquitin specific peptidase 53
  ENST ID: ENST00000509769
  CDS Start-End: 121-1104
cattattaaaatagactgcagtggatttaattggacaattcaagacatccattttattgtccaaaatattacataaaagtgtacagtttttagcctaaatgcaaacaaagttgcttgaaaatggcatgggtaaaattcttacggaaacctggtggcaatcttggaaaagtttatcagcctggaagtatgctatcactagcccctaccaaaggcttgttaaatgaaccaggacaaaacagctgctttcttaatagcgctgtacaggttttatggcaattggatatattccgacgaagcttgcgggttttgactggacatgtttgtcagggagatgcctgtatattttgtgcattgaagacgatatttgcacagttccaacacagtcgagaaaaagcacttccctcagataacataaggcatgctcttgcagaaagtttcaaagatgagcagcgatttcaacttggccttatggatgatgctgcggagtgctttgaaaatatgttggagaggattcattttcacatagtgccaagcagagatgcagacatgtgtacctctaaatcttgtatcactcaccagaagtttgctatgactctgtatgaacagtgtgtgtgtcgtagctgtggagcatcgtcagatcctctaccttttacagaatttgtgcggtacatttctacaacagccttatgcaatgaggttgaaagaatgttggaaaggcatgaacgctttaaacctgaaatgtttgcagaattgctacaagcagcaaatacaacagatgactataggaaatgtcctagtaactgtggccaaaaaataaaaattcgccgtgttttaatgaattgcccagagattgttacaattggtttagtctgggactccgagcattctgacttgaccgaagctgttgttcggaatctagcaacacatctttatcttcctgggcttttttatagagttactgatgaaaatgccaaaaatagtgaacttaaccttgttggtatgatctgctacaccagccaacattattgtgcctttgcatttcacaccaaaagttccaaatgggtattttttgatgatgcaaatgtgaaagagataataccttgaagtgggatttctgggttgtgtgattggaactagatggaaagatgttgtctccaaatgcattcgatgccactttcagccactacttttgttttatgcaaacccagatggcacagcagtttctactgaggatgcactcaggcaggtcatcagctggtcacattacaaatctgttgcagaaaatatgggatgtgaaaagcctgtaattcataagtcagataatttaaaagaaaatggatttggtgatcaggcaaagcagagagaaaatcagaaatttccaactgataatatttcatcatctaatcggagccacagtcacacaggtgtagggaaaggaccagctaagttaagtcacattgatcaaagggaaaagataaaagacatttccagagaatgtgctctgaaagctattgaacagaaaaacttactttcttcacaaaggaaagatttagagaagggacaaagaaaagatttaggacgacatagagatttggttgatgaagacctttcacatttccaatctggatcacctcctgccccaaatggttttaaacaacatgggaatccacatctatatcatagtcaaggaaaaggatcatataaacatgaccgagttgtacctcagagtcgagcttctgcacaaataataagttcaagtaaatcccagattcttgctccaggagagaaaataactggcaaagttaagagtgacaatggcactggatatgacacagacagcagccaagattctagggatagaggaaacagctgtgatagcagcagtaaaagccggaaccgaggttggaaacctatgagagaaacattaaatgttgatagtatttttagtgaaagtgaaaaaagacagcatagtccaagacataaaccaaatatcagtaataagcctaaatctagcaaggatccgagttttagtaattggccaaaagagaatccaaagcaaaaaggtttaatgaccatatatgaagatgaaatgaagcaggaaataggaagcagaagttcccttgaatctaatggaaaaggagcagagaaaaataaaggccttgtagagggtaaagtgcatggtgataattggcagatgcaaaggactgagtctggatatgaaagcagtgatcacatcagtaatggttctactaatttggactcacctgttatcgatggaaatggtacagtaatggatatcagtggtgttaaagaaacagtatgcttcagtgaccagattacgacaagcaacctaaataaagaacgtggggactgtacctcccttcagagccaacatcacttagaaggctttagaaaagaactcaggaatttggaagcaggctataaatctcatgaattccacccagaatcacatttacaaataaaaaatcatttgataaaaagatcacatgtacatgaagacaatggaaagttatttccttcatccagtctacaaatacccaaggaccataatgcaagagaacatatccaccagtcagatgaacagaaacttgaaaaaccgaatgaatgcaaattttctgagtggcttaatatagaaaattctgagagaacaggtttgccttttcacgttgataactctgcttctgggaagagagtgaacagtaatgaaccatcttcattatggtcttcacacctaagaactgttgggttaaagccagaaactgctcctctcatccagcaacaaaatatcatggatcaatgttactttgagaactctctatccacagaatgtataattcggtcagccagcagatctgatgggtgtcagatgccaaaacttttttgccagaatctaccaccccctttgccaccaaagaaatatgctataaccagtgtgccacagtcagagaaaagcgaatctacacctgatgtcaaacttacagaggtgtttaaagctacctctcatcttccgaagcacagtttaagtacagcttcagaaccaagtttagaagtgagtacacatatgaatgatgaaagacataaagaaacatttcaagtgagagaatgttttggcaacacaccaaactgtccatccagctcctcaactaacgattttcaggcaaactcaggtgccattgatgcattttgccaaccagaactagactctatttctacctgtccaaatgagacagtttcattaactacctatttttcagttgatagctgcatgacggatacatatagattgaaataccatcagaggcccaagctctcttttccagagagcagtggcttttgtaataattcactatcttagagtgaaaaaggactagacctgtgttacataataatcttggttcaagctgcccttctgaacaaagatataaacctagcatacattgtaatagataactggtaaaactgaccaacttttacttctcagaggccatttaaatataataggaacctactgaccaaacctagtgatacataaaattaaagcctgtggcatttttaaagttgttaatcactatacatatgtatgtgtatatgtgtatacacatatataattttatgatcaatatcttagatattttagaaattccctttgaatagtcttggcgtgccgtgaaaaatagaaaatcagggagatataataattcatttgtcatatgctacagttgaataaaaattaaatttgtccccctattttgtggccagtagactgggaagtattaaactaaccagtactcatgtatggagattataaactatgctaattgaaaagtaccaggtgatacatagcctggtacttttttgtcaaagaattgctttatgaagaagcactttctaatgggtaaccagaaaagggcttcacccatttgtttttgacttctatgatagtcactgcatatgatccctttaagtgtctttaaaaaaaatgacttatgaatttgatagcatttggggaaaaaaagccttatatgattaacaatttgtaagttttcaagatcggatggaatttaattttgctcctagaatttttgtcttcagaatatctagttaagataaattaggcctttgactattataggtattcataaatgctactttagccatgtaagttaaaaagttaaaatacttaaactttagtgtatttatttatctcgttactttttttctaattttatatgaaatgtgaaaggtctttattttggtttggtttactttgggctgctaaccaccagtgttaggaattaatgtagggcaccctcttattgggaatgtcactgtaattgcctacattttctttgctgtaatattacctgcttataggttgtcaacccattttatctgaatttgaaaatctatctaggtttccagattaaatttctacctttcatatagagagtttaattttaataaaatgtttaattagagcatccttcccttttattctactttgaacaaatagtaattttaccccaactacttttcatgaagagtgctttgaaaattaaaggaatttttattattatggtaaccttatgagtaaaaataagttactttaattgctttatttcgttagttgtcattttattttgtactatgctggtaaactaattgtggtttagaatagttttatgttcactcctgataactgagaaacagaactaaagttttccttacattgctaaatggataaacctcatattcaataaactagtaaatgtagccacttga

SEQ ID NO: 197471 - DNA, 6247 bp, Homo sapiens
  Payload ID: 18949
  Gene Name: ubiquitin specific peptidase 54
  Uniprot ID: Q70EL1
  ENST ID: ENST00000339859
  CDS Start-End: 102-5156
gtttacggagactcggaactggataaagggaccaggctacattgggaaagaagtgggaagaaatggggtacagcgacgaggagggctaaatgtgaacaataatgtcttggaagagaaattatttttcagggggtcgtggtagtgtacaagggatgtttgcacctcgaagctcaacctccatagcccccagcaaaggcctcagcaatgagccagggcaaaacagctgcttcctcaacagtgccctgcaggttttgtggcacttggatatcttccgacgtagctttaggcagcttacaactcacaagtgcatgggagattcctgcatcttttgcgctctcaagggaatctttaaccagtttcagtgtagtagtgaaaaagtgcttccatctgacactctccgcagtgctctggcaaagactttccaggatgaacaacgtttccagctgggaattatggatgatgctgcagagtgctttgaaaacctcctgatgagaattcacttccacattgctgatgaaaccaaagaggatatatgtactgcccaacactgcatttcccatcagaaatttgcaatgacattgtttgagcagtgtgtatgtactagctgtggtgccacttctgatccgctgcctttcatccagatggtacattatatctccaccacttccctttgcaatcaggctatttgtatgctggaaagacgagagaaaccttcaccaagcatgtttggtgagctgctgcagaatgccagcaccatgggggatctgcggaactgtccaagcaactgtggagagaggatcaggattcgccgtgtgttgatgaatgctccacagattatcacgattgggctggtatgggactcagaccactcagacttagcagaagatgttatccacagcctgggaacctgccttaagctgggtgatctgtttttcagagtgacggatgaccgggccaagcaatctgaactgtacttagttggaatgatctgttactatggcaaacattattctacattcttttttcaaacaaagattcgcaaatggatgtattttgatgatgctcatgtcaaggagattgggcccaaatggaaggatgtggtgaccaaatgcatcaaggggcattatcagcccctgctgctgctttatgcagatccccagggtaccccagtttccacccaggacctgcctccccaagctgagttccagtcatacagcaggacatgctacgacagtgaagattcagggagggagccctccatctcaagtgacactcgaacagattcctcaacggagagctatccctacaaacattcccaccatgagtctgtggtcagtcacttctcttctgattctcaggggacagtcatctataatgtggaaaatgattccatgtctcagagcagtcgggacacaggacacctgactgatagtgaatgtaatcagaaacacacatccaagaaagggtcactgatagagcgcaagaggagctctggtcgggttaggaggaaaggcgatgagccccaggcctcgggataccacagtgaaggagaaacactgaaagagaagcaggctcctagaaatgcctccaaaccatccagcagcaccaacaggctgagagattttaaagagacagtcagcaatatgatccataacagaccatccctggcttctcagaccaatgtaggctctcactgcaggggcagaggaggagaccagcctgacaaaaaacctcctaggaccctgcctttacactctcgtgactgggaaatagagagtaccagcagtgagtcaaaatccagttcttccagcaagtatcgtcccacatggagacccaaacgagaatctctgaatattgacagtatctttagtaaggacaaaaggaagcactgtggctatacccagcttagccccttttctgaggattcagctaaagaatttataccagatgaaccaagcaagccaccttcttacgacattaaatttggtggaccaagcccccagtacaagcgctggggcccagcacggccaggctctcaccttttagagcagcacccccgactaatccagcgaatggaatctggctatgaaagcagtgagaggaacagcagcagccctgtcagcctggatgcagccctgcctgagagctcaaatgtctacagggatccaagtgctaagagatcagctgggttggttccttcctggcgtcatatcccaaagtcgcacagcagtagcatcctggaggtagactccacagcatccatgggtggctggacaaagagtcagcctttctctggtgaggagatatcttctaaaagtgaactggatgaattgcaggaagaggtggccaggagggcgcaggaacaggaacttcgaagaaaacgggagaaggagttagaggcagcgaaagggtttaaccctcatcctagccgcttcatggacttggatgaactgcagaatcaggggaggagtgacggctttgagaggtccctgcaagaggcagagtcagtgtttgaagagtcactacatctggaacagaaaggagactgtgctgcagctttggctctctgtaatgaagctatctctaaactaagacttgccctgcatggtgccagctgtagcacgcacagcagagccctagtcgataagaagttgcaaatcagtattcgaaaagcacggagcctgcaggatcgcatgcagcagcagcaatcaccacagcagccgtcgcagccctcagcctgcctcccaacacaggcggggactctctctcagccaacaagtgaacagcctatcccgctccaagtattgttaagccaagaggcccaactggaatccggcatggatacagagtttggggccagttctttcttccattcacctgcttcctgccatgagtcacactcatcactatctccagagtcatctgccccacagcacagctcccccagtagatctgccttgaagcttctgacttcggttgaagtagacaacattgaaccctctgcattccacaggcaaggtttacctaaagcaccagggtggactgagaagaattctcatcatagttgggagccattggatgccccagagggtaagctgcaaggctctaggtgtgacaacagcagttgcagcaagctccctccacaagaaggaagaggcattgctcaagaacagctgttccaagaaaagaaggatcctgctaacccctccccggtgatgcctggaatagccacctctgagaggggtgatgaacacagcctaggctgtagtccttcaaattcatcagctcagcccagccttcccctgtatagaacctgccaccccataatgcctgttgcttcttcatttgtgcttcactgtcctgatcctgtgcagaaaactaaccaatgcctccaaggccaaagcctcaaaacttcattgactttaaaagtggacagaggcagtgaggagacctataggccagagtttcccagcacaaaggggcttgtccgttctctggctgagcagttccagaggatgcagggtgtctccatgagggatagtacaggtttcaaggatagaagtttgtcaggtagtctaaggaagaactcttccccttctgattctaagcctcctttctcacagggtcaagagaaaggccactggccatgggcaaagcaacaatcctctctggagggtggggatagaccactttcctgggaagagtccactgaacattcttctcttgccttaaactctgggctgcctaatggtgaaacttctagcggaggacagcccaggttggcagagccagacatataccaagagaagctgtcccaagtgagagatgttaggtctaaggatctgggcagcagtactgacttggggacttccttgcctttggattcctgggtgaatatcacaaggttctgtgattctcagcttaagcatggggcacctaggccaggaatgaagtcctcccctcatgattcccatacgtgtgtaacctatccagagagaaatcacatccttttgcatccacattggaaccaagacacagagcaggagacctcagaattggagtctctgtatcaggccagtcttcaggcttctcaagctggctgttctggatgggggcagcaggataccgcctggcacccacttagccaaacaggctctgcagatggcatggggaggaggttgcactcagcccatgatcctggtctctcaaagacttcaacagcagaaatggagcatggtctccatgaagccagaacagtgcgtacttctcaggctacaccttgccgaggcctcagcagggagtgtggggaggatgagcagtacagtgcagagaatttacgtcgcatctcacgcagtctcagtggcaccgttgtctcagagagggaggaagctccggtttcttcccacagttttgattcatcaaacgtgaggaagcctttggaaaccgggcaccgttgttccagctcctcttccctccctgtcatccatgacccttctgtgtttctcctcggtccccaactctaccttccccaaccacagttcctgtccccagatgtcctgatgcccaccatggcaggggagcccaatagactcccaggaacttcaaggagtgtccagcagtttctggctatgtgtgacaggggtgaaacttcccaaggggccaagtacacaggaaggactttgaactaccagagcctcccccatcgctccagaacagacaactcctgggcaccctggtcagagaccaaccagcatattgggaccagattcctgactactccagggtgcaatcctcaactaacctacactgccacactaccagaaagaagcaagggccttcaggttcctcacactcagtcctggagtgatcttttccattcaccctcccaccctcccattgttcatcctgtgtacccaccatctagcagtcttcatgtacccctgaggtcagcttggaattcagatcctgttccagggtcccgaacccctggtcctcgaagagtagatatgcccccagatgatgactggaggcaaagcagttatgcctcccactctggacacaggagaacagtgggagaggggtttctgtttgttctatcagatgctcccagaagagagcagatcagggctagagtcctgcagcacagtcaatggtaaaggttattcctttcctttcctggagctacacctttctttgtaaaactgtactgtgggccgggcgcggtggctcacacctgtaatcccagcactttgggaggctgaggcgggtggatcacgaggtcaggagattgagaccatcctggccaacatggtgaaaccccgtctctaccaaaatacaaaaaattagccaggcgtgacggtgcgtgcctgtagtcccaactactcggaaggctgaggcaggagaattgcttgaacccgggaggcagaggttgcagtgagccgagatcgcaccactgcactccagcttggcaatagagtgagactccatctcaaaaaacaaaacaaaacaacaacaaaataaactactgtggcagcgttggtaccctgcatcactgccatggttgtgctattctcatctcaacatagaattggtgggttctcctaagggtgtcaggaacctctaaaaagatgtgattctttgggaggggatatttgaaattccaacttccattccccctagcaaaaggaagcagctgctgtttaagggttttatctgagccactttaaagatgaatccatggtattactctggatactagccattccttaggattttaaggtcacattttattcctggatgctttatgtccccacctccacctgagccctcatcctctgttccctactatactcccaacttctactctttgttttatccacctatccctattacctgaccctttgtcttccctgtctcccatccttggggggacatgtagccctgtggtcatggttctgatgacatcatcagggcagcccccctgcccaggtattatggcctgtcagcattccctgtgccctccaaaccttaggcctagaatgcggagctgccaacataacattcacccttttgaacagatggagtcaggcacactaacacagccttctgtcctcaataacacagccattattgccacttgctcagtcgtcaatgtaaaccctcagagtcagctgaactattttaggccaaacatactgtttttgtaaagtatttttcattaataaatctataagacagttctatttaa

SEQ ID NO: 197472 - DNA, 6161 bp, Homo sapiens
  Payload ID: 18949
  Gene Name: ubiquitin specific peptidase 54
  Uniprot ID: Q70EL1
  ENST ID: ENST00000408019
  CDS Start-End: 18-5072
gctaaatgtgaacaataatgtcttggaagagaaattatttttcagggggtcgtggtagtgtacaagggatgtttgcacctcgaagctcaacctccatagcccccagcaaaggcctcagcaatgagccagggcaaaacagctgcttcctcaacagtgccctgcaggttttgtggcacttggatatcttccgacgtagctttaggcagcttacaactcacaagtgcatgggagattcctgcatcttttgcgctctcaagggaatctttaaccagtttcagtgtagtagtgaaaaagtgcttccatctgacactctccgcagtgctctggcaaagactttccaggatgaacaacgtttccagctgggaattatggatgatgctgcagagtgctttgaaaacctcctgatgagaattcacttccacattgctgatgaaaccaaagaggatatatgtactgcccaacactgcatttcccatcagaaatttgcaatgacattgtttgagcagtgtgtatgtactagctgtggtgccacttctgatccgctgcctttcatccagatggtacattatatctccaccacttccctttgcaatcaggctatttgtatgctggaaagacgagagaaaccttcaccaagcatgtttggtgagctgctgcagaatgccagcaccatgggggatctgcggaactgtccaagcaactgtggagagaggatcaggattcgccgtgtgttgatgaatgctccacagattatcacgattgggctggtatgggactcagaccactcagacttagcagaagatgttatccacagcctgggaacctgccttaagctgggtgatctgtttttcagagtgacggatgaccgggccaagcaatctgaactgtacttagttggaatgatctgttactatggcaaacattattctacattcttttttcaaacaaagattcgcaaatggatgtattttgatgatgctcatgtcaaggagattgggcccaaatggaaggatgtggtgaccaaatgcatcaaggggcattatcagcccctgctgctgctttatgcagatccccagggtaccccagtttccacccaggacctgcctccccaagctgagttccagtcatacagcaggacatgctacgacagtgaagattcagggagggagccctccatctcaagtgacactcgaacagattcctcaacggagagctatccctacaaacattcccaccatgagtctgtggtcagtcacttctcttctgattctcaggggacagtcatctataatgtggaaaatgattccatgtctcagagcagtcgggacacaggacacctgactgatagtgaatgtaatcagaaacacacatccaagaaagggtcactgatagagcgcaagaggagctctggtcgggttaggaggaaaggcgatgagccccaggcctcgggataccacagtgaaggagaaacactgaaagagaagcaggctcctagaaatgcctccaaaccatccagcagcaccaacaggctgagagattttaaagagacagtcagcaatatgatccataacagaccatccctggcttctcagaccaatgtaggctctcactgcaggggcagaggaggagaccagcctgacaaaaaacctcctaggaccctgcctttacactctcgtgactgggaaatagagagtaccagcagtgagtcaaaatccagttcttccagcaagtatcgtcccacatggagacccaaacgagaatctctgaatattgacagtatctttagtaaggacaaaaggaagcactgtggctatacccagcttagccccttttctgaggattcagctaaagaatttataccagatgaaccaagcaagccaccttcttacgacattaaatttggtggaccaagcccccagtacaagcgctggggcccagcacggccaggctctcaccttttagagcagcacccccgactaatccagcgaatggaatctggctatgaaagcagtgagaggaacagcagcagccctgtcagcctggatgcagccctgcctgagagctcaaatgtctacagggatccaagtgctaagagatcagctgggttggttccttcctggcgtcatatcccaaagtcgcacagcagtagcatcctggaggtagactccacagcatccatgggtggctggacaaagagtcagcctttctctggtgaggagatatcttctaaaagtgaactggatgaattgcaggaagaggtggccaggagggcgcaggaacaggaacttcgaagaaaacgggagaaggagttagaggcagcgaaagggtttaaccctcatcctagccgcttcatggacttggatgaactgcagaatcaggggaggagtgacggctttgagaggtccctgcaagaggcagagtcagtgtttgaagagtcactacatctggaacagaaaggagactgtgctgcagctttggctctctgtaatgaagctatctctaaactaagacttgccctgcatggtgccagctgtagcacgcacagcagagccctagtcgataagaagttgcaaatcagtattcgaaaagcacggagcctgcaggatcgcatgcagcagcagcaatcaccacagcagccgtcgcagccctcagcctgcctcccaacacaggcggggactctctctcagccaacaagtgaacagcctatcccgctccaagtattgttaagccaagaggcccaactggaatccggcatggatacagagtttggggccagttctttcttccattcacctgcttcctgccatgagtcacactcatcactatctccagagtcatctgccccacagcacagctcccccagtagatctgccttgaagcttctgacttcggttgaagtagacaacattgaaccctctgcattccacaggcaaggtttacctaaagcaccagggtggactgagaagaattctcatcatagttgggagccattggatgccccagagggtaagctgcaaggctctaggtgtgacaacagcagttgcagcaagctccctccacaagaaggaagaggcattgctcaagaacagctgttccaagaaaagaaggatcctgctaacccctccccggtgatgcctggaatagccacctctgagaggggtgatgaacacagcctaggctgtagtccttcaaattcatcagctcagcccagccttcccctgtatagaacctgccaccccataatgcctgttgcttcttcatttgtgcttcactgtcctgatcctgtgcagaaaactaaccaatgcctccaaggccaaagcctcaaaacttcattgactttaaaagtggacagaggcagtgaggagacctataggccagagtttcccagcacaaaggggcttgtccgttctctggctgagcagttccagaggatgcagggtgtctccatgagggatagtacaggtttcaaggatagaagtttgtcaggtagtctaaggaagaactcttccccttctgattctaagcctcctttctcacagggtcaagagaaaggccactggccatgggcaaagcaacaatcctctctggagggtggggatagaccactttcctgggaagagtccactgaacattcttctcttgccttaaactctgggctgcctaatggtgaaacttctagcggaggacagcccaggttggcagagccagacatataccaagagaagctgtcccaagtgagagatgttaggtctaaggatctgggcagcagtactgacttggggacttccttgcctttggattcctgggtgaatatcacaaggttctgtgattctcagcttaagcatggggcacctaggccaggaatgaagtcctcccctcatgattcccatacgtgtgtaacctatccagagagaaatcacatccttttgcatccacattggaaccaagacacagagcaggagacctcagaattggagtctctgtatcaggccagtcttcaggcttctcaagctggctgttctggatgggggcagcaggataccgcctggcacccacttagccaaacaggctctgcagatggcatggggaggaggttgcactcagcccatgatcctggtctctcaaagacttcaacagcagaaatggagcatggtctccatgaagccagaacagtgcgtacttctcaggctacaccttgccgaggcctcagcagggagtgtggggaggatgagcagtacagtgcagagaatttacgtcgcatctcacgcagtctcagtggcaccgttgtctcagagagggaggaagctccggtttcttcccacagttttgattcatcaaacgtgaggaagcctttggaaaccgggcaccgttgttccagctcctcttccctccctgtcatccatgacccttctgtgtttctcctcggtccccaactctaccttccccaaccacagttcctgtccccagatgtcctgatgcccaccatggcaggggagcccaatagactcccaggaacttcaaggagtgtccagcagtttctggctatgtgtgacaggggtgaaacttcccaaggggccaagtacacaggaaggactttgaactaccagagcctcccccatcgctccagaacagacaactcctgggcaccctggtcagagaccaaccagcatattgggaccagattcctgactactccagggtgcaatcctcaactaacctacactgccacactaccagaaagaagcaagggccttcaggttcctcacactcagtcctggagtgatcttttccattcaccctcccaccctcccattgttcatcctgtgtacccaccatctagcagtcttcatgtacccctgaggtcagcttggaattcagatcctgttccagggtcccgaacccctggtcctcgaagagtagatatgcccccagatgatgactggaggcaaagcagttatgcctcccactctggacacaggagaacagtgggagaggggtttctgtttgttctatcagatgctcccagaagagagcagatcagggctagagtcctgcagcacagtcaatggtaaaggttattcctttcctttcctggagctacacctttctttgtaaaactgtactgtgggccgggcgcggtggctcacacctgtaatcccagcactttgggaggctgaggcgggtggatcacgaggtcaggagattgagaccatcctggccaacatggtgaaaccccgtctctaccaaaatacaaaaaattagccaggcgtgacggtgcgtgcctgtagtcccaactactcggaaggctgaggcaggagaattgcttgaacccgggaggcagaggttgcagtgagccgagatcgcaccactgcactccagcttggcaatagagtgagactccatctcaaaaaacaaaacaaaacaacaacaaaataaactactgtggcagcgttggtaccctgcatcactgccatggttgtgctattctcatctcaacatagaattggtgggttctcctaagggtgtcaggaacctctaaaaagatgtgattctttgggaggggatatttgaaattccaacttccattccccctagcaaaaggaagcagctgctgtttaagggttttatctgagccactttaaagatgaatccatggtattactctggatactagccattccttaggattttaaggtcacattttattcctggatgctttatgtccccacctccacctgagccctcatcctctgttccctactatactcccaacttctactctttgttttatccacctatccctattacctgaccctttgtcttccctgtctcccatccttggggggacatgtagccctgtggtcatggttctgatgacatcatcagggcagcccccctgcccaggtattatggcctgtcagcattccctgtgccctccaaaccttaggcctagaatgcggagctgccaacataacattcacccttttgaacagatggagtcaggcacactaacacagccttctgtcctcaataacacagccattattgccacttgctcagtcgtcaatgtaaaccctcagagtcagctgaactattttaggccaaacatactgtttttgtaaagtatttttcattaataaatctataagacagttctattt

SEQ ID NO: 197473 - DNA, 5201 bp, Homo sapiens
  Payload ID: 18949
  Gene Name: ubiquitin specific peptidase 54
  ENST ID: ENST00000424265
  CDS Start-End: 1-1906
accttcaccaagcatgtttggtgagctgctgcagaatgccagcaccatgggggatctgcggaactgtccaagcaactgtggagagaggatcaggattcgccgtgtgttgatgaatgctccacagattatcacgattgggctggtatgggactcagaccactcagacttagcagaagatgttatccacagcctgggaacctgccttaagctgggtgatctgtttttcagagtgacggatgaccgggccaagcaatctgaactgtacttagttggaatgatctgttactatggcaaacattattctacattcttttttcaaacaaagattcgcaaatggatgtattttgatgatgctcatgtcaaggagattgggcccaaatggaaggatgtggtgaccaaatgcatcaaggggcattatcagcccctgctgctgctttatgcagatccccagggtaccccagtttccacccaggacctgcctccccaagctgagttccagtcatacagcaggacatgctacgacagtgaagattcagggagggagccctccatctcaagtgacactcgaacagattcctcaacggagagctatccctacaaacattcccaccatgagtctgtggtcagtcacttctcttctgattctcaggggacagtcatctataatgtggaaaatgattccatgtctcagagcagtcgggacacaggacacctgactgatagtgaatgtaatcagaaacacacatccaagaaagggtcactgatagagcgcaagaggagctctggtcgggttaggaggaaaggcgatgagccccaggcctcgggataccacagtgaaggagaaacactgaaagagaagcaggctcctagaaatgcctccaaaccatccagcagcaccaacaggctgagagattttaaagagacagtcagcaatatgatccataacagaccatccctggcttctcagaccaatgtaggctctcactgcaggggcagaggaggagaccagcctgacaaaaaacctcctaggaccctgcctttacactctcgtgactgggaaatagagagtaccagcagtgagtcaaaatccagttcttccagcaagtatcgtcccacatggagacccaaacgagaatctctgaatattgacagtatctttagtaaggacaaaaggaagcactgtggctatacccagcttagccccttttctgaggattcagctaaagaatttataccagatgaaccaagcaagccaccttcttacgacattaaatttggtggaccaagcccccagtacaagcgctggggcccagcacggccaggctctcaccttttagagcagcacccccgactaatccagcgaatggaatctggctatgaaagcagtgagaggaacagcagcagccctgtcagcctggatgcagccctgcctgagagctcaaatgtctacagggatccaagtgctaagagatcagctgggttggttccttcctggcgtcatatcccaaagtcgcacagcagtagcatcctggaggtagactccacagcatccatgggtggctggacaaagagtcagcctttctctggtgaggagatatcttctaaaagtgaactggatgaattgcaggaagaggtggccaggagggcgcaggaacaggaacttcgaagaaaacgggagaaggagttagaggcagcgaaagggtttaaccctcatcctagccgcttcatggacttggatgaactgcagaatcaggggaggagtgacggctttgagaggtccctgcaagaggcagagtcagtgtttgaagagtcactacatctggaacagaaaggagactgtgctgcagctttggctctctgtaatgaagctatcttgaacagcctatcccgctccaagtattgttaagccaagaggcccaactggaatccggcatggatacagagtttggggccagttctttcttccattcacctgcttcctgccatgagtcacactcatcactatctccagagtcatctgccccacagcacagctcccccagtagatctgccttgaagcttctgacttcggttgaagtagacaacattgaaccctctgcattccacaggcaaggtttacctaaagcaccagggtggactgagaagaattctcatcatagttgggagccattggatgccccagagggtaagctgcaaggctctaggtgtgacaacagcagttgcagcaagctccctccacaagaaggaagaggcattgctcaagaacagctgttccaagaaaagaaggatcctgctaacccctccccggtgatgcctggaatagccacctctgagaggggtgatgaacacagcctaggctgtagtccttcaaattcatcagctcagcccagccttcccctgtatagaacctgccaccccataatgcctgttgcttcttcatttgtgcttcactgtcctgatcctgtgcagaaaactaaccaatgcctccaaggccaaagcctcaaaacttcattgactttaaaagtggacagaggcagtgaggagacctataggccagagtttcccagcacaaaggggcttgtccgttctctggctgagcagttccagaggatgcagggtgtctccatgagggatagtacaggtttcaaggatagaagtttgtcaggtagtctaaggaagaactcttccccttctgattctaagcctcctttctcacagggtcaagagaaaggccactggccatgggcaaagcaacaatcctctctggagggtggggatagaccactttcctgggaagagtccactgaacattcttctcttgccttaaactctgggctgcctaatggtgaaacttctagcggaggacagcccaggttggcagagccagacatataccaagagaagctgtcccaagtgagagatgttaggtctaaggatctgggcagcagtactgacttggggacttccttgcctttggattcctgggtgaatatcacaaggttctgtgattctcagcttaagcatggggcacctaggccaggaatgaagtcctcccctcatgattcccatacgtgtgtaacctatccagagagaaatcacatccttttgcatccacattggaaccaagacacagagcaggagacctcagaattggagtctctgtatcaggccagtcttcaggcttctcaagctggctgttctggatgggggcagcaggataccgcctggcacccacttagccaaacaggctctgcagatggcatggggaggaggttgcactcagcccatgatcctggtctctcaaagacttcaacagcagaaatggagcatggtctccatgaagccagaacagtgcgtacttctcaggattcatcaaacgtgaggaagcctttggaaaccgggcaccgttgttccagctcctcttccctccctgtcatccatgacccttctgtgtttctcctcggtccccaactctaccttccccaaccacagttcctgtccccagatgtcctgatgcccaccatggcaggggagcccaatagactcccaggaacttcaaggagtgtccagcagtttctggctatgtgtgacaggggtgaaacttcccaaggggccaagtacacaggaaggactttgaactaccagagcctcccccatcgctccagaacagacaactcctgggcaccctggtcagagaccaaccagcatattgggaccagattcctgactactccagggtgcaatcctcaactaacctacactgccacactaccagaaagaagcaagggccttcaggttcctcacactcagtcctggagtgatcttttccattcaccctcccaccctcccattgttcatcctgtgtacccaccatctagcagtcttcatgtacccctgaggtcagcttggaattcagatcctgttccagggtcccgaacccctggtcctcgaagagtagatatgcccccagatgatgactggaggcaaagcagttatgcctcccactctggacacaggagaacagtgggagaggggtttctgtttgttctatcagatgctcccagaagagagcagatcagggctagagtcctgcagcacagtcaatggtaaaggttattcctttcctttcctggagctacacctttctttgtaaaactgtactgtgggccgggcgcggtggctcacacctgtaatcccagcactttgggaggctgaggcgggtggatcacgaggtcaggagattgagaccatcctggccaacatggtgaaaccccgtctctaccaaaatacaaaaaattagccaggcgtgacggtgcgtgcctgtagtcccaactactcggaaggctgaggcaggagaattgcttgaacccgggaggcagaggttgcagtgagccgagatcgcaccactgcactccagcttggcaatagagtgagactccatctcaaaaaacaaaacaaaacaacaacaaaataaactactgtggcagcgttggtaccctgcatcactgccatggttgtgctattctcatctcaacatagaattggtgggttctcctaagggtgtcaggaacctctaaaaagatgtgattctttgggaggggatatttgaaattccaacttccattccccctagcaaaaggaagcagctgctgtttaagggttttatctgagccactttaaagatgaatccatggtattactctggatactagccattccttaggattttaaggtcacattttattcctggatgctttatgtccccacctccacctgagccctcatcctctgttccctactatactcccaacttctactctttgttttatccacctatccctattacctgaccctttgtcttccctgtctcccatccttggggggacatgtagccctgtggtcatggttctgatgacatcatcagggcagcccccctgcccaggtattatggcctgtcagcattccctgtgccctccaaaccttaggcctagaatgcggagctgccaacataacattcacccttttgaacagatggagtcaggcacactaacacagccttctgtcctcaataacacagccattattgccacttgctcagtcgtcaatgtaaaccctcagagtcagctgaactattttaggccaaacatactgtttttgtaaagtatttttcattaataaatctataagacagttctatttaa

SEQ ID NO: 197474 - DNA, 509 bp, Homo sapiens
  Payload ID: 18949
  Gene Name: ubiquitin specific peptidase 54
  ENST ID: ENST00000451492
  CDS Start-End: 79-509
cttgccccacagataccctcgtgattagaggtcttttgctggaggttgactgtgctgtctggctaaatgtgaacaataatgtcttggaagagaaattatttttcagggggtcgtggtagtgtacaagggatgtttgcacctcgaagctcaacctccatagcccccagcaaaggcctcagcaatgagccagggcaaaacagctgcttcctcaacagtgccctgcaggttttgtggcacttggatatcttccgacgtagctttaggcagcttacaactcacaagtgcatgggagattcctgcatcttttgcgctctcaagggaatctttaaccagtttcagtgtagtagtgaaaaagtgcttccatctgacactctccgcagtgctctggcaaagactttccaggatgaacaacgtttccagctgggaattatggatgatgctgcagagtgctttctgtttttcagagtgacggatgaccgggccaagcaatctgaactgtacttagttgg

SEQ ID NO: 197475 - DNA, 4370 bp, Homo sapiens
  Payload ID: 18949
  Gene Name: ubiquitin specific peptidase 54
  ENST ID: ENST00000418501
  CDS Start-End: 1-1075
cctgactgatagtgaatgtaatcagaaacacacatccaagaaagggtcactgatagagcgcaagaggagctctggtcgggttaggaggaaaggcgatgagccccaggcctcgggataccacagtgaaggagaaacactgaaagagaagcaggctcctagaaatgcctccaaaccatccagcagcaccaacaggctgagagattttaaagagacagtcagcaatatgatccataacagaccatccctggcttctcagaccaatgtaggctctcactgcaggggcagaggaggagaccagcctgacaaaaaacctcctaggaccctgcctttacactctcgtgactgggaaatagagagtaccagcagtgagtcaaaatccagttcttccagcaagtatcgtcccacatggagacccaaacgagaatctctgaatattgacagtatctttagtaaggacaaaaggaagcactgtggctatacccagcttagccccttttctgaggattcagctaaagaatttataccagatgaaccaagcaagccaccttcttacgacattaaatttggtggaccaagcccccagtacaagcgctggggcccagcacggccaggctctcaccttttagagcagcacccccgactaatccagcgaatggaatctggctatgaaagcagtgagaggaacagcagcagccctgtcagcctggatgcagccctgcctgagagctcaaatgtctacagggatccaagtgctaagagatcagctgggttggttccttcctggcgtcatatcccaaagtcgcacagcagtagcatcctggaggtagactccacagcatccatgggtggctggacaaagagtcagcctttctctggtgaggagatatcttctaaaagtgaactggatgaattgcaggaagaggtggccaggagggcgcaggaacaggaacttcgaagaaaacgggagaaggagttagaggcagcgaaagggtttaaccctcatcctagccgcttcatggacttggatgaactgcagaatcaggtgaacagcctatcccgctccaagtattgttaagccaagaggcccaactggaatccggcatggatacagagtttggggccagttctttcttccattcacctgcttcctgccatgagtcacactcatcactatctccagagtcatctgccccacagcacagctcccccagtagatctgccttgaagcttctgacttcggttgaagtagacaacattgaaccctctgcattccacaggcaaggtttacctaaagcaccagggtggactgagaagaattctcatcatagttgggagccattggatgccccagagggtaagctgcaaggctctaggtgtgacaacagcagttgcagcaagctccctccacaagaaggaagaggcattgctcaagaacagctgttccaagaaaagaaggatcctgctaacccctccccggtgatgcctggaatagccacctctgagaggggtgatgaacacagcctaggctgtagtccttcaaattcatcagctcagcccagccttcccctgtatagaacctgccaccccataatgcctgttgcttcttcatttgtgcttcactgtcctgatcctgtgcagaaaactaaccaatgcctccaaggccaaagcctcaaaacttcattgactttaaaagtggacagaggcagtgaggagacctataggccagagtttcccagcacaaaggggcttgtccgttctctggctgagcagttccagaggatgcagggtgtctccatgagggatagtacaggtttcaaggatagaagtttgtcaggtagtctaaggaagaactcttccccttctgattctaagcctcctttctcacagggtcaagagaaaggccactggccatgggcaaagcaacaatcctctctggagggtggggatagaccactttcctgggaagagtccactgaacattcttctcttgccttaaactctgggctgcctaatggtgaaacttctagcggaggacagcccaggttggcagagccagacatataccaagagaagctgtcccaagtgagagatgttaggtctaaggatctgggcagcagtactgacttggggacttccttgcctttggattcctgggtgaatatcacaaggttctgtgattctcagcttaagcatggggcacctaggccaggaatgaagtcctcccctcatgattcccatacgtgtgtaacctatccagagagaaatcacatccttttgcatccacattggaaccaagacacagagcaggagacctcagaattggagtctctgtatcaggccagtcttcaggcttctcaagctggctgttctggatgggggcagcaggataccgcctggcacccacttagccaaacaggctctgcagatggcatggggaggaggttgcactcagcccatgatcctggtctctcaaagacttcaacagcagaaatggagcatggtctccatgaagccagaacagtgcgtacttctcaggattcatcaaacgtgaggaagcctttggaaaccgggcaccgttgttccagctcctcttccctccctgtcatccatgacccttctgtgtttctcctcggtccccaactctaccttccccaaccacagttcctgtccccagatgtcctgatgcccaccatggcaggggagcccaatagactcccaggaacttcaaggagtgtccagcagtttctggctatgtgtgacaggggtgaaacttcccaaggggccaagtacacaggaaggactttgaactaccagagcctcccccatcgctccagaacagacaactcctgggcaccctggtcagagaccaaccagcatattgggaccagattcctgactactccagggtgcaatcctcaactaacctacactgccacactaccagaaagaagcaagggccttcaggttcctcacactcagtcctggagtgatcttttccattcaccctcccaccctcccattgttcatcctgtgtacccaccatctagcagtcttcatgtacccctgaggtcagcttggaattcagatcctgttccagggtcccgaacccctggtcctcgaagagtagatatgcccccagatgatgactggaggcaaagcagttatgcctcccactctggacacaggagaacagtgggagaggggtttctgtttgttctatcagatgctcccagaagagagcagatcagggctagagtcctgcagcacagtcaatggtaaaggttattcctttcctttcctggagctacacctttctttgtaaaactgtactgtgggccgggcgcggtggctcacacctgtaatcccagcactttgggaggctgaggcgggtggatcacgaggtcaggagattgagaccatcctggccaacatggtgaaaccccgtctctaccaaaatacaaaaaattagccaggcgtgacggtgcgtgcctgtagtcccaactactcggaaggctgaggcaggagaattgcttgaacccgggaggcagaggttgcagtgagccgagatcgcaccactgcactccagcttggcaatagagtgagactccatctcaaaaaacaaaacaaaacaacaacaaaataaactactgtggcagcgttggtaccctgcatcactgccatggttgtgctattctcatctcaacatagaattggtgggttctcctaagggtgtcaggaacctctaaaaagatgtgattctttgggaggggatatttgaaattccaacttccattccccctagcaaaaggaagcagctgctgtttaagggttttatctgagccactttaaagatgaatccatggtattactctggatactagccattccttaggattttaaggtcacattttattcctggatgctttatgtccccacctccacctgagccctcatcctctgttccctactatactcccaacttctactctttgttttatccacctatccctattacctgaccctttgtcttccctgtctcccatccttggggggacatgtagccctgtggtcatggttctgatgacatcatcagggcagcccccctgcccaggtattatggcctgtcagcattccctgtgccctccaaaccttaggcctagaatgcggagctgccaacataacattcacccttttgaacagatggagtcaggcacactaacacagccttctgtcctcaataacacagccattattgccacttgctcagtcgtcaatgtaaaccctcagagtcagctgaactattttaggccaaacatactgtttttgtaaagtatttttcattaataaatctataagacagttctatttaa

SEQ ID NO: 197476 - DNA, 543 bp, Homo sapiens
  Payload ID: 18949
  Gene Name: ubiquitin specific peptidase 54
  ENST ID: ENST00000413442
  CDS Start-End: 83-543
atcacttgccccacagataccctcgtgattagaggtcttttgctggaggttgactgtgctgtctggctaaatgtgaacaataatgtcttggaagagaaattatttttcagggggtcgtggtagtgtacaagggatgtttgcacctcgaagctcaacctccatagcccccagcaaaggcctcagcaatgagccagggcaaaacagctgcttcctcaacagtgccctgcaggttttgtggcacttggatatcttccgacgtagctttaggcagcttacaactcacaagtgcatgggagattcctgcatcttttgcgctctcaagggaatctttaaccagtttcagtgtagtagtgaaaaagtgcttccatctgacactctccgcagtgctctggcaaagactttccaggatgaacaacgtttccagctgggaattatggatgatgctgcagagtgctttgaaaacctcctgatgagaattcacttccacattgctgatgaaaccaaagaggatatatgtactgcccaacactgcatttcccatca

SEQ ID NO: 197477 - DNA, 600 bp, Homo sapiens
  Payload ID: 18949
  Gene Name: ubiquitin specific peptidase 54
  ENST ID: ENST00000433394
  CDS Start-End: 361-600
atgcggcgccaggagctgctaagagatgggctctcctgtgttgcccaggctgtactcgaactcctaggctcaagtaattccttcccacctcagcctcctgattggctgggactacagctctctgacacagctggctattctagtcccagaagaaagaggagagacttgctgaagatctggatgggacaatagaagtttggggcacattaaaaagaagcagcaagaacatcaacaaaaacctcagatgattcaaacaggcttcttcttggctttgtggaaccttttgcagttgctcagaatttgagtttttgcttcagaggatgatgagacaaggcaatagagggctaaatgtgaacaataatgtcttggaagagaaattatttttcagggggtcgtggtagtgtacaagggatgtttgcacctcgaagctcaacctccatagcccccagcaaaggcctcagcaatgagccagggcaaaacagctgcttcctcaacagtgccctgcaggttttgtggcacttggatatcttccgacgtagctttaggcagcttacaactcacaagtgcatgggagattcctgcatcttttgcgctctcaag

SEQ ID NO: 197478 - DNA, 2777 bp, Homo sapiens
  Payload ID: 18949
  Gene Name: ubiquitin specific peptidase 54
  Uniprot ID: Q70EL1
  ENST ID: ENST00000422491
  CDS Start-End: 338-2515
ctgggttggttccttcctggcgtcatatcccaaagtcgcacagcagtagcatcctggaggtagactccacagcatccatgggtggctggacaaagagtcagcctttctctggtgaggagatatcttctaaaagtgaactggatgaattgcaggaagaggtggccaggagggcgcaggaacaggaacttcgaagaaaacgggagaaggagttagaggcagcgaaagggtttaaccctcatcctagccgcttcatggacttggatgaactgcagaatcaggtgaacagcctatcccgctccaagtattgttaagccaagaggcccaactggaatccggcatggatacagagtttggggccagttctttcttccattcacctgcttcctgccatgagtcacactcatcactatctccagagtcatctgccccacagcacagctcccccagtagatctgccttgaagcttctgacttcggttgaagtagacaacattgaaccctctgcattccacaggcaaggtttacctaaagcaccagggtggactgagaagaattctcatcatagttgggagccattggatgccccagagggtaagctgcaaggctctaggtgtgacaacagcagttgcagcaagctccctccacaagaaggaagaggcattgctcaagaacagctgttccaagaaaagaaggatcctgctaacccctccccggtgatgcctggaatagccacctctgagaggggtgatgaacacagcctaggctgtagtccttcaaattcatcagctcagcccagccttcccctgtatagaacctgccaccccataatgcctgttgcttcttcatttgtgcttcactgtcctgatcctgtgcagaaaactaaccaatgcctccaaggccaaagcctcaaaacttcattgactttaaaagtggacagaggcagtgaggagacctataggccagagtttcccagcacaaaggggcttgtccgttctctggctgagcagttccagaggatgcagggtgtctccatgagggatagtacaggtttcaaggatagaagtttgtcaggtagtctaaggaagaactcttccccttctgattctaagcctcctttctcacagggtcaagagaaaggccactggccatgggcaaagcaacaatcctctctggagggtggggatagaccactttcctgggaagagtccactgaacattcttctcttgccttaaactctgggctgcctaatggtgaaacttctagcggaggacagcccaggttggcagagccagacatataccaagagaagctgtcccaagtgagagatgttaggtctaaggatctgggcagcagtactgacttggggacttccttgcctttggattcctgggtgaatatcacaaggttctgtgattctcagcttaagcatggggcacctaggccaggaatgaagtcctcccctcatgattcccatacgtgtgtaacctatccagagagaaatcacatccttttgcatccacattggaaccaagacacagagcaggagacctcagaattggagtctctgtatcaggccagtcttcaggcttctcaagctggctgttctggatgggggcagcaggataccgcctggcacccacttagccaaacaggctctgcagatggcatggggaggaggttgcactcagcccatgatcctggtctctcaaagacttcaacagcagaaatggagcatggtctccatgaagccagaacagtgcgtacttctcaggattcatcaaacgtgaggaagcctttggaaaccgggcaccgttgttccagctcctcttccctccctgtcatccatgacccttctgtgtttctcctcggtccccaactctaccttccccaaccacagttcctgtccccagatgtcctgatgcccaccatggcaggggagcccaatagactcccaggaacttcaaggagtgtccagcagtttctggctatgtgtgacaggggtgaaacttcccaaggggccaagtacacaggaaggactttgaactaccagagcctcccccatcgctccagaacagacaactcctgggcaccctggtcagagaccaaccagcatattgggaccagattcctgactactccagggtgcaatcctcaactaacctacactgccacactaccagaaagaagcaagggccttcaggttcctcacactcagtcctggagtgatcttttccattcaccctcccaccctcccattgttcatcctgtgtacccaccatctagcagtcttcatgtacccctgaggtcagcttggaattcagatcctgttccagggtcccgaacccctggtcctcgaagagtagatatgcccccagatgatgactggaggcaaagcagttatgcctcccactctggacacaggagaacagtgggagaggggtttctgtttgttctatcagatgctcccagaagagagcagatcagggctagagtcctgcagcacagtcaatggtaaaggttattcctttcctttcctggagctacacctttctttgtaaaactgtactgtgggccgggcgcggtggctcacacctgtaatcccagcactttgggaggctgaggcgggtggatcacgaggtcaggagattgagaccatcctggccaacatggtgaaaccccgtctctaccaaaatacaaaaaattagccaggcgtgacggtgcgtgcctgtagtcccaactactcggaaggctgaggcaggagaattgcttgaacccgg

SEQ ID NO: 197479 - DNA, 4674 bp, Homo sapiens
  Payload ID: 18949
  Gene Name: ubiquitin specific peptidase 54
  ENST ID: ENST00000466048
  CDS Start-End: 1-1238
ggagggagccctccatctcaagtgacactcgaacagattcctcaacggagagctatccctacaaacattcccaccatgagtctgtggtcagtcacttctcttctgattctcaggggacagtcatctataatgtggaaaatgattccatgtctcagagcagtcgggacacaggagaaacactgaaagagaagcaggctcctagaaatgcctccaaaccatccagcagcaccaacaggctgagagattttaaagagacagtcagcaatatgatccataacagaccatccctggcttctcagaccaatgtaggctctcactgcaggggcagaggaggagaccagcctgacaaaaaacctcctaggaccctgcctttacactctcgtgactgggaaatagagagtaccagcagtgagtcaaaatccagttcttccagcaagtatcgtcccacatggagacccaaacgagaatctctgaatattgacagtatctttagtaaggacaaaaggaagcactgtggctatacccagcttagccccttttctgaggattcagctaaagaatttataccagatgaaccaagcaagccaccttcttacgacattaaatttggtggaccaagcccccagtacaagcgctggggcccagcacggccaggctctcaccttttagagcagcacccccgactaatccagcgaatggaatctggctatgaaagcagtgagaggaacagcagcagccctgtcagcctggatgcagccctgcctgagagctcaaatgtctacagggatccaagtgctaagagatcagctgggttggttccttcctggcgtcatatcccaaagtcgcacagcagtagcatcctggaggtagactccacagcatccatgggtggctggacaaagagtcagcctttctctggtgaggagatatcttctaaaagtgaactggatgaattgcaggaagaggtggccaggagggcgcaggaacaggaacttcgaagaaaacgggagaaggagttagaggcagcgaaagggtttaaccctcatcctagccgcttcatggacttggatgaactgcagaatcaggggaggagtgacggctttgagaggtccctgcaagaggcagagtcagtgtttgaagagtcactacatctggaacagaaaggagactgtgctgcagctttggctctctgtaatgaagctatcttgaacagcctatcccgctccaagtattgttaagccaagaggcccaactggaatccggcatggatacagagtttggggccagttctttcttccattcacctgcttcctgccatgagtcacactcatcactatctccagagtcatctgccccacagcacagctcccccagtagatctgccttgaagcttctgacttcggttgaagtagacaacattgaaccctctgcattccacaggcaaggtttacctaaagcaccagggtggactgagaagaattctcatcatagttgggagccattggatgccccagagggtaagctgcaaggctctaggtgtgacaacagcagttgcagcaagctccctccacaagaaggaagaggcattgctcaagaacagctgttccaagaaaagaaggatcctgctaacccctccccggtgatgcctggaatagccacctctgagaggggtgatgaacacagcctaggctgtagtccttcaaattcatcagctcagcccagccttcccctgtatagaacctgccaccccataatgcctgttgcttcttcatttgtgcttcactgtcctgatcctgtgcagaaaactaaccaatgcctccaaggccaaagcctcaaaacttcattgactttaaaagtggacagaggcagtgaggagacctataggccagagtttcccagcacaaaggggcttgtccgttctctggctgagcagttccagaggatgcagggtgtctccatgagggatagtacaggtttcaaggatagaagtttgtcaggtagtctaaggaagaactcttccccttctgattctaagcctcctttctcacagggtcaagagaaaggccactggccatgggcaaagcaacaatcctctctggagggtggggatagaccactttcctgggaagagtccactgaacattcttctcttgccttaaactctgggctgcctaatggtgaaacttctagcggaggacagcccaggttggcagagccagacatataccaagagaagctgtcccaagtgagagatgttaggtctaaggatctgggcagcagtactgacttggggacttccttgcctttggattcctgggtgaatatcacaaggttctgtgattctcagcttaagcatggggcacctaggccaggaatgaagtcctcccctcatgattcccatacgtgtgtaacctatccagagagaaatcacatccttttgcatccacattggaaccaagacacagagcaggagacctcagaattggagtctctgtatcaggccagtcttcaggcttctcaagctggctgttctggatgggggcagcaggataccgcctggcacccacttagccaaacaggctctgcagatggcatggggaggaggttgcactcagcccatgatcctggtctctcaaagacttcaacagcagaaatggagcatggtctccatgaagccagaacagtgcgtacttctcaggctacaccttgccgaggcctcagcagggagtgtggggaggatgagcagtacagtgcagagaatttacgtcgcatctcacgcagtctcagtggcaccgttgtctcagagagggaggaagctccggtttcttcccacagttttgattcatcaaacgtgaggaagcctttggaaaccgggcaccgttgttccagctcctcttccctccctgtcatccatgacccttctgtgtttctcctcggtccccaactctaccttccccaaccacagttcctgtccccagatgtcctgatgcccaccatggcaggggagcccaatagactcccaggaacttcaaggagtgtccagcagtttctggctatgtgtgacaggggtgaaacttcccaaggggccaagtacacaggaaggactttgaactaccagagcctcccccatcgctccagaacagacaactcctgggcaccctggtcagagaccaaccagcatattgggaccagattcctgactactccagggtgcaatcctcaactaacctacactgccacactaccagaaagaagcaagggccttcaggttcctcacactcagtcctggagtgatcttttccattcaccctcccaccctcccattgttcatcctgtgtacccaccatctagcagtcttcatgtacccctgaggtcagcttggaattcagatcctgttccagggtcccgaacccctggtcctcgaagagtagatatgcccccagatgatgactggaggcaaagcagttatgcctcccactctggacacaggagaacagtgggagaggggtttctgtttgttctatcagatgctcccagaagagagcagatcagggctagagtcctgcagcacagtcaatggtaaaggttattcctttcctttcctggagctacacctttctttgtaaaactgtactgtgggccgggcgcggtggctcacacctgtaatcccagcactttgggaggctgaggcgggtggatcacgaggtcaggagattgagaccatcctggccaacatggtgaaaccccgtctctaccaaaatacaaaaaattagccaggcgtgacggtgcgtgcctgtagtcccaactactcggaaggctgaggcaggagaattgcttgaacccgggaggcagaggttgcagtgagccgagatcgcaccactgcactccagcttggcaatagagtgagactccatctcaaaaaacaaaacaaaacaacaacaaaataaactactgtggcagcgttggtaccctgcatcactgccatggttgtgctattctcatctcaacatagaattggtgggttctcctaagggtgtcaggaacctctaaaaagatgtgattctttgggaggggatatttgaaattccaacttccattccccctagcaaaaggaagcagctgctgtttaagggttttatctgagccactttaaagatgaatccatggtattactctggatactagccattccttaggattttaaggtcacattttattcctggatgctttatgtccccacctccacctgagccctcatcctctgttccctactatactcccaacttctactctttgttttatccacctatccctattacctgaccctttgtcttccctgtctcccatccttggggggacatgtagccctgtggtcatggttctgatgacatcatcagggcagcccccctgcccaggtattatggcctgtcagcattccctgtgccctccaaaccttaggcctagaatgcggagctgccaacataacattcacccttttgaacagatggagtcaggcacactaacacagccttctgtcctcaataacacagccattattgccacttgctcagtcgtcaatgtaaaccctcagagtcagctgaactattttaggccaaacatactgtttttgtaaagtatttttcattaataaatctataagacagttctatttaa

SEQ ID NO: 197480 - DNA, 7976 bp, Homo sapiens
  Payload ID: 18950
  Gene Name: ubiquitin specific peptidase 6
  Uniprot ID: P35125
  ENST ID: ENST00000250066
  CDS Start-End: 1700-5920
ctaaaaataccattaagtaatagtattagcttttgtattctgagattcaacagcagcagtcacttccctccactcctatgtgtatcccaggaccaccctgggcggggagggctgaggtcagggaggtctgaagctggtcctgggctccgggggtgacagtgatgaggaactgggtgcacacatgagtggggcagccgggcctggccagagaagcaacacacacgtgcacagacatgtttatccacatacacatgtgcacgcatgtgcacaaacacattgcaggcaggcatgttgacgcctcaggcagcggaggaccctgactctgggccctgctgacccaggcaaggccccattgtgatgcgtgccatgacctcagaatgtcactggtgcttagcacctatccgctctccagactgcgtctgtgttctacggcagttacacacacgcagtggtattcacaagcggttttgtggactcaaaggttttctccctgagaggcataacccaggccagctgattcatcagaatcaggtgagtgtgacctgctctcttccctccaggctgacttggggacagtggctatggtatgggcggtgttggcctctgggcagctacagaggagggtcatccctgagcactcaccgggcgcccgttctacactgcccatgtagacgattttctctttcgtcttcatggtggcttcgtagagtgggtgctgttcccgaatgtacccattcgacaggtgagccgtctggggtcagagaggcagtaactggcctgggaatccagacaagaccctgggttttgctctcagccctgctgtgtgccatgctagacttcaggcctcaaccctgagacctccctgctctagatcccaaatctgcccagatttccgatcccaatggggcagagcctggccctggcagagacactgggatggatccactgtgggtggggaggagggaagggtcctcagaacacacctggggcctaagctgggtcttgatggtcactgtgggacccactggacacacacagtcccttgtctgggagtggcatggggagccttctgcccttgggcagttgtggaaagtgaaggagccctggagagctggctgaggggagactatcttcccttgtgttcaaaggggtccaggcactggggctctccccaagtatttcttattctgtctggcctcgctttccttttgccctgagtattctcaggagggacggtccatctagatgtcctccaggagcaaggacccactgttcttcatcagtgacccaggaaaatgaagccccctcctgtggggacagctcagaatggtggagtccacagtccctccctgagagacatggtttccatgagcacagtggctgctttggagacagtaatcattttcatccccaaaaccaaacacactcctgctcaaatggtgttattgctaaagcagcttcactggttagactgaagggccatggtagcccaagtgatgagcggggtagaatggagcagtcaggagagatcttgttccccgtaggaaactgggcatctctgtggccctgaacatcccaggaggccgatcgtacagagacctctggtgcctgaccgcagttcacatccacatccctggaatagaccatcacaggctcttcacccttggcaggtggacaccattcaacctgccggggcaggatggacatggtagagaatgcagatagtttgcaggcacaggagcggaaggacatacttatgaagtatgacaagggacaccgagctgggctgccagaggacaaggggcctgagcccgttggaatcaacagcagcattgatcgttttggcattttgcatgagacggagctgcctcctgtgactgcacgggaggcgaagaaaattcggcgggagatgacacgaacgagcaagtggatggaaatgctgggagaatgggagacatataagcacagtagcaaactcatagatcgagtgtacaagggaattcccatgaacatccggggcccggtgtggtcagtcctcctgaacattcaggaaatcaagttgaaaaaccccggaagataccagatcatgaaggagaggggcaagaggtcatctgaacacatccaccacatcgacctggacgtgaggacgactctccggaaccatgtcttctttagggatcgatatggagccaagcagagggaactattctacatcctcctggcctattcggagtataacccggaggtgggctactgcagggacctgagccacatcaccgccttgttcctcctttatctgcctgaggaggacgcattctgggcactggtgcagctgctggccagtgagaggcactccctgccaggattccacagcccaaatggtgggacagtccaggggctccaagaccaacaggagcatgtggtacccaagtcacaacccaagaccatgtggcatcaggacaaggaaggtctatgcgggcagtgtgcctcgttaggctgccttctccggaacctgattgacgggatctctctcgggctcaccctgcgcctgtgggacgtgtatttggtggaaggagaacaggtgttgatgccaataaccagcattgctcttaaggttcagcagaagcgcctcatgaagacatccaggtgtggcctgtgggcacgtctgcggaaccaattcttcgatacctgggccatgaacgatgacaccgtgctcaagcatcttagggcctctacgaagaaactaacaaggaagcaaggggacctgccacccccagccaaacgcgagcaagggtccttggcacccaggcctgtgccggcttcacgtggtgggaagaccctctgcaaggggtataggcaggcccctccaggcccaccagcccagttccagcggcccatttgctcagcttccccgccatgggcatctcgtttttccacgccctgtcctggtggggctgtccgggaagacacgtaccctgtgggcactcagggtgtgcccagcctggccctggctcagggaggacctcagggttcctggagattcctggagtggaagtcaatgccccggctcccaacggacctggatatagggggcccttggttcccccattatgattttgaatggagctgctgggtccgtgccatatcccaggaggaccagctggccacctgctggcaggctgaacactgcggagaggttcacaacaaagatatgagttggcctgaggagatgtcttttacagcaaatagtagtaaaatagatagacaaaaggttcccacagaaaagggagccacaggtctaagcaacctgggaaacacatgcttcatgaactcaagcatccagtgcgttagtaacacacagccactgacacagtattttatctcagggagacatctttatgaactcaacaggacaaatcccattggtatgaaggggcatatggctaaatgctatggtgatttagtgcaggaactctggagtggaactcagaagagtgttgccccattaaagcttcggcggaccatagcaaaatatgctcccaagtttgatgggtttcagcaacaagactcccaagaacttctggcttttctcttggatggtcttcatgaagatctcaaccgagtccatgaaaagccatatgtggaactgaaggacagtgatggccgaccagactgggaagtagctgcagaggcctgggacaaccatctaagaagaaatagatcaattattgtggatttgttccatgggcagctaagatctcaagtcaaatgcaagacatgtgggcatataagtgtccgatttgaccctttcaattttttgtctttgccactaccaatggacagttacatggacttagaaataacagtgattaagttagatggtactacccctgtacggtatggactaagactgaatatggatgaaaagtacacaggtttaaaaaaacagctgagggatctctgtggacttaattcagaacaaatcctactagcagaagtacatgattccaacataaagaactttcctcaggataaccaaaaagtacaactctcagtgagcggatttttgtgtgcatttgaaattcctgtcccttcatctccaatttcagcttctagtccaacacaaatagatttctcctcttcaccatctacaaatggaatgttcaccctaactaccaatggggacctacccaaaccaatattcatccccaatggaatgccaaacactgttgtgccatgtggaactgagaagaacttcacaaatggaatggttaatggtcacatgccatctcttcctgacagcccctttacaggttacatcattgcagtccaccgaaaaatgatgaggacagaactgtatttcctgtcacctcaggagaatcgccccagcctctttggaatgccattgattgttccatgcactgtgcatacccggaagaaagacctatatgatgcggtttggattcaagtatcctggttagcaagaccactcccacctcaggaagctagtattcatgcccaggatcgtgataactgtatgggctatcaatatccattcactctacgagttgtgcagaaagatgggaactcctgtgcttggtgcccacagtatagattttgcagaggctgtaaaattgattgtggggaagacagagctttcattggaaatgcctatattgctgtggattggcaccccacagcccttcaccttcgctatcaaacatcccaggaaagggttgtagataagcatgagagtgtggagcagagtcggcgagcgcaagccgagcccatcaacctggacagctgtctccgtgctttcaccagtgaggaagagctaggggaaagtgagatgtactactgttccaagtgtaagacccactgcttagcaacaaagaagctggatctctggaggcttccacccttcctgattattcaccttaagcgatttcaatttgtaaatgatcagtggataaaatcacagaaaattgtcagatttcttcgggaaagttttgatccgagtgcttttttggtaccacgagacccggccctctgccagcataaaccactcacaccccagggggatgagctctccaagcccaggattctggcaagagaggtgaagaaagtggatgcgcagagttcggctggaaaagaggacatgctcctaagcaaaagcccatcctcactcagcgctaacatcagcagcagcccaaaaggttctccttcttcatcaagaaaaagtggaaccagctgtccctccagcaaaaacagcagccctaatagcagcccacggactttggggaggagcaaagggaggctccggctgccccagattggcagcaaaaataagccgtcaagtagtaagaagaacttggatgccagcaaagagaatggggctgggcagatctgtgagctggctgacgccttgagccgagggcatatgcgggggggcagccaaccagagctggtcactcctcaggaccatgaggtagctttggccaatggattcctttatgagcatgaagcatgtggcaatggctgtggcgatggctacagcaatggtcagcttggaaaccacagtgaagaagacagcactgatgaccaaagagaagacactcatattaagcctatttataatctatatgcaatttcatgccattcaggaattctgagtgggggccattacatcacttatgccaaaaacccaaactgcaagtggtactgttataatgacagcagctgtgaggaacttcaccctgatgaaattgacaccgactctgcctacattcttttctatgagcagcaggggatagactacgcacaatttctgccaaagattgatggcaaaaagatggcagacacaagcagtacggatgaagactctgagtctgattacgaaaagtactctatgttacagtaaagctaccactctggctgctagacagcttggtggcgagggagatgactccttgtagctgatacttggcaaaagtgtcactgaaagacaagctaaatgtagttattttatcctgttagaacaaaaattctaattaaaatagttaacttgaagagtagaaacaattgtattttgaagtctcatacaagctgtctgatagagaactttcaggcagatcccaccattagcctgtaaacaaaaggtgtggcaccagccacctgggaccaaataagaattgaattgtgcttgtccagatatgaacaaatatgtagtgagtatagagtttaccaataatcataacaaatattaaagatttccttggagtcagaggaaaaaacaaacaattataatgttgtctagggacgacatgatacgctacctcctttttcctgaagttttattccattatattgacaagatggagaaagcaagatcatgaaggtgtgcaaatgattcttacggcatggacaaggatttttcaatttattttttaaactgtttccataccctttctttttcttgctttttgtttttgccattgtgtttacgtttgagacacaaccagtcattggtggcaggggcatagagtggtcagtctgaaagggaggctctcttaagagctatgtgccttccaaccagagggagacccagtagaaagaaaaacatcctgggaaatccagctaccagggccctcccagtggaggcatcttacatttaggctacttcaagtatcctcagaaatgtattctgcacccccggccccgcccatgctgagggaaggggagcagttgccaatatttgcaccatcttcacatgcacatgttgcaacaagagcttctgggaaggtaagcggcatcggagctagatcacgtttcacaattagtggttattcttttctgtgtttgttttgcactttaaaaaagagagaacacatgcaaatgaacttgcttgtgtgtatttgatggctctaagggctataaattacaaacaaaacacatcccagacattaggagttcataagtatatttaatgaaattggtggttttaggaagtcaactttagttttgctttgtttgcatgtccactggtttttttattttgatatttgtctttttttaaattttacagtagtcattgaaagttatgtttctttgcttacttcattttttccctctaattatttaagattggaacaaaagtataaatattatttatttgaggtagaatttttttcatgtagtttcttaatatatacttgaaggaaatgtttcaccttatttttggtctttgtttattcatttagaccctgcaagttgattctcattgccagattccattaccctttcttcctcataggtagtaattaccaatgtaactaagcatttgtgttctgatatctgaggccagtaactattaatatctagttctcagagcatttggaaaggttatcttaaatggctacctaaattgaaatccttttcagaaaaaatataattgcaagtaggtaggagtggcctaaattgtctaatgtaataaagtcagacaaaatgcacactttatagtttcaagattttcagtaaataaaatctgtccattcctacctggacatgtcccattaaaaagtggaagattttaaataatttctttacagatgttttatttaaacaggtagcacaatctactaatgttgtgtgatttgtgttatactggttgtaattaatttttttaattcatgaactagcggaaaatttattaaattaactattaactacattcaccttgtaaattactgtataaaacttgttgacaatgcactgactttagaaagatgttaatgtacataaatagagtgtaaataaaatagtgttgatgtactgaaatatgaactgtatcaaaagtattggtaattgtatatggggtgtacctgtttatctgttaactattatccaaacaaattaaatactgtggttgcctctatgtgctgtttttcctcatacaagtaaacacagaaagtcaaatt

SEQ ID NO: 197481 - DNA, 8464 bp, Homo sapiens
  Payload ID: 18950
  Gene Name: ubiquitin specific peptidase 6
  Uniprot ID: P35125
  ENST ID: ENST00000574788
  CDS Start-End: 2231-6451
gccgccgtctcgtgtggtgtctgaggggcgtctacctggagtcactgagccgacgaaagggaaaaggccagtgcctgtccgggaagagctcagcctagtggggcgggcgacaagttacagttgctgccttacgatggccgtggcccgtggaggcactagaccctcaccaggggtctgtcaggaaaggcgggcagatacgtgaggcctgaacaggaaggaactgggagacccaagactgtaccgccaagaccgctttcgagtcgggccgaccggaatttgaattcgtttcttcacttactagttgatttttttccttgattccttcgtgggactcaagacaggggtgccctgtttactcagcccactgtgctcaacctcttgcaggagtgtgcaggaaatgaaggccctttgaggtcaggtggatgaggatgtcagtgtgaagatggacactgtgcctggagtgaacctgagctggatcctgaatgagatgcatgaccaggacaagaaattggtggagaagagctacaaggatgccaagggctgtttcttcagcatgagagaggggctgaactgcgaggtggccaccaacacagaggccctgcagagcggcaggatagagatatggagctctacatctctgtgcagaacctgagccatcccagctcagcaaggtagggcctctgtcccctccccaccctgtacctatcaccccagggtgagcccagccttatagacccctgcttggaggtgtgttacgggacccaactggcccagctgcaggggctcatcagaagcatggagcagcagctgtgcgagctctgctgcgacgcggagcaccaggaccatgagcaccaggtccttctggacgtgaagacacggctggagcaggagatcgccacctacagccgcttgctagaggttgaggacgctcaagtcacagggagaagacgtccacccacacatcaggagacaggcctggaacagagccttcctgcacagcctcagaagggacccaccctggtgacaccttgatcttggactgacactcatgacctccagtactgtgagacagtaacattctgttgttgaaggtgcccagtctgtggtactgtaaaacagccctgggaaactaacgcagcctgttagcccacagatggtgaagggatggaatgctccacggagctccaggcttactatctacagcccccaaagtgtgctgcgggacccttgggtgggtgtaggtatgcaaggtaattttgggtggttcaaggtgaataatttcaattgacataataatgtatttatcttgctgggtaaatgagggatacccaactgttaggaaccaggcaacacagcaggaggtgagcagccagccagtgagcaaagcttcatctgtagaaacagccacttcccatccctcgcattaccgcatgagctctgcctcctgtcagatgagcggtgccgttagattctcacagaagcatgaaccctactgtgaactgcgcatgccagggatctagattgcgtgctccttatgagaacctaatgcctgatgatctgtgactgtctcatcactgccagatggaaccacgtagttgcaggaaaacaagttcagggctcccactgattctacattatggctggagtgcaatggcgcaatctcggctctctgcaacttccgcctcctgggttcaagcaattctcctgcctcagcctcccgagtagctgggactacaggcatgtgccaccatgcctggggctgtcattgggacagtctgagatggggagtcgggggagacaatggatgaatggatggatgaatggacagcagtccagggagatgtccctgtgtgtcctgaactgggcccttcctccagtgagaagccttcctgagctgacttggggacagtggctatggtatgggcggtgttggcctctgggcagctacagaggagggtcatccctgagcactcaccgggcgcccgttctacactgcccatgtagacgattttctctttcgtcttcatggtggcttcgtagagtgggtgctgttcccgaatgtacccattcgacaggaaactgggcatctctgtggccctgaacatcccaggaggccgatcgtacagagacctctggtgcctgaccgcagttcacatccacatccctggaatagaccatcacaggctcttcacccttggcaggtggacaccattcaacctgccggggcaggatggacatggtagagaatgcagatagtttgcaggcacaggagcggaaggacatacttatgaagtatgacaagggacaccgagctgggctgccagaggacaaggggcctgagcccgttggaatcaacagcagcattgatcgttttggcattttgcatgagacggagctgcctcctgtgactgcacgggaggcgaagaaaattcggcgggagatgacacgaacgagcaagtggatggaaatgctgggagaatgggagacatataagcacagtagcaaactcatagatcgagtgtacaagggaattcccatgaacatccggggcccggtgtggtcagtcctcctgaacattcaggaaatcaagttgaaaaaccccggaagataccagatcatgaaggagaggggcaagaggtcatctgaacacatccaccacatcgacctggacgtgaggacgactctccggaaccatgtcttctttagggatcgatatggagccaagcagagggaactattctacatcctcctggcctattcggagtataacccggaggtgggctactgcagggacctgagccacatcaccgccttgttcctcctttatctgcctgaggaggacgcattctgggcactggtgcagctgctggccagtgagaggcactccctgccaggattccacagcccaaatggtgggacagtccaggggctccaagaccaacaggagcatgtggtacccaagtcacaacccaagaccatgtggcatcaggacaaggaaggtctatgcgggcagtgtgcctcgttaggctgccttctccggaacctgattgacgggatctctctcgggctcaccctgcgcctgtgggacgtgtatttggtggaaggagaacaggtgttgatgccaataaccagcattgctcttaaggttcagcagaagcgcctcatgaagacatccaggtgtggcctgtgggcacgtctgcggaaccaattcttcgatacctgggccatgaacgatgacaccgtgctcaagcatcttagggcctctacgaagaaactaacaaggaagcaaggggacctgccacccccagccaaacgcgagcaagggtccttggcacccaggcctgtgccggcttcacgtggtgggaagaccctctgcaaggggtataggcaggcccctccaggcccaccagcccagttccagcggcccatttgctcagcttccccgccatgggcatctcgtttttccacgccctgtcctggtggggctgtccgggaagacacgtaccctgtgggcactcagggtgtgcccagcctggccctggctcagggaggacctcagggttcctggagattcctggagtggaagtcaatgccccggctcccaacggacctggatatagggggcccttggttcccccattatgattttgaatggagctgctgggtccgtgccatatcccaggaggaccagctggccacctgctggcaggctgaacactgcggagaggttcacaacaaagatatgagttggcctgaggagatgtcttttacagcaaatagtagtaaaatagatagacaaaaggttcccacagaaaagggagccacaggtctaagcaacctgggaaacacatgcttcatgaactcaagcatccagtgcgttagtaacacacagccactgacacagtattttatctcagggagacatctttatgaactcaacaggacaaatcccattggtatgaaggggcatatggctaaatgctatggtgatttagtgcaggaactctggagtggaactcagaagagtgttgccccattaaagcttcggcggaccatagcaaaatatgctcccaagtttgatgggtttcagcaacaagactcccaagaacttctggcttttctcttggatggtcttcatgaagatctcaaccgagtccatgaaaagccatatgtggaactgaaggacagtgatggccgaccagactgggaagtagctgcagaggcctgggacaaccatctaagaagaaatagatcaattattgtggatttgttccatgggcagctaagatctcaagtcaaatgcaagacatgtgggcatataagtgtccgatttgaccctttcaattttttgtctttgccactaccaatggacagttacatggacttagaaataacagtgattaagttagatggtactacccctgtacggtatggactaagactgaatatggatgaaaagtacacaggtttaaaaaaacagctgagggatctctgtggacttaattcagaacaaatcctactagcagaagtacatgattccaacataaagaactttcctcaggataaccaaaaagtacaactctcagtgagcggatttttgtgtgcatttgaaattcctgtcccttcatctccaatttcagcttctagtccaacacaaatagatttctcctcttcaccatctacaaatggaatgttcaccctaactaccaatggggacctacccaaaccaatattcatccccaatggaatgccaaacactgttgtgccatgtggaactgagaagaacttcacaaatggaatggttaatggtcacatgccatctcttcctgacagcccctttacaggttacatcattgcagtccaccgaaaaatgatgaggacagaactgtatttcctgtcacctcaggagaatcgccccagcctctttggaatgccattgattgttccatgcactgtgcatacccggaagaaagacctatatgatgcggtttggattcaagtatcctggttagcaagaccactcccacctcaggaagctagtattcatgcccaggatcgtgataactgtatgggctatcaatatccattcactctacgagttgtgcagaaagatgggaactcctgtgcttggtgcccacagtatagattttgcagaggctgtaaaattgattgtggggaagacagagctttcattggaaatgcctatattgctgtggattggcaccccacagcccttcaccttcgctatcaaacatcccaggaaagggttgtagataagcatgagagtgtggagcagagtcggcgagcgcaagccgagcccatcaacctggacagctgtctccgtgctttcaccagtgaggaagagctaggggaaagtgagatgtactactgttccaagtgtaagacccactgcttagcaacaaagaagctggatctctggaggcttccacccttcctgattattcaccttaagcgatttcaatttgtaaatgatcagtggataaaatcacagaaaattgtcagatttcttcgggaaagttttgatccgagtgcttttttggtaccacgagacccggccctctgccagcataaaccactcacaccccagggggatgagctctccaagcccaggattctggcaagagaggtgaagaaagtggatgcgcagagttcggctggaaaagaggacatgctcctaagcaaaagcccatcctcactcagcgctaacatcagcagcagcccaaaaggttctccttcttcatcaagaaaaagtggaaccagctgtccctccagcaaaaacagcagccctaatagcagcccacggactttggggaggagcaaagggaggctccggctgccccagattggcagcaaaaataagccgtcaagtagtaagaagaacttggatgccagcaaagagaatggggctgggcagatctgtgagctggctgacgccttgagccgagggcatatgcgggggggcagccaaccagagctggtcactcctcaggaccatgaggtagctttggccaatggattcctttatgagcatgaagcatgtggcaatggctgtggcgatggctacagcaatggtcagcttggaaaccacagtgaagaagacagcactgatgaccaaagagaagacactcatattaagcctatttataatctatatgcaatttcatgccattcaggaattctgagtgggggccattacatcacttatgccaaaaacccaaactgcaagtggtactgttataatgacagcagctgtgaggaacttcaccctgatgaaattgacaccgactctgcctacattcttttctatgagcagcaggggatagactacgcacaatttctgccaaagattgatggcaaaaagatggcagacacaagcagtacggatgaagactctgagtctgattacgaaaagtactctatgttacagtaaagctaccactctggctgctagacagcttggtggcgagggagatgactccttgtagctgatacttggcaaaagtgtcactgaaagacaagctaaatgtagttattttatcctgttagaacaaaaattctaattaaaatagttaacttgaagagtagaaacaattgtattttgaagtctcatacaagctgtctgatagagaactttcaggcagatcccaccattagcctgtaaacaaaaggtgtggcaccagccacctgggaccaaataagaattgaattgtgcttgtccagatatgaacaaatatgtagtgagtatagagtttaccaataatcataacaaatattaaagatttccttggagtcagaggaaaaaacaaacaattataatgttgtctagggacgacatgatacgctacctcctttttcctgaagttttattccattatattgacaagatggagaaagcaagatcatgaaggtgtgcaaatgattcttacggcatggacaaggatttttcaatttattttttaaactgtttccataccctttctttttcttgctttttgtttttgccattgtgtttacgtttgagacacaaccagtcattggtggcaggggcatagagtggtcagtctgaaagggaggctctcttaagagctatgtgccttccaaccagagggagacccagtagaaagaaaaacatcctgggaaatccagctaccagggccctcccagtggaggcatcttacatttaggctacttcaagtatcctcagaaatgtattctgcacccccggccccgcccatgctgagggaaggggagcagttgccaatatttgcaccatcttcacatgcacatgttgcaacaagagcttctgggaaggtaagcggcatcggagctagatcacgtttcacaattagtggttattcttttctgtgtttgttttgcactttaaaaaagagagaacacatgcaaatgaacttgcttgtgtgtatttgatggctctaagggctataaattacaaacaaaacacatcccagacattaggagttcataagtatatttaatgaaattggtggttttaggaagtcaactttagttttgctttgtttgcatgtccactggtttttttattttgatatttgtctttttttaaattttacagtagtcattgaaagttatgtttctttgcttacttcattttttccctctaattatttaagattggaacaaaagtataaatattatttatttgaggtagaatttttttcatgtagtttcttaatatatacttgaaggaaatgtttcaccttatttttggtctttgtttattcatttagaccctgcaagttgattctcattgccagattccattaccctttcttcctcataggtagtaattaccaatgtaactaagcatttgtgttctgatatctgaggccagtaactattaatatctagttctcagagcatttggaaaggttatcttaaatggctacctaaattgaaatccttttcagaaaaaatataattgcaagtaggtaggagtggcctaaattgtctaatgtaataaagtcagacaaaatgcacactttatagtttcaagattttcagtaaataaaatctgtccattcctacctggacatgtcccattaaaaagtggaagattttaaataatttctttacagatgttttatttaaacaggtagcacaatctactaatgttgtgtgatttgtgttatactggttgtaattaatttttttaattcatgaactagcggaaaatttattaaattaactattaactacattcaccttgtaaattactgtataaaacttgttgacaatgcactgactttagaaagatgttaatgtacataaatagagtgtaaataaaatagtgttgatgtactgaaatatgaactgtatcaaaagtattggtaattgtatatggggtgtacctgtttatctgttaactattatccaaacaaattaaatactgtggttgcctcta

SEQ ID NO: 197482 - DNA, 7862 bp, Homo sapiens
  Payload ID: 18950
  Gene Name: ubiquitin specific peptidase 6
  Uniprot ID: P35125
  ENST ID: ENST00000572949
  CDS Start-End: 1700-4060
ctaaaaataccattaagtaatagtattagcttttgtattctgagattcaacagcagcagtcacttccctccactcctatgtgtatcccaggaccaccctgggcggggagggctgaggtcagggaggtctgaagctggtcctgggctccgggggtgacagtgatgaggaactgggtgcacacatgagtggggcagccgggcctggccagagaagcaacacacacgtgcacagacatgtttatccacatacacatgtgcacgcatgtgcacaaacacattgcaggcaggcatgttgacgcctcaggcagcggaggaccctgactctgggccctgctgacccaggcaaggccccattgtgatgcgtgccatgacctcagaatgtcactggtgcttagcacctatccgctctccagactgcgtctgtgttctacggcagttacacacacgcagtggtattcacaagcggttttgtggactcaaaggttttctccctgagaggcataacccaggccagctgattcatcagaatcaggtgagtgtgacctgctctcttccctccaggctgacttggggacagtggctatggtatgggcggtgttggcctctgggcagctacagaggagggtcatccctgagcactcaccgggcgcccgttctacactgcccatgtagacgattttctctttcgtcttcatggtggcttcgtagagtgggtgctgttcccgaatgtacccattcgacaggtgagccgtctggggtcagagaggcagtaactggcctgggaatccagacaagaccctgggttttgctctcagccctgctgtgtgccatgctagacttcaggcctcaaccctgagacctccctgctctagatcccaaatctgcccagatttccgatcccaatggggcagagcctggccctggcagagacactgggatggatccactgtgggtggggaggagggaagggtcctcagaacacacctggggcctaagctgggtcttgatggtcactgtgggacccactggacacacacagtcccttgtctgggagtggcatggggagccttctgcccttgggcagttgtggaaagtgaaggagccctggagagctggctgaggggagactatcttcccttgtgttcaaaggggtccaggcactggggctctccccaagtatttcttattctgtctggcctcgctttccttttgccctgagtattctcaggagggacggtccatctagatgtcctccaggagcaaggacccactgttcttcatcagtgacccaggaaaatgaagccccctcctgtggggacagctcagaatggtggagtccacagtccctccctgagagacatggtttccatgagcacagtggctgctttggagacagtaatcattttcatccccaaaaccaaacacactcctgctcaaatggtgttattgctaaagcagcttcactggttagactgaagggccatggtagcccaagtgatgagcggggtagaatggagcagtcaggagagatcttgttccccgtaggaaactgggcatctctgtggccctgaacatcccaggaggccgatcgtacagagacctctggtgcctgaccgcagttcacatccacatccctggaatagaccatcacaggctcttcacccttggcaggtggacaccattcaacctgccggggcaggatggacatggtagagaatgcagatagtttgcaggcacaggagcggaaggacatacttatgaagtatgacaagggacaccgagctgggctgccagaggacaaggggcctgagcccgttggaatcaacagcagcattgatcgttttggcattttgcatgagacggagctgcctcctgtgactgcacgggaggcgaagaaaattcggcgggagatgacacgaacgagcaagtggatggaaatgctgggagaatgggagacatataagcacagtagcaaactcatagatcgagtgtacaagggaattcccatgaacatccggggcccggtgtggtcagtcctcctgaacattcaggaaatcaagttgaaaaaccccggaagataccagatcatgaaggagaggggcaagaggtcatctgaacacatccaccacatcgacctggacgtgaggacgactctccggaaccatgtcttctttagggatcgatatggagccaagcagagggaactattctacatcctcctggcctattcggagtataacccggaggtgggctactgcagggacctgagccacatcaccgccttgttcctcctttatctgcctgaggaggacgcattctgggcactggtgcagctgctggccagtgagaggcactccctgccaggattccacagcccaaatggtgggacagtccaggggctccaagaccaacaggagcatgtggtacccaagtcacaacccaagaccatgtggcatcaggacaaggaaggtctatgcgggcagtgtgcctcgttaggctgccttctccggaacctgattgacgggatctctctcgggctcaccctgcgcctgtgggacgtgtatttggtggaaggagaacaggtgttgatgccaataaccagcattgctcttaaggttcagcagaagcgcctcatgaagacatccaggtgtggcctgtgggcacgtctgcggaaccaattcttcgatacctgggccatgaacgatgacaccgtgctcaagcatcttagggcctctacgaagaaactaacaaggaagcaaggggacctgccacccccagccaaacgcgagcaagggtccttggcacccaggcctgtgccggcttcacgtggtgggaagaccctctgcaaggggtataggcaggcccctccaggcccaccagcccagttccagcggcccatttgctcagcttccccgccatgggcatctcgtttttccacgccctgtcctggtggggctgtccgggaagacacgtaccctgtgggcactcagggtgtgcccagcctggccctggctcagggaggacctcagggttcctggagattcctggagtggaagtcaatgccccggctcccaacggacctggatatagggggcccttggttcccccattatgattttgaatggagctgctgggtccgtgccatatcccaggaggaccagctggccacctgctggcaggctgaacactgcggagaggttcacaacaaagatatgagttggcctgaggagatgtcttttacagcaaatagtagtaaaatagatagacaaaaggttcccacagaaaagggagccacaggtctaagcaacctgggaaacacatgcttcatgaactcaagcatccagtgcgttagtaacacacagccactgacacagtattttatctcagggagacatctttatgaactcaacaggacaaatcccattggtatgaaggggcatatggctaaatgctatggtgatttagtgcaggaactctggagtggaactcagaagagtgttgccccattaaagcttcggcggaccatagcaaaatatgctcccaagtttgatgggtttcagcaacaagactcccaagaacttctggcttttctcttggatggtcttcatgaagatctcaaccgagtccatgaaaagccatatgtggaactgaaggacagtgatggccgaccagactgggaagtagctgcagaggcctgggacaaccatctaagaagaaatagatcaattattgtggatttgttccatgggcagctaagatctcaagtcaaatgcaagacatgtgggcatataagtgtccgatttgaccctttcaattttttgtctttgccactaccaatggacagttacatggacttagaaataacagtgattaagttagatggtactacccctgtacggtatggactaagactgaatatggatgaaaagtacacaggtttaaaaaaacagctgagggatctctgtggacttaattcagaacaaatcctactagcagaagtacatgattccaacataaagatttctcctcttcaccatctacaaatggaatgttcaccctaactaccaatggggacctacccaaaccaatattcatccccaatggaatgccaaacactgttgtgccatgtggaactgagaagaacttcacaaatggaatggttaatggtcacatgccatctcttcctgacagcccctttacaggttacatcattgcagtccaccgaaaaatgatgaggacagaactgtatttcctgtcacctcaggagaatcgccccagcctctttggaatgccattgattgttccatgcactgtgcatacccggaagaaagacctatatgatgcggtttggattcaagtatcctggttagcaagaccactcccacctcaggaagctagtattcatgcccaggatcgtgataactgtatgggctatcaatatccattcactctacgagttgtgcagaaagatgggaactcctgtgcttggtgcccacagtatagattttgcagaggctgtaaaattgattgtggggaagacagagctttcattggaaatgcctatattgctgtggattggcaccccacagcccttcaccttcgctatcaaacatcccaggaaagggttgtagataagcatgagagtgtggagcagagtcggcgagcgcaagccgagcccatcaacctggacagctgtctccgtgctttcaccagtgaggaagagctaggggaaagtgagatgtactactgttccaagtgtaagacccactgcttagcaacaaagaagctggatctctggaggcttccacccttcctgattattcaccttaagcgatttcaatttgtaaatgatcagtggataaaatcacagaaaattgtcagatttcttcgggaaagttttgatccgagtgcttttttggtaccacgagacccggccctctgccagcataaaccactcacaccccagggggatgagctctccaagcccaggattctggcaagagaggtgaagaaagtggatgcgcagagttcggctggaaaagaggacatgctcctaagcaaaagcccatcctcactcagcgctaacatcagcagcagcccaaaaggttctccttcttcatcaagaaaaagtggaaccagctgtccctccagcaaaaacagcagccctaatagcagcccacggactttggggaggagcaaagggaggctccggctgccccagattggcagcaaaaataagccgtcaagtagtaagaagaacttggatgccagcaaagagaatggggctgggcagatctgtgagctggctgacgccttgagccgagggcatatgcgggggggcagccaaccagagctggtcactcctcaggaccatgaggtagctttggccaatggattcctttatgagcatgaagcatgtggcaatggctgtggcgatggctacagcaatggtcagcttggaaaccacagtgaagaagacagcactgatgaccaaagagaagacactcatattaagcctatttataatctatatgcaatttcatgccattcaggaattctgagtgggggccattacatcacttatgccaaaaacccaaactgcaagtggtactgttataatgacagcagctgtgaggaacttcaccctgatgaaattgacaccgactctgcctacattcttttctatgagcagcaggggatagactacgcacaatttctgccaaagattgatggcaaaaagatggcagacacaagcagtacggatgaagactctgagtctgattacgaaaagtactctatgttacagtaaagctaccactctggctgctagacagcttggtggcgagggagatgactccttgtagctgatacttggcaaaagtgtcactgaaagacaagctaaatgtagttattttatcctgttagaacaaaaattctaattaaaatagttaacttgaagagtagaaacaattgtattttgaagtctcatacaagctgtctgatagagaactttcaggcagatcccaccattagcctgtaaacaaaaggtgtggcaccagccacctgggaccaaataagaattgaattgtgcttgtccagatatgaacaaatatgtagtgagtatagagtttaccaataatcataacaaatattaaagatttccttggagtcagaggaaaaaacaaacaattataatgttgtctagggacgacatgatacgctacctcctttttcctgaagttttattccattatattgacaagatggagaaagcaagatcatgaaggtgtgcaaatgattcttacggcatggacaaggatttttcaatttattttttaaactgtttccataccctttctttttcttgctttttgtttttgccattgtgtttacgtttgagacacaaccagtcattggtggcaggggcatagagtggtcagtctgaaagggaggctctcttaagagctatgtgccttccaaccagagggagacccagtagaaagaaaaacatcctgggaaatccagctaccagggccctcccagtggaggcatcttacatttaggctacttcaagtatcctcagaaatgtattctgcacccccggccccgcccatgctgagggaaggggagcagttgccaatatttgcaccatcttcacatgcacatgttgcaacaagagcttctgggaaggtaagcggcatcggagctagatcacgtttcacaattagtggttattcttttctgtgtttgttttgcactttaaaaaagagagaacacatgcaaatgaacttgcttgtgtgtatttgatggctctaagggctataaattacaaacaaaacacatcccagacattaggagttcataagtatatttaatgaaattggtggttttaggaagtcaactttagttttgctttgtttgcatgtccactggtttttttattttgatatttgtctttttttaaattttacagtagtcattgaaagttatgtttctttgcttacttcattttttccctctaattatttaagattggaacaaaagtataaatattatttatttgaggtagaatttttttcatgtagtttcttaatatatacttgaaggaaatgtttcaccttatttttggtctttgtttattcatttagaccctgcaagttgattctcattgccagattccattaccctttcttcctcataggtagtaattaccaatgtaactaagcatttgtgttctgatatctgaggccagtaactattaatatctagttctcagagcatttggaaaggttatcttaaatggctacctaaattgaaatccttttcagaaaaaatataattgcaagtaggtaggagtggcctaaattgtctaatgtaataaagtcagacaaaatgcacactttatagtttcaagattttcagtaaataaaatctgtccattcctacctggacatgtcccattaaaaagtggaagattttaaataatttctttacagatgttttatttaaacaggtagcacaatctactaatgttgtgtgatttgtgttatactggttgtaattaatttttttaattcatgaactagcggaaaatttattaaattaactattaactacattcaccttgtaaattactgtataaaacttgttgacaatgcactgactttagaaagatgttaatgtacataaatagagtgtaaataaaatagtgttgatgtactgaaatatgaactgtatcaaaagtattggtaattgtatatggggtgtacctgtttatctgttaactattatccaaacaaattaaatactgtggttgcctctatgtgctgtttttcctcatacaagtaaacacagaaagtcaaa

SEQ ID NO: 197483 - DNA, 8185 bp, Homo sapiens
  Payload ID: 18950
  Gene Name: ubiquitin specific peptidase 6
  ENST ID: ENST00000575709
  CDS Start-End: 1700-2830
ctaaaaataccattaagtaatagtattagcttttgtattctgagattcaacagcagcagtcacttccctccactcctatgtgtatcccaggaccaccctgggcggggagggctgaggtcagggaggtctgaagctggtcctgggctccgggggtgacagtgatgaggaactgggtgcacacatgagtggggcagccgggcctggccagagaagcaacacacacgtgcacagacatgtttatccacatacacatgtgcacgcatgtgcacaaacacattgcaggcaggcatgttgacgcctcaggcagcggaggaccctgactctgggccctgctgacccaggcaaggccccattgtgatgcgtgccatgacctcagaatgtcactggtgcttagcacctatccgctctccagactgcgtctgtgttctacggcagttacacacacgcagtggtattcacaagcggttttgtggactcaaaggttttctccctgagaggcataacccaggccagctgattcatcagaatcaggtgagtgtgacctgctctcttccctccaggctgacttggggacagtggctatggtatgggcggtgttggcctctgggcagctacagaggagggtcatccctgagcactcaccgggcgcccgttctacactgcccatgtagacgattttctctttcgtcttcatggtggcttcgtagagtgggtgctgttcccgaatgtacccattcgacaggtgagccgtctggggtcagagaggcagtaactggcctgggaatccagacaagaccctgggttttgctctcagccctgctgtgtgccatgctagacttcaggcctcaaccctgagacctccctgctctagatcccaaatctgcccagatttccgatcccaatggggcagagcctggccctggcagagacactgggatggatccactgtgggtggggaggagggaagggtcctcagaacacacctggggcctaagctgggtcttgatggtcactgtgggacccactggacacacacagtcccttgtctgggagtggcatggggagccttctgcccttgggcagttgtggaaagtgaaggagccctggagagctggctgaggggagactatcttcccttgtgttcaaaggggtccaggcactggggctctccccaagtatttcttattctgtctggcctcgctttccttttgccctgagtattctcaggagggacggtccatctagatgtcctccaggagcaaggacccactgttcttcatcagtgacccaggaaaatgaagccccctcctgtggggacagctcagaatggtggagtccacagtccctccctgagagacatggtttccatgagcacagtggctgctttggagacagtaatcattttcatccccaaaaccaaacacactcctgctcaaatggtgttattgctaaagcagcttcactggttagactgaagggccatggtagcccaagtgatgagcggggtagaatggagcagtcaggagagatcttgttccccgtaggaaactgggcatctctgtggccctgaacatcccaggaggccgatcgtacagagacctctggtgcctgaccgcagttcacatccacatccctggaatagaccatcacaggctcttcacccttggcaggtggacaccattcaacctgccggggcaggatggacatggtagagaatgcagatagtttgcaggcacaggagcggaaggacatacttatgaagtatgacaagggacaccgagctgggctgccagaggacaaggggcctgagcccgttggaatcaacagcagcattgatcgttttggcattttgcatgagacggagctgcctcctgtgactgcacgggaggcgaagaaaattcggcgggagatgacacgaacgagcaagtggatggaaatgctgggagaatgggagacatataagcacagtagcaaactcatagatcgagtgtacaagggaattcccatgaacatccggggcccggtgtggtcagtcctcctgaacattcaggaaatcaagttgaaaaaccccggaagataccagatcatgaaggagaggggcaagaggtcatctgaacacatccaccacatcgacctggacgtgaggacgactctccggaaccatgtcttctttagggatcgatatggagccaagcagagggaactattctacatcctcctggcctattcggagtataacccggaggtgggctactgcagggacctgagccacatcaccgccttgttcctcctttatctgcctgaggaggacgcattctgggcactggtgcagctgctggccagtgagaggcactccctgccaggattccacagcccaaatggtgggacagtccaggggctccaagaccaacaggagcatgtggtacccaagtcacaacccaagaccatgtggcatcaggacaaggaaggtctatgcgggcagtgtgcctcgttaggctgccttctccggaacctgattgacgggatctctctcgggctcaccctgcgcctgtgggacgtgtatttggtggaaggagaacaggtgttgatgccaataaccagcattgctcttaaggttcagcagaagcgcctcatgaagacatccaggtgtggcctgtgggcacgtctgcggaaccaattcttcgatacctgggccatgaacgatgacaccgtgctcaagcatcttagggcctctacgaagaaactaacaaggaagcaaggggacctgccacccccaggcccaacagccctgggacgaaggtgtgtggcaggaagcccccagccagtctgaaccctgggggcagtcccaggagccacccaccatgccccaacggcttccccatgccaggcagcacacacccctccctctgggatcagcagactacaggcgtgtcgtcagtgtcagaccacaggggccacacagagaccccaaggactccagagatgcagccaaacgcgagcaagggtccttggcacccaggcctgtgccggcttcacgtggtgggaagaccctctgcaaggggtataggcaggcccctccaggcccaccagcccagttccagcggcccatttgctcagcttccccgccatgggcatctcgtttttccacgccctgtcctggtggggctgtccgggaagacacgtaccctgtgggcactcagggtgtgcccagcctggccctggctcagggaggacctcagggttcctggagattcctggagtggaagtcaatgccccggctcccaacggacctggatatagggggcccttggttcccccattatgattttgaatggagctgctgggtccgtgccatatcccaggaggaccagctggccacctgctggcaggctgaacactgcggagaggttcacaacaaagatatgagttggcctgaggagatgtcttttacagcaaatagtagtaaaatagatagacaaaaggttcccacagaaaagggagccacaggtctaagcaacctgggaaacacatgcttcatgaactcaagcatccagtgcgttagtaacacacagccactgacacagtattttatctcagggagacatctttatgaactcaacaggacaaatcccattggtatgaaggggcatatggctaaatgctatggtgatttagtgcaggaactctggagtggaactcagaagagtgttgccccattaaagcttcggcggaccatagcaaaatatgctcccaagtttgatgggtttcagcaacaagactcccaagaacttctggcttttctcttggatggtcttcatgaagatctcaaccgagtccatgaaaagccatatgtggaactgaaggacagtgatggccgaccagactgggaagtagctgcagaggcctgggacaaccatctaagaagaaatagatcaattattgtggatttgttccatgggcagctaagatctcaagtcaaatgcaagacatgtgggcatataagtgtccgatttgaccctttcaattttttgtctttgccactaccaatggacagttacatggacttagaaataacagtgattaagttagatggtactacccctgtacggtatggactaagactgaatatggatgaaaagtacacaggtttaaaaaaacagctgagggatctctgtggacttaattcagaacaaatcctactagcagaagtacatgattccaacataaagaactttcctcaggataaccaaaaagtacaactctcagtgagcggatttttgtgtgcatttgaaattcctgtcccttcatctccaatttcagcttctagtccaacacaaatagatttctcctcttcaccatctacaaatggaatgttcaccctaactaccaatggggacctacccaaaccaatattcatccccaatggaatgccaaacactgttgtgccatgtggaactgagaagaacttcacaaatggaatggttaatggtcacatgccatctcttcctgacagcccctttacaggttacatcattgcagtccaccgaaaaatgatgaggacagaactgtatttcctgtcacctcaggagaatcgccccagcctctttggaatgccattgattgttccatgcactgtgcatacccggaagaaagacctatatgatgcggtttggattcaagtatcctggttagcaagaccactcccacctcaggaagctagtattcatgcccaggatcgtgataactgtatgggctatcaatatccattcactctacgagttgtgcagaaagatgggaactcctgtgcttggtgcccacagtatagattttgcagaggctgtaaaattgattgtggggaagacagagctttcattggaaatgcctatattgctgtggattggcaccccacagcccttcaccttcgctatcaaacatcccaggaaagggttgtagataagcatgagagtgtggagcagagtcggcgagcgcaagccgagcccatcaacctggacagctgtctccgtgctttcaccagtgaggaagagctaggggaaagtgagatgtactactgttccaagtgtaagacccactgcttagcaacaaagaagctggatctctggaggcttccacccttcctgattattcaccttaagcgatttcaatttgtaaatgatcagtggataaaatcacagaaaattgtcagatttcttcgggaaagttttgatccgagtgcttttttggtaccacgagacccggccctctgccagcataaaccactcacaccccagggggatgagctctccaagcccaggattctggcaagagaggtgaagaaagtggatgcgcagagttcggctggaaaagaggacatgctcctaagcaaaagcccatcctcactcagcgctaacatcagcagcagcccaaaaggttctccttcttcatcaagaaaaagtggaaccagctgtccctccagcaaaaacagcagccctaatagcagcccacggactttggggaggagcaaagggaggctccggctgccccagattggcagcaaaaataagccgtcaagtagtaagaagaacttggatgccagcaaagagaatggggctgggcagatctgtgagctggctgacgccttgagccgagggcatatgcgggggggcagccaaccagagctggtcactcctcaggaccatgaggtagctttggccaatggattcctttatgagcatgaagcatgtggcaatggctgtggcgatggctacagcaatggtcagcttggaaaccacagtgaagaagacagcactgatgaccaaagagaagacactcatattaagcctatttataatctatatgcaatttcatgccattcaggaattctgagtgggggccattacatcacttatgccaaaaacccaaactgcaagtggtactgttataatgacagcagctgtgaggaacttcaccctgatgaaattgacaccgactctgcctacattcttttctatgagcagcaggggatagactacgcacaatttctgccaaagattgatggcaaaaagatggcagacacaagcagtacggatgaagactctgagtctgattacgaaaagtactctatgttacagtaaagctaccactctggctgctagacagcttggtggcgagggagatgactccttgtagctgatacttggcaaaagtgtcactgaaagacaagctaaatgtagttattttatcctgttagaacaaaaattctaattaaaatagttaacttgaagagtagaaacaattgtattttgaagtctcatacaagctgtctgatagagaactttcaggcagatcccaccattagcctgtaaacaaaaggtgtggcaccagccacctgggaccaaataagaattgaattgtgcttgtccagatatgaacaaatatgtagtgagtatagagtttaccaataatcataacaaatattaaagatttccttggagtcagaggaaaaaacaaacaattataatgttgtctagggacgacatgatacgctacctcctttttcctgaagttttattccattatattgacaagatggagaaagcaagatcatgaaggtgtgcaaatgattcttacggcatggacaaggatttttcaatttattttttaaactgtttccataccctttctttttcttgctttttgtttttgccattgtgtttacgtttgagacacaaccagtcattggtggcaggggcatagagtggtcagtctgaaagggaggctctcttaagagctatgtgccttccaaccagagggagacccagtagaaagaaaaacatcctgggaaatccagctaccagggccctcccagtggaggcatcttacatttaggctacttcaagtatcctcagaaatgtattctgcacccccggccccgcccatgctgagggaaggggagcagttgccaatatttgcaccatcttcacatgcacatgttgcaacaagagcttctgggaaggtaagcggcatcggagctagatcacgtttcacaattagtggttattcttttctgtgtttgttttgcactttaaaaaagagagaacacatgcaaatgaacttgcttgtgtgtatttgatggctctaagggctataaattacaaacaaaacacatcccagacattaggagttcataagtatatttaatgaaattggtggttttaggaagtcaactttagttttgctttgtttgcatgtccactggtttttttattttgatatttgtctttttttaaattttacagtagtcattgaaagttatgtttctttgcttacttcattttttccctctaattatttaagattggaacaaaagtataaatattatttatttgaggtagaatttttttcatgtagtttcttaatatatacttgaaggaaatgtttcaccttatttttggtctttgtttattcatttagaccctgcaagttgattctcattgccagattccattaccctttcttcctcataggtagtaattaccaatgtaactaagcatttgtgttctgatatctgaggccagtaactattaatatctagttctcagagcatttggaaaggttatcttaaatggctacctaaattgaaatccttttcagaaaaaatataattgcaagtaggtaggagtggcctaaattgtctaatgtaataaagtcagacaaaatgcacactttatagtttcaagattttcagtaaataaaatctgtccattcctacctggacatgtcccattaaaaagtggaagattttaaataatttctttacagatgttttatttaaacaggtagcacaatctactaatgttgtgtgatttgtgttatactggttgtaattaatttttttaattcatgaactagcggaaaatttattaaattaactattaactacattcaccttgtaaattactgtataaaacttgttgacaatgcactgactttagaaagatgttaatgtacataaatagagtgtaaataaaatagtgttgatgtactgaaatatgaactgtatcaaaagtattggtaattgtatatggggtgtacctgtttatctgttaactattatccaaacaaattaaatactgtggttgcctctatgtgctgtttttcctcatacaagtaaacacagaaagtcaaa

SEQ ID NO: 197484 - DNA, 5412 bp, Homo sapiens
  Payload ID: 18951
  Gene Name: ubiquitin specific peptidase 7 (herpes virus-associated)
  Uniprot ID: Q93009
  ENST ID: ENST00000344836
  CDS Start-End: 200-3508
gtacgtgcgcgtctccctgccgccgccgccgcccgccgcgggccgccccggggccgccgtcgccgacgacgcgcgggaggaggaggaggaggccgccccgccgccgccgccgccgccgccgccccggctcgccgccgcccgcccgccgggctcgcagccccggcccccggccgcaggcgaggcccaggccgcggccgacatgaaccaccagcagcagcagcagcagcagaaagcgggcgagcagcagttgagcgagcccgaggacatggagatggaagcgggagatacagatgacccaccaagaattactcagaaccctgtgatcaatgggaatgtggccctgagtgatggacacaacaccgcggaggaggacatggaggatgacaccagttggcgctccgaggcaacctttcagttcactgtggagcgcttcagcagactgagtgagtcggtccttagccctccgtgttttgtgcgaaatctgccatggaagattatggtgatgccacgcttttatccagacagaccacaccaaaaaagcgtaggattctttctccagtgcaatgctgaatctgattccacgtcatggtcttgccatgcacaagcagtgctgaagataataaattacagagatgatgaaaagtcgttcagtcgtcgtattagtcatttgttcttccataaagaaaatgattggggattttccaattttatggcctggagtgaagtgaccgatcctgagaaaggatttatagatgatgacaaagttacctttgaagtctttgtacaggcggatgctccccatggagttgcgtgggattcaaagaagcacacaggctacgtcggcttaaagaatcagggagcgacttgttacatgaacagcctgctacagacgttatttttcacgaatcagctacgaaaggctgtgtacatgatgccaaccgagggggatgattcgtctaaaagcgtccctttagcattacaaagagtgttctatgaattacagcatagtgataaacctgtaggaacaaaaaagttaacaaagtcatttgggtgggaaactttagatagcttcatgcaacatgatgttcaggagctttgtcgagtgttgctcgataatgtggaaaataagatgaaaggcacctgtgtagagggcaccatacccaaattattccgcggcaaaatggtgtcctatatccagtgtaaagaagtagactatcggtctgatagaagagaagattattatgatatccagctaagtatcaaaggaaagaaaaatatatttgaatcatttgtggattatgtggcagtagaacagctcgatggggacaataaatacgacgctggggaacatggcttacaggaagcagagaaaggtgtgaaattcctaacattgccaccagtgttacatctacaactgatgagatttatgtatgaccctcagacggaccaaaatatcaagatcaatgataggtttgaattcccagagcagttaccacttgatgaatttttgcaaaaaacagatcctaaggaccctgcaaattatattcttcatgcagtcctggttcatagtggagataatcatggtggacattatgtggtttatctaaaccccaaaggggatggcaaatggtgtaaatttgatgacgacgtggtgtcaaggtgtactaaagaggaagcaattgagcacaattatgggggtcacgatgacgacctgtctgttcgacactgcactaatgcttacatgttagtctacatcagggaatcaaaactgagtgaagttttacaggcggtcaccgaccatgatattcctcagcagttggtggagcgattacaagaagagaaaaggatcgaggctcagaagcggaaggagcggcaggaagcccatctctatatgcaagtgcagatagtcgcagaggaccagttttgtggccaccaagggaatgacatgtacgatgaagaaaaagtgaaatacactgtgttcaaagtattgaagaactcctcgcttgctgagtttgttcagagcctctctcagaccatgggatttccacaagatcaaattcgattgtggcccatgcaagcaaggagtaatggaacaaaacgaccagcaatgttagataatgaagccgacggcaataaaacaatgattgagctcagtgataatgaaaacccttggacaatattcctggaaacagttgatcccgagctggctgctagtggagcgaccttacccaagtttgataaagatcatgatgtaatgttatttttgaagatgtatgatcccaaaacgcggagcttgaattactgtgggcatatctacacaccaatatcctgtaaaatacgtgacttgctcccagttatgtgtgacagagcaggatttattcaagatactagccttatcctctatgaggaagttaaaccgaatttaacagagagaattcaggactatgacgtgtctcttgataaagcccttgatgaactaatggatggtgacatcatagtatttcagaaggatgaccctgaaaatgataacagtgaattacccaccgcaaaggagtatttccgagatctctaccaccgcgttgatgtcattttctgtgataaaacaatccctaatgatcctggatttgtggttacgttatcaaatagaatgaattattttcaggttgcaaagacagttgcacagaggctcaacacagatccaatgttgctgcagtttttcaagtctcaaggttatagggatggcccaggtaatcctcttagacataattatgaaggtactttaagagatcttctacagttcttcaagcctagacaacctaagaaactttactatcagcagcttaagatgaaaatcacagactttgagaacaggcgaagttttaaatgtatatggttaaacagccaatttagggaagaggaaataacactatatccagacaagcatgggtgtgtccgggacctgttagaagaatgtaaaaaggccgtggagcttggggagaaagcatcagggaaacttaggctgctagaaattgtaagctacaaaatcattggtgttcatcaagaagatgaactattagaatgtttatctcctgcaacgagccggacgtttcgaatagaggaaatccctttggaccaggtggacatagacaaagagaatgagatgcttgtcacagtggcgcatttccacaaagaggtcttcggaacgttcggaatcccgtttttgctgaggatacaccagggcgagcattttcgagaagtgatgaagcgaatccagagcctgctggacatccaggagaaggagtttgagaagtttaaatttgcaattgtaatgatgggccgacaccagtacataaatgaagacgagtatgaagtaaatttgaaagactttgagccacagcccggtaatatgtctcatcctcggccttggctagggctcgaccacttcaacaaagccccaaagaggagtcgctacacttaccttgaaaaggccattaaaatccataactgatttccaagctggtgtgttcaaggcgaggacggtgtgtgggtggccccttaacagcctagaactttggtgcacgtgccctctagccgaagtcttcagcaagaggattcgctgctggtgttaattttattttattgaggctgttcagtttggcttctctgtatctattgactgccctttttgagcaaaatgaagatgtttttataaagcttggatgccaatgagagttattttatggtaaccacagtgcaaggcaactgtcagcgcaatgggggagaagaggttagtggatcgggggtccctggctcaaggtctctgggctgtccctagtgggcacgagtggctcggctgccttcctggggtcccgtgcaccagccctgcagctagcaagtcttgtgtttaggctcgtctgacctatttccttcagttatactttcaatgaccttttgtgcatctgttaaggcaaaacagagaaactcacaacctaataaatagcgctcttcccttcattgtgtgcattgtcggcccttcctcgggttctcctcctccagctgcctgggggctttttaataaacttgtctcacctcgtcagccactactgtctgcagcccctttgcaaagtggatgcactgaatacagtccggacagacattgtgggggtctttttattaaatcaagaacattgttaaattcaattaaggtttactctgctgccttggcagacttacgatctcaacagttcatacgagcaggtgaaaggattataaatagaatttcgttaaagtggaacagacgacaagaaagccttttagcaagagggcatgctcactagtggttagtaagctgtcgactttgtaaaaaagttaaaaatgaaaaaaaaaggaaaaatgaattgtatatttaatgaatgaacatgtacaatttgccactgggaggaggttcctttttgttgggtgagtctgcaagtgaatttcactgatgttgatattcattgtgtgtagttttatttcggtcccagccccgtttccttttattttggagctaatgccagctgcgtgtctagttttgagtgcagtaaaatagaatcagcaaatcactcttatttttcatccttttccggtattttttgggttgtttctgtgggagcagtgtacaccaactcttcctgtatattgcctttttgctggaaaatgttgtatgttgaataaaattttctataaaaattataattcagtgagttacgtggaagtggaggaagatttctactctccctggaaacaggcctgggaaaccttggcatttgtaacaaggtttcactgagatgtacttttccttctaattccgttttgcgggggcagggtctcttgtttctttttttttttttttttttttttagcctctaactagtcacatttactcttaagaaatgaaaggttttccaggagagaactgtgtacaaataaggtgactggagatgtgacctgatgtgtcacgaggcccttcggggcggcaggcgctatcgtgggcgtggtccttgcaccgtcccatcggccttgccttccagctccgtggcacggtttcctggtctttgggccagtgtgtaccttggagtgacttcctttctcaacttccactgcagtgtgtgtgccttctgctctgagagctgccttgtgacccgtgtgatagaaagcagggagtgagggtccccgcggacctggcccttccctccttcctcccccagaaagaggagttagagcaggggtgcgagagccgttcgctgtgggtttgtctttgaacaaacattaaggtgtcttgtttttgttctgggctgggggttggctgtagtcttaggtaactgaaagttcctactctcccttaaggtattaaatgactctttttccaaagaa

SEQ ID NO: 197485 - DNA, 3587 bp, Homo sapiens
  Payload ID: 18951
  Gene Name: ubiquitin specific peptidase 7 (herpes virus-associated)
  Uniprot ID: Q93009
  ENST ID: ENST00000381886
  CDS Start-End: 117-3377
aaaaaataaaaaagaatgctgaggtagagctcctagagattctatgcagtcactctgatgtgggtgagagaacctcccccatcccccagcagaggccactgcagagccatgcagagatggctgggaaccacaggcttgggctggaagcgggagatacagatgacccaccaagaattactcagaaccctgtgatcaatgggaatgtggccctgagtgatggacacaacaccgcggaggaggacatggaggatgacaccagttggcgctccgaggcaacctttcagttcactgtggagcgcttcagcagactgagtgagtcggtccttagccctccgtgttttgtgcgaaatctgccatggaagattatggtgatgccacgcttttatccagacagaccacaccaaaaaagcgtaggattctttctccagtgcaatgctgaatctgattccacgtcatggtcttgccatgcacaagcagtgctgaagataataaattacagagatgatgaaaagtcgttcagtcgtcgtattagtcatttgttcttccataaagaaaatgattggggattttccaattttatggcctggagtgaagtgaccgatcctgagaaaggatttatagatgatgacaaagttacctttgaagtctttgtacaggcggatgctccccatggagttgcgtgggattcaaagaagcacacaggctacgtcggcttaaagaatcagggagcgacttgttacatgaacagcctgctacagacgttatttttcacgaatcagctacgaaaggctgtgtacatgatgccaaccgagggggatgattcgtctaaaagcgtccctttagcattacaaagagtgttctatgaattacagcatagtgataaacctgtaggaacaaaaaagttaacaaagtcatttgggtgggaaactttagatagcttcatgcaacatgatgttcaggagctttgtcgagtgttgctcgataatgtggaaaataagatgaaaggcacctgtgtagagggcaccatacccaaattattccgcggcaaaatggtgtcctatatccagtgtaaagaagtagactatcggtctgatagaagagaagattattatgatatccagctaagtatcaaaggaaagaaaaatatatttgaatcatttgtggattatgtggcagtagaacagctcgatggggacaataaatacgacgctggggaacatggcttacaggaagcagagaaaggtgtgaaattcctaacattgccaccagtgttacatctacaactgatgagatttatgtatgaccctcagacggaccaaaatatcaagatcaatgataggtttgaattcccagagcagttaccacttgatgaatttttgcaaaaaacagatcctaaggaccctgcaaattatattcttcatgcagtcctggttcatagtggagataatcatggtggacattatgtggtttatctaaaccccaaaggggatggcaaatggtgtaaatttgatgacgacgtggtgtcaaggtgtactaaagaggaagcaattgagcacaattatgggggtcacgatgacgacctgtctgttcgacactgcactaatgcttacatgttagtctacatcagggaatcaaaactgagtgaagttttacaggcggtcaccgaccatgatattcctcagcagttggtggagcgattacaagaagagaaaaggatcgaggctcagaagcggaaggagcggcaggaagcccatctctatatgcaagtgcagatagtcgcagaggaccagttttgtggccaccaagggaatgacatgtacgatgaagaaaaagtgaaatacactgtgttcaaagtattgaagaactcctcgcttgctgagtttgttcagagcctctctcagaccatgggatttccacaagatcaaattcgattgtggcccatgcaagcaaggagtaatggaacaaaacgaccagcaatgttagataatgaagccgacggcaataaaacaatgattgagctcagtgataatgaaaacccttggacaatattcctggaaacagttgatcccgagctggctgctagtggagcgaccttacccaagtttgataaagatcatgatgtaatgttatttttgaagatgtatgatcccaaaacgcggagcttgaattactgtgggcatatctacacaccaatatcctgtaaaatacgtgacttgctcccagttatgtgtgacagagcaggatttattcaagatactagccttatcctctatgaggaagttaaaccgaatttaacagagagaattcaggactatgacgtgtctcttgataaagcccttgatgaactaatggatggtgacatcatagtatttcagaaggatgaccctgaaaatgataacagtgaattacccaccgcaaaggagtatttccgagatctctaccaccgcgttgatgtcattttctgtgataaaacaatccctaatgatcctggatttgtggttacgttatcaaatagaatgaattattttcaggttgcaaagacagttgcacagaggctcaacacagatccaatgttgctgcagtttttcaagtctcaaggttatagggatggcccaggtaatcctcttagacataattatgaaggtactttaagagatcttctacagttcttcaagcctagacaacctaagaaactttactatcagcagcttaagatgaaaatcacagactttgagaacaggcgaagttttaaatgtatatggttaaacagccaatttagggaagaggaaataacactatatccagacaagcatgggtgtgtccgggacctgttagaagaatgtaaaaaggccgtggagcttggggagaaagcatcagggaaacttaggctgctagaaattgtaagctacaaaatcattggtgttcatcaagaagatgaactattagaatgtttatctcctgcaacgagccggacgtttcgaatagaggaaatccctttggaccaggtggacatagacaaagagaatgagatgcttgtcacagtggcgcatttccacaaagaggtcttcggaacgttcggaatcccgtttttgctgaggatacaccagggcgagcattttcgagaagtgatgaagcgaatccagagcctgctggacatccaggagaaggagtttgagaagtttaaatttgcaattgtaatgatgggccgacaccagtacataaatgaagacgagtatgaagtaaatttgaaagactttgagccacagcccggtaatatgtctcatcctcggccttggctagggctcgaccacttcaacaaagccccaaagaggagtcgctacacttaccttgaaaaggccattaaaatccataactgatttccaagctggtgtgttcaaggcgaggacggtgtgtgggtggccccttaacagcctagaactttggtgcacgtgccctctagccgaagtcttcagcaagaggattcgctgctggtgttaattttattttattgaggctgttcagtttggcttctctgtatctattgactgccctttttgagcaaaatgaagatgtttttataaagcttg

SEQ ID NO: 197486 - DNA, 1966 bp, Homo sapiens
  Payload ID: 18951
  Gene Name: ubiquitin specific peptidase 7 (herpes virus-associated)
  ENST ID: ENST00000542333
  CDS Start-End: 196-1725
aagaacaagattgcactctgagagaaggaaggcatggtgaagaggtggtgttgtggtgggccttaaagtaggcttaggacttgagctcggggatttggagcgggagatacagatgacccaccaagaattactcagaaccctgtgatcaatgggaatgtggccctgagtgatggacacaacaccgcggaggaggacatggaggatgacaccagttggcgctccgaggcaacctttcagttcactgtggagcgcttcagcagactgagtgagtcggtccttagccctccgtgttttgtgcgaaatctgccatggaagattatggtgatgccacgcttttatccagacagaccacaccaaaaaagcgtaggattctttctccagtgcaatgctgaatctgattccacgtcatggtcttgccatgcacaagcagtgctgaagataataaattacagagatgatgaaaagtcgttcagtcgtcgtattagtcatttgttcttccataaagaaaatgattggggattttccaattttatggcctggagtgaagtgaccgatcctgagaaaggatttatagatgatgacaaagttacctttgaagtctttgtacaggcggatgctccccatggagttgcgtgggattcaaagaagcacacaggctacgtcggcttaaagaatcagggagcgacttgttacatgaacagcctgctacagacgttatttttcacgaatcagctacgaaaggctgtgtacatgatgccaaccgagggggatgattcgtctaaaagcgtccctttagcattacaaagagtgttctatgaattacagcatagtgataaacctgtaggaacaaaaaagttaacaaagtcatttgggtgggaaactttagatagcttcatgcaacatgatgttcaggagctttgtcgagtgttgctcgataatgtggaaaataagatgaaaggcacctgtgtagagggcaccatacccaaattattccgcggcaaaatggtgtcctatatccagtgtaaagaagtagactatcggtctgatagaagagaagattattatgatatccagctaagtatcaaaggaaagaaaaatatatttgaatcatttgtggattatgtggcagtagaacagctcgatggggacaataaatacgacgctggggaacatggcttacaggaagcagagaaaggtgtgaaattcctaacattgccaccagtgttacatctacaactgatgagatttatgtatgaccctcagacggaccaaaatatcaagatcaatgataggtttgaattcccagagcagttaccacttgatgaatttttgcaaaaaacagatcctaaggaccctgcaaattatattcttcatgcagtcctggttcatagtggagataatcatggtggacattatgtggtttatctaaaccccaaaggggatggcaaatggtgtaaatttgatgacgacgtggtgtcaaggtgtactaaagaggaagcaattgagcacaattatgggggtcacgatgacgacctgtctgttcgacactgcactaatgcttacatgttagtctacatcagggaatcaaaactgacagttggtggagcgattacaagaagagaaaaggatcgaggctcagaagcggaaggagcggcaggaagcccatctctatatgcaagtgcagatagtcgcagaggaccagttttgtggccaccaagggaatgacatgtacgatgaagaaaaagtgaaatacactgtgttcaaagtattgaagaactcctcgcttgctgagtttgttcagagcctctctcagaccatgggatttccacaagatcaaattcgattgtggcccatgcaagcaaggagtaatggaacaaaacgaccagcaatgttagataatgaagccgacggcaataaaacaatgattgagctcagtgataatgaaaacccttggacaatattcctg

SEQ ID NO: 197487 - DNA, 4533 bp, Homo sapiens
  Payload ID: 18951
  Gene Name: ubiquitin specific peptidase 7 (herpes virus-associated)
  ENST ID: ENST00000563961
  CDS Start-End: 138-413
ccgacgacgcgcgggaggaggaggaggaggccgccccgccgccgccgccgccgccgccgccccggctcgccgccgcccgcccgccgggctcgcagccccggcccccggccgcaggcgaggcccaggccgcggccgacatgaaccaccagcagcagcagcagcagcagaaagcgggcgagcagcagttgagcgagcccgaggacatggagatggaagcgggagatacagatgacccaccaagaattactcagaaccctgtgatcaatgggaatgtggccctgagtgatggacacaacaccgcggaggaggacatggaggatgacaccagttggcgctccgaggcaacctttcagttcactgtggagcgcttcagcagactgagtcatggtcttgccatgcacaagcagtgctgaagataataaattacagagatgatgaaaagtcgttcagtcgtcgtattagtcatttgttcttccataaagaaaatgattggggattttccaattttatggcctggagtgaagtgaccgatcctgagaaaggatttatagatgatgacaaagttacctttgaagtctttgtacaggcggatgctccccatggagttgcgtgggattcaaagaagcacacaggctacgtcggcttaaagaatcagggagcgacttgttacatgaacagcctgctacagacgttatttttcacgaatcagctacgaaaggctgtgtacatgatgccaaccgagggggatgattcgtctaaaagcgtccctttagcattacaaagagtgttctatgaattacagcatagtgataaacctgtaggaacaaaaaagttaacaaagtcatttgggtgggaaactttagatagcttcatgcaacatgatgttcaggagctttgtcgagtgttgctcgataatgtggaaaataagatgaaaggcacctgtgtagagggcaccatacccaaattattccgcggcaaaatggtgtcctatatccagtgtaaagaagtagactatcggtctgatagaagagaagattattatgatatccagctaagtatcaaaggaaagaaaaatatatttgaatcatttgtggattatgtggcagtagaacagctcgatggggacaataaatacgacgctggggaacatggcttacaggaagcagagaaaggtgtgaaattcctaacattgccaccagtgttacatctacaactgatgagatttatgtatgaccctcagacggaccaaaatatcaagatcaatgataggtttgaattcccagagcagttaccacttgatgaatttttgcaaaaaacagatcctaaggaccctgcaaattatattcttcatgcagtcctggttcatagtggagataatcatggtggacattatgtggtttatctaaaccccaaaggggatggcaaatggtgtaaatttgatgacgacgtggtgtcaaggtgtactaaagaggaagcaattgagcacaattatgggggtcacgatgacgacctgtctgttcgacactgcactaatgcttacatgttagtctacatcagggaatcaaaactgagtgaagttttacaggcggtcaccgaccatgatattcctcagcagttggtggagcgattacaagaagagaaaaggatcgaggctcagaagcggaaggagcggcaggaagcccatctctatatgcaagtgcagatagtcgcagaggaccagttttgtggccaccaagggaatgacatgtacgatgaagaaaaagtgaaatacactgtgttcaaagtattgaagaactcctcgcttgctgagtttgttcagagcctctctcagaccatgggatttccacaagatcaaattcgattgtggcccatgcaagcaaggagtaatggaacaaaacgaccagcaatgttagataatgaagccgacggcaataaaacaatgattgagctcagtgataatgaaaacccttggacaatattcctggaaacagttgatcccgagctggctgctagtggagcgaccttacccaagtttgataaagatcatgatgtaatgttatttttgaagatgtatgatcccaaaacgcggagcttgaattactgtgggcatatctacacaccaatatcctgtaaaatacgtgacttgctcccagttatgtgtgacagagcaggatttattcaagatactagccttatcctctatgaggaagttaaaccgaatttaacagagagaattcaggactatgacgtgtctcttgataaagcccttgatgaactaatggatggtgacatcatagtatttcagaaggatgaccctgaaaatgataacagtgaattacccaccgcaaaggagtatttccgagatctctaccaccgcgttgatgtcattttctgtgataaaacaatccctaatgatcctggatttgtggttacgttatcaaatagaatgaattattttcaggttgcaaagacagttgcacagaggctcaacacagatccaatgttgctgcagtttttcaagtctcaaggttatagggatggcccaggtaatcctcttagacataattatgaaggtactttaagagatcttctacagttcttcaagcctagacaacctaagaaactttactatcagcagcttaagatgaaaatcacagactttgagaacaggcgaagttttaaatgtatatggttaaacagccaatttagggaagaggaaataacactatatccagacaagcatgggtgtgtccgggacctgttagaagaatgtaaaaaggccgtggagcttggggagaaagcatcagggaaacttaggctgctagaaattgtaagctacaaaatcattggtgttcatcaagaagatgaactattagaatgtttatctcctgcaacgagccggacgtttcgaatagaggaaatccctttggaccaggtggacatagacaaagagaatgagatgcttgtcacagtggcgcatttccacaaagaggtcttcggaacgttcggaatcccgtttttgctgaggatacaccagggcgagcattttcgagaagtgatgaagcgaatccagagcctgctggacatccaggagaaggagtttgagaagtttaaatttgcaattgtaatgatgggccgacaccagtacataaatgaagacgagtatgaagtaaatttgaaagactttgagccacagcccggtaatatgtctcatcctcggccttggctagggctcgaccacttcaacaaagccccaaagaggagtcgctacacttaccttgaaaaggccattaaaatccataactgatttccaagctggtgtgttcaaggcgaggacggtgtgtgggtggccccttaacagcctagaactttggtgcacgtgccctctagccgaagtcttcagcaagaggattcgctgctggtgttaattttattttattgaggctgttcagtttggcttctctgtatctattgactgccctttttgagcaaaatgaagatgtttttataaagcttggatgccaatgagagttattttatggtaaccacagtgcaaggcaactgtcagcgcaatgggggagaagaggttagtggatcgggggtccctggctcaaggtctctgggctgtccctagtgggcacgagtggctcggctgccttcctggggtcccgtgcaccagccctgcagctagcaagtcttgtgtttaggctcgtctgacctatttccttcagttatactttcaatgaccttttgtgcatctgttaaggcaaaacagagaaactcacaacctaataaatagcgctcttcccttcattgtgtgcattgtcggcccttcctcgggttctcctcctccagctgcctgggggctttttaataaacttgtctcacctcgtcagccactactgtctgcagcccctttgcaaagtggatgcactgaatacagtccggacagacattgtgggggtctttttattaaatcaagaacattgttaaattcaattaaggtttactctgctgccttggcagacttacgatctcaacagttcatacgagcaggtgaaaggattataaatagaatttcgttaaagtggaacagacgacaagaaagccttttagcaagagggcatgctcactagtggttagtaagctgtcgactttgtaaaaaagttaaaaatgaaaaaaaaaggaaaaatgaattgtatatttaatgaatgaacatgtacaatttgccactgggaggaggttcctttttgttgggtgagtctgcaagtgaatttcactgatgttgatattcattgtgtgtagttttatttcggtcccagccccgtttccttttattttggagctaatgccagctgcgtgtctagttttgagtgcagtaaaatagaatcagcaaatcactcttatttttcatccttttccggtattttttgggttgtttctgtgggagcagtgtacaccaactcttcctgtatattgcctttttgctggaaaatgttgtatgttgaataaaattttctataaaaattataa

SEQ ID NO: 197488 - DNA, 3194 bp, Homo sapiens
  Payload ID: 18951
  Gene Name: ubiquitin specific peptidase 7 (herpes virus-associated)
  ENST ID: ENST00000563085
  CDS Start-End: 467-3194
atgttatctgccaggagctttaacttcatgaatgtttgaaacctgggagcgagcgctgtggcccattctcaagcgggagatacagatgacccaccaagaattactcagaaccctgtgatcaatgggaatgtggccctgagtgatggacacaacaccgcggaggaggacatggaggatggggagtaacggggcagttgaaagaaaccatcagtcacgggctgcaccaccagaaggactgctgttcagacctcctgccaaaagttcagcctccatgagaaactgcagccgtagttgagagttctctcacagtgcggtttacccctggcagctggctgaggcaatatctgaggaagacaccagttggcgctccgaggcaacctttcagttcactgtggagcgcttcagcagactgagtgagtcggtccttagccctccgtgttttgtgcgaaatctgccatggaagattatggtgatgccacgcttttatccagacagaccacaccaaaaaagcgtaggattctttctccagtgcaatgctgaatctgattccacgtcatggtcttgccatgcacaagcagtgctgaagataataaattacagagatgatgaaaagtcgttcagtcgtcgtattagtcatttgttcttccataaagaaaatgattggggattttccaattttatggcctggagtgaagtgaccgatcctgagaaaggatttatagatgatgacaaagttacctttgaagtctttgtacaggcggatgctccccatggagttgcgtgggattcaaagaagcacacaggctacgtcggcttaaagaatcagggagcgacttgttacatgaacagcctgctacagacgttatttttcacgaatcagctacgaaaggctgtgtacatgatgccaaccgagggggatgattcgtctaaaagcgtccctttagcattacaaagagtgttctatgaattacagcatagtgataaacctgtaggaacaaaaaagttaacaaagtcatttgggtgggaaactttagatagcttcatgcaacatgatgttcaggagctttgtcgagtgttgctcgataatgtggaaaataagatgaaaggcacctgtgtagagggcaccatacccaaattattccgcggcaaaatggtgtcctatatccagtgtaaagaagtagactatcggtctgatagaagagaagattattatgatatccagctaagtatcaaaggaaagaaaaatatatttgaatcatttgtggattatgtggcagtagaacagctcgatggggacaataaatacgacgctggggaacatggcttacaggaagcagagaaaggtgtgaaattcctaacattgccaccagtgttacatctacaactgatgagatttatgtatgaccctcagacggaccaaaatatcaagatcaatgataggtttgaattcccagagcagttaccacttgatgaatttttgcaaaaaacagatcctaaggaccctgcaaattatattcttcatgcagtcctggttcatagtggagataatcatggtggacattatgtggtttatctaaaccccaaaggggatggcaaatggtgtaaatttgatgacgacgtggtgtcaaggtgtactaaagaggaagcaattgagcacaattatgggggtcacgatgacgacctgtctgttcgacactgcactaatgcttacatgttagtctacatcagggaatcaaaactgagtgaagttttacaggcggtcaccgaccatgatattcctcagcagttggtggagcgattacaagaagagaaaaggatcgaggctcagaagcggaaggagcggcaggaagcccatctctatatgcaagtgcagatagtcgcagaggaccagttttgtggccaccaagggaatgacatgtacgatgaagaaaaagtgaaatacactgtgttcaaagtattgaagaactcctcgcttgctgagtttgttcagagcctctctcagaccatgggatttccacaagatcaaattcgattgtggcccatgcaagcaaggagtaatggaacaaaacgaccagcaatgttagataatgaagccgacggcaataaaacaatgattgagctcagtgataatgaaaacccttggacaatattcctggaaacagttgatcccgagctggctgctagtggagcgaccttacccaagtttgataaagatcatgatgtaatgttatttttgaagatgtatgatcccaaaacgcggagcttgaattactgtgggcatatctacacaccaatatcctgtaaaatacgtgacttgctcccagttatgtgtgacagagcaggatttattcaagatactagccttatcctctatgaggaagttaaaccgaatttaacagagagaattcaggactatgacgtgtctcttgataaagcccttgatgaactaatggatggtgacatcatagtatttcagaaggatgaccctgaaaatgataacagtgaattacccaccgcaaaggagtatttccgagatctctaccaccgcgttgatgtcattttctgtgataaaacaatccctaatgatcctggatttgtggttacgttatcaaatagaatgaattattttcaggttgcaaagacagttgcacagaggctcaacacagatccaatgttgctgcagtttttcaagtctcaaggttatagggatggcccaggtaatcctcttagacataattatgaaggtactttaagagatcttctacagttcttcaagcctagacaacctaagaaactttactatcagcagcttaagatgaaaatcacagactttgagaacaggcgaagttttaaatgtatatggttaaacagccaatttagggaagaggaaataacactatatccagacaagcatgggtgtgtccgggacctgttagaagaatgtaaaaaggccgtggagcttggggagaaagcatcagggaaacttaggctgctagaaattgtaagctacaaaatcattggtgttcatcaagaagatgaactattagaatgtttatctcctgcaacgagccggacgtttcgaatagaggaaatccctttggaccaggtggacatagacaaagagaatgagatgcttgtcacagtggcgcatttccacaaagaggtcttcggaacgttcggaatcccgtttttgc

SEQ ID NO: 197489 - DNA, 577 bp, Homo sapiens
  Payload ID: 18951
  Gene Name: ubiquitin specific peptidase 7 (herpes virus-associated)
  ENST ID: ENST00000566273
  CDS Start-End: 101-577
gaatccacctgtttttcggggagtttgtacttggcagtgtgtggtgcagccagcatccggccaggtgtgcgcttgcaaccgtgcgaaagccctgccgcacatggctgcctgcatcagaatcaaacctgactcgaaagcgggagatacagatgacccaccaagaattactcagaaccctgtgatcaatgggaatgtggccctgagtgatggacacaacaccgcggaggaggacatggaggatgacaccagttggcgctccgaggcaacctttcagttcactgtggagcgcttcagcagactgagtgagtcggtccttagccctccgtgttttgtgcgaaatctgccatggaagattatggtgatgccacgcttttatccagacagaccacaccaaaaaagcgtaggattctttctccagtgcaatgctgaatctgattccacgtcatggtcttgccatgcacaagcagtgctgaagataataaattacagagatgatgaaaagtcgttcagtcgtcgtattagtcatttgttcttccataaagaaaatgattggggattttccaattttatggcctgg

SEQ ID NO: 197490 - DNA, 559 bp, Homo sapiens
  Payload ID: 18951
  Gene Name: ubiquitin specific peptidase 7 (herpes virus-associated)
  ENST ID: ENST00000566004
  CDS Start-End: 169-559
atgttatctgccaggagctttaacttcatgaatgtttgaaacctgggagcgagcgctgtggcccattctcaagcgggagatacagatgacccaccaagaattactcagaaccctgtgatcaatgggaatgtggccctgagtgatggacacaacaccgcggaggaggacatggaggatgacaccagttggcgctccgaggcaacctttcagttcactgtggagcgcttcagcagactgagtgagtcggtccttagccctccgtgttttgtgcgaaatctgccatggaagattatggtgatgccacgcttttatccagacagaccacaccaaaaaagcgtaggattctttctccagtgcaatgctgaatctgattccacgtcatggtcttgccatgcacaagcagtgctgaagataataaattacagagatgatgaaaagtcgttcagtcgtcgtattagtcatttgttcttccataaagaaaatgattggggattttccaattttatggcctggagtgaagtgaccgatcctgagaaaggatttatagatgatgacaaag

SEQ ID NO: 197491 - DNA, 3554 bp, Homo sapiens
  Payload ID: 18951
  Gene Name: ubiquitin specific peptidase 7 (herpes virus-associated)
  ENST ID: ENST00000565455
  CDS Start-End: 61-204
gatgtgggtgagagaacctcccccatcccccagcagaggccactgcagagccatgcagagatggctgggaaccacaggcttgggctggaagcgggagatacagatgacccaccaagaattactcagaaccctgtgatcaatgggaatgtggccctgagtgatggacacaacaccgcggaggaggacatggaggatggggagtaacggggcagttgaaagaaaccatcagtcacgggctgcaccaccagaaggactgctgttcagacctcctgccaaaagttcagcctccatgagaaactgcagccgtagttgagagttctctcacagtgcggtttacccctggcagctggctgaggcaatatctgaggaagacaccagttggcgctccgaggcaacctttcagttcactgtggagcgcttcagcagactgagtgagtcggtccttagccctccgtgttttgtgcgaaatctgccatggaagattatggtgatgccacgcttttatccagacagaccacaccaaaaaagcgtaggattctttctccagtgcaatgctgaatctgattccacgtcatggtcttgccatgcacaagcagtgctgaagataataaattacagagatgatgaaaagtcgttcagtcgtcgtattagtcatttgttcttccataaagaaaatgattggggattttccaattttatggcctggagtgaagtgaccgatcctgagaaaggatttatagatgatgacaaagttacctttgaagtctttgtacaggcggatgctccccatggagttgcgtgggattcaaagaagcacacaggctacgtcggcttaaagaatcagggagcgacttgttacatgaacagcctgctacagacgttatttttcacgaatcagctacgaaaggctgtgtacatgatgccaaccgagggggatgattcgtctaaaagcgtccctttagcattacaaagagtgttctatgaattacagcatagtgataaacctgtaggaacaaaaaagttaacaaagtcatttgggtgggaaactttagatagcttcatgcaacatgatgttcaggagctttgtcgagtgttgctcgataatgtggaaaataagatgaaaggcacctgtgtagagggcaccatacccaaattattccgcggcaaaatggtgtcctatatccagtgtaaagaagtagactatcggtctgatagaagagaagattattatgatatccagctaagtatcaaaggaaagaaaaatatatttgaatcatttgtggattatgtggcagtagaacagctcgatggggacaataaatacgacgctggggaacatggcttacaggaagcagagaaaggtgtgaaattcctaacattgccaccagtgttacatctacaactgatgagatttatgtatgaccctcagacggaccaaaatatcaagatcaatgataggtttgaattcccagagcagttaccacttgatgaatttttgcaaaaaacagatcctaaggaccctgcaaattatattcttcatgcagtcctggttcatagtggagataatcatggtggacattatgtggtttatctaaaccccaaaggggatggcaaatggtgtaaatttgatgacgacgtggtgtcaaggtgtactaaagaggaagcaattgagcacaattatgggggtcacgatgacgacctgtctgttcgacactgcactaatgcttacatgttagtctacatcagggaatcaaaactgagtgaagttttacaggcggtcaccgaccatgatattcctcagcagttggtggagcgattacaagaagagaaaaggatcgaggctcagaagcggaaggagcggcaggaagcccatctctatatgcaagtgcagatagtcgcagaggaccagttttgtggccaccaagggaatgacatgtacgatgaagaaaaagtgaaatacactgtgttcaaagtattgaagaactcctcgcttgctgagtttgttcagagcctctctcagaccatgggatttccacaagatcaaattcgattgtggcccatgcaagcaaggagtaatggaacaaaacgaccagcaatgttagataatgaagccgacggcaataaaacaatgattgagctcagtgataatgaaaacccttggacaatattcctggaaacagttgatcccgagctggctgctagtggagcgaccttacccaagtttgataaagatcatgatgtaatgttatttttgaagatgtatgatcccaaaacgcggagcttgaattactgtgggcatatctacacaccaatatcctgtaaaatacgtgacttgctcccagttatgtgtgacagagcaggatttattcaagatactagccttatcctctatgaggaagttaaaccgaatttaacagagagaattcaggactatgacgtgtctcttgataaagcccttgatgaactaatggatggtgacatcatagtatttcagaaggatgaccctgaaaatgataacagtgaattacccaccgcaaaggagtatttccgagatctctaccaccgcgttgatgtcattttctgtgataaaacaatccctaatgatcctggatttgtggttacgttatcaaatagaatgaattattttcaggttgcaaagacagttgcacagaggctcaacacagatccaatgttgctgcagtttttcaagtctcaaggttatagggatggcccaggtaatcctcttagacataattatgaaggtactttaagagatcttctacagttcttcaagcctagacaacctaagaaactttactatcagcagcttaagatgaaaatcacagactttgagaacaggcgaagttttaaatgtatatggttaaacagccaatttagggaagaggaaataacactatatccagacaagcatgggtgtgtccgggacctgttagaagaatgtaaaaaggccgtggagcttggggagaaagcatcagggaaacttaggctgctagaaattgtaagctacaaaatcattggtgttcatcaagaagatgaactattagaatgtttatctcctgcaacgagccggacgtttcgaatagaggaaatccctttggaccaggtggacatagacaaagagaatgagatgcttgtcacagtggcgcatttccacaaagaggtcttcggaacgttcggaatcccgtttttgctgaggatacaccagggcgagcattttcgagaagtgatgaagcgaatccagagcctgctggacatccaggagaaggagtttgagaagtttaaatttgcaattgtaatgatgggccgacaccagtacataaatgaagacgagtatgaagtaaatttgaaagactttgagccacagcccggtaatatgtctcatcctcggccttggctagggctcgaccacttcaacaaagccccaaagaggagtcgctacacttaccttgaaaaggccattaaaatccataactgatttccaagctggtgtgttcaaggcgaggacggtgtgtgggtggccccttaacagccta

SEQ ID NO: 197492 - DNA, 569 bp, Homo sapiens
  Payload ID: 18951
  Gene Name: ubiquitin specific peptidase 7 (herpes virus-associated)
  ENST ID: ENST00000569230
  CDS Start-End: 217-569
agctgcgccccgcctggggttgctcttgaggagccaaactttgccagattaggctgacagtgagaaaataaattcttccacggtagatactgggtgaaaaagtgcacgtcagcgggcaaggcgggagatacagatgacccaccaagaattactcagaaccctgtgatcaatgggaatgtggccctgagtgatggacacaacaccgcggaggaggacatggaggatgacaccagttggcgctccgaggcaacctttcagttcactgtggagcgcttcagcagactgagtgagtcggtccttagccctccgtgttttgtgcgaaatctgccatggaagattatggtgatgccacgcttttatccagacagaccacaccaaaaaagcgtaggattctttctccagtgcaatgctgaatctgattccacgtcatggtcttgccatgcacaagcagtgctgaagataataaattacagagatgatgaaaagtcgttcagtcgtcgtattagtcatttgttcttccataaagaaaatgattggggattttccaattttatggcctggagtgaagt

SEQ ID NO: 197493 - DNA, 479 bp, Homo sapiens
  Payload ID: 18951
  Gene Name: ubiquitin specific peptidase 7 (herpes virus-associated)
  ENST ID: ENST00000564117
  CDS Start-End: 152-479
aatggaattcacggggaggaaagctgggtataggcattaagtgcccagtagagcagcgggagatacagatgacccaccaagaattactcagaaccctgtgatcaatgggaatgtggccctgagtgatggacacaacaccgcggaggaggacatggaggatgacaccagttggcgctccgaggcaacctttcagttcactgtggagcgcttcagcagactgagtgagtcggtccttagccctccgtgttttgtgcgaaatctgccatggaagattatggtgatgccacgcttttatccagacagaccacaccaaaaaagcgtaggattctttctccagtgcaatgctgaatctgattccacgtcatggtcttgccatgcacaagcagtgctgaagataataaattacagagatgatgaaaagtcgttcagtcgtcgtattagtcatttgttcttccataaagaaaatgattggggatttt

SEQ ID NO: 197494 - DNA, 313 bp, Homo sapiens
  Payload ID: 18951
  Gene Name: ubiquitin specific peptidase 7 (herpes virus-associated)
  ENST ID: ENST00000567692
  CDS Start-End: 1-52
gaattactgtgggcatatctacacaccaatatcctgtaaaatacgaagttaaaccgaatttaacagagagaattcaggactatgacgtgtctcttgataaagcccttgatgaactaatggatggtgacatcatagtatttcagaaggatgaccctgaaaatgataacagtgaattacccaccgcaaaggagtatttccgagatctctaccaccgcgttgatgtcattttctgtgataaaacaatccctaatgatcctggatttgtggttacgttatcaaatagaatgaattattttcaggttgcaaagacagt

SEQ ID NO: 197495 - DNA, 332 bp, Homo sapiens
  Payload ID: 18951
  Gene Name: ubiquitin specific peptidase 7 (herpes virus-associated)
  ENST ID: ENST00000563043
  CDS Start-End: 1-207
gatcccaaaacgcggagcttgaattactgtgggcatatctacacaccaatatcctgtaaaatacggatgaccctgaaaatgataacagtgaattacccaccgcaaaggagtatttccgagatctctaccaccgcgttgatgtcattttctgtgataaaacaatccctaatgatcctggatttgtggttacgttatcaaatagaatgaattattttcaggttgcaaagacagttgcacagaggctcaacacagatccaatgttgctgcagtttttcaagtctcaaggttatagggatggcccaggtaatcctcttagacataattatgaaggt

SEQ ID NO: 197496 - DNA, 4243 bp, Homo sapiens
  Payload ID: 18952
  Gene Name: ubiquitin specific peptidase 8
  Uniprot ID: P40818
  ENST ID: ENST00000307179
  CDS Start-End: 199-3555
aatgcaaatcgggaaaagggggtgagctgggctggcttccgtcctggtagccaaggctaattctccctcgagttcttgggagatgggcatttggcgagaaggctggcgttagtgaagcgcgcccggcgtcacggaaagaagcacttgtaaggaaatatagcatccattgtgaaagtggaaaagtaaagataattcatcatgcctgctgtggcttcagttcctaaagaactctacctcagttcttcactaaaagaccttaataagaagacagaagttaaaccagagaaaataagcactaagagttatgtgcacagtgccctgaagatctttaagacagcagaagaatgcagattagatcgtgatgaggaaagggcctatgtactatatatgaaatacgtgactgtttataatcttatcaaaaaaagacctgatttcaagcaacagcaggattatttccattcaatacttggacctggaaacatcaaaaaagctgtcgaagaagctgaaagactctctgaaagccttaaattaagatatgaagaagctgaagtccggaaaaaacttgaggaaaaagacaggcaggaggaagcacagcggctacaacaaaaaaggcaggaaacaggaagagaggatggtggcacattggctaaaggctctttggagaatgttttggattccaaagacaaaacccaaaagagcaatggtgaaaagaatgaaaaatgtgagaccaaagagaaaggagcaatcacagcaaaggaactatacacaatgatgacggataaaaacatcagcttgattataatggatgctcgaagaatgcaggattatcaggattcctgtattttacattctctcagtgttcctgaagaagccatcagtccaggagtcactgctagttggattgaagcacacctgccagatgattctaaagacacatggaagaagagggggaatgtggagtatgtggtacttcttgactggtttagttctgccaaagatttacagattggaacaactctccggagtctgaaagatgcacttttcaagtgggaaagtaaaactgtcctgcgcaatgagcctttggttttagagggaggctatgaaaactggctcctttgttatccccagtatacaacaaatgctaaggtcactccacccccacgacgccagaatgaagaggtgtctatctcattggattttacttatccctcattggaagaatcaattccttctaaacctgctgcccagacgccacctgcatctatagaagtagatgaaaatatagaattgataagtggtcaaaatgagagaatgggaccactgaatatatcaactccagttgaaccagttgctgcttctaaatctgatgtttcacccataattcagccagtgcctagtataaagaatgttccacagattgatcgtactaaaaaaccagcagtcaaattgcctgaagagcatagaataaaatctgaaagtacaaaccatgagcaacaatctcctcagagtggaaaagttattcctgatcgttccaccaagccagtagttttttctccaactctcatgttaacagatgaagaaaaggctcgtattcatgcagaaactgctcttctaatggaaaaaaacaaacaagaaaaagaacttcgggaaaggcagcaagaggaacagaaagagaaactgaggaaggaagaacaagaacaaaaagccaaaaagaaacaagaagctgaagaaaatgaaattacagagaagcaacaaaaagcaaaagaagaaatggagaagaaagaaagtgaacaggccaagaaagaagataaagaaacctcagcaaagaggggcaaagaaataacaggagtaaaaagacaaagtaaaagtgaacatgaaacttctgatgccaagaaatctgtagaagatagggggaaaaggtgtccaaccccagaaatacagaaaaagtcaacaggagatgtgccccatacatctgtgacaggggattcaggttcaggcaagccatttaagattaaaggacaaccagaaagtggaattctaaggacaggaacttttagagaggatacagacgataccgaaagaaataaagctcaacgagaacctttgacaagagcacgaagtgaagaaatggggaggatcgtaccaggactgccttcaggctgggccaagtttcttgacccaatcactggaacctttcgttattatcattcacccaccaacactgttcatatgtacccaccggaaatggctccttcatctgcacctccttccacccctccaactcataaagccaagccacagattcctgctgagcgggatagggaaccttccaaactgaagcgctcctactcctccccagatataacccaggctattcaagaggaagagaagaggaagccaacagtaactccaacagttaatcgggaaaacaagccaacatgttatcctaaagctgagatctcaaggctttctgcttctcagattcggaacctcaatcctgtttttggaggttctggaccagctcttactggacttcgtaacttaggaaatacttgttatatgaactcaatattgcagtgcctatgtaacgctccacatttggctgattatttcaaccgaaactgttatcaggatgatattaacaggtcaaatttgttggggcataaaggtgaagtggcagaagaatttggtataatcatgaaagccctgtggacaggacagtatagatatatcagtccaaaggactttaaaatcaccattgggaagatcaatgaccagtttgcaggatacagtcagcaagattcacaagaattgcttctgttcctaatggatggtctccatgaagatctaaataaagctgataatcggaagagatataaagaagaaaataatgatcatctcgatgactttaaagctgcagaacatgcctggcagaaacacaagcagctcaatgagtctattattgttgcactttttcagggtcaattcaaatctacagtacagtgcctcacatgtcacaaaaagtctaggacatttgaggccttcatgtatttgtctctaccactagcatccacaagtaaatgtacattacaggattgccttagattattttccaaagaagaaaaactcacagataacaacagattttactgcagtcattgcagagctcgacgggattctctaaaaaagatagaaatctggaagttaccacctgtgcttttagtgcatctgaaacgtttttcctacgatggcaggtggaaacaaaaattacagacatctgtggacttcccgttagaaaatcttgacttgtcacagtatgttattggtccaaagaacaatttgaagaaatataatttgttttctgtttcaaatcactacggtgggctggatggaggccactacacagcctattgtaaaaatgcagcaagacaacggtggtttaagtttgatgatcatgaagtttctgatatctccgtttcttctgtgaaatcttcagcagcttatatcctcttttatacttcattgggaccacgagtaactgatgtagccacataaggagacataggttataaactagttatcttttaaaaggctcagcaacacaactcttgaaatgcttatcaggataatggtagctatagctggccatttagaggaattctaggacagtgggagctgtgttactagcactatataattccggtcagtgctgacaaataacatttaacaagtattgcagtaatcatcacttacaggtaccatttatttcaaaacaacttttttagtctgctccaaagttaaaataattaactagctaagcattattattcgactggtctaaaaactattgttatcttttttttttccttttcactgttatggccttttcacatttctaaatcccatcttgatatactatgaatactctagaatgatgtaaagcagataggaatgtatgtgtacatatttattgcatacttgcacatcaaatcgatgtacatagtttaacacgtggtccttttgtgaaacctagaactcagaggattgctttttttctttcagcctattttgagttaacttcagtgctttcttagggaaatgacagggcaaagcaatttttctgttggctttgggctgtatttgtgcactaaatctttattctaaaaaaaaaaatggaaactttaatttttttaaaacgagaatttcatttacagctacattaaaatcttaatgagaaaaataa

SEQ ID NO: 197497 - DNA, 19026 bp, Homo sapiens
  Payload ID: 18952
  Gene Name: ubiquitin specific peptidase 8
  Uniprot ID: P40818
  ENST ID: ENST00000396444
  CDS Start-End: 339-3695
aatgcaaatcgggaaaagggggtgagctgggctggcttccgtcctggtagccaaggctaattctccctcgagttcttgggagatgggcatttggcgagaaggctggcgttagtgaagcgcgcccggcgtcacggtgagtgcgggtcttgggccctagcacctgttctctgggaagtcgtccgctgtgaacgatgaacgcctttccttccaccagctgctggttaccccggagacaagctctgtccgcggagaggagtgggacaactcctaaaggaaagaagcacttgtaaggaaatatagcatccattgtgaaagtggaaaagtaaagataattcatcatgcctgctgtggcttcagttcctaaagaactctacctcagttcttcactaaaagaccttaataagaagacagaagttaaaccagagaaaataagcactaagagttatgtgcacagtgccctgaagatctttaagacagcagaagaatgcagattagatcgtgatgaggaaagggcctatgtactatatatgaaatacgtgactgtttataatcttatcaaaaaaagacctgatttcaagcaacagcaggattatttccattcaatacttggacctggaaacatcaaaaaagctgtcgaagaagctgaaagactctctgaaagccttaaattaagatatgaagaagctgaagtccggaaaaaacttgaggaaaaagacaggcaggaggaagcacagcggctacaacaaaaaaggcaggaaacaggaagagaggatggtggcacattggctaaaggctctttggagaatgttttggattccaaagacaaaacccaaaagagcaatggtgaaaagaatgaaaaatgtgagaccaaagagaaaggagcaatcacagcaaaggaactatacacaatgatgacggataaaaacatcagcttgattataatggatgctcgaagaatgcaggattatcaggattcctgtattttacattctctcagtgttcctgaagaagccatcagtccaggagtcactgctagttggattgaagcacacctgccagatgattctaaagacacatggaagaagagggggaatgtggagtatgtggtacttcttgactggtttagttctgccaaagatttacagattggaacaactctccggagtctgaaagatgcacttttcaagtgggaaagtaaaactgtcctgcgcaatgagcctttggttttagagggaggctatgaaaactggctcctttgttatccccagtatacaacaaatgctaaggtcactccacccccacgacgccagaatgaagaggtgtctatctcattggattttacttatccctcattggaagaatcaattccttctaaacctgctgcccagacgccacctgcatctatagaagtagatgaaaatatagaattgataagtggtcaaaatgagagaatgggaccactgaatatatcaactccagttgaaccagttgctgcttctaaatctgatgtttcacccataattcagccagtgcctagtataaagaatgttccacagattgatcgtactaaaaaaccagcagtcaaattgcctgaagagcatagaataaaatctgaaagtacaaaccatgagcaacaatctcctcagagtggaaaagttattcctgatcgttccaccaagccagtagttttttctccaactctcatgttaacagatgaagaaaaggctcgtattcatgcagaaactgctcttctaatggaaaaaaacaaacaagaaaaagaacttcgggaaaggcagcaagaggaacagaaagagaaactgaggaaggaagaacaagaacaaaaagccaaaaagaaacaagaagctgaagaaaatgaaattacagagaagcaacaaaaagcaaaagaagaaatggagaagaaagaaagtgaacaggccaagaaagaagataaagaaacctcagcaaagaggggcaaagaaataacaggagtaaaaagacaaagtaaaagtgaacatgaaacttctgatgccaagaaatctgtagaagatagggggaaaaggtgtccaaccccagaaatacagaaaaagtcaacaggagatgtgccccatacatctgtgacaggggattcaggttcaggcaagccatttaagattaaaggacaaccagaaagtggaattctaaggacaggaacttttagagaggatacagacgataccgaaagaaataaagctcaacgagaacctttgacaagagcacgaagtgaagaaatggggaggatcgtaccaggactgccttcaggctgggccaagtttcttgacccaatcactggaacctttcgttattatcattcacccaccaacactgttcatatgtacccaccggaaatggctccttcatctgcacctccttccacccctccaactcataaagccaagccacagattcctgctgagcgggatagggaaccttccaaactgaagcgctcctactcctccccagatataacccaggctattcaagaggaagagaagaggaagccaacagtaactccaacagttaatcgggaaaacaagccaacatgttatcctaaagctgagatctcaaggctttctgcttctcagattcggaacctcaatcctgtttttggaggttctggaccagctcttactggacttcgtaacttaggaaatacttgttatatgaactcaatattgcagtgcctatgtaacgctccacatttggctgattatttcaaccgaaactgttatcaggatgatattaacaggtcaaatttgttggggcataaaggtgaagtggcagaagaatttggtataatcatgaaagccctgtggacaggacagtatagatatatcagtccaaaggactttaaaatcaccattgggaagatcaatgaccagtttgcaggatacagtcagcaagattcacaagaattgcttctgttcctaatggatggtctccatgaagatctaaataaagctgataatcggaagagatataaagaagaaaataatgatcatctcgatgactttaaagctgcagaacatgcctggcagaaacacaagcagctcaatgagtctattattgttgcactttttcagggtcaattcaaatctacagtacagtgcctcacatgtcacaaaaagtctaggacatttgaggccttcatgtatttgtctctaccactagcatccacaagtaaatgtacattacaggattgccttagattattttccaaagaagaaaaactcacagataacaacagattttactgcagtcattgcagagctcgacgggattctctaaaaaagatagaaatctggaagttaccacctgtgcttttagtgcatctgaaacgtttttcctacgatggcaggtggaaacaaaaattacagacatctgtggacttcccgttagaaaatcttgacttgtcacagtatgttattggtccaaagaacaatttgaagaaatataatttgttttctgtttcaaatcactacggtgggctggatggaggccactacacagcctattgtaaaaatgcagcaagacaacggtggtttaagtttgatgatcatgaagtttctgatatctccgtttcttctgtgaaatcttcagcagcttatatcctcttttatacttcattgggaccacgagtaactgatgtagccacataaggagacataggttataaactagttatcttttaaaaggctcagcaacacaactcttgaaatgcttatcaggataatggtagctatagctggccatttagaggaattctaggacagtgggagctgtgttactagcactatataattccggtcagtgctgacaaataacatttaacaagtattgcagtaatcatcacttacaggtaccatttatttcaaaacaacttttttagtctgctccaaagttaaaataattaactagctaagcattattattcgactggtctaaaaactattgttatcttttttttttccttttcactgttatggccttttcacatttctaaatcccatcttgatatactatgaatactctagaatgatgtaaagcagataggaatgtatgtgtacatatttattgcatacttgcacatcaaatcgatgtacatagtttaacacgtggtccttttgtgaaacctagaactcagaggattgctttttttctttcagcctattttgagttaacttcagtgctttcttagggaaatgacagggcaaagcaatttttctgttggctttgggctgtatttgtgcactaaatctttattctaaaaaaaaaaatggaaactttaatttttttaaaacgagaatttcatttacagctacattaaaatcttaatgagaaaaataatttataaccctgtgggtgttctgtctttaatattgtattatcaaatataggacagtaaaaccatagattttatatacacacgtgctatataataacacccagagtcattctttcaagactagtattctcacatattgagaatattcattctaaatattaaagtaaaaatgccgggagtcaggcatgattgcaaagtgaactgcattataaactacatctttacagagtgatgtattaagagggttaaaggagcttataatttatttaaccgagggactcagttgctatatatatagtcagtaaaacactccatataaaaataagattctaaaagtgcttcagaaagagaccaccattagcaggctctcagggagaagatgaaaggatggggttcaaattgtgaagctgacaacttttcatgttttacaattagtctaagagaccacttcttggctaaattattatatcaaatatattcaaatcatattcttaaactcatcgagccatttgaacaaaaattatttttgtttagcttcatgagtatctttggaaaataatttgttgaatatatatgattatgagatattttctgataaacactgaattttgaaacctgaactcactatataattgcagtgttttgaaggcctgcatccattagcattgcattatattcacactgccttttttagtgaaccaagacccatcttctggacgacagatttatcttaagatgaaaggttgtataacatgcccacaaggcataaaaatgttaatgatgcaagtaagttctaagagtttaatgaccaagcaaaactctaccaccagatgctgactgcttgttttgcagtgttcaggaaacaccattttcctggctcttaacgcttttgtattggtatggaaaagggctggcagctatagaacaggagatccatagcattttgaacagaagtatctggaatctcactgactcgtgtgttatcaaagctatatcaggcctgggtgactgaattcttgcagaaagcagtgtagtggccaccatccaaatcaccaaaatggttctatgggagaaaggaatgtcaaacttagtattcacatatgaacactaactactggaacagaaatgatagggccaagagatgctttttaaattgtcccttattctaaattaaaaggaagtgataattttgttgttaaatcatgcatatagcctgactgctatattgcttctcatttcattgtaactacttatatgttgtgcccattgactatcatctgtgaataaagaaagacaatatttagcagcatctgattaatgtttatcagtgaacatttagttagcacttaatatacatcaactattaagcattaaaggaaattttacaataagaagataattcaggccgggcacagtggctcacacctgtaatcccaacactctgggaggctgaggcaggtggattgcttgagtccaggagttcaagaccagcctgggcaaaatagcgagactccatatcttttaaaggaaaaaaaaaaaaaaaaaaaagatgagctaggcatagtggtgcacacctgtagtcccagctacttgggaagttggggtgggaggatctctcgagcctgagaggtcgaggctgcaatgagccgtgattgtaccactgcactccagcctgggtgacagagtgagaccctgtcttaaaattgtaagttcatttacgtaagatggcttcttttttttttttttaaagttaggataagccacagaagagacatttaacattagaataaggatcttaactgcatattgctacagcacaaattgagggggctatgtagcaacaacccctcaatcccccatagggtacaaaaaataatgtatctcattttcctttttccatgtctttcctaacccagtattgtttggaacaaaggcattagagaggtgtacttccaaggaggtgttatggtgtatgataagggtcagcaaaccacggcccgtgggtcaactccaggctgtttttgtaagacccatgcattagcaacgggttttaaatttttatatggttggggaaaagatccaagtaataatagtattgttatatgtgaaaattttatgaaattcaaatgtcaatgtccttaaagttttatgggaacacagtcatgctcatttgtttacacttttcagtggctgctttaatgatacaacagtaaaactgaatagttgcagccaataccatatggcttatgaggcctaaaatatttactgtttggcctttaacagaataagtttgctgacctctgctgtagaggaagaaaattgattatttgttaacttatttttaattttttgagatggagtctctctctgttgcccaggctggaatgcagtggcacgatctcggctcactgcaacctccgcctcccaggttcaagcaattcttctgcctcagccttccaagtagctgggagactacaggtgcctgccaccatgcccagctaattttttgtatttttagtagagatggggtttcactgtgttagccaggatggtctcgatctcgacctcgggatcctcccacttcggcctcccaaagttatttatttttatttgagacagagtcttgctctgttgcccaggctggagtgcagtgacgtgatctcagctcaccacaacctctgcttcctgggttaaagctcttctcctgcctcagcctcccaagtaactgggattacaggcacgcaccaccacacccagctaattttttgtatttttagtagagatggggtttcgccgtgttggccaggctggtcttgaactcctgacctcaagtgatccacctgcctccacctcccaaagtgctgggattacaggcgtgagccactgcacccagcctatttatttttagaagcagtttcttgctatgttgcccaggctgtacatgaattcctaggcacaagcagtcctctcacttcaggcccccaaatagctgggactacaggcatacaccaccatgtccagaatgaaaatggatctgactagttaattccaacgtgaattcgggtgtaatagtacattgtgaccttagcgaaattatttgacctttctgagctttaatttctcatctattaacatggcttgttttgtatagctgttatcaaatatctcatgtattgagggctagtacacaggagttatttattcaatattcccttcaaccttcgtcttccccacctctctccttacaggtaatagaaatatctgaaattcacatttaaaagatcaaggttccgccaggcctggtggctcacgcctgtaatcccagcactttgggaggctgaggcaggcggatcacttgaggtcaggagtttgagactagcctggccaacatggtgaaaatccatctcttctaaaaatataaaaattagctgggcatggtggcgcatgccggtaatcccagctacttgggaggctgaggcagaatcatttgaacctgggagatggaggttgcagtgagctgagatcatgccattgcattccagcctgggcggagccctaaacaggaaatttaacaacagtatggtgtgtggtttatgctttgtgactgcctgggcgtaaagacagtccctagtttctgtaaccagtatgctcgggttttaaaggtcacgcaaggacactcgaggtaaagtcttaggcccccctacaaggtgagaagttggattgagatccacatacaaagccaggacctttaaagacattcaccctcaatggaaggattaaaaaacaaaatccaccctctagtgcttgtgttagcttggactcatggtacagagaataaaagtcattcctgggaatttgtcaccatagacctaccttttcaccagtttgggattcaaatttatactacctgtgtggtctgcgaatcctgtgaacttaatatgaaaagtatttctagggcagttgccagaaggaaacagaatttctagattgttgcatgttaactcagacctaacaggatatccacatatgaaaccccaatgaagttgagatcacaattcaaaataatagaacatgcaaggaaacaatttatcataagagtcagaaggcaataagatttaaacccccaaggactttagataatagaattattaagcagaggctacaaataaagtatatttaaatatatttagaagaaggaaacaaactttagaaactaaatagaattttcagaaatgagaaatacaacatagttggccgtccatatttacgggctctgcatcttcagaatcaactaatgtgatgggaaagatttgaaaaaataatacaacaataaaaatatacatattttaaaatacagtgtaacaactatttacatagtatttatattgtattagatattataagtaatccagagatgacttaaagtatatgggaggatgtgcataggttacatgcaaatactactccaggcctggcatggtggctcacacgtgtaatcccaacgtttttgggggatggaggtgggcagactgcttgagcccaggagttgtagaccagcctgggcaacatggcaaaaccctgtctacacaaaatacaaaaattgaccaggcatagtggcacgtgcctatagtcccagctacttggtaggttgaggtgggagaatcacctgagcccaggaggtcgaggctacagtgagctgtgactgagccactgctctccagcctggcaacagaatgagaccttgtctcaaaaaacaaaaacaaaaaacaccagaaaagacaccattttatatagggcccttgagcatctgtggattttgatagtcaaagggatcctggaaccaactccctgcagatactgaggtacaactgtactggaaattaacttaatgaagatattaggacacagaaaatgaataaaccggactgggcgcggtggctcatgcctgtaatcctagcactttgggaggctgaggcgggtggaccatgaggtcaggagttcaagaccaacctggtacacatggtgaaaccctgtctctattaaaaaaaacaaaaaaaattagctgggcctggtggcgtgcacctgtaatcccagctacttgagaggctgaagcaggagaatcgcttgaacccgggaggtggaggttgcagtgagccaagatcgtgccattgcactccagtgtgggtgacagagtgagactccatctcaaaaaaaaaaaaaaaagaataaactataaaatgaagttggggaaattagcaagaatggagtagtgatggagaatacgtgttaagaggcatgaaaaattgaatgagaatattcagcgtatgtcctgtagaagttctaggaggagagaatcgagtaggggagcaaggcaatattaaaagtgataatggctgaaaatgattaatgagacatgaatcttcacatttaggaaatgcagcgagccagggataaataaaaataatactgcagaacaacagagacaaagagaaaaagcttaaaagcaaccagaaagaaaaagagagtttacccacaagaatctaacctgctggtagaagttctccatagcagccatagaaatcagagacaatacagtagcttcaaaataatagagaaaaataactgtcaatctggaatttgatttctagttatcatccaagaatgaaagtgaattaaagacttctcaaagactgagagacttcaggataacagaccctcactgaaaagcctactgaaatatatgccacatgaattttaaaaactcaatgaaggaagaagtgatacataatagacagtgattaacaaaaaagactgatgaagatccgggcaaatataacccaatatgaacagtagaaaaccatgataatgtctcctttggaggcatattaaaaaattaaaaaccggctgggcatggtggttcacacctgtaatcccagcactttggaaggccaaggcaggaggatcgtttgagcccaggagtttgagaccagcctgggcaacatagtgagacctggtctctaaaaaaaataaaaaagttggccatgcacagtagcatgcctgtagtcccagctacttggcaggcagaggcaggaggatcccttaagcccagagttcaaaactgtagtgagctatgattcattgcactagtgcactccagtctgggcaacagagtgagaccctgtctcaaaaacaaaagatgctgaaaacagtagttcagtgatcagaattacagtgttctaagagctttccatttctttgggagcagagtataaagatcttgattaactttaggctttaagtatgaaagctgtcgttttttagcataattactaaagaatcaaaatgtgtaacttccaaagttgtagagggaaaataaagaaagctttatcagtttagtagcagcaagaacaacaggggaaaacaacacagcagaggtccccaacccccccaggctgcctgtccctgacctgttcaggacctggctgcacagcaggaagcgagcggcaaacctaccctgagcaccgcctcctgtcagatcagctgctgcattagattctcacagcagcacaaactctattgtgaactgcgcatgtgagggatctaggttgcgtgctccttatgagaatctactgcctgattttctgaggtggaacagtttaatcccaaaaccatgcccgccccggcccccatccatgggaaaaaaaccgcatcagtggaaaaattgtcttccacaaaaatcagtccctggtgccaacaaggttggggactgccgaattagaaaaataaggctaacataaacacaaaagaagatgacgacaagtaaatccgaatttattactagttgaaatatatgggatgtagtaaatttaccaaatatttactggattttaaatatccagttctagccaggcgcgatggctcacgtctataatctcagcacttggggaggccgaggggggcggatcacgaggtcaggagatcaagactatcctggccaacacggtgaaacctcatctctacaaaaatacaaaaaattagccgggcatggtggcaggcgcctatagtcccagctactccggaggctgaggcaggagaatggcatgaacccaggaggtgaagcttgcagtgagccgagatcgtgccactgcattccagcctgggcgacagagcgagacttcatctcaaaaaaaaaaaaaaaaaaaaaaaaaaaaaaaaatccagttttaggccaagtgtggtggctcatgcctgtaatcccaacactttgggaggccaaggcaggcggatcacctgagatcaggagttccagaccaccctggccaacatggcaaaacccggtctctactaaaaatacaaaaattagctgggtctggtggcacatgccagtaatcccaactacttgggaagctgaggcaggagagttgcttgaacctgggaggtggaggttgcagtgagccaagatcatgccactgcactccagcctggggcacagagtgagactctgtctctaaaacaaaacaacaacaacaacaaatccagttctatgcactatataacatttagaactcagaaaaggtgtatttcccttgagcatcatgttggtgcttaaaatgtttcagattttggagcattttggattttcagattagggatgctcaacttgtcgtaggtagatatgaccaagagaaagctgaagtagctatacatcagctaaaatggtccctaagatagaatgcattgtaaatgagtcactttataatgaaaaaaggtttaaatcacccaaattgtataatttgaaactgctacctacctaacaaaacagacttgttaaaaacaaatgacagaactatagggaagttttgacaagtctaccatcataatggaagatttcaactattgatcaagcagacaaaaatattagtatagatacagcttttacaatatatacttagatgagtatctgactcctgaaatagaagtgcactgtctcaacaaatgtaaaagagttagtttaggccaggcacggtggctcatgcctgtaatcccagcactttgggaggccaaggcaggcgaatcacgaggtcaggagttcgagaccagcctggccaacatggagaaaccccgtctctactaaaaatacaaaaaattagctgggcatggtgtcggctgcctgtaatcccagctactgaggaggctgaagcaggaaaatcgcttgaaactgggcggcggaggttgcagtgagccgagatggtgccagtgcactctagcccgggcgacagtgcaagactctgtctcaaaaaaaaaaaaaaaaaaaaaaaaagattagtttaatttagaccctagtctttgaacacaatacaattagcagtcaatacaaaatgatacccccacaaaaaatcaatacttttggaaattaaaaaaacacttctaagtaactttataaataaattataaaagtaaaacacttagaagtaaatagtaatgaaaatactatatcaaaacatgggatgcactgatgtctgagaatgtcttaaaaataatacgatgccaagaagagagtgggtcagtattaagatgaattgatcatttattttatattcaaatatcttgcttcagcaagctagttgatggatgcatggcggtttgttatgctgtccaattttgtatatgtttgaaatattctataataaaaaaaggcagagaaagtgggagatagacatttgtagttttaaatacttatatcttaaaggatagactgagtgttaatacactggacactcagtttaaaacattaaaacataacagaataaaccctaaaagagtagagggaagagataacactgtaagaggaataacccataaagcagaaaacaaagatgtaatacagaagatttaaaaaaaggtaaaagttggtgttttaagacaaaataatttggatgttagcctgccacagtggttcatgcctataatccctgcactttgggaggccaaggcagatggatcgcctgagtccaggagtttgaaaccagcttgggcaacatggcaaaaccccgtctctataaaaaaaaaaagagtacaggccaggcgcggtggctcacgcctgtaatcccagcactttgggaggccgaggcgggcggatcacgaggtcaggagattgagaccatcctggctaacacggtgaaaccccatctctattaaaaatacaaaaaattacctgggcacggtggcgggcgcctgtagtcccagctacttgggaggctgaggcaggagaatggcgtgaacccggggtcggagcttgcagtgagccaagatcgcgccactgtgctccagcctgggcgacagagcgagactccgtcacaaaaaaaaaaaaaaaaaaaaaaaaaaaaattacaaaattagctggacatggtgttgtgcctgtagttccatctacttgggaggctgaggtgggaggatggctcgagcctgggaggcagaggttgcagtgagccaagatcacaccactgcactccagcctgggagacagagtgagaccctctctcaaaaatagtaacttggacgtcaatagtaagatttagagaataagagacaaggcggccgggcgcggtggctcatgtaatcccagcactttggaaggctgaggcaggcggatcaccaggtcaggaaattgagactatcctggctaacacggtgaaacaccgtctctactaaaaatacaaaaaattagccgggcatggtggcgggcgcctgtagtcccaagctactcaggaggctgagacaggagaatgacttgaacccgggaggcggagcttgccgtgagctgagatcgtgccattgcactccagcctgggcgacagagcgagactgcgtctcaaaaaataaaataaaataaaataaaataaaaaagagacaagtcaacgataaaattaaaaatgaaaaaacatgtaatagctacagatcctgaataaatttattgttaataccctaaaaactttatgccagccaactgagaccttagatgaaatagacaaatatctggagaataagttaccaaaatgactgaagagaaatacatggctcacacctatattttttacagaaattgacaagggccaggaataatcgaaatactactgaaaaataagaataaagttgtgatggtaatgacttagggaataatgatggttcttgctctgccagatatcaatgtttatttcaaagctatagctataattaatattcataagctaaattaagaattaattcaatattaatttaataaatttaatattttatagctataattaatacagtacggaattagcccaaatgtgaacaaattgaccaacagacacacacagcataggaaaaccagcattatatgttactgaggaaaagaagaggctgagacatttggttattcatatgcagaaaaatgaaattgaatccctaatttatactacatttttgtcagaagtgcaaaacaatttaaatgtttggaagatatgtaggtaaatatctttgtaattccagggttggaaaggatttcttaaatgagacacagaaaaggactaactagaaaagattgatgttccaaccaaattaaaacttgattgtcagcaattacaataagatacaacaaccaaatgcagtttgtgaattttggatggattctggtctttgaaaaaaaatgctactaaaaaaaaaaaccttgtgacaattgatatttgaatatgaatctatgaatatgagtgatggaattttaaattttcttacatataattctgctattgtgggtatgtagaagaatgtggttaagggattattttgatctatgaagtgtcacgatacaagatttaaatcagcaaaaagttagatatacgtgtgtatagatgtgcacatatatatgtatagagagtgaaagtaataaaagtgtatacactgctaaatgttaataactgaatctagctgaaatgtacaccaatgtacaccaatgttttgttttttggttttttttttagagatggagtctcgctctgtctcccaggctggagtgcagtggcgctatctcggctcactgcaagctccgcctcctgggttcacgccattctcctgcctcagcctcctgagtagctgggactacaggcgcccgccaccatgcccggctaattttttttgtatttttagtagagacggggtttcaccgtgttagccaggatggtctcgatctcctgacctcgtgatccgcctgccttggcctcccaaagtgctgggattacaggcgtcagccaccgtgcccggccgatgtacaccaatgttctctgtacaattctttcagattttctgaatgtttgcaaagttttattttaaaaactggagagagagcacttgaaaagatgctcaacatcattagtcattaggaaaatgcaactcaaaaccatgacataccagttcatacctactttgtatgggatagaataaaaaatgagaggcagtaacaagttcggttgaggatgtggggaaactggaaccttagttccagttgctggtgggaacgtaaaatgctgctgccactttggaaaacaatttggcagttcctcaaaaaattaaccagagttaccatatgacccagaaatttcacacttaggtatatacccaacagaaatgaaaacatgtttacagaaaatcctgtacataaatgttcatagcagcattactgatgacagccaaaagtggaaacaagccaaatgtccatcactggatggattaaggaaatgtggtatatcctatacaatggaatattatttggcaataaaaaggaatgaagtacagatacatgctatgacatgaatgaaacttgaaaacattatgctgaataaaagaaaataaaaacagaaggtcatatattctatgattctgtttattaaaatacccagaataggccaggcactgtggctcacgcctgtaatcccagcacctgggggagccgaggcaggtggatcacttgacgtctggagtttgagaccagcctgggcaatatagcaaaaccccatctcaaccaaaatacacaaaaattattggggcatggtggtgcacacctgtggtcccagctactcgagggagggaggagggaagatcacttgagccagggaggttgaggctgcagtgagctgagattgcaccattgcactccagcctgagcaagagtgagatattgtctcaaaaaataaaataaataaaattttaaaaatacgcagaataggcacatctatagaaatatataaagtagaggccaggagaagtggttcatgcctgtaatccgagcactttgggaggccaaggtgggtgcgccacttgaggtcaggagttcaagaccagcctggtcaacatggtgaaaccccacctctactaaaaatacaaaaatacacctgtagtcccagctactcgggaggctgagttacgagaatcccttgaacctgggaggcggaagttgcagtgagctgaaatcatgccactgcactccagcctgggcaacagagcaagactctgttaaaaaaaaaaaaaatagcgagagatcgagagagagtgcacgtgagaagactagtagttgctatggactgggggagaaggaacgggttacagggtttcttttggggataacgaaaatgttctaaaactggactgtggtgataactgcacaactctgtgaatgtactaaaaactactgaactggccaggcacagtggctcacacctgtaatcccagcactttgggaggccctgagatgggcagatcacttgaggtcaggagttccagaccagtctggccaacatggtgaaaccacatctctactaaaaatatttttaaaaattagccaggcatggtggtgcacctgtaatcccagctacttgggaggctggggcatgagaatcatttgaaaccagggggtggaggttgcagtgagccgagatcacaccaccgcactccagcctgggcgacagagccagactctgtctcaaaaacaaacaaaacaaaaacaacaaaaaacacaactgaacacatttaaggtgaattctgtggtatgtgaactatctctaagaacttctttttatttaagttgggaaacaaaaagatcatgtacaacaaaccaaaaacaaaaaagttatttctaacccatgtaacatataacaaggatctagaacatgtaaatgactctttccaatcaataagaagaaaaataacccagtttgtaaaaaatgtgcaaaagacaaatatttcatacaataggaaaaactaaaatgagataattttgtatccattagatggcaaaaattaagaagtctgatgatcctggtaggggtatgtattggtataatcacttgtagaaagttaaatatgcacatactttatgatctaagtgacctcactcctaagtatatacatgagagaaactcttatgcacatatatatgcaggaatgtctgcataatgttgttcatgccagcaaaaatttggaaacaatgaaatatcaataggaaaatggataatttatgatatattcacacaatatacatcataggctagtgaaattataaccacatgcaacaatatggatatatctttaaaatatttaatgaaaaagtatgcttggcgcggtagctcacacctgtaatcccagcactttgggaggatgagggaggtggatcacctgaggtcatgagttcgagacaagagcgaaactgtctaaaaaaaaaaaaaaaaaaaagagtgaagaatcaagccacagaaggtaatttaaaaatgtacactcaagatttaaaaagaactacaattccataagaaaaaggcaggccacagaataggaaaaagaataaaagacttgtttaggcatttcacaaaagaaagtatacaaatttaagtagttatttaaaccacaatgccattctactatatgggcaaccagaagggccaaaacaaaacgaacaaaagactaccaagtgttaacaaggatttaaggcaactgaaacttccagtcattgctggtgggggtatgaattggtacagtcgctttggaaagctactgagcagtatgtactaaagccagacatatgcgtatttctgaaccaggagtttcactcctaggtatgtactcaaaagaactgtgtacactatgttcaccaaaaaacaagaatgtttatagcaaccctctttgcattagtcaaaagctagtaattacccaaaagttcctgaatggtagaatgaattactaaattgtagtattttcatacaatggaatactatacagcaatgagaatgaataaattacaatataaacaacaatatggatgaacattacataattttgaatgaaaggagccagacacaaaaaaaggatatactgtacaattccatttatacgaagcataaaatcaggcaaaaatctataaatctgtcctgccagaagtcagtggttttccagactcgaaggcaggtacaagcacagttagggtgctggtaacattctgtttaaactctgttctgctggttacatgggtatgttcacttgaaaatccatcaagttttatcctcatggtttgtgtacttttctgtatatatgtttcacttcaataaagtttatttttggtc

SEQ ID NO: 197498 - DNA, 3559 bp, Homo sapiens
  Payload ID: 18952
  Gene Name: ubiquitin specific peptidase 8
  Uniprot ID: P40818
  ENST ID: ENST00000425032
  CDS Start-End: 194-3232
aaatcgggaaaagggggtgagctgggctggcttccgtcctggtagccaaggctaattctccctcgagttcttgggagatgggcatttggcgagaaggctggcgttagtgaagcgcgcccggcgtcacggaaagaagcacttgtaaggaaatatagcatccattgtgaaagtggaaaagtaaagataattcatcatgcctgctgtggcttcagttcctaaagaactctacctcagttcttcactaaaagaccttaataagaagacagaagttaaaccagagaaaataagcactaagagatatgaagaagctgaagtccggaaaaaacttgaggaaaaagacaggcaggaggaagcacagcggctacaacaaaaaaggcaggaaacaggaagagaggatggtggcacattggctaaaggctctttggagaatgttttggattccaaagacaaaacccaaaagagcaatggtgaaaagaatgaaaaatgtgagaccaaagagaaaggagcaatcacagcaaaggaactatacacaatgatgacggataaaaacatcagcttgattataatggatgctcgaagaatgcaggattatcaggattcctgtattttacattctctcagtgttcctgaagaagccatcagtccaggagtcactgctagttggattgaagcacacctgccagatgattctaaagacacatggaagaagagggggaatgtggagtatgtggtacttcttgactggtttagttctgccaaagatttacagattggaacaactctccggagtctgaaagatgcacttttcaagtgggaaagtaaaactgtcctgcgcaatgagcctttggttttagagggaggctatgaaaactggctcctttgttatccccagtatacaacaaatgctaaggtcactccacccccacgacgccagaatgaagaggtgtctatctcattggattttacttatccctcattggaagaatcaattccttctaaacctgctgcccagacgccacctgcatctatagaagtagatgaaaatatagaattgataagtggtcaaaatgagagaatgggaccactgaatatatcaactccagttgaaccagttgctgcttctaaatctgatgtttcacccataattcagccagtgcctagtataaagaatgttccacagattgatcgtactaaaaaaccagcagtcaaattgcctgaagagcatagaataaaatctgaaagtacaaaccatgagcaacaatctcctcagagtggaaaagttattcctgatcgttccaccaagccagtagttttttctccaactctcatgttaacagatgaagaaaaggctcgtattcatgcagaaactgctcttctaatggaaaaaaacaaacaagaaaaagaacttcgggaaaggcagcaagaggaacagaaagagaaactgaggaaggaagaacaagaacaaaaagccaaaaagaaacaagaagctgaagaaaatgaaattacagagaagcaacaaaaagcaaaagaagaaatggagaagaaagaaagtgaacaggccaagaaagaagataaagaaacctcagcaaagaggggcaaagaaataacaggagtaaaaagacaaagtaaaagtgaacatgaaacttctgatgccaagaaatctgtagaagatagggggaaaaggtgtccaaccccagaaatacagaaaaagtcaacaggagatgtgccccatacatctgtgacaggggattcaggttcaggcaaggctcaacgagaacctttgacaagagcacgaagtgaagaaatggggaggatcgtaccaggactgccttcaggctgggccaagtttcttgacccaatcactggaacctttcgttattatcattcacccaccaacactgttcatatgtacccaccggaaatggctccttcatctgcacctccttccacccctccaactcataaagccaagccacagattcctgctgagcgggatagggaaccttccaaactgaagcgctcctactcctccccagatataacccaggctattcaagaggaagagaagaggaagccaacagtaactccaacagttaatcgggaaaacaagccaacatgttatcctaaagctgagatctcaaggctttctgcttctcagattcggaacctcaatcctgtttttggaggttctggaccagctcttactggacttcgtaacttaggaaatacttgttatatgaactcaatattgcagtgcctatgtaacgctccacatttggctgattatttcaaccgaaactgttatcaggatgatattaacaggtcaaatttgttggggcataaaggtgaagtggcagaagaatttggtataatcatgaaagccctgtggacaggacagtatagatatatcagtccaaaggactttaaaatcaccattgggaagatcaatgaccagtttgcaggatacagtcagcaagattcacaagaattgcttctgttcctaatggatggtctccatgaagatctaaataaagctgataatcggaagagatataaagaagaaaataatgatcatctcgatgactttaaagctgcagaacatgcctggcagaaacacaagcagctcaatgagtctattattgttgcactttttcagggtcaattcaaatctacagtacagtgcctcacatgtcacaaaaagtctaggacatttgaggccttcatgtatttgtctctaccactagcatccacaagtaaatgtacattacaggattgccttagattattttccaaagaagaaaaactcacagataacaacagattttactgcagtcattgcagagctcgacgggattctctaaaaaagatagaaatctggaagttaccacctgtgcttttagtgcatctgaaacgtttttcctacgatggcaggtggaaacaaaaattacagacatctgtggacttcccgttagaaaatcttgacttgtcacagtatgttattggtccaaagaacaatttgaagaaatataatttgttttctgtttcaaatcactacggtgggctggatggaggccactacacagcctattgtaaaaatgcagcaagacaacggtggtttaagtttgatgatcatgaagtttctgatatctccgtttcttctgtgaaatcttcagcagcttatatcctcttttatacttcattgggaccacgagtaactgatgtagccacataaggagacataggttataaactagttatcttttaaaaggctcagcaacacaactcttgaaatgcttatcaggataatggtagctatagctggccatttagaggaattctaggacagtgggagctgtgttactagcactatataattccggtcagtgctgacaaataacatttaacaagtattgcagtaatcatcacttacaggtaccatttatttcaaaacaacttttttagtctgctccaaagttaaaataattaactagctaagcattattattcgactggtctaaaaactattgttatcttttttttttccttttcactgttatgg

SEQ ID NO: 197499 - DNA, 1449 bp, Homo sapiens
  Payload ID: 18952
  Gene Name: ubiquitin specific peptidase 8
  ENST ID: ENST00000560730
  CDS Start-End: 166-576
ggcttccgtcctggtagccaaggctaattctccctcgagttcttgggagatgggcatttggcgagaaggctggcgttagtgaagcgcgcccggcgtcacggaaagaagcacttgtaaggaaatatagcatccattgtgaaagtggaaaagtaaagataattcatcatgcctgctgtggcttcagttcctaaagaactctacctcagttcttcactaaaagaccttaataagaagacagaagttaaaccagagaaaataagcactaagagttatgtgcacagtgccctgaagatctttaagacagcagaagaatgcagattagatcgtgatgaggaaagggcctatgtactatatatgaaatacgtgactgtttataatcttatcaaaaaaagacctgatttcaagcaacagcaggattatttccattcaatacttggacctggaaacatcaaaaaagctgtcgaagaagctgaaagactctctgaaagccttaaattaagagcaatggtgaaaagaatgaaaaatgtgagaccaaagagaaaggagcaatcacagcaaaggaactatacacaatgatgacggataaaaacatcagcttgattataatggatgctcgaagaatgcaggattatcaggattcctgtattttacattctctcagtgttcctgaagaagccatcagtccaggagtcactgctagttggattgaagcacacctgccagatgattctaaagacacatggaagaagagggggaatgtggagtatgtggtacttcttgactggtttagttctgccaaagatttacagattggaacaactctccggagtctgaaagatgcacttttcaagtgggaaagtaaaactgtcctgcgcaatgagcctttggttttagagggaggctatgaaaactggctcctttgttatccccagtatacaacaaatgctaaggtcactccacccccacgacgccagaatgaagaggtgtctatctcatgtattggattttacttatccctcattggaagaatcaattccttctaaacctgctgcccagacgccacctgcatctatagaagtagatgaaaatatagaattgataagtggtcaaaatgagagaatgggaccactgaatatatcaactccagttgaaccagttgctgcttctaaatctgatgtttcacccataattcagccagtgcctagtataaagaatgttccacagattgatcgtactaaaaaaccagcagtcaaattgcctgaagagcatagaataaaatctgaaagtacaaaccatgagcaacaatctcctcagagtggaaaagttattcctgatcgttccaccaagccagtagttttttctccaactctcatgttaacagatgaagaaaaggctcgtattcatgcagaaactgctcttctaatggaaaaaaacaaacaagaaaaagaa

SEQ ID NO: 197500 - DNA, 652 bp, Homo sapiens
  Payload ID: 18952
  Gene Name: ubiquitin specific peptidase 8
  ENST ID: ENST00000560297
  CDS Start-End: 363-652
gcaatgcaaatcgggaaaagggggtgagctgggctggcttccgtcctggtagccaaggctaattctccctcgagttcttgggagatgggcatttggcgagaaggctggcgttagtgaagcgcgcccggcgtcacggcaacaacaatactcaacataaatatctgttcttgaactcctgggctcaagcagtcctcccacctcagtctcccagagtgttgggattacagctgtgaggcaccacgcccagtcagtgcactgctttttgcatggagaaagtcttgctgctactttaaaaaggaaagaagcacttgtaaggaaatatagcatccattgtgaaagtggaaaagtaaagataattcatcatgcctgctgtggcttcagttcctaaagaactctacctcagttcttcactaaaagaccttaataagaagacagaagttaaaccagagaaaataagcactaagagttatgtgcacagtgccctgaagatctttaagacagcagaagaatgcagattagatcgtgatgaggaaagggcctatgtactatatatgaaatacgtgactgtttataatcttatcaaaaaaagacctgatttcaagcaacagcaggattatttccattcaatacttggacctggaaacatcaaaaa

SEQ ID NO: 197501 - DNA, 432 bp, Homo sapiens
  Payload ID: 18952
  Gene Name: ubiquitin specific peptidase 8
  ENST ID: ENST00000559242
  CDS Start-End: 49-237
ggaaatatagcatccattgtgaaagtggaaaagtaaagataattcatcatgcctgctgtggcttcagttcctaaagaactctacctcagttcttcactaaaagaccttaataagaagacagaagttaaaccagagaaaataagcactaagaggattatttccattcaatacttggacctggaaacatcaaaaaagctgtcgaagaagctgaaagactctctgaaagccttaaattaagatatgaagaagctgaagtccggaaaaaacttgaggaaaaagacaggcaggaggaagcacagcggctacaacaaaaaaggcaggaaacaggaagagaggatggtggcacattggctaaaggctctttggagaatgttttggattccaaagacaaaacccaaaagagcaatggtgaaaagaatgaaaaatgtgaga

SEQ ID NO: 197502 - DNA, 410 bp, Homo sapiens
  Payload ID: 18952
  Gene Name: ubiquitin specific peptidase 8
  ENST ID: ENST00000560982
  CDS Start-End: 192-410
ctcgagttcttgggagatgggcatttggcgagaaggctggcgttagtgaagcgcgcccggcgtcacgctgctggttaccccggagacaagctctgtccgcggagaggagtgggacaactcctaaaggaaagaagcacttgtaaggaaatatagcatccattgtgaaagtggaaaagtaaagataattcatcatgcctgctgtggcttcagttcctaaagaactctacctcagttcttcactaaaagaccttaataagaagacagaagttaaaccagagaaaataagcactaagagttatgtgcacagtgccctgaagatctttaagacagcagaagaatgcagattagatcgtgatgaggaaagggcctatgtactatatatgaaatacgtgactgtttataatcttatc

SEQ ID NO: 197503 - DNA, 815 bp, Homo sapiens
  Payload ID: 18952
  Gene Name: ubiquitin specific peptidase 8
  ENST ID: ENST00000561330
  CDS Start-End: 32-409
tgtgaaagtggaaaagtaaagataattcatcatgcctgctgtggcttcagttcctaaagaactctacctcagttcttcactaaaagaccttaataagaagacagaagttaaaccagagaaaataagcactaagagttatgtgcacagtgccctgaagatctttaagacagcagaagaatgcagattagatcgtgatgaggaaagggcctatgtactatatatgaaatacgtgactgtttataatcttatcaaaaaaagacctgatttcaagcaacagcaggattatttccattcaatacttggacctggaaacatcaaaaaagctgtcgaagaagctgaaagactctctgaaagccttaaattaagtggattttacttatccctcattggaagaatcaattccttctaaacctgctgcccagacgccacctgcatctatagaagtagatgaaaatatagaattgataagtggtcaaaatgagagaatgggaccactgaatatatcaactccagttgaaccagttgctgcttctaaatctgatgtttcacccataattcagccagtgcctagtataaagaatgttccacagattgatcgtactaaaaaaccagcagtcaaattgcctgaagagcatagaataaaatctgaaagtacaaaccatgagcaacaatctcctcagagtggaaaagttattcctgatcgttccaccaagccagtagttttttctccaactctcatgttaacagatgaagaaaaggctcgtattcatgcagaaactgctcttctaatggaaaaaaacaaacaagaaaaagaa

SEQ ID NO: 197504 - DNA, 1917 bp, Homo sapiens
  Payload ID: 18952
  Gene Name: ubiquitin specific peptidase 8
  ENST ID: ENST00000559329
  CDS Start-End: 478-1917
gagctgggctggcttccgtcctggtagccaaggctaattctccctcgagttcttgggagatgggcatttggcgagaaggctggcgttagtgaagcgcgcccggcgtcacggtgagtgcgggtcttgggccctagcacctgttctctgggaagtcgtccgctgtgaacgatgaacgcctttccttccaccagctgctggttaccccggagacaagctctgtccgcggagaggagtgggacaactcctaaaggcaacaacaatactcaacataaatatctgttcttgaactcctgggctcaagcagtcctcccacctcagtctcccagagtgttgggattacagctgtgaggcaccacgcccagtcagtgcactgctttttgcatggagaaagtcttgctgctactttaaaaaggaaagaagcacttgtaaggaaatatagcatccattgtgaaagtggaaaagtaaagataattcatcatgcctgctgtggcttcagttcctaaagaactctacctcagttcttcactaaaagaccttaataagaagacagaagttaaaccagagaaaataagcactaagagttatgtgcacagtgccctgaagatctttaagacagcagaagaatgcagattagatcgtgatgaggaaagggcctatgtactatatatgaaatacgtgactgtttataatcttatcaaaaaaagacctgatttcaagcaacagcaggattatttccattcaatacttggacctggaaacatcaaaaaagctgtcgaagaagctgaaagactctctgaaagccttaaattaagatatgaagaagctgaagtccggaaaaaacttgaggaaaaagacaggcaggaggaagcacagcggctacaacaaaaaaggcaggaaacaggaagagaggatggtggcacattggctaaaggctctttggagaatgttttggattccaaagacaaaacccaaaagagcaatggtgaaaagaatgaaaaatgtgagaccaaagagaaaggagcaatcacagcaaaggaactatacacaatgatgacggataaaaacatcagcttgattataatggatgctcgaagaatgcaggattatcaggattcctgtattttacattctctcagtgttcctgaagaagccatcagtccaggagtcactgctagttggattgaagcacacctgccagatgattctaaagacacatggaagaagagggggaatgtggagtatgtggtacttcttgactggtttagttctgccaaagatttacagattggaacaactctccggagtctgaaagatgcacttttcaagtgggaaagtaaaactgtcctgcgcaatgagcctttggttttagagggaggctatgaaaactggctcctttgttatccccagtatacaacaaatgctaaggtcactccacccccacgacgccagaatgaagaggtgtctatctcattggattttacttatccctcattggaagaatcaattccttctaaacctgctgcccagacgccacctgcatctatagaagtagatgaaaatatagaattgataagtggtcaaaatgagagaatgggaccactgaatatatcaactccagttgaaccagttgctgcttctaaatctgatgtttcacccataattcagccagtgcctagtataaagaatgttccacagattgatcgtactaaaaaaccagcagtcaaattgcctgaagagcatagaataaaatctgaaagtacaaaccatgagcaacaatctcctcagagtggaaaagttattcctgatcgttccaccaagccagtagttttttctccaactctcatgttaacagatgaagaaaaggctcgtattcatgcagaaactgctcttctaatggaaaaaaacaaacaagaaaaa

SEQ ID NO: 197505 - DNA, 498 bp, Homo sapiens
  Payload ID: 18952
  Gene Name: ubiquitin specific peptidase 8
  ENST ID: ENST00000558091
  CDS Start-End: 93-498
gcatttatatagcagatgaagaatcaggaaagaagcacttgtaaggaaatatagcatccattgtgaaagtggaaaagtaaagataattcatcatgcctgctgtggcttcagttcctaaagaactctacctcagttcttcactaaaagaccttaataagaagacagaagttaaaccagagaaaataagcactaagagttatgtgcacagtgccctgaagatctttaagacagcagaagaatgcagattagatcgtgatgaggaaagggcctatgtactatatatgaaatacgtgactgtttataatcttatcaaaaaaagacctgatttcaagcaacagcaggattatttccattcaatacttggacctggaaacatcaaaaaagctgtcgaagaagctgaaagactctctgaaagccttaaattaagatatgaagaagctgaagtccggaaaaaacttgaggaaaaagacaggcaggaggaagcacagcggctacaac

SEQ ID NO: 197506 - DNA, 609 bp, Homo sapiens
  Payload ID: 18952
  Gene Name: ubiquitin specific peptidase 8
  ENST ID: ENST00000561211
  CDS Start-End: 87-275
tgaagcgcgcccggcgtcacggaaagaagcacttgtaaggaaatatagcatccattgtgaaagtggaaaagtaaagataattcatcatgcctgctgtggcttcagttcctaaagaactctacctcagttcttcactaaaagaccttaataagaagacagaagttaaaccagagaaaataagcactaagaggattatttccattcaatacttggacctggaaacatcaaaaaagctgtcgaagaagctgaaagactctctgaaagccttaaattaagatatgaagaagctgaagtccggaaaaaacttgaggaaaaagacaggcaggaggaagcacagcggctacaacaaaaaaggcaggaaacaggaagagaggatggtggcacattggctaaaggctctttggagaatgttttggattccaaagacaaaacccaaaagagcaatggtgaaaagaatgaaaaatgtgagaccaaagagaaaggagcaatcacagcaaaggaactatacacaatgatgacggataaaaacatcagcttgattataatggatgctcgaagaatgcaggattatcaggattcctgtattttacattctctcagtgttcctga

SEQ ID NO: 197507 - DNA, 1568 bp, Homo sapiens
  Payload ID: 18952
  Gene Name: ubiquitin specific peptidase 8
  ENST ID: ENST00000625664
  CDS Start-End: 294-482
ggtagccaaggctaattctccctcgagttcttgggagatgggcatttggcgagaaggctggcgttagtgaagcgcgcccggcgtcacggtgagtgcgggtcttgggccctagcacctgttctctgggaagtcgtccgctgtgaacgatgaacgcctttccttccaccagctgctggttaccccggagacaagctctgtccgcggagaggagtgggacaactcctaaaggaaagaagcacttgtaaggaaatatagcatccattgtgaaagtggaaaagtaaagataattcatcatgcctgctgtggcttcagttcctaaagaactctacctcagttcttcactaaaagaccttaataagaagacagaagttaaaccagagaaaataagcactaagaggattatttccattcaatacttggacctggaaacatcaaaaaagctgtcgaagaagctgaaagactctctgaaagccttaaattaagatatgaagaagctgaagtccggaaaaaacttgaggaaaaagacaggcaggaggaagcacagcggctacaacaaaaaaggcaggaaacaggaagagaggatggtggcacattggctaaaggctctttggagaatgttttggattccaaagacaaaacccaaaagagcaatggtgaaaagaatgaaaaatgtgagaccaaagagaaaggagcaatcacagcaaaggaactatacacaatgatgacggataaaaacatcagcttgattataatggatgctcgaagaatgcaggattatcaggattcctgtattttacattctctcagtgttcctgaagaagccatcagtccaggagtcactgctagttggattgaagcacacctgccagatgattctaaagacacatggaagaagagggggaatgtggagtatgtggtacttcttgactggtttagttctgccaaagatttacagattggaacaactctccggagtctgaaagatgcacttttcaagtgggaaagtaaaactgtcctgcgcaatgagcctttggttttagagggaggctatgaaaactggctcctttgttatccccagtatacaacaaatgctaaggtcactccacccccacgacgccagaatgaagaggtgtctatctcattggattttacttatccctcattggaagaatcaattccttctaaacctgctgcccagacgccacctgcatctatagaagtagatgaaaatatagaattgataagtggtcaaaatgagagaatgggaccactgaatatatcaactccagttgaaccagttgctgcttctaaatctgatgtttcacccataattcagccagtgcctagtataaagaatgttccacagattgatcgtactaaaaaaccagcagtcaaattgcctgaagagcatagaataaaatctgaaagtacaaaccatgagcaacaatctcctcagagtggaaaagttattcctgatcgttccaccaagccagtagttttttctccaactctcatgttaacagatgaagaaaaggctcgtattcatgcagaaactgctcttctaatgg

SEQ ID NO: 197508 - DNA, 12401 bp, Homo sapiens
  Payload ID: 18953
  Gene Name: ubiquitin specific peptidase 9, X-linked
  Uniprot ID: Q93008
  ENST ID: ENST00000324545
  CDS Start-End: 634-8346
gcggccgccttagcgcccggtgcttgggtcggcgccgggagcgaggagcgagctacttcaaagccaccaggcctggagcggggacagaggcggcgactaggggaaggtgaagccgtcgctgcaggaggaggagcaggaggaggtgacgcaggagaaacgcaccgcccggagcccgtctgagctcagcgagagccccagcctgaggggagaaggggaagagggccgtcgccggccaaggaggaggaggaggcgggcgcggcgaggagcgagttccggcgccggtgtgcagccttttggttgagacgcccgcagccccgagcccggccgccgcagcctttcgatacactttgttgccggtcacccccgggcctgggatgcacccagggtaggtctcgtcccgggaccgagccccaccgtcgcctggtgcctcccgcctccgtgtgccctggttgtgagaagacgtctgtgtcgtgcggttatgcaatggtctctgcaagatggtttattcttgaattggacctttttaagactgacaaatgctggtacttcatcttctataagtggactataatttcttttctcaagacaactacataagcagacaaaattgcaaagatctgccctgtgtcgagtatgacagccacgactcgtggctctccggtcggagggaatgacaaccagggccaggctcctgatggacagtctcagccccccctccaacagaatcagacttcatcgcctgattcttccaatgaaaattccccggcaactcccccagatgagcaaggtcaaggtgatgccccaccacagcttgaagatgaggaacctgcatttccacatactgacttggccaagttggatgacatgatcaacaggcctcgatgggtggttccagttttgccgaaaggggaattagaagtgcttttagaagctgctattgatcttagtaaaaagggccttgatgttaaaagtgaagcatgtcagcgatttttccgtgatgggctaacaatatcattcactaaaattcttacagatgaagcagtgagtggctggaagtttgaaattcataggtgtattattaacaatactcatcgtctggtggagctatgtgtggccaagttgtcccaagactggtttccacttttagaacttcttgccatggccttaaatcctcattgcaaattccatatctacaatggtacacgtccatgtgaatcagtttcctcaagtgttcagttgcctgaagatgaactctttgctcgttctccagatcctcgatcaccaaagggttggctagtggatcttctcaacaaatttggcactttaaatgggttccagattttgcatgatcgttttattaatggatcagcattaaacgttcaaataattgcagcccttattaaaccatttgggcaatgctatgagtttctcactcttcatacagtgaaaaagtactttcttccaataatagaaatggttccacagtttttagaaaacttaactgatgaagaactgaaaaaagaagcaaagaatgaagccaaaaatgatgctctttcaatgattattaaatctttgaagaatttagcttcaagggttccaggacaagaagaaactgttaaaaacttagaaatatttaggttaaaaatgatacttagattattgcaaatttcttctttcaatggaaagatgaatgcactgaatgaagttaataaggtgatatctagtgtatcatactatactcatcgacatggtaatcctgaggaggaagagtggctcacagctgaacgaatggcagaatggatacagcagaacaatatcttatccatagtgttgcgagatagtcttcatcagccacagtatgtagaaaagttagagaagattcttcgttttgtcatcaaagaaaaagctctgaccttacaggatcttgataatatctgggcagcacaggcagggaaacatgaagccattgtgaagaatgtacatgatctcctggcaaaattggcatgggatttttctcctgaacaacttgatcatctttttgattgttttaaggccagttggacaaatgcgagtaaaaagcaacgtgaaaagctacttgagctgatacgtcgtcttgcagaagatgataaagatggtgtgatggcacacaaagtgttgaaccttctgtggaatctggctcacagtgatgatgtgcctgtagatatcatggacctggctctcagtgcccacataaaaatactagattacagttgctcccaggaccgtgatacacaaaagatccaatggatagatcgctttatagaagaacttcgcacaaatgacaaatgggttattcccgcactgaaacaaattagagaaatttgtagtttgtttggtgaagcgcctcaaaatttgagtcaaactcagcgaagtccccatgtgttttatcgccatgacttaatcaatcaacttcaacacaatcatgccctagttactttggtagcagaaaaccttgcaacttacatggaaagcatgagactatatgctagagaccatgaagattatgacccacaaactgtgaggctgggaagtagatatagtcatgttcaagaagttcaagaacggcttaacttccttagatttttattgaaggatggtcagctgtggctatgtgctcctcaggcaaaacaaatatggaaatgcttagctgagaatgcagtttacctttgtgatcgtgaagcctgttttaagtggtattccaagttgatgggggatgaaccagacttagatcctgatattaataaggacttctttgaaagtaatgtgcttcagcttgatccttctctgttaactgaaaatggaatgaagtgttttgagcgattcttcaaagctgtgaattgtcgagaaggaaaactagtagcaaaaaggagagcctatatgatggatgacttggagttaataggattagattacctttggagggtcgtgattcagagtaatgatgatattgccagcagagctatagatctcctcaaagagatatacacgaaccttggtccaagactacaagtcaatcaggtggtgatccatgaagacttcattcagtcttgttttgatcgtctgaaggcttcctatgacacattgtgtgttttggatggtgacaaagacagtgttaattgtgcaagacaggaagctgttcgaatggttcgagtattaactgttttaagggaatatataaatgaatgtgacagtgattatcatgaggaaagaacaattctccctatgtcgagagcattccgcggtaaacacctctcttttgtagttcgatttccaaaccagggcagacaggttgatgacttggaggtatggtctcatacaaatgatacaattggttcagtacgacgatgtattctcaatcgtattaaagccaacgtagcccatacaaaaattgagctctttgtgggcggtgagctgatagatcctgcagatgatagaaagttgattggacaattaaacttaaaagataaatcgcttattacagccaaacttacacagataagttccaatatgccttcaagccctgatagctcttctgattcctccactggatctcctggaaaccatggtaatcattacagtgatggtcccaatccagaagtggaaagctgtttgcctggagtgataatgtcactgcatcccagatacatctcttttctttggcaagttgcagacttaggtagcagcctaaatatgccaccccttagagatggagcaagagtacttatgaaacttatgccgccagatagcacaacgatagaaaaattaagagctatttgtttagaccatgccaaacttggagaaagcagccttagtccatctcttgactcacttttctttggtccttcagcctcacaagtgctatatctaacagaggtagtctatgccttgttaatgcctgctggtgcacctctggctgatgattcctctgattttcagtttcacttcttgaaaagtggtggcctaccccttgtactgagtatgctaaccagaaataacttcctaccgaatgcagatatggaaactcgaaggggtgcctacctcaatgctcttaaaatagccaagcttttgctaactgccattggctatggtcatgttcgagctgtggcagaagcttgtcagccaggtgtagaaggtgtgaatcccatgacacagatcaaccaagttacccatgatcaagcagtggtgctacaaagtgcccttcagagcattcctaatccatcatccgagtgcatgcttagaaatgtgtcagttcgtcttgctcagcagatatctgatgaggcttcaagatatatgcctgatatttgtgtaattagagctatacaaaaaattatctgggcatcaggatgtgggtcgttacagctagtatttagcccaaatgaagaaatcactaaaatttatgagaagaccaatgcaggcaatgagccagacttggaagacgaacaggtttgctgtgaagcattggaagtgatgaccttatgttttgccttgattccaacagccttagatgctcttagtaaagaaaaggcttggcagacattcatcattgacttactattgcactgtcacagcaaaactgttcgtcaggtggcacaggagcagttctttttaatgtgcaccagatgttgcatgggacaccggcctctacttttcttcattactctactctttactgttttggggagcacagcaagagagagagctaaacactcaggcgactactttactcttttaagacaccttcttaattacgcttacaatagtaatattaatgtacccaatgctgaagttcttctcaataatgaaattgattggcttaaaagaattagggatgatgttaaaagaacaggagaaacgggtattgaagagacgatcttagagggccaccttggagtgacaaaggagttactggcctttcaaacttctgagaaaaaatttcatattggttgtgaaaaaggaggtgctaatctcattaaagaattaattgatgatttcatatttcctgcatccaatgtttacctacagtatatgagaaatggagagcttccagctgaacaggctattccggtctgtggttcaccacctacaattaatgctggttttgaattacttgtagcattagctgttggctgtgtgaggaatctcaaacaaatagtagattctttgactgaaatgtattacattggcacagcaataactacttgtgaagcacttactgagtgggaatatctgccacctgttggaccccgcccacccaaaggattcgtggggctgaaaaatgccggtgctacttgttacatgaattctgtgattcagcaactctacatgattccttccattaggaacggtattcttgccattgaaggcacaggtagtgatgtagatgatgatatgtctggggatgagaagcaggacaatgagagcaatgttgatcccagggatgatgtatttggatatcctcaacaatttgaagataaaccagcattaagtaaaactgaagatagaaaagagtacaacattggtgtcctaagacaccttcaggtcatctttggtcatttagctgcttctcgactgcaatactatgtgcccagaggattttggaaacagttcaggctttggggtgagcctgttaatctgcgtgaacaacacgatgctttagaattttttaattcattggtggatagtttagatgaagctttaaaagctttaggacatccagctatgctaagtaaagtcttaggaggttcctttgctgatcagaagatctgccaaggctgcccacataggtacgaatgtgaagaatcttttacgaccctaaacgtagacattagaaatcaccaaaatcttcttgattctttggaacagtatgtcaaaggagatttactagaaggtgcaaatgcatatcattgtgaaaaatgcaataaaaaggttgataccgtaaagcgcttgctgattaaaaaattacctcctgttcttgctatacaactaaagcgatttgactatgactgggaaagagaatgtgcaatcaagttcaatgattattttgaatttcctcgagagctggacatggaaccttacacagttgcaggtgtcgcaaagctggaaggggataatgtaaacccagagagtcagttgatacaacagagtgagcagtctgaaagtgagacagcaggaagcacaaaatacagacttgtgggtgtgctcgtacacagtggtcaagcgagtggggggcattattattcttacatcatccaaaggaatggtggagatggtgagagaaatcgctggtataaatttgatgatggtgatgtaacagaatgtaaaatggatgatgacgaagaaatgaaaaaccagtgttttggtggagagtacatgggagaagtgtttgatcacatgatgaagcgtatgtcatacaggcgccagaaaaggtggtggaatgcttatatacttttttatgaacgaatggacacaatagaccaagatgatgagttgataagatatatatcagagcttgctatcaccaccagacctcatcagattattatgccatcagccattgagagaagtgtacggaaacagaacgtacaattcatgcataaccgaatgcagtacagtatggagtattttcagtttatgaaaaaactgcttacatgtaatggcgtttacttaaaccctcctcccgggcaagatcacctgttgcctgaagcagaagaaatcactatgatcagtattcaacttgctgctaggttcctctttactacaggatttcacacaaagaaagtagtccgtggctctgccagtgattggtatgatgcattgtgtattctccttcgtcacagcaagaatgtacgtttttggtttgctcataacgtcctttttaatgtttcaaatcgcttctccgaataccttctggagtgccctagtgcagaagtgaggggtgcgtttgcaaaacttatagtctttattgcacatttttccttgcaagatgggccatgtccttcaccttttgcctctcctggaccttctagtcaggcttatgacaacttaagcttgagtgatcacttactaagagcagtactaaatctcttgagaagggaagtttcagagcatgggcgtcatttacagcagtatttcaacctgtttgtaatgtatgccaatttaggtgtggcagagaagacacagcttctgaaattgagtgtacctgctacttttatgcttgtgtctttagatgaaggtccaggtcctccaatcaaataccagtatgctgaattaggcaaattatactcagtagtgtcacagctgatccgctgttgcaatgtctcttcaagaatgcagtcttcaatcaatggtaatcctcctcttcccaatccttttggtgatcctaatttatcacaacctataatgccaattcagcagaatgtggcagacattttatttgtgagaacaagttatgtgaagaaaatcattgaagactgcagtaattcagaggaaaccgtcaaattgcttcgtttttgctgctgggagaatcctcagttctcatctactgtcctcagtgaacttctctggcaggttgcatattcctatacctatgaactgcggccctatttggatctgcttttgcaaatcttactgattgaggactcctggcaaactcacagaattcataatgcactgaaaggaattccagatgaccgagatgggctgtttgacacaatccagcgctctaagaatcactatcaaaaaagagcataccagtgtataaaatgtatggtagctctatttagtaactgtcctgttgcttaccaaatcctgcagggcaatggagatcttaaaagaaagtggacctgggcagtggaatggcttggagatgaacttgaaagaagaccatatactggcaatcctcagtacacttacaacaattggtctcccccagtgcaaagcaatgaaacgtccaatggttatttcttggagagatcacatagtgctaggatgacacttgcaaaagcttgtgaactctgtccagaggaggtaaaaaaagccaccagtgtgcagcagatagaaatggaagagagcaaagagccagatgaccaagatgctccagatgaacatgagtcgcctccacctgaagatgccccattgtacccccattcacctggatctcagtatcaacagaataaccatgtgcatggacagccatatacaggcccagcagcacatcacatgaacaaccctcagagaactggccaacgagcacaagaaaattatgaaggcagtgaagaagtatccccacctcaaaccaaggatcaatgaaatgcacataattaactggttccatcaagactgtgcacccaggccttacagtccaacctttttctgtgtctggctaatatttaaaactagaaaaactattcctaatcaacatggagtggagagtttattcactgtcttatctgcagaaatttgctgtcaatatataacccgcctgcagtggaaagtgtatagtgttttgtaataaatggcctgatgctaatgtgtaaatggcaaaggtgtatatagtatattaatgttgactgttaattcttaagcaagaaacttttttcttgatgagactcacagatctacacaaactacaaaagttaattttcttgttacacccactgcactctgcaaccagtgttgcctgcctcatggcagttggatcagctcctttacaaaaaagaaaaaaaaaaaaccaacagcaacaaaacagagcccatccatgtcagccacaccaatagtttcatgttaattctttgccactggagtcaattttgctatgagcaatgtaaggctggtaacctttaaattatttggttgatgtggaaaattggtgatgtaacactgtttctagatttttttcattgcctttttattctgatattaggttaatcactttgaagctatagttatgctgtaacatttagcatggcttcacaccaagttagtgtagccaatgaggaaaaagttaccataatgacagcagttgtccgagaagtgacagctgtattactcagagcttttacttcttacacctagaatattaaaatataaaacaaggggagaaatgtgacagtctattttcagttgcacatatgttccttatatataatgtttgacagttcaatctctgggtggaataaagaacacttacgtatcagtaatgggaatttttaaagatttaaaacaaatatgcaaaaatttgctatgccaagatgctggagcataatataagactgtatttggtgtgcttgttttgtttctttggtagagtttattaggtgaatcttctaaaactttccttctgttggatcccagtgacgtggaagtcatcagaaccccacggtacttggagtacctctctgcaccaagatagctggctgattttctgctcagtcacaattttacttgaaagcaagaattgtcctagctccttttccattattccaaaacgtttaacgttcaaagcagggtctcattaaaaaagaaactactggttgatataattgagatattacaatttcagaataaacatttgattaaaaataaggaaatcctcagttcatactgtatttaaaagagaattggtaacttgaatgtgtgtaattttttggaacctgtctaaaaaccaaatacccctgcaaacagatacagcccaccctattctatttaaatattttgctgttttattttatagaaattattttgctgaattcacaaatagaatttgatttaagaagaactttttgtcctgtggtgtgtttttggttttttttttggttactttttttgtcctttttttttttttttaaaagaggactgcatattaaaattcattctgtgcatagcatgcctaggcatgacactgattcaggatttcagtcacatcaagtttttgtgcacagaaagatttgacctttggccctctactgaagattttgagaaatcaggatgttgacactgtaaaagtttcctaacataatcttgtactttttgtatgttttttatatacatgtatatttaatgagcacaagcttggttgtattttttacaattcagttaatagggaaatgttttgtcaaaaggctacacttggaactgaacaaagcagaaacaaaattgagcattgcattattttgtgattaaaaggggcaggtatttaagataaagctttgggtatcttatttgtagtactgtatagtcaacctgtgcttctaggtgttcctgtaggacattttgacaccgatactttgagtgaaagtcacacacggtgtttgcaattccaactgatttttgttttgtttttatttttttgttgttttcttctttgagatggagtcttgctctgtcacccaggctggagtgcagtggcacaatcttggctcactgcaacgtcgcctcctgggttcaagcgattcttccgcctcagcctcccgagtagctgggattagaggtgcccaccaccacgcccagctaatttttgtatttttgtagagacagggtttcaccacgttggccaggctggtcttgaactcctgacctcaggtgatctggccgcctcggcctcccaaagtgctgggattgcaggtgtgagccaccgcgcctggccccagttgatagtttttttaatttaaaagttcctcaattccaagctctttaaacgagtgaaataggttaactttatttggatgagttaggtgtaccatctcaccatctgagaggagatttatatatttcctgctgctccttaacaaaatatgtaatgtacttaaaaactttaacgacttcctagttgagagaaaacttgacatataaaaggctgtgaatttttctgcttggaggaagagcccaaccttggttgctttgaagttacaagcccccttgtgccaggtgaggggcttgtgagtcatttttgtctccatttgaggaagagtggtattcgttgtgactaggagcaagggaaagtggagttatttttgtttgtgcaaattattttctatatttaactcaagcattaatgtataaccagaaatttaaagatgcatgttgttgcaagagcaacataatggtgattttgaggtctttttctgaacacaagtggcacattttaaatttcaagtcttcaaagtgcctaaggattatttagttctccctcaactgattttttgagccatatatttcctattttaaatgtttgcggaatcgccagtcttcctttgaaagaaacagcccccagaattctaaatgacacgattatagaagacagtagaatgtgttaccataaagactgaagatattttagttgtaaaaccatgtgaacaagggcttttgccctattgtatctaagtatttcagtgcacaacttgttaaaccatgttgctgctgtttctaagccctccaccaactgaactttcatgtttagcattgtagaggcagaaataacatactaggttttttttttctttcattgatttttctcctggtgataatttcccagccttgtgtcttttagctgttgtgtatacaaatttagaattaaaatgttttctatttttttcatgattaacttagtgaataacttaaatccttaatcctcgtagtggttagaaagatgaggagacttttttgacttacatttgtaaatgaaaacaagtctgtgaatattcagatgactacttcgaagtaattcagtttttttattagtatttttccagcttatgttttcccatgagctattttactttgctgaattttgtgggtaatttggtggatatatcctgccttatttaggattatagctggataagaaaattgccttttcattgtaagtgcccagttttggtctctagtttgaaggtactacatactgccgataaaggaaaacactcccctacaccccagtttttgtgttaccaagaaaaaaaaaacagtattggtttcatagtaggactcaaccagaattggtcctacatatatgtgagtgttcagtttttgcaaataaggtttttgagtgtgataaaacactacagaagtgctaagtgtattgagaatttgctgctgattgtatttataacaattacttgacgtttgcagaaatttagcactttccctccaaatttataggtgtaagagaagcgggggcaaggtgcaccacattttaaaactgcaaatgtgtgaaaatttatttagagattcagattcctaaaaggaaatttcaccacccaagtcatgcacttcttagccttttacaagccaacagactgacatgaagattgttcacagttcctaagatttagcacatatacaaaaataaaactttataaattcaa

SEQ ID NO: 197509 - DNA, 8371 bp, Homo sapiens
  Payload ID: 18953
  Gene Name: ubiquitin specific peptidase 9, X-linked
  Uniprot ID: Q93008
  ENST ID: ENST00000378308
  CDS Start-End: 634-8298
gcggccgccttagcgcccggtgcttgggtcggcgccgggagcgaggagcgagctacttcaaagccaccaggcctggagcggggacagaggcggcgactaggggaaggtgaagccgtcgctgcaggaggaggagcaggaggaggtgacgcaggagaaacgcaccgcccggagcccgtctgagctcagcgagagccccagcctgaggggagaaggggaagagggccgtcgccggccaaggaggaggaggaggcgggcgcggcgaggagcgagttccggcgccggtgtgcagccttttggttgagacgcccgcagccccgagcccggccgccgcagcctttcgatacactttgttgccggtcacccccgggcctgggatgcacccagggtaggtctcgtcccgggaccgagccccaccgtcgcctggtgcctcccgcctccgtgtgccctggttgtgagaagacgtctgtgtcgtgcggttatgcaatggtctctgcaagatggtttattcttgaattggacctttttaagactgacaaatgctggtacttcatcttctataagtggactataatttcttttctcaagacaactacataagcagacaaaattgcaaagatctgccctgtgtcgagtatgacagccacgactcgtggctctccggtcggagggaatgacaaccagggccaggctcctgatggacagtctcagccccccctccaacagaatcagacttcatcgcctgattcttccaatgaaaattccccggcaactcccccagatgagcaaggtcaaggtgatgccccaccacagcttgaagatgaggaacctgcatttccacatactgacttggccaagttggatgacatgatcaacaggcctcgatgggtggttccagttttgccgaaaggggaattagaagtgcttttagaagctgctattgatcttagtaaaaagggccttgatgttaaaagtgaagcatgtcagcgatttttccgtgatgggctaacaatatcattcactaaaattcttacagatgaagcagtgagtggctggaagtttgaaattcataggtgtattattaacaatactcatcgtctggtggagctatgtgtggccaagttgtcccaagactggtttccacttttagaacttcttgccatggccttaaatcctcattgcaaattccatatctacaatggtacacgtccatgtgaatcagtttcctcaagtgttcagttgcctgaagatgaactctttgctcgttctccagatcctcgatcaccaaagggttggctagtggatcttctcaacaaatttggcactttaaatgggttccagattttgcatgatcgttttattaatggatcagcattaaacgttcaaataattgcagcccttattaaaccatttgggcaatgctatgagtttctcactcttcatacagtgaaaaagtactttcttccaataatagaaatggttccacagtttttagaaaacttaactgatgaagaactgaaaaaagaagcaaagaatgaagccaaaaatgatgctctttcaatgattattaaatctttgaagaatttagcttcaagggttccaggacaagaagaaactgttaaaaacttagaaatatttaggttaaaaatgatacttagattattgcaaatttcttctttcaatggaaagatgaatgcactgaatgaagttaataaggtgatatctagtgtatcatactatactcatcgacatggtaatcctgaggaggaagagtggctcacagctgaacgaatggcagaatggatacagcagaacaatatcttatccatagtgttgcgagatagtcttcatcagccacagtatgtagaaaagttagagaagattcttcgttttgtcatcaaagaaaaagctctgaccttacaggatcttgataatatctgggcagcacaggcagggaaacatgaagccattgtgaagaatgtacatgatctcctggcaaaattggcatgggatttttctcctgaacaacttgatcatctttttgattgttttaaggccagttggacaaatgcgagtaaaaagcaacgtgaaaagctacttgagctgatacgtcgtcttgcagaagatgataaagatggtgtgatggcacacaaagtgttgaaccttctgtggaatctggctcacagtgatgatgtgcctgtagatatcatggacctggctctcagtgcccacataaaaatactagattacagttgctcccaggaccgtgatacacaaaagatccaatggatagatcgctttatagaagaacttcgcacaaatgacaaatgggttattcccgcactgaaacaaattagagaaatttgtagtttgtttggtgaagcgcctcaaaatttgagtcaaactcagcgaagtccccatgtgttttatcgccatgacttaatcaatcaacttcaacacaatcatgccctagttactttggtagcagaaaaccttgcaacttacatggaaagcatgagactatatgctagagaccatgaagattatgacccacaaactgtgaggctgggaagtagatatagtcatgttcaagaagttcaagaacggcttaacttccttagatttttattgaaggatggtcagctgtggctatgtgctcctcaggcaaaacaaatatggaaatgcttagctgagaatgcagtttacctttgtgatcgtgaagcctgttttaagtggtattccaagttgatgggggatgaaccagacttagatcctgatattaataaggacttctttgaaagtaatgtgcttcagcttgatccttctctgttaactgaaaatggaatgaagtgttttgagcgattcttcaaagctgtgaattgtcgagaaggaaaactagtagcaaaaaggagagcctatatgatggatgacttggagttaataggattagattacctttggagggtcgtgattcagagtaatgatgatattgccagcagagctatagatctcctcaaagagatatacacgaaccttggtccaagactacaagtcaatcaggtggtgatccatgaagacttcattcagtcttgttttgatcgtctgaaggcttcctatgacacattgtgtgttttggatggtgacaaagacagtgttaattgtgcaagacaggaagctgttcgaatggttcgagtattaactgttttaagggaatatataaatgaatgtgacagtgattatcatgaggaaagaacaattctccctatgtcgagagcattccgcggtaaacacctctcttttgtagttcgatttccaaaccagggcagacaggttgatgacttggaggtatggtctcatacaaatgatacaattggttcagtacgacgatgtattctcaatcgtattaaagccaacgtagcccatacaaaaattgagctctttgtgggcggtgagctgatagatcctgcagatgatagaaagttgattggacaattaaacttaaaagataaatcgcttattacagccaaacttacacagataagttccaatatgccttcaagccctgatagctcttctgattcctccactggatctcctggaaaccatggtaatcattacagtgatggtcccaatccagaagtggaaagctgtttgcctggagtgataatgtcactgcatcccagatacatctcttttctttggcaagttgcagacttaggtagcagcctaaatatgccaccccttagagatggagcaagagtacttatgaaacttatgccgccagatagcacaacgatagaaaaattaagagctatttgtttagaccatgccaaacttggagaaagcagccttagtccatctcttgactcacttttctttggtccttcagcctcacaagtgctatatctaacagaggtagtctatgccttgttaatgcctgctggtgcacctctggctgatgattcctctgattttcagtttcacttcttgaaaagtggtggcctaccccttgtactgagtatgctaaccagaaataacttcctaccgaatgcagatatggaaactcgaaggggtgcctacctcaatgctcttaaaatagccaagcttttgctaactgccattggctatggtcatgttcgagctgtggcagaagcttgtcagccaggtgtagaaggtgtgaatcccatgacacagatcaaccaagttacccatgatcaagcagtggtgctacaaagtgcccttcagagcattcctaatccatcatccgagtgcatgcttagaaatgtgtcagttcgtcttgctcagcagatatctgatgaggcttcaagatatatgcctgatatttgtgtaattagagctatacaaaaaattatctgggcatcaggatgtgggtcgttacagctagtatttagcccaaatgaagaaatcactaaaatttatgagaagaccaatgcaggcaatgagccagacttggaagacgaacaggtttgctgtgaagcattggaagtgatgaccttatgttttgccttgattccaacagccttagatgctcttagtaaagaaaaggcttggcagacattcatcattgacttactattgcactgtcacagcaaaactgttcgtcaggtggcacaggagcagttctttttaatgtgcaccagatgttgcatgggacaccggcctctacttttcttcattactctactctttactgttttggggagcacagcaagagagagagctaaacactcaggcgactactttactcttttaagacaccttcttaattacgcttacaatagtaatattaatgtacccaatgctgaagttcttctcaataatgaaattgattggcttaaaagaattagggatgatgttaaaagaacaggagaaacgggtattgaagagacgatcttagagggccaccttggagtgacaaaggagttactggcctttcaaacttctgagaaaaaatttcatattggttgtgaaaaaggaggtgctaatctcattaaagaattaattgatgatttcatatttcctgcatccaatgtttacctacagtatatgagaaatggagagcttccagctgaacaggctattccggtctgtggttcaccacctacaattaatgctggttttgaattacttgtagcattagctgttggctgtgtgaggaatctcaaacaaatagtagattctttgactgaaatgtattacattggcacagcaataactacttgtgaagcacttactgagtgggaatatctgccacctgttggaccccgcccacccaaaggattcgtggggctgaaaaatgccggtgctacttgttacatgaattctgtgattcagcaactctacatgattccttccattaggaacggtattcttgccattgaaggcacaggtagtgatgtagatgatgatatgtctggggatgagaagcaggacaatgagagcaatgttgatcccagggatgatgtatttggatatcctcaacaatttgaagataaaccagcattaagtaaaactgaagatagaaaagagtacaacattggtgtcctaagacaccttcaggtcatctttggtcatttagctgcttctcgactgcaatactatgtgcccagaggattttggaaacagttcaggctttggggtgagcctgttaatctgcgtgaacaacacgatgctttagaattttttaattcattggtggatagtttagatgaagctttaaaagctttaggacatccagctatgctaagtaaagtcttaggaggttcctttgctgatcagaagatctgccaaggctgcccacataggtacgaatgtgaagaatcttttacgaccctaaacgtagacattagaaatcaccaaaatcttcttgattctttggaacagtatgtcaaaggagatttactagaaggtgcaaatgcatatcattgtgaaaaatgcaataaaaaggttgataccgtaaagcgcttgctgattaaaaaattacctcctgttcttgctatacaactaaagcgatttgactatgactgggaaagagaatgtgcaatcaagttcaatgattattttgaatttcctcgagagctggacatggaaccttacacagttgcaggtgtcgcaaagctggaaggggataatgtaaacccagagagtcagttgatacaacagagtgagcagtctgaaagtgagacagcaggaagcacaaaatacagacttgtgggtgtgctcgtacacagtggtcaagcgagtggggggcattattattcttacatcatccaaaggaatggtggagatggtgagagaaatcgctggtataaatttgatgatggtgatgtaacagaatgtaaaatggatgatgacgaagaaatgaaaaaccagtgttttggtggagagtacatgggagaagtgtttgatcacatgatgaagcgtatgtcatacaggcgccagaaaaggtggtggaatgcttatatacttttttatgaacgaatggacacaatagaccaagatgatgagttgataagatatatatcagagcttgctatcaccaccagacctcatcagattattatgccatcagccattgagagaagtgtacggaaacagaacgtacaattcatgcataaccgaatgcagtacagtatggagtattttcagtttatgaaaaaactgcttacatgtaatggcgtttacttaaaccctcctcccgggcaagatcacctgttgcctgaagcagaagaaatcactatgatcagtattcaacttgctgctaggttcctctttactacaggatttcacacaaagaaagtagtccgtggctctgccagtgattggtatgatgcattgtgtattctccttcgtcacagcaagaatgtacgtttttggtttgctcataacgtcctttttaatgtttcaaatcgcttctccgaataccttctggagtgccctagtgcagaagtgaggggtgcgtttgcaaaacttatagtctttattgcacatttttccttgcaagatgggccatgtccttcaccttttgcctctcctggaccttctagtcaggcttatgacaacttaagcttgagtgatcacttactaagagcagtactaaatctcttgagaagggaagtttcagagcatgggcgtcatttacagcagtatttcaacctgtttgtaatgtatgccaatttaggtgtggcagagaagacacagcttctgaaattgagtgtacctgctacttttatgcttgtgtctttagatgaaggtccaggtcctccaatcaaataccagtatgctgaattaggcaaattatactcagtagtgtcacagctgatccgctgttgcaatgtctcttcaagaatgcagtcttcaatcaatggtaatcctcctcttcccaatccttttggtgatcctaatttatcacaacctataatgccaattcagcagaatgtggcagacattttatttgtgagaacaagttatgtgaagaaaatcattgaagactgcagtaattcagaggaaaccgtcaaattgcttcgtttttgctgctgggagaatcctcagttctcatctactgtcctcagtgaacttctctggcaggttgcatattcctatacctatgaactgcggccctatttggatctgcttttgcaaatcttactgattgaggactcctggcaaactcacagaattcataatgcactgaaaggaattccagatgaccgagatgggctgtttgacacaatccagcgctctaagaatcactatcaaaaaagagcataccagtgtataaaatgtatggtagctctatttagtaactgtcctgttgcttaccaaatcctgcagggcaatggagatcttaaaagaaagtggacctgggcagtggaatggcttggagatgaacttgaaagaagaccatatactggcaatcctcagtacacttacaacaattggtctcccccagtgcaaagcaatgaaacgtccaatggttatttcttggagagatcacatagtgctaggatgacacttgcaaaagcttgtgaactctgtccagaggaggagccagatgaccaagatgctccagatgaacatgagtcgcctccacctgaagatgccccattgtacccccattcacctggatctcagtatcaacagaataaccatgtgcatggacagccatatacaggcccagcagcacatcacatgaacaaccctcagagaactggccaacgagcacaagaaaattatgaaggcagtgaagaagtatccccacctcaaaccaaggatcaatgaaatgcacataattaactggttccatcaagactgtgcacccaggccttacagtccaacctttttctgtgtctgg

SEQ ID NO: 197510 - DNA, 548 bp, Homo sapiens
  Payload ID: 18953
  Gene Name: ubiquitin specific peptidase 9, X-linked
  ENST ID: ENST00000462850
  CDS Start-End: 1-139
aattctgtggaaggccaaaaagatgcataaggttattgtagtagagcatttggtatatagaggaacatttccagcctgttccaagaaagaggtgttagaagaactgttcgtcaggtggcacaggagcagttctttttaatgtgcaccagatgttgcatgggacaccggcctctacttttcttcattactctactctttactgttttggggagcacagcaagagagagagctaaacactcaggcgactactttactcttttaagacaccttcttaattacgcttacaatagtaatattaatgtacccaatgctgaagttcttctcaataatgaaattgattggcttaaaagaattagggatgatgttaaaagaacaggagaaacgggtattgaagagacgatcttagagggccaccttggagtgacaaaggagttactggcctttcaaacttctgagaaaaaatttcatattggttgtgaaaaaggaggtgctaatctcattaaagaattaattgatgatttcatatttcctgcatccaatgtttacct

SEQ ID NO: 197511 - DNA, 10036 bp, Homo sapiens
  Payload ID: 18954
  Gene Name: ubiquitin specific peptidase 9, Y-linked
  Uniprot ID: O00507
  ENST ID: ENST00000338981
  CDS Start-End: 946-8613
tgaataattgaactttgtttatttctccatatttttgcagtggtaattccattataaaacctaatgaaacaatgtttttatagatggtgtggaaagacttttctgggctcagaggtgaaactgacccttgtgtatcagcagcatttctgactgactgagagagtgtagtgattaacagagttgtgatgttagttaagaaacttagatttgccattgtagcttttctaccaattagcagattgtttaactcactgaaattgtaaagtggtagacgtggacttagtcattactgggcagcttatgaattgtattcatttactcatgatgtaaaaatggttagtctccacttttaaggctctagttctagtggctaaataggtacttatttatacagtatgataactgctgtattaaaatacatgtctcaaatgtggaatagtagaagaggtgaagaaaatcatagtttgaggtagaatactgtttgctggtcttaaaaactgtggtattttggtgattccataaattaggtcagatacttccactggagggaaacagtttaaaggatatatgtgatactattaatagaatgaggaagacacaccagatatttaggagggaattagcgagcttgaaactaagagctggtttgaatgagactgggtcataagtgatttcaagtaccagattaaggcactgagattttatttttaagcactgaagtcagattttttccttttaaaagaaaggattcatgatgaaatctgctttttgttttgcagagagcttggagataattctggtggctgtgtggagtatgtgttggaggtattaaattttcacagtatatataaggcagcaattgataggcctttcacagattcttctgataactacataaagagacaaaaaaaagaaaaaagagcaaagatctgtgctgtgtcaagtatgacagccatcactcatggctctccagtaggagggaacgacagccagggccaggttcttgatggccagtctcagcatctcttccaacagaaccagacttcatcacctgattcttccaatgagaattccgtagcaactcctcctccagaggaacaagggcaaggtgatgccccaccacagcatgaagatgaagagcctgcatttccacatactgagctggcaaacctggatgacatgatcaacaggcctcgatgggtggttcctgttttgccaaaaggggaattagaagtgcttttagaagctgctattgatcttagtgtaaaaggccttgatgttaaaagtgaagcatgccaacgtttttttcgagatggactaacaatatctttcactaaaattcttatggatgaggctgtgagtggctggaagtttgaaattcatagatgtattattaacaatactcatcgcctagtggagctttgtgtggccaagttgtcccaagattggtttccacttctagaacttctcgccatggccttaaatcctcactgcaagtttcatatctacaatggtacacgtccgtgtgaattaatttcctcaaatgctcagttgcctgaagatgaattatttgctcgttcttcagatcctcgatcaccaaaaggttggctagtggatctcatcaataaatttggcacattaaatgggttccagattttgcatgatcgtttttttaatggatcagcattaaatattcaaataattgcagctcttattaaaccatttggacaatgctatgagtttctcagtcaacatacactgaaaaagtacttcattccagttatagaaatagttccacatttattggaaaacttaactgatgaagaactgaaaaaggaggcaaagaatgaagccaaaaatgatgccctttcaatgattattaaatctttgaagaacttagcttcaagaatttcaggacaagatgagactataaaaaatttggaaatttttaggttaaagatgatactcagattgttgcaaatttcctcttttaatggaaagatgaatgcactgaatgaaataaataaggttatatctagtgtatcatattatactcatcggcatagtaatcctgaggaggaagaatggctgacagctgagcgaatggcagaatggatacagcaaaataatatcttatccatagtcttgcaagacagtcttcatcaaccacaatatgtagaaaagctagagaaaattcttcgttttgtgattaaagaaaaggctcttacattacaggaccttgataatatctgggcagcacaggcaggaaaacatgaagccattgtgaagaatgtacatgatctgctagcaaagttggcttgggatttttctcctggacaacttgatcatctttttgattgctttaaggcaagttggacaaatgcaagtaaaaagcaacgtgaaaagctccttgagttgatacgccgtcttgcagaagatgataaagatggtgtgatggcacacaaagtgttgaaccttctttggaacctggctcagagtgatgatgtgcctgtagacatcatggaccttgctcttagtgcccacataaaaatactagattatagttgttcccaggatcgagatgcacagaagatccagtggatagatcactttatagaagaacttcgcacaaatgacaagtgggtaattcctgctctgaaacaaataagagaaatttgtagtttgtttggtgaagcatctcaaaatttgagtcaaactcagcgaagtccccacatattttatcgccatgatttaatcaaccagcttcaacaaaatcatgctttagttactttggtagcagaaaaccttgcaacctacatgaatagcatcagattgtatgctggagatcatgaagactatgatccacaaacagtgaggcttggaagtcgatacagtcatgttcaagaagttcaagaacgactaaacttccttagatttttactgaaggatggccaactgtggctctgtgctcctcaggcaaaacaaatatggaagtgcttagcagaaaatgcagtttatctttgtgatcgtgaagcctgttttaagtggtattccaagttaatgggggatgaaccagacttggatcctgatattaataaggacttctttgaaagtaatgtacttcagcttgatccttcccttttaactgaaaatggaatgaaatgctttgaaagatttttcaaagctgtcaattgtcgagaaaggaaactaatagcaaaaagaagatcctatatgatggatgatttggaattaattggactagactacctttggagggttgtgattcagagtagtgacgagattgctaacagagctatagatcttcttaaagagatatacacaaaccttggcccaagattaaaagccaatcaggtggttatccatgaagacttcattcagtcttgctttgatcgtttaaaagcatcatatgatacactgtgtgtttttgatggtgacaaaaacagcattaattgtgcaagacaagaagccattcgaatggttagagtattaactgttataaaagagtacattaatgaatgtgacagtgattatcacaaggaaagaatgattctacctatgtcgagagcatttcgtggcaaacacctctctcttatagttcggtttccaaaccagggcagacaggttgatgagttggatatatggtctcatacgaatgacacaattggttcagtacggcgatgtattgttaatcgtattaaagccaatgtagcccacaaaaaaattgaactttttgtgggtggtgagctgatagattctgaagatgacagaaagctaattggacaattaaacttaaaagataaatctctaattacagccaaacttacacaaataaatttcaatatgccatcaagtcctgatagctcttccgattcctcaactgcatctcctggaaaccaccgtaatcattacaatgatggtcccaatctagaggtggaaagttgtttgcctggggtgataatgtcagtgcatcccagatacatctctttcctttggcaagttgcagacttaggtagcaacctgaatatgccacctcttagagatggagcaagagtacttatgaaacttatgccaccagatagaacagctgtagaaaaattacgagctgtttgtttggaccatgcaaaacttggagaaggcaaacttagtccaccccttgactctcttttctttggtccttctgcctcccaagttctatacctaacagaggtagtttatgccttgttaatgcctgctggtgtgcctctaactgatgggtcctctgactttcaagttcacttcttgaaaagtggtggcttacctcttgtactgagtatgctaataagaaataacttcttgccaaatacagatatggaaactcgaaggggtgcttatttaaatgctcttaaaatagccaaactgttgttaactgcgattggctatggccatgttcgagctgtagcagaagcttgtcagccagttgtagatggtacagaccccataacacagattaaccaagttactcatgatcaagcagtggtgctacaaagtgcccttcagagcattcctaatccctcatccgagtgcgtacttagaaatgagtccatacttcttgctcaggaaatatctaatgaggcttcaagatatatgcctgatatttgtgtaattagggctatacagaaaattatctgggcatcagcatgtggggcattaggactagtttttagcccaaatgaagaaataactaaaatttatcagatgaccaccaatggaagcaataagctggaggtggaagatgaacaagtttgctgtgaagcactggaagtgatgaccttatgttttgctttacttccaacagcgttggatgcacttagtaaagaaaaagcctggcagaccttcatcattgacttattattgcactgtccaagcaaaactgttcgtcagttggcacaggagcagttctttttaatgtgcaccagatgttgcatgggacacaggcctctgcttttcttcattactttactctttaccatactggggagcacagcaagagagaagggtaaatattcaggtgattatttcacacttttacggcaccttctcaattatgcttacaatggcaatattaacatacccaatgctgaagttcttcttgtcagtgaaattgattggctcaaaaggattagggataatgttaaaaacacaggtgaaacaggtgtcgaagagccaatactggaaggccaccttggggtaacaaaagagttattggcctttcaaacttctgagaaaaagtatcactttggttgtgaaaaaggaggtgctaatctcattaaagaattaattgatgatttcatctttcccgcatccaaagtttacctgcagtatttaagaagtggagaactaccagctgagcaggctattccagtctgtagttcacccgttaccatcaatgccggttttgagctacttgtagcattagctattggctgtgtgaggaatctcaaacagatagtagactgtttgactgaaatgtattacatgggcacagcaattactacttgtgaagcacttactgagtgggaatatctgccccctgttggaccccgcccaccaaaaggatttgtgggactcaaaaatgctggtgctacgtgttacatgaactctgtgatccagcagctatacatgattccttctatcaggaacagtattcttgcaattgaaggcacaggtagtgatttacacgatgatatgttcggggatgagaagcaggacagtgagagtaatgttgatccccgagatgatgtatttggatatcctcatcaatttgaagacaagccagcattaagtaagacagaagataggaaagagtataatattggtgtcctaagacaccttcaggtcatctttggtcatttagctgcttcccaactacaatactatgtacccagaggattttggaaacagttcaggctttggggtgaacctgttaatctccgtgaacaacatgatgccttagagttttttaattctttggtggatagtttagatgaagctttaaaagctttaggacacccggctatactaagtaaagtcctaggaggctcctttgctgatcagaagatctgccaaggctgcccacataggtatgaatgtgaagaatcttttacaactttgaatgtggatattagaaatcatcaaaatcttcttgactctttggaacagtatatcaaaggagatttattggaaggtgcaaatgcatatcattgtgaaaaatgtgataaaaaggttgacacagtaaagcgcctgctaattaaaaaattgcctcgggttcttgctatccaactcaaacgatttgactatgactgggaaagagaatgtgcaattaaattcaatgattattttgaatttcctcgagagctggatatgggaccttacacagtagcaggtgttgcaaacctggaaagggataatgtaaactcagaaaatgagttgattgaacagaaagagcagtctgacaatgaaactgcaggaggcacaaagtacagacttgtaggagtgcttgtacacagtggtcaagcaagcggtgggcattattattcttacatcattcaaaggaatggtaaagatgatcagacagatcactggtataaatttgatgatggagatgtaacagaatgcaaaatggatgatgatgaagaaatgaaaaatcagtgttttggtggagagtacatgggagaagtatttgatcacatgatgaagcgcatgtcatataggcgacagaagaggtggtggaatgcttacatacttttttatgaacaaatggatatgatagatgaagatgatgagatgataagatacatatcagagctaactattgcaagaccccatcagatcattatgtcaccagccattgagagaagtgtacggaaacaaaatgtgaaatttatgcataaccgattgcaatatagtttagagtattttcagtttgtgaaaaaactgcttacatgtaatggtgtttatttaaaccctgctccagggcaggattatttgttgcctgaagcagaagaaattactatgattagtattcagcttgctgctagattcctctttaccactggatttcacaccaagaaaatagttcgtggtcctgccagtgactggtatgatgcactgtgcgttcttctccgtcacagcaaaaatgtacgtttttggtttactcataatgtcctttttaatgtatcaaatcgcttctctgaataccttctggagtgccctagtgcagaagtgaggggtgcatttgcaaaacttatagtgtttattgcacacttttccttgcaagatgggtcttgtccttctccttttgcatctccaggaccttctagtcaggcatgtgataacttgagcttgagtgaccacttactaagagccacactaaatctcttgagaagggaagtttcagagcatggacatcatttacagcaatattttaatttgtttgtaatgtatgccaatttaggtgtggcagaaaaaacacagcttctgaaattgaatgtacctgctacctttatgcttgtgtctttagacgaaggaccaggtcctccaatcaaatatcagtatgctgaattaggcaagttatattcagtagtgtctcagctgattcgttgttgcaatgtgtcatcaacaatgcagtcttcaatcaatggtaatccccctctccccaatcctttcggtgaccttaatttatcacagcctataatgccaattcagcagaatgtgttagacattttatttgtgagaacaagttatgtgaagaaaattattgaagactgcagtaactcagaggataccatcaaattacttcgcttttgctcttgggagaatcctcagttctcatctactgtcctcagcgaacttctctggcaggttgcatattcatatacctatgaacttcggccatatttagatctacttttccaaattttactgattgaggactcctggcagactcacagaattcataatgcacttaaaggaattccagatgacagagatgggctgttcgatacaatacagcgctcgaagaatcactatcaaaaacgagcatatcagtgcataaaatgtatggtagctctatttagcagttgtcctgttgcttaccagatcttacagggtaacggagatcttaaaagaaaatggacctgggcagtggaatggctaggagatgaacttgaaagaagaccatatactggcaatcctcagtatagttacaacaattggtctcctccagtacaaagcaatgaaacagcaaatggttatttcttagaaagatcacatagtgctaggatgacacttgcaaaagcttgtgaactctgtccagaagaggagccagatgaccaggatgccccagatgagcatgagccctctccatcagaagatgccccattatatcctcattcacctgcctctcagtatcaacagaataatcatgtacatggacagccatatacaggaccagcagcacatcacttgaacaaccctcagaaaacaggccaacgaacacaagaaaattatgaaggcaatgaagaagtatcctcacctcagatgaaggatcagtgaaaagcaataattaactgcttcctttatgactatgcactaaggtcttatagtccaaactttctctgtgtctggctagtattgaaaactagataaactgctccaaaccaacatggagtaaagagcatattcactggtttatttgcagtaatttgcaatttgtcagtgtataagacacatgcagggtgaagtgtacagagttttgtaacaaatgactggtcctaatctgtaaatgagaaaggtatatatactatgttaatgtctgactgttaattcttaagcaagaaactttttttgatgaaaacaagtcagatctacacagtcacacaattattttttgttgtgttcactacattgtgcaattgatattgcctgctttgagcagtttggtcaacttaccaacttccccccaaaaaagggaacataaaagagcccatctttgtcagtttacaccaatagtttcttgttaatccttctttcctggatatataaggctggtggtaacttttgaattatatggttgatgtggaaaattggcagtgtaacatttctagatacttttcattacctttttattctggtatataggctaaccactttaaagctattcttatgctgtaacagttagcatggcttcacactgtttgtgtagccaagaggacagaattacatgaatgacagtgcccagagtgacagctgtatattgctcagagcttttatttcttatacctagaataaatataaaatgggggaaaaatgtgacagacaagcagtttttcattgcacacatattcttcacatttaatgtttgatagttcaatttcttgagctgaagaatatcaaagtatcgataatacgaattttaaaatattaaaaccaatacacaaaattttcctatgtcagaatgtggtggagcataatagattgtatttggtgtgcttgcgattttttttttccatagaatttattaagtgaagtttctaaaactttgcttctcctgatcccggtgaagtgtacatcataagaatccatagtactttgaagtaccattgcaccaagatgtctgactgaattcatagtcacacttttatttgaaagaaagaattgttgtagttttttttcattattctaaaactcttgttgttagatacaagatttaattaagatctaagctcctgcttatttaatgtaattctaaggtaccattttagaaaaaacatttgttttaagattccaagaaacctgtgagttaatactatatttaaaagagaattggtaaattttgaatgtgtgtaatattttggaacctgtttaaaaaccaaatatacctgcaaatagatacagcctatcctatactatttaaatgtttggctgttttgttttatagaaattattttgctgaattcacaaataaaatttaagaaga

SEQ ID NO: 197512 - DNA, 909 bp, Homo sapiens
  Payload ID: 18954
  Gene Name: ubiquitin specific peptidase 9, Y-linked
  ENST ID: ENST00000453031
  CDS Start-End: 1-713
aattattgaagactgcagtaactcagaggataccatcaaattacttcgcttttgctcttgggagaatcctcagttctcatctactgtcctcagcgaacttctctggcagaattcataatgcacttaaaggaattccagatgacagagatgggctgttcgatacaatacagcgctcgaagaatcactatcaaaaacgagcatatcagtgcataaaatgtatggtagctctatttagcagttgtcctgttgcttaccagatcttacagggtaacggagatcttaaaagaaaatggacctgggcagtggaatggctaggagatgaacttgaaagaagaccatatactggcaatcctcagtatagttacaacaattggtctcctccagtacaaagcaatgaaacagcaaatggttatttcttagaaagatcacatagtgctaggatgacacttgcaaaagcttgtgaactctgtccagaagaggagccagatgaccaggatgccccagatgagcatgagccctctccatcagaagatgccccattatatcctcattcacctgcctctcagtatcaacagaataatcatgtacatggacagccatatacaggaccagcagcacatcacttgaacaaccctcagaaaacaggccaacgaacacaagaaaattatgaaggcaatgaagaagtatcctcacctcagatgaaggatcagtgaaaagcaataattaactgcttcctttatgactatgcactaaggtcttatagtccaaactttctctgtgtctggctagtattgaaaactagataaactgctccaaaccaacatggagtaaagagcatattcactggtttatttgcagtaatttgcaatttgtcagtgtataagacacatgcagggtgaagtgtacaga

SEQ ID NO: 197513 - DNA, 3814 bp, Homo sapiens
  Payload ID: 18955
  Gene Name: ubiquitin specific peptidase like 1
  Uniprot ID: Q5W0Q7
  ENST ID: ENST00000255304
  CDS Start-End: 343-3621
agggcggacagccacgcctctgcggagggcgaccggaagtgctcacgtcttcaccttccccgccacgccaccgtcctttcaggcccagcgtgcagcaggaaggaggactcttttgccgcggactcaagccggaagccgccttcctagtggagacgcgagtgggggaggagcagtccgaggggaacgtgggttgaacgttgcaactagggtggagatcaagctggaacaggagttccgatcgacccggtaccaagaaggggagtgcccgcggcagggttcattgaaaaaatccttagtgatattgacatgtctcaagtgacataaattagccaatgactcggaatgatggattctccgaagattggaaatggtttgccagtgattggaccagggactgatatagggatatcttcactccacatggtggggtatttgggaaaaaattttgattcagctaaagttccatcagatgagtattgccctgcttgtagagagaagggaaagttaaaagccttaaagacttaccgaattagttttcaagaatctatctttttgtgtgaggatctgcagtgcatctatcctttgggctctaaatcacttaataacctaatttctcctgatttggaagaatgtcacactccacataagcctcagaaaaggaagagcttagaaagcagctataaggattcacttcttttagcaaattccaaaaagactagaaattatattgctattgacggtggaaaagttttgaacagcaaacataatggagaagtatatgacgaaacctcgtcaaacttacctgatagtagtggtcaacagaatccaattaggacagctgattccttggagcggaatgagattttggaagctgatactgttgacatggctactacaaaagatcctgctacagttgatgtctctggaactggcagaccttcccctcaaaatgaaggatgtacatctaaactggaaatgccactggagagcaaatgtacatcatttccccaggctttatgtgtccagtggaaaaatgcttatgctctctgttggttagactgtatcctgtcagctttggtgcactcggaagagttaaagaacaccgtgactggactgtgctcgaaggaggaatctatattctggcggttgcttacaaaatataatcaagcaaatacacttctatataccagtcaattgagtggtgttaaagatggagattgtaaaaaacttacctcagaaatatttgcagagatagagacctgtctgaatgaagttagagatgaaatttttattagccttcagccccagcttagatgcacattaggtgatatggaaagccctgtgtttgcatttcccctgctcttaaaactagaaacccacattgaaaagctcttcctatattctttttcttgggactttgaatgttcgcagtgtggacaccaatatcaaaacaggcatatgaagagtctggtcacctttacaaatgtcatccctgagtggcacccacttaatgctgcccattttggtccatgtaacaattgcaacagtaaatcacaaataagaaaaatggtattagaaaaagtatctcccatattcatgttgcactttgtagaaggcttaccacagaatgacttgcagcactatgcatttcattttgaaggctgtctttatcagataacttctgtaattcagtatcgagcaaataatcattttataacatggattttagatgctgatggaagttggctggaatgtgatgacttaaaaggcccatgttctgaaaggcacaagaaatttgaagttcctgcttcagagatacatattgttatttgggaaagaaaaatatcccaagtgacagataaagaagctgcctgccttccacttaaaaagactaatgaccaacacgctctcagtaatgagaaaccagtatctttaacatcgtgttctgtgggtgatgctgcctcagctgaaacagcctcagtaactcaccctaaagatatatcagttgcccctcgtactctttcacaggacacagctgtaactcatggagatcatttactttcaggtccaaaaggtttggttgacaatattttacctctgacacttgaagaaactatccagaaaacagcctcagtttcacagttaaattctgaagctttcctgttagaaaataaacctgtagcagaaaatacaggaattctcaaaaccaatactttgctatcacaagaatcactaatggcttcttcagtatcagctccatgtaatgaaaagcttattcaagaccaatttgtggacataagttttccatcccaagttgtaaatacaaacatgcagtcagtacagctgaatacagaagatactgtaaatactaaatctgtgaataatactgatgctactggtcttatacagggagtgaagtcagtagaaattgagaaggacgctcagttaaaacaattccttacaccaaaaactgaacaattaaaaccagaacgtgtcacatctcaggtatctaatttgaagaaaaaagaaactacagcagattctcaaaccacaacatctaagtcattacagaatcagtctctgaaagaaaatcagaagaagccatttgtgggaagttgggttaaaggcttaataagcaggggtgcttcttttatgccactctgtgtttcagctcataatagaaacactataactgatttacaaccttcagttaaaggggtaaataattttggtggctttaaaactaaaggtataaaccagaaggccagccacgtatccaagaaagctcgtaagagtgcaagtaagcctcctcccatcagtaagccaccagcaggccctccatcgtctaatggcacagctgcccacccacatgctcatgctgcttcagaagttttggaaaagtctggaagcacctcatgtggagctcaactcaaccacagttcttatgggaatggtatttcttcagcaaaccatgaagacttggtggaaggtcagattcataaacttcgtctaaaacttcgtaaaaagctaaaggcagaaaagaagaaattagctgctcttatgtcttccccgcaaagcagaacagttcgaagtgaaaatctagaacaggtgccccaggatgggtctccaaatgattgtgaatcaatagaggacttgttaaatgagctaccatatccaattgatattgccagtgagtctgcatgcaccactgttcctggtgtttccctgtacagtagtcaaactcatgaagaaattttagcggaattattgtctcctacacctgtttcaacagagctgtcagaaaatggggaaggtgactttaggtatttgggaatgggagatagtcatatcccaccaccagtaccaagtgaattcaatgatgtttcccagaacacacatctgagacaggaccataattattgtagccccaccaagaaaaatccatgtgaagttcagccagactctctgacaaataatgcctgcgttagaacattaaacttggagagtccgatgaagactgatattttcgatgagtttttttcctcctcagcattaaatgctttagcaaatgacacattagacctacctcatttcgatgaatatctgtttgagaattattgaattaatgcttgttaacttttttcatataatatttattattattagaagaacttacaatgtgttcaggtagtgtttatacactggacttgtgtaattacttgtgtaataaccatgaacaaaatgcaaggtttaacctttggttctgcccatgaagcatgtaatctttcttacacattaaaatcactgaatgtgt

SEQ ID NO: 197514 - DNA, 4074 bp, Homo sapiens
  Payload ID: 18955
  Gene Name: ubiquitin specific peptidase like 1
  Uniprot ID: Q5W0Q7
  ENST ID: ENST00000614860
  CDS Start-End: 369-2660
gcgagtgggggaggagcagtccgaggggaacgtgggttgaacgttgcaactagggtggagatcaagctggaacaggagttccgatcgacccggtaccaagaaggggagtgcccgcggcagaattttgattcagctaaagttccatcagatgagtattgccctgcttgtagagagaagggaaagttaaaagccttaaagacttaccgaattagttttcaagaatctatctttttgtgtgaggatctgcagatggagattgtaaaaaacttacctcagaaatatttgcagagatagagacctgtctgaatgaagttagagatgaaatttttattagccttcagccccagcttagatgcacattaggtgatatggaaagccctgtgtttgcatttcccctgctcttaaaactagaaacccacattgaaaagctcttcctatattctttttcttgggactttgaatgttcgcagtgtggacaccaatatcaaaacaggcatatgaagagtctggtcacctttacaaatgtcatccctgagtggcacccacttaatgctgcccattttggtccatgtaacaattgcaacagtaaatcacaaataagaaaaatggtattagaaaaagtatctcccatattcatgttgcactttgtagaaggcttaccacagaatgacttgcagcactatgcatttcattttgaaggctgtctttatcagataacttctgtaattcagtatcgagcaaataatcattttataacatggattttagatgctgatggaagttggctggaatgtgatgacttaaaaggcccatgttctgaaaggcacaagaaatttgaagttcctgcttcagagatacatattgttatttgggaaagaaaaatatcccaagtgacagataaagaagctgcctgccttccacttaaaaagactaatgaccaacacgctctcagtaatgagaaaccagtatctttaacatcgtgttctgtgggtgatgctgcctcagctgaaacagcctcagtaactcaccctaaagatatatcagttgcccctcgtactctttcacaggacacagctgtaactcatggagatcatttactttcaggtccaaaaggtttggttgacaatattttacctctgacacttgaagaaactatccagaaaacagcctcagtttcacagttaaattctgaagctttcctgttagaaaataaacctgtagcagaaaatacaggaattctcaaaaccaatactttgctatcacaagaatcactaatggcttcttcagtatcagctccatgtaatgaaaagcttattcaagaccaatttgtggacataagttttccatcccaagttgtaaatacaaacatgcagtcagtacagctgaatacagaagatactgtaaatactaaatctgtgaataatactgatgctactggtcttatacagggagtgaagtcagtagaaattgagaaggacgctcagttaaaacaattccttacaccaaaaactgaacaattaaaaccagaacgtgtcacatctcaggtatctaatttgaagaaaaaagaaactacagcagattctcaaaccacaacatctaagtcattacagaatcagtctctgaaagaaaatcagaagaagccatttgtgggaagttgggttaaaggcttaataagcaggggtgcttcttttatgccactctgtgtttcagctcataatagaaacactataactgatttacaaccttcagttaaaggggtaaataattttggtggctttaaaactaaaggtataaaccagaaggccagccacgtatccaagaaagctcgtaagagtgcaagtaagcctcctcccatcagtaagccaccagcaggccctccatcgtctaatggcacagctgcccacccacatgctcatgctgcttcagaagttttggaaaagtctggaagcacctcatgtggagctcaactcaaccacagttcttatgggaatggtatttcttcagcaaaccatgaagacttggtggaaggtcagattcataaacttcgtctaaaacttcgtaaaaagctaaaggcagaaaagaagaaattagctgctcttatgtcttccccgcaaagcagaacagttcgaagtgaaaatctagaacaggtgccccaggatgggtctccaaatgattgtgaatcaatagaggacttgttaaatgagctaccatatccaattgatattgccagtgagtctgcatgcaccactgttcctggtgtttccctgtacagtagtcaaactcatgaagaaattttagcggaattattgtctcctacacctgtttcaacagagctgtcagaaaatggggaaggtgactttaggtatttgggaatgggagatagtcatatcccaccaccagtaccaagtgaattcaatgatgtttcccagaacacacatctgagacaggaccataattattgtagccccaccaagaaaaatccatgtgaagttcagccagactctctgacaaataatgcctgcgttagaacattaaacttggagagtccgatgaagactgatattttcgatgagtttttttcctcctcagcattaaatgctttagcaaatgacacattagacctacctcatttcgatgaatatctgtttgagaattattgaattaatgcttgttaacttttttcatataatatttattattattagaagaacttacaatgtgttcaggtagtgtttatacactggacttgtgtaattacttgtgtaataaccatgaacaaaatgcaaggtttaacctttggttctgcccatgaagcatgtaatctttcttacacattaaaatcactgaatgtgttctcctttttggtttcattttgttcttgtgagagtatgaggatttcaaaatgttaaagatgaaaagtggcgtctagtttctgacagtttgtacagttggatgcattacatttttagatttgaagttttggttatgttagtgttatgagtgatctttgtggtggttttcttcccctggaaacctgttgctcgtggcgctttgcccacggtgcccgagttcttgtcctgtgtccagatatgcagacaaatgaagggtgaagaagaagaagaggagctttatttagtgttagaacagctcagaaggagacccacagtgagcagctcccctgtgtcggcgggcaggtcgtccctcaagtgttcagctctcagcagagaaaaggccctggagagggtgactcctctcagctctcagcagagaagcagccctggagaaggtagcttctgttcgcaggcagattgtccagaggtcctgctgctctcagacggggccctggagaggatagcttctatccataggcaggttgttctgccgtctctacaggtctctgaagctcttagcagagagggtagctcctccctgttgctggtcgtcccaccctctgctcagttctggctgagcctggggcattttacgggcctcgggggaggaagtgcatacttactggcctggaaaaggcaccagttcccactcctacaggtgggactggcagcctggccctcagccttcaggccctccctgttcatggcttccaggcttacccccctgctttgatctgagagctggtgccaatagcagggagaagccaagctgcagaggcaagcacttccgagcctgcaaaagcaggcccccaaaagtgcagggatgcctgagtctgcacccgcacccaggagggtggagatcttgcctgctccaaggctgcagccggaatgatagcaggctgactggagcacctgccaccatcattagttcaagagtttatgcagatttaagttgtatacggtatatgaatgtgtgacagttttccttatggttgtgtggccttctgtaagagcctacgcctgtttgttacaccggtagagtgctgtggaatgtaaactttccctatgtcacttatctcctttatctctccatacagaggagggcaagaaaccttgttacttgaactttagtaatgttaagtgatcaataaatctataaataaatgatagcagaaaaaagtta

SEQ ID NO: 197515 - DNA, 6103 bp, Homo sapiens
  Payload ID: 18956
  Gene Name: ubiquitination factor E4A
  Uniprot ID: Q14139
  ENST ID: ENST00000252108
  CDS Start-End: 132-3332
taacttccggttgctgtgctgagtcggaagtgggaacccttcggccgctgagattctgtcgtgtcgtcgctgctggcacttcaggctctgcctctcccactaggtctggatggaggataccttaaagtgaaatgacagaccaggagaataacaacaacatctcaagtaacccctttgctgctctttttggctccctggctgatgccaaacagtttgcggcaatccaaaaagagcagctgaagcaacaatctgatgaactcccagctagcccagatgactcggataatagcgtgtcagagagcctggatgaattcgattactctgtggctgagattagccgctcattccgatcacagcaggaaatatgtgagcaactcaacatcaatcacatgatccaaaggatcttccttattactctggacaacagtgatcccagcttgaaaagcgggaatggcatccctagccgttgtgtgtatttggaagaaatggcagtagagctagaagatcaagactggcttgatatgagcaatgttgagcaggccctcttcgctcgcttattacttcaagatccaggcaaccacttaattaacatgacttcttctacaacgctaaatctctctgctgatcgagatgcaggagagaggcacattttttgttacctttactcctgcttccagagagccaaggaagagattaccaaagttccagagaacctgctaccctttgcagtgcagtgcagaaacctcactgtgtccaatacccgaacagttcttctcaccccagagatctatgttgaccaaaacatccatgagcaactggtagatttgatgttagaagccatccagggagcccattttgaagatgtaactgagtttctggaagaggtcattgaagccttgatattggatgaggaagttagaacatttccagaagtcatgattccagtgtttgatattttattgggccgaataaaagatctagagctctgtcagatccttttgtatgcatatctggatattcttctctatttcactaggcaaaaagatatggcaaaggtttttgtagaatacattcagcccaaggaccctaccaatgggcaaatgtaccagaagaccttgctgggagtaattctgagtatctcctgcttattaaagactccgggtgttgtagaaaatcatggctactttttgaatccatctcgttccagcccccaggagatcaaagtacaggaggccaacatccatcagttcatggctcagttccacgaaaagatctaccagatgctgaagaacttactccagctctctccagaaaccaaacactgtatcttgtcctggcttggaaactgtttgcatgcaaatgcaggccgcaccaagatttgggccaatcagatgccagaaatctttttccaaatgtatgcctcagatgctttctttctgaatctgggtgctgctctcctgaagctatgccagccattttgcaaacccagatcctctcggctcctcacctttaatcccacatactgtgccctcaaggagttgaatgatgaagaacgaaaaattaaaaatgtacacatgagaggtttggacaaagaaacctgtttgatcccagctgtgcaggagccgaagtttccacagaactacaaccttgtaacagagaaccttgctctgacagagtacaccttgtacttgggatttcacaggttgcatgatcagatggtaaaaatcaaccaaaatctgcatcggctgcaggttgcctggcgggatgctcagcaaagttctagccctgctgctgacaatcttcgtgagcagtttgaacgactgatgaccatctatctttctaccaagactgccatgacagagccacaaatgctacaaaactgcctaaacttgcaggtgtccatggctgttctactggttcaactggccataggcaatgagggctcacagccaatagagctaacctttcctttgccagatggctacagctctttggcttatgtgccagaattttttgcagataacctgggtgattttctcatttttctccgccgctttgccgatgacattttggagacatcagcagattccctggagcatgtccttcactttatcaccattttcactggaagcatagaaagaatgaagaatccccacctgagggccaaactagcagaggtgttggaagcagtgatgccccacctggatcagaccccaaatcccttggtatccagtgtgttccaccggaaacgtgtgttctgcaactttcagtatgcaccccaacttgcagaggctctaatcaaggtttttgtggacatcgaatttacaggagacccccatcaatttgaacagaagtttaattaccgccgtcccatgtatcctatcctaagatacatgtgggggacagatacctatcgggagagcattaaggatttggctgactatgcctctaagaatttagaagccatgaatcccccacttttcctccgctttcttaacctgctaatgaatgatgccatcttccttttggatgaagccatacagtatttgagcaagataaagattcagcaaattgagaaggatcgaggtgaatgggatagtctgactccagaagcccgccgagaaaaggaggctggcctacagatgtttggacagctggcacgtttccataacatcatgtccaatgaaacaatcggtacccttgcctttctcacatcagagatcaagtcactctttgtgcatcccttcctggctgagcgcatcatctccatgttgaactacttcctgcaacacctggttggccccaagatgggtgccttaaaagtcaaggacttcagcgaatttgacttcaaaccccagcagcttgtatcagatatctgcactatctacttaaatcttggggatgaggagaatttctgtgccactgtgcccaaggatggacgttcctattccccaactctctttgcacagacagttcgagtcttgaagaaaataaataagcctgggaatatgattatggctttcagcaacttggcagagagaatcaagtctcttgcagacctccaacaacaggaagaggaaacctatgcagatgcctgtgatgagttcctggatcccattatgagcacactgatgtgtgaccctgtggtgctgccatcttccagagtcactgtggatagatccaccattgcaagacatttgctcagtgaccaaacagatccctttaaccgtagtcccctcaccatggaccagatccggccaaacacagaactaaaagaaaaaatccaacggtggcttgcagagaggaaacaacaaaaggagcaacttgaatagatactgtgaactaaccaaaccaaaaccaaccccagagtgcagataaacaattgtttgtggtttctctctttctggttctgttccttttctttcttcttttctttttcttttttttttttttttttactaaattagagaactgctcttgctgaaattatgatagttaagattcctaagaacttgacaatgctcccctggcttgcaggaaattatacttattatagcatcaccaagtttagaaatcatcactaattttcaccctctgttgtctcttcatattcttcttccttttcctaaatgaaattatattatttcaactactaaaacttcccgccaccctgctatttctcttccaattactgttcaaacatttttggtgagtgctgcttttataaatatgtgatgtcacatatttcagtgacagctgatgttatcagaaaaatcctgttatcctgtgtatttactagtcctcatgatctagacttaaccccttttctgtgttacagagtaacttcacataaaagcagatacctttaagtttgtgtagacttctgaataagatgatagacgagaattttttttaaaaaaggaatttaaaggaatcttgtgcaacttctgttgatagctcttaattttgttatacagtctttttaatgaggattggtagggcaatcctaccaattgatgggggtgaggagactgttgggcccttattctcttatgaaaatctgtttctacaaggactaggcctaagtagatttaggcaacgggtatcatatccatgaaaaatgtcattttaagacactaatatcaacagtatatctcagtgtgtgagatatataaatacacatacaccccatgtgcttttttgttggtttagtgtaaactgagtaccactttatattttctcttccatagtgagatgtatgcagtatgtggccatgtttactaacatactcattcttcacaaaattctgagattataaaatgtatatagttaatatttgtttgagcttgtgacctgacttctaagagctacttctaacacagccttaggtcttcaattaacaaagtaggaagttgagcacaaccttgtccacagccattttaaatatccacttagccctgtgtagttggtaggtggacaccactttcataagtgaacttgagctcactactcaattgtgcagcttaatatgctgactagggacattcccctatggattatctttatatcactgtctttctaagcccagagatgtcataagtgacaagaaaagtgataggatcaagaaatgggtgtcactgcttcatttggaacatgttattaactatggtctctttcaaataaatagtagttttatatttcaacacaagttgctataagcagtccttgatgggtttttgattgcatcagctggaaagcctcaaatctaagagggcttcccatcctagatataaaataggtgttgcctattgctgtgcttataaaatgaaaaaggaaattgaggacacttttgcaaatgccagaatgtaagattcattcagtgtgctccctgggcctttatggcatgggttgacaggatttgtttattttctaaaattagcttcattcaatatttatcatcctcctttccctctctgagaatgaactatgtataaaataagcttctgcctatttgcatttatcttccaaacccaatctagtaggatgttctcattttaaaaacgaggggaaaagaccagagtttttcaggagaaaactggaggaaaatgggcacaaaaactcagaaggcagctattcccagcagcttcctagttaacaacccccatgctgcctccagtctttgtctgtattcttctgtatttaaccttcagattgtaagccttttctggcaagcttttcttctttttttaaactcttttcctgaaactttttatgaatggctatggcaccattaatgctgctgaatatctttaaactctgcacaagcaagtgtgtagcttaaggccactactggtaaggaaaccaagtgtcctctgtgccttttttctttctgtgaagtaatttaagaatatccaaaaaaattagactttaaaaagttatcttggtacaacaccgtgtgtatatacacttggaagcttaaaaaggtgttttgtctggaacttagaagcagctctaaatctagtagagcagactttctaacatacctagttttgtgtattggctttgctggagtatgatagcaaaatgaagactcttttactcagctctggtattgctcataacttaccaagaggctaatactaaacttggaaaattgtttaagtatgttttatcaagcagtctgggttttgttttttaatatactttttaatggatatgtgaaaactgaaggaaatgttaaaggttttttaatggtgcaagtgaaggtgccagttgctatttgatatcacactctacaaaagcttcattactttatttgatggtggttgctaagcagccattgcacagagcataagtctactgggtgcctttacatgccagaggctgatgctgcactgttgatgtcatgtgaggaaataatgcacatgctctaactgctcaacaggaaatgaacctagaaacagaaaatgaaaaggttgattgaaataaaacttgatcaacgcgactgtattttgaaacattccaggaaggttacttcttgtcaaacttgcctggcagtgtttgttcaaaacttgtatttaataaatgaacatctgacttacaa

SEQ ID NO: 197516 - DNA, 6061 bp, Homo sapiens
  Payload ID: 18956
  Gene Name: ubiquitination factor E4A
  Uniprot ID: Q14139
  ENST ID: ENST00000431736
  CDS Start-End: 73-3294
cgtgtcgtcgctgctggcacttcaggctctgcctctcccactaggtctggatggaggataccttaaagtgaaatgacagaccaggagaataacaacaacatctcaagtaacccctttgctgctctttttggctccctggctgatgccaaacagtttgcggcaatccaaaaagagcagctgaagcaacaatctgatgaactcccagctagcccagatgactcggataatagcgtgtcagagagcctggatgaattcgattactctgtggctgagattagccgctcattccgatcacagcaggaaatatgtgagcaactcaacatcaatcacatgatccaaaggatcttccttattactctggacaacagtgatcccagcttgaaaagcgggaatggcatccctagccgttgtgtgtatttggaagaaatggcagtagagctagaagatcaagactggcttgatatgagcaatgttgagcaggccctcttcgctcgcttattacttcaagatccaggcaaccacttaattaacatgacttcttctacaacgctaaatctctctgctgatcgagatgcaggagagaggcacattttttgttacctttactcctgcttccagagagccaaggaagagattaccaaagttccagagaacctgctaccctttgcagtgcagtgcagaaacctcactgtgtccaatacccgaacagttcttctcaccccagagatctatgttgaccaaaacatccatgagcaactggtagatttgatgttagaagccatccagggagcccgtgagtacatgaacaagatctattttgaagatgtaactgagtttctggaagaggtcattgaagccttgatattggatgaggaagttagaacatttccagaagtcatgattccagtgtttgatattttattgggccgaataaaagatctagagctctgtcagatccttttgtatgcatatctggatattcttctctatttcactaggcaaaaagatatggcaaaggtttttgtagaatacattcagcccaaggaccctaccaatgggcaaatgtaccagaagaccttgctgggagtaattctgagtatctcctgcttattaaagactccgggtgttgtagaaaatcatggctactttttgaatccatctcgttccagcccccaggagatcaaagtacaggaggccaacatccatcagttcatggctcagttccacgaaaagatctaccagatgctgaagaacttactccagctctctccagaaaccaaacactgtatcttgtcctggcttggaaactgtttgcatgcaaatgcaggccgcaccaagatttgggccaatcagatgccagaaatctttttccaaatgtatgcctcagatgctttctttctgaatctgggtgctgctctcctgaagctatgccagccattttgcaaacccagatcctctcggctcctcacctttaatcccacatactgtgccctcaaggagttgaatgatgaagaacgaaaaattaaaaatgtacacatgagaggtttggacaaagaaacctgtttgatcccagctgtgcaggagccgaagtttccacagaactacaaccttgtaacagagaaccttgctctgacagagtacaccttgtacttgggatttcacaggttgcatgatcagatggtaaaaatcaaccaaaatctgcatcggctgcaggttgcctggcgggatgctcagcaaagttctagccctgctgctgacaatcttcgtgagcagtttgaacgactgatgaccatctatctttctaccaagactgccatgacagagccacaaatgctacaaaactgcctaaacttgcaggtgtccatggctgttctactggttcaactggccataggcaatgagggctcacagccaatagagctaacctttcctttgccagatggctacagctctttggcttatgtgccagaattttttgcagataacctgggtgattttctcatttttctccgccgctttgccgatgacattttggagacatcagcagattccctggagcatgtccttcactttatcaccattttcactggaagcatagaaagaatgaagaatccccacctgagggccaaactagcagaggtgttggaagcagtgatgccccacctggatcagaccccaaatcccttggtatccagtgtgttccaccggaaacgtgtgttctgcaactttcagtatgcaccccaacttgcagaggctctaatcaaggtttttgtggacatcgaatttacaggagacccccatcaatttgaacagaagtttaattaccgccgtcccatgtatcctatcctaagatacatgtgggggacagatacctatcgggagagcattaaggatttggctgactatgcctctaagaatttagaagccatgaatcccccacttttcctccgctttcttaacctgctaatgaatgatgccatcttccttttggatgaagccatacagtatttgagcaagataaagattcagcaaattgagaaggatcgaggtgaatgggatagtctgactccagaagcccgccgagaaaaggaggctggcctacagatgtttggacagctggcacgtttccataacatcatgtccaatgaaacaatcggtacccttgcctttctcacatcagagatcaagtcactctttgtgcatcccttcctggctgagcgcatcatctccatgttgaactacttcctgcaacacctggttggccccaagatgggtgccttaaaagtcaaggacttcagcgaatttgacttcaaaccccagcagcttgtatcagatatctgcactatctacttaaatcttggggatgaggagaatttctgtgccactgtgcccaaggatggacgttcctattccccaactctctttgcacagacagttcgagtcttgaagaaaataaataagcctgggaatatgattatggctttcagcaacttggcagagagaatcaagtctcttgcagacctccaacaacaggaagaggaaacctatgcagatgcctgtgatgagttcctggatcccattatgagcacactgatgtgtgaccctgtggtgctgccatcttccagagtcactgtggatagatccaccattgcaagacatttgctcagtgaccaaacagatccctttaaccgtagtcccctcaccatggaccagatccggccaaacacagaactaaaagaaaaaatccaacggtggcttgcagagaggaaacaacaaaaggagcaacttgaatagatactgtgaactaaccaaaccaaaaccaaccccagagtgcagataaacaattgtttgtggtttctctctttctggttctgttccttttctttcttcttttctttttcttttttttttttttttttactaaattagagaactgctcttgctgaaattatgatagttaagattcctaagaacttgacaatgctcccctggcttgcaggaaattatacttattatagcatcaccaagtttagaaatcatcactaattttcaccctctgttgtctcttcatattcttcttccttttcctaaatgaaattatattatttcaactactaaaacttcccgccaccctgctatttctcttccaattactgttcaaacatttttggtgagtgctgcttttataaatatgtgatgtcacatatttcagtgacagctgatgttatcagaaaaatcctgttatcctgtgtatttactagtcctcatgatctagacttaaccccttttctgtgttacagagtaacttcacataaaagcagatacctttaagtttgtgtagacttctgaataagatgatagacgagaattttttttaaaaaaggaatttaaaggaatcttgtgcaacttctgttgatagctcttaattttgttatacagtctttttaatgaggattggtagggcaatcctaccaattgatgggggtgaggagactgttgggcccttattctcttatgaaaatctgtttctacaaggactaggcctaagtagatttaggcaacgggtatcatatccatgaaaaatgtcattttaagacactaatatcaacagtatatctcagtgtgtgagatatataaatacacatacaccccatgtgcttttttgttggtttagtgtaaactgagtaccactttatattttctcttccatagtgagatgtatgcagtatgtggccatgtttactaacatactcattcttcacaaaattctgagattataaaatgtatatagttaatatttgtttgagcttgtgacctgacttctaagagctacttctaacacagccttaggtcttcaattaacaaagtaggaagttgagcacaaccttgtccacagccattttaaatatccacttagccctgtgtagttggtaggtggacaccactttcataagtgaacttgagctcactactcaattgtgcagcttaatatgctgactagggacattcccctatggattatctttatatcactgtctttctaagcccagagatgtcataagtgacaagaaaagtgataggatcaagaaatgggtgtcactgcttcatttggaacatgttattaactatggtctctttcaaataaatagtagttttatatttcaacacaagttgctataagcagtccttgatgggtttttgattgcatcagctggaaagcctcaaatctaagagggcttcccatcctagatataaaataggtgttgcctattgctgtgcttataaaatgaaaaaggaaattgaggacacttttgcaaatgccagaatgtaagattcattcagtgtgctccctgggcctttatggcatgggttgacaggatttgtttattttctaaaattagcttcattcaatatttatcatcctcctttccctctctgagaatgaactatgtataaaataagcttctgcctatttgcatttatcttccaaacccaatctagtaggatgttctcattttaaaaacgaggggaaaagaccagagtttttcaggagaaaactggaggaaaatgggcacaaaaactcagaaggcagctattcccagcagcttcctagttaacaacccccatgctgcctccagtctttgtctgtattcttctgtatttaaccttcagattgtaagccttttctggcaagcttttcttctttttttaaactcttttcctgaaactttttatgaatggctatggcaccattaatgctgctgaatatctttaaactctgcacaagcaagtgtgtagcttaaggccactactggtaaggaaaccaagtgtcctctgtgccttttttctttctgtgaagtaatttaagaatatccaaaaaaattagactttaaaaagttatcttggtacaacaccgtgtgtatatacacttggaagcttaaaaaggtgttttgtctggaacttagaagcagctctaaatctagtagagcagactttctaacatacctagttttgtgtattggctttgctggagtatgatagcaaaatgaagactcttttactcagctctggtattgctcataacttaccaagaggctaatactaaacttggaaaattgtttaagtatgttttatcaagcagtctgggttttgttttttaatatactttttaatggatatgtgaaaactgaaggaaatgttaaaggttttttaatggtgcaagtgaaggtgccagttgctatttgatatcacactctacaaaagcttcattactttatttgatggtggttgctaagcagccattgcacagagcataagtctactgggtgcctttacatgccagaggctgatgctgcactgttgatgtcatgtgaggaaataatgcacatgctctaactgctcaacaggaaatgaacctagaaacagaaaatgaaaaggttgattgaaataaaacttgatcaacgcgactgtattttgaaacattccaggaaggttacttcttgtcaaacttgcctggcagtgtttgttcaaaacttgtatttaataaatgaacatctgactt

SEQ ID NO: 197517 - DNA, 2149 bp, Homo sapiens
  Payload ID: 18956
  Gene Name: ubiquitination factor E4A
  ENST ID: ENST00000545354
  CDS Start-End: 466-2082
gtataagtagaggaagaaaacagcaactcagtcatagaaagggacactaagaatagcaatttttaatgccttctcaagatacctgaattgatgcagagcatttttcaaaactactcagtcaacacattgccggaagaaggaaattatgtctttagagagaaatctccatcatagacattttaaataagacagtagataaaagttcagcatgtgcttaagctgctcagctgcctagattcaaacaaaaaatgaatatcatctagtttcccaatattagctagctcaagacattatctacagggccaaaggaaatgattttggactattatccataactttgaattatgtgtcttcctttcagtagagaatattaggctgaccttttctgaagaataatttaatttaatattgaacaacagagagctggaagctgctcttagattgcatctcaggttgcatgatcagatggtaaaaatcaaccaaaatctgcatcggctgcaggttgcctggcgggatgctcagcaaagttctagccctgctgctgacaatcttcgtgagcagtttgaacgactgatgaccatctatctttctaccaagactgccatgacagagccacaaatgctacaaaactgcctaaacttgcaggtgtccatggctgttctactggttcaactggccataggcaatgagggctcacagccaatagagctaacctttcctttgccagatggctacagctctttggcttatgtgccagaattttttgcagataacctgggtgattttctcatttttctccgccgctttgccgatgacattttggagacatcagcagattccctggagcatgtccttcactttatcaccattttcactggaagcatagaaagaatgaagaatccccacctgagggccaaactagcagaggtgttggaagcagtgatgccccacctggatcagaccccaaatcccttggtatccagtgtgttccaccggaaacgtgtgttctgcaactttcagtatgcaccccaacttgcagaggctctaatcaaggtttttgtggacatcgaatttacaggagacccccatcaatttgaacagaagtttaattaccgccgtcccatgtatcctatcctaagatacatgtgggggacagatacctatcgggagagcattaaggatttggctgactatgcctctaagaatttagaagccatgaatcccccacttttcctccgctttcttaacctgctaatgaatgatgccatcttccttttggatgaagccatacagtatttgagcaagataaagattcagcaaattgagaaggatcgaggtgaatgggatagtctgactccagaagcccgccgagaaaaggaggctggcctacagatgtttggacagctggcacgtttccataacatcatgtccaatgaaacaatcggtacccttgcctttctcacatcagagatcaagtcactctttgtgcatcccttcctggctgagcgcatcatctccatgttgaactacttcctgcaacacctggttggccccaagatgggtgccttaaaagtcaaggacttcagcgaatttgacttcaaaccccagcagcttgtatcagatatctgcactatctacttaaatcttggggatgaggagaatttctgtgccactgtgcccaaggatggacgttcctattccccaactctctttgcacagacagttcgagtcttgaagaaaataaataagcctgggaatatgattatggctttcagcaacttggcagagagaatcaagtctcttgcagacctccaacaacaggaagaggaaacctatgcagatgcctgtgatgagttcctggatcccattatgagcacactgatgtgtgaccctgtggtgctgccatcttccagagtcactgtggatagatccaccattgcaagacatttgctcagtgaccaaacagatccctttaaccgtagtcccctcaccatggaccagatccggccaaacacagaactaaaagaaaaaatccaacggtggcttgcagagaggaaacaacaaaaggagcaacttgaatagatactgtgaactaaccaaaccaaaaccaaccccagagtgcagataaacaattgtttgtggtttctct

SEQ ID NO: 197518 - DNA, 4772 bp, Homo sapiens
  Payload ID: 18957
  Gene Name: ubiquitination factor E4B
  Uniprot ID: O95155
  ENST ID: ENST00000253251
  CDS Start-End: 840-4361
gacggggtgggacggaggcggggagaggacgcaggcgagaggaactcggcggcgcggcgcccgcggcctattggctgccacgtcccggcgccagaagccccgcctccctgacgggggtcacgtgatccctttcaaagatggccgccctgttgttttgatgaataatacttggtggggcgagggggaaagagtaggggtggaggggtaggaggatttactcttccagcgagagctacgcgcatcccatcctccccctcccccctacccgggctccggcgtggaggcggggcgtggccggcctgctttgggaggggaggggcttcccttacagtgctgggctctgccaggacggctgtggggtcgccttacctcggggtatccactctgcagtcgaccagttcccgccaggagcaaagggtaggaaggagagcaggatctgctgtaggaacgcagctaccgcgccactatcacgaagaaacagcaggctcggggcacgagacgaactggagaccgcgctgcctagctgggtaacctgggaagcagagggtaataagtggcgccttaagacaaccctgtagcagcagcagtggcggccaaaggaggctgctcagggaacaagcggctgtagtagtctgtggggcgactggagtgaccgaagccaaggcagtttagtgcctctcgtgttcttattttttaacctctgactatgcaattctgaaacctcccccattcgggggaccagacagcctgatagacaccttccactctccttcctcccgccgtggtctcgagaacagaaggatctctccttaacgcctttcaccattaagaggaaagcgatggaggagctgagcgctgatgagattcgacggaggcgccttgcacgacttgctggtggacagacctctcagccaaccaccccactcacctctccccagagggagaaccctccggggcctcccatagcggcatcagccccaggaccctctcagagtcttggtctcaatgtccacaacatgaccccagctacctccccaataggtgcatcaggagtagcccatcgaagccagagcagtgaaggagtcagttctctcagcagctcgccctctaatagccttgaaacgcaatctcagtctctctcacgttcccagagcatggatatcgatggtgtctcatgtgagaaaagcatgtcccaggtggatgtggattcaggaattgaaaacatggaggttgatgaaaatgatcgaagagaaaagcggagcctcagtgataaggagccttcctcgggccctgaagtgtctgaagagcaggccttacagctggtctgtaagatcttccgtgtctcttggaaggaccgggacagagatgtcatctttctttcttctctttctgcacagtttaagcagaacccaaaagaagtattctccgattttaaggacttgattggccagattttaatggaagtgctaatgatgtccactcagaccagagatgaaaacccatttgccagtctgacagccacatcacagccaattgctgcagcagcacggtcaccagacagaaatctcttgctaaacactggctccaatccaggaacaagccccatgttctgcagcgtggcttcctttggtgccagctctttgtctagtttgggagcctctggtggagcaagtaattgggattcctacagtgaccatttcaccattgaaacctgcaaagagacagatatgctgaactacctcatcgagtgtttcgaccgagttggaatagaggaaaaaaaagcaccaaagatgtgcagccagccagcagtcagccagcttctgagcaacatccgctcacagtgcatatcccatactgctttagtactacaaggctccctaacacagcccaggtccttgcagcagccgtccttcctagtgccgtatatgctgtgtaggaatctcccatatggcttcattcaggaactggtgagaaccactcaccaggatgaagaagtgttcaagcagatatttatccccattttacaaggcctggctcttgctgccaaagagtgctccctcgacagtgactactttaaataccccctcatggcactaggtgagctctgtgaaaccaagtttgggaagacacaccctgtgtgcaatttggttgcttctttgcggttgtggttgccgaaatccttaagtcctggctgtgggcgggagctgcagagactctcttacttaggggctttctttagcttctcagtctttgcagaagatgatgttaaagtggttgaaaaatacttctcagggcctgccattaccctggaaaacactcgtgtggttagccaatcattgcagcattacttagagctcggaaggcaagagctttttaagattctgcatagtattttgttaaatggcgaaacccgtgaggctgctctcagttacatggcggctgtcgtcaatgccaatatgaagaaagcacagatgcagacagatgatagattggtgtctacagatggatttatgctgaatttcctttgggtactgcagcagctaagtacaaaaatcaagttagaaacagttgatcccacgtatatttttcacccaagatgtcggattactcttcccaatgatgagacgcgtgtgaatgcaacgatggaagatgtgaatgactggctgactgaactctatggcgatcagcctccattttctgagccgaaattccctacggagtgcttctttctcaccctgcatgctcaccacctctctattctgcctagttgccgtcgctatatccgcagactccgggctatccgggagctcaatagaactgtagaagatttgaaaaataatgaaagccaatggaaagattccccactggcaactagacaccgcgaaatgctgaagcgctgtaaaactcagcttaagaaactggtacggtgcaaggcctgtgctgatgctggcctacttgacgagagcttcctgagaagatgtctgaatttttatggccttctcattcagctgctgctccgcatcctggaccccgcatatcccgatataacactgcctttaaattcagatgtccccaaggtatttgcagcgttgcctgagttttatgtagaagatgttgcagaatttttattttttattgtacaatactctccccaggcgctttatgagccctgtactcaggatattgtgatgttccttgttgtgatgttgtgcaaccagaactacatccgaaacccatatttggtggccaaactggtagaagtcatgtttatgaccaaccctgctgttcagccacgaacccagaagttttttgaaatgattgagaaccatcctctctccaccaagttgttggtaccttccctgatgaagttttatacagatgttgagcataccggagccaccagtgagttttatgacaagttcacaattcgctatcatattagcaccatttttaaaagcctttggcaaaacatagctcaccatggcacctttatggaggagttcaactccgggaagcagtttgttcgctatataaacatgttgataaacgacacgacgtttttgctcgatgaaagtctggagtctctgaagcgaatccatgaagtgcaggaagagatgaagaacaaagaacagtgggaccagttgccccgggatcagcagcaggctcgtcagtctcagcttgctcaggatgagcgtgtgtcccgctcttacctcgccctggccaccgaaaccgtggacatgttccacatcctcacgaagcaggtccagaagcccttcctcagaccggagcttggaccccgattggctgcaatgctgaactttaatcttcagcaactttgtggccccaagtgccgtgacctgaaagttgaaaaccctgagaaatacggctttgaaccaaagaagctgttggaccaactgacggatatttacttacagctggactgtgctcggttcgcgaaagccattgctgacgaccagagatcctacagtaaggaattgtttgaagaagttatttcaaagatgcggaaggcagggatcaaatccacaatagcaatagaaaaatttaagctgctcgccgagaaagtggaggagatagtggccaagaacgcacgcgcagaaatcgactacagcgacgctcctgatgagttcagagaccctctgatggacaccctcatgacagaccccgtgcggctgccctctggcaccatcatggaccgctccatcatcctgcggcacctgctcaactcccccacggaccccttcaaccggcagacgctgacagagagcatgctggaaccagtgccagaactgaaagagcagattcaggcgtggatgagagagaaacagaacagcgatcactaaaccgttccgccgcccaccctctgctagacacagccaaggccaacgaggcaagcagaagcagcggccgcagcgaagctgccgttcatgtgttggaggccaaatgtggcaaaccaaccccaggcccacccagagcgagcaaacgctgagacctgaaaggacatggatgagaagaggagcccgcttcctgtacatatatttaagtgacaaacacggtcaaaagcttaagggacaggttttatggttgcttgtgtaataaagcatgtccttcgtatgtcacagtttggggcaacggaagtcttttagtgatggctaatgggtctgggcagcatcccttcatgaatttttttttaatccaatatccgttgatttgattgtgattagagaaccttggacattttgctgctaaagaat

SEQ ID NO: 197519 - DNA, 5267 bp, Homo sapiens
  Payload ID: 18957
  Gene Name: ubiquitination factor E4B
  Uniprot ID: O95155
  ENST ID: ENST00000343090
  CDS Start-End: 76-3984
ctctccttcctcccgccgtggtctcgagaacagaaggatctctccttaacgcctttcaccattaagaggaaagcgatggaggagctgagcgctgatgagattcgacggaggcgccttgcacgacttgctggtggacagacctctcagccaaccaccccactcacctctccccagagggagaaccctccggggcctcccatagcggcatcagccccaggaccctctcagagtcttggtctcaatgtccacaacatgaccccagctacctccccaataggtgcatcaggagtagcccatcgaagccagagcagtgaaggagtcagttctctcagcagctcgccctctaatagccttgaaacgcaatctcagtctctctcacgttcccagagcatggatatcgatggtgtctcatgtgagaaaagcatgtcccaggtggatgtggattcaggaattgaaaacatggaggttgatgaaaatgatcgaagagaaaagcggagcctcagtgataaggagccttcctcgggccctgaagtgtctgaagagcaggccttacagctggtctgtaagatcttccgtgtctcttggaaggaccgggacagagatgtcatctttctttcttctctttctgcacagtttaagcagaacccaaaagaagtattctccgattttaaggacttgattggccagattttaatggaagtgctaatgatgtccactcagaccagagatgaaaacccatttgccagtctgacagccacatcacagccaattgctgcagcagcacggtcaccagacagaaatctcttgctaaacactggctccaatccaggaacaagccccatgttctgcagcgtggcttcctttggtgccagctctttgtctagcctctatgaaagtagtccggctcccactcccagtttctggagctctgttcccgtgatgggcccgtctcttgcctcaccttcccgtgcagccagccagttggctgtgccttccactcccctcagtcctcacagtgcagcctctggaactgctgcgggaagccagccttcatccccgcggtatcgcccctacactgtcactcacccatgggcgtcctcaggcgtctccattctgtcgagctccccaagtccccctgccctcgccagtagcccccaagcagtgcccgccagcagttccagacagaggcccagcagcacgggtccacccctaccacccgcctcacccagtgccacgagcagacgcccctcctccctgaggatctctcctagtttgggagcctctggtggagcaagtaattgggattcctacagtgaccatttcaccattgaaacctgcaaagagacagatatgctgaactacctcatcgagtgtttcgaccgagttggaatagaggaaaaaaaagcaccaaagatgtgcagccagccagcagtcagccagcttctgagcaacatccgctcacagtgcatatcccatactgctttagtactacaaggctccctaacacagcccaggtccttgcagcagccgtccttcctagtgccgtatatgctgtgtaggaatctcccatatggcttcattcaggaactggtgagaaccactcaccaggatgaagaagtgttcaagcagatatttatccccattttacaaggcctggctcttgctgccaaagagtgctccctcgacagtgactactttaaataccccctcatggcactaggtgagctctgtgaaaccaagtttgggaagacacaccctgtgtgcaatttggttgcttctttgcggttgtggttgccgaaatccttaagtcctggctgtgggcgggagctgcagagactctcttacttaggggctttctttagcttctcagtctttgcagaagatgatgttaaagtggttgaaaaatacttctcagggcctgccattaccctggaaaacactcgtgtggttagccaatcattgcagcattacttagagctcggaaggcaagagctttttaagattctgcatagtattttgttaaatggcgaaacccgtgaggctgctctcagttacatggcggctgtcgtcaatgccaatatgaagaaagcacagatgcagacagatgatagattggtgtctacagatggatttatgctgaatttcctttgggtactgcagcagctaagtacaaaaatcaagttagaaacagttgatcccacgtatatttttcacccaagatgtcggattactcttcccaatgatgagacgcgtgtgaatgcaacgatggaagatgtgaatgactggctgactgaactctatggcgatcagcctccattttctgagccgaaattccctacggagtgcttctttctcaccctgcatgctcaccacctctctattctgcctagttgccgtcgctatatccgcagactccgggctatccgggagctcaatagaactgtagaagatttgaaaaataatgaaagccaatggaaagattccccactggcaactagacaccgcgaaatgctgaagcgctgtaaaactcagcttaagaaactggtacggtgcaaggcctgtgctgatgctggcctacttgacgagagcttcctgagaagatgtctgaatttttatggccttctcattcagctgctgctccgcatcctggaccccgcatatcccgatataacactgcctttaaattcagatgtccccaaggtatttgcagcgttgcctgagttttatgtagaagatgttgcagaatttttattttttattgtacaatactctccccaggcgctttatgagccctgtactcaggatattgtgatgttccttgttgtgatgttgtgcaaccagaactacatccgaaacccatatttggtggccaaactggtagaagtcatgtttatgaccaaccctgctgttcagccacgaacccagaagttttttgaaatgattgagaaccatcctctctccaccaagttgttggtaccttccctgatgaagttttatacagatgttgagcataccggagccaccagtgagttttatgacaagttcacaattcgctatcatattagcaccatttttaaaagcctttggcaaaacatagctcaccatggcacctttatggaggagttcaactccgggaagcagtttgttcgctatataaacatgttgataaacgacacgacgtttttgctcgatgaaagtctggagtctctgaagcgaatccatgaagtgcaggaagagatgaagaacaaagaacagtgggaccagttgccccgggatcagcagcaggctcgtcagtctcagcttgctcaggatgagcgtgtgtcccgctcttacctcgccctggccaccgaaaccgtggacatgttccacatcctcacgaagcaggtccagaagcccttcctcagaccggagcttggaccccgattggctgcaatgctgaactttaatcttcagcaactttgtggccccaagtgccgtgacctgaaagttgaaaaccctgagaaatacggctttgaaccaaagaagctgttggaccaactgacggatatttacttacagctggactgtgctcggttcgcgaaagccattgctgacgaccagagatcctacagtaaggaattgtttgaagaagttatttcaaagatgcggaaggcagggatcaaatccacaatagcaatagaaaaatttaagctgctcgccgagaaagtggaggagatagtggccaagaacgcacgcgcagaaatcgactacagcgacgctcctgatgagttcagagaccctctgatggacaccctcatgacagaccccgtgcggctgccctctggcaccatcatggaccgctccatcatcctgcggcacctgctcaactcccccacggaccccttcaaccggcagacgctgacagagagcatgctggaaccagtgccagaactgaaagagcagattcaggcgtggatgagagagaaacagaacagcgatcactaaaccgttccgccgcccaccctctgctagacacagccaaggccaacgaggcaagcagaagcagcggccgcagcgaagctgccgttcatgtgttggaggccaaatgtggcaaaccaaccccaggcccacccagagcgagcaaacgctgagacctgaaaggacatggatgagaagaggagcccgcttcctgtacatatatttaagtgacaaacacggtcaaaagcttaagggacaggttttatggttgcttgtgtaataaagcatgtccttcgtatgtcacagtttggggcaacggaagtcttttagtgatggctaatgggtctgggcagcatcccttcatgaatttttttttaatccaatatccgttgatttgattgtgattagagaaccttggacattttgctgctaaagaatcttttttcccctctcccccttcctgaccctacttgcactgctgtggatttttttaagagaagcaaaaacaaaagtaaactcctttccctggccctccaaacatatattctgtgagataactgtgcctgctaccaagtgttaatcctgggatcgtatttttatatcatattcacatatttgtttttttaattggtgttagatgacatgattaataaaaaaggcaagatattttcagaatttgaatttcagttttttttttcttttgaaatgtccctttaagatttttttattctaaacaaaataaagaaaatcctgctgctctggtccttgtgataagcctctcttcggcatctgaggagcagctgcagcaaaatctaggggtgtaagtgtatcaggacttatgtgacttatattttggggagatgagggttgggttttttttttaatgctacgtgacagtttgaaaccttcacagttatcctctgggggtaaatcaattcttcaacccttgggtgtgtgagtttgaggcagggtcatttgtgtgatgtgtttggccttaccaaagcaaaagagggtgcaagaatgtgggagtatgtctgccggtttcaacacacacagacaaacacagccacacgcgcacacaagtataagactttttgtattactgctccctacttaacatacttgaattctcaaatttcctttggggtaaaaaaaaaaaaaggatttgaaaccataaagtgttctgaagaaattaagtctataaaaagcatactttcttttttcttttccttttttccctccacagacaatgtcctctgttcaattcctaacgcaaactacaataaatggtgacacacgttcagaagaaa

SEQ ID NO: 197520 - DNA, 1273 bp, Homo sapiens
  Payload ID: 18957
  Gene Name: ubiquitination factor E4B
  ENST ID: ENST00000377153
  CDS Start-End: 398-700
taggaacgcagctaccgcgccactatcacgaagaaacagcaggctcggggcacgagacgaactggagaccgcgctgcctagctgggtaacctgggaagcagagggtaataagtggcgccttaagacaaccctgtagcagcagcagtggcggccaaaggaggctgctcagggaacaagcggctgtagtagtctgtggggcgactggagtgaccgaagccaaggcagtttagtgcctctcgtgttcttattttttaacctctgactatgcaattctgaaacctcccccattcgggggaccagacagcctgatagacaccttccactctccttcctcccgccgtggtctcgagaacagaaggatctctccttaacgcctttcaccattaagaggaaagcgatggaggagctgagcgctgatgagattcgacggaggcgccttgcacgacttgctggtggacagacctctcagccaaccaccccactcacctctccccagagggagaaccctccggggcctcccatagcggcatcagccccaggaccctctcagagtcttggtctcaatgtccacaacatgaccccagctacctccccaataggtgcatcaggtttaggtattatctctgatgacaagatgattaagactgaatttggttctgctgattttatgaatttggttgatggttttaagataaaataatctgaaaatgcaagattaaaataatggtcaaaatgaacacctctaattgcagatttcctcgtcttcattctgcattggcacagaactttttctttaacttttcagaggataaaactacctgataggatgtttagaactatctcattaaaaagtaaaagtttatttctttataataaatgagctgatgcttgatatccaggactgtctttgttgggaaatgatatttctcatactgtgtatttgaaaatatctctcttttgtctgtgaacttttctatcaaatatagtattattgtcatataataataattactattttataattaggattctagttgcgtaaagggggtgctaagagaactgcattgatcataatatcatctaataatttgatagccttctgaatcatctgtcttcttgatctagaatcgtgtcaattaaaagtatttgcagagtttttgttgctgtacttctcgttaggtatcagtgtagactatagatatatataaatgtttatacctaatgtggttcaaccaaaacatctgttagtaataaagaagatccttgcctataa

SEQ ID NO: 197521 - DNA, 827 bp, Homo sapiens
  Payload ID: 18957
  Gene Name: ubiquitination factor E4B
  ENST ID: ENST00000470736
  CDS Start-End: 1-827
gaaccactcaccaggatgaagaagtgttcaagcagatatttatccccattttacaaggcctggctcttgctgccaaagagtgctccctcgacagtgactactttaaataccccctcatggcactaggtgagctctgtgaaaccaagtttgggaagacacaccctgtgtgcaatttggttaaagtggttgaaaaatacttctcagggcctgccattaccctggaaaacactcgtgtggttagccaatcattgcagcattacttagagctcggaaggcaagagctttttaagattctgcatagtattttgttaaatggcgaaacccgtgaggctgctctcagttacatggcggctgtcgtcaatgccaatatgaagaaagcacagatgcagacagatgatagattggtgtctacagatggatttatgctgaatttcctttgggtactgcagcagctaagtacaaaaatcaagttagaaacagttgatcccacgtatatttttcacccaagatgtcggattactcttcccaatgatgagacgcgtgtgaatgcaacgatggaagatgtgaatgactggctgactgaactctatggcgatcagcctccattttctgagccgaaattccctacggagtgcttctttctcaccctgcatgctcaccacctctctattctgcctagttgccgtcgctatatccgcagactccgggctatccgggagctcaatagaactgtagaagatttgaaaaataatgaaagccaatggaaagattccccactggcaactagacaccgcgaaatgctgaagcgctgtaaaactcagcttaag

SEQ ID NO: 197522 - DNA, 560 bp, Homo sapiens
  Payload ID: 18957
  Gene Name: ubiquitination factor E4B
  ENST ID: ENST00000488228
  CDS Start-End: 1-295
agatgttgagcataccggagccaccagtgagttttatgacaagttcacaattcgctatcatattagcaccatttttaaaagcctttggcaaaacatagctcaccatggcacctttatggaggagttcaactccgggaagcagtttgttcgctatataaacatgttgataaacgacacgacgtttttgctcgatgaaagtctggagtctctgaagcgaatccatgaagtgcaggaagagatgaagaacaaagaacagtgggaccagttgccccggagcctgcagtgcagtacctgattgtatccatgagtcaaacagctcttattatctcctccccagcccatggcagagttgaaggaggaaagtgcgccagaggatcagcagcaggctcgtcagtctcagcttgctcaggatgagcgtgtgtcccgctcttacctcgccctggccaccgaaaccgtggacatgttccacatcctcacgaagcaggtccagaagcccttcctcagaccggagcttggaccccgattggctgcaatgctgaactttaatcttcagcaacttt

SEQ ID NO: 197523 - DNA, 2536 bp, Homo sapiens
  Payload ID: 18958
  Gene Name: ubiquitin-conjugating enzyme E2 variant 1
  Uniprot ID: Q13404
  ENST ID: ENST00000340309
  CDS Start-End: 380-892
gcctaacctcttcctgcgatgagctcggcacgggaattattattgtcaattttacttgcaagaagtttcctacaagagccaaggaatccatgcgagtaaacatttacgggcaccatagataaaaggcttgtgttttaatcctcatcctctccacctgttagctctgagtctcagttttctcatctctaaaaatggggatattcacaggagttgctgcatcgagttgtgaggattaaaagttggatgtaacggcttggtaattatgagctcttctagtgtcccttcctcttccctgtgcccaaggggttttaggaaagcattttatctccacagcaatcctatgaggttgatactactatcctcatagaaggggaaactgatgccaggagaggttcaagcgtcttacctgaagtcacaaagcaaactgagtgatgaaggaagacttgaacctagaaaatttcactgcaaaggagtaaaagtccctcgcaatttccgactgttggaagaactcgaagaaggccagaaaggagtaggagatggcacagttagctggggtctagaagatgacgaagacatgacacttacaagatggacagggatgataattgggcctccaagaacaatttatgaaaaccgaatatacagccttaaaatagaatgtggacctaaatacccagaagcacccccctttgtaagatttgtaacaaaaattaatatgaatggagtaaatagttctaatggagtggtggacccaagagccatatcagtgctagcaaaatggcagaattcatatagcatcaaagttgtcctgcaagagcttcggcgcctaatgatgtctaaagaaaatatgaaactccctcagccgcccgaaggacagtgttacagcaattaatcaaaaagaaaaaccacaggcccttccccttccccccaattcgatttaatcagtcttcattttccacagtagtaaattttctagatacgtcttgtagacctcaaagtaccggaaaggaagctcccattcaaaggaaatttatcttaagatactgtaaatgatactaattttttgtccatttgaaatatataagttgtgctataacaaatcatcctgtcaagtgtaaccactgtccacgtagttgaacttctgggatcaagaaagtctatttaaattgattcccatcataactggtggggcacatctaactcaactgtgaaaagacacatcacacaatcaccttgctgctgattacacggcctggggtctctgccttctccccttaccctcccgcctcccaccctccctgcaacaacagccctctagcctggggggcttgttagagtagatgtgaaggtttcaggtcgcagcctgtgggactactgctaggtgtgtggggtgtttcgcctgcacccctggtttctttaagtcttaagtgatgccccttccaaaccatcatcctgtccccacgctcctccactcccgcccttggccgaagcatagattgtaacccctccactcccctctgagattggccttcggtgaggaattcagggctttccccatatcttctctcccccacctttatcgaggggtgctgctttttctccctcctcctcaagttcctttttgcaccgtcaccacccaacaccttccatgacacttccttgctttggccagaagccatcaggtaaggttggaaagagcctctgacctcccttgtttagttttggaaccatactcactcactctccaccagcctgggaaatgaatattgggtcctcagccctgccaccctctgctgtcatcagctgatgcattgtttttagctcaggttttgataaggtgaaaagaatagtcaccagggttactcagacctgccagctctcggagtccttggtggttgaacttggagaaagaccgcatgaagatacttgtaagcacacatgatccctctgaattgttttactttcctgtaactgcttttgcttttaaaaattgaagaagttttaaacagggctttcatttggtcatccttgcaatccattggggtctagtttggaatctgacaactggaacaaaaagaaccttgaatccggtgcatgccttggttttggtgctgctgctgcttcccaagatcctcagcagggattaagaaggaacccggtgtgcacagcagatccccgaaattggtgggcttgacctcctggcaaattgctgcgtctttccacttgctgttcaggaccactaaatgctgaaatgtggatgcataccgaaataaaagcaattcattgtgtactaaaggttttttttttttttttaatttagtatttgtgtaaaaccaccttttgaagcagcaactatcaagtctgaaaagcaattgatgtttccattaatctttttctggggggaaaaccttagttctaaggatttaacatcctgtaagtgaagtttaacataacagtattccataagcagcctttttattgtcagaccattgcctgattttaatataataaaaaaaaagtgtgcgttaatatttaa

SEQ ID NO: 197524 - DNA, 1973 bp, Homo sapiens
  Payload ID: 18958
  Gene Name: ubiquitin-conjugating enzyme E2 variant 1
  Uniprot ID: Q13404
  ENST ID: ENST00000371657
  CDS Start-End: 12-329
agcgacgcaagatggcagccaccacgggctcgggagtaaaagtccctcgcaatttccgactgttggaagaactcgaagaaggccagaaaggagtaggagatggcacagttagctggggtctagaagatgacgaagacatgacacttacaagatggacagggatgataattgggcctccaagagtggacccaagagccatatcagtgctagcaaaatggcagaattcatatagcatcaaagttgtcctgcaagagcttcggcgcctaatgatgtctaaagaaaatatgaaactccctcagccgcccgaaggacagtgttacagcaattaatcaaaaagaaaaaccacaggcccttccccttccccccaattcgatttaatcagtcttcattttccacagtagtaaattttctagatacgtcttgtagacctcaaagtaccggaaaggaagctcccattcaaaggaaatttatcttaagatactgtaaatgatactaattttttgtccatttgaaatatataagttgtgctataacaaatcatcctgtcaagtgtaaccactgtccacgtagttgaacttctgggatcaagaaagtctatttaaattgattcccatcataactggtggggcacatctaactcaactgtgaaaagacacatcacacaatcaccttgctgctgattacacggcctggggtctctgccttctccccttaccctcccgcctcccaccctccctgcaacaacagccctctagcctggggggcttgttagagtagatgtgaaggtttcaggtcgcagcctgtgggactactgctaggtgtgtggggtgtttcgcctgcacccctggtttctttaagtcttaagtgatgccccttccaaaccatcatcctgtccccacgctcctccactcccgcccttggccgaagcatagattgtaacccctccactcccctctgagattggccttcggtgaggaattcagggctttccccatatcttctctcccccacctttatcgaggggtgctgctttttctccctcctcctcaagttcctttttgcaccgtcaccacccaacaccttccatgacacttccttgctttggccagaagccatcaggtaaggttggaaagagcctctgacctcccttgtttagttttggaaccatactcactcactctccaccagcctgggaaatgaatattgggtcctcagccctgccaccctctgctgtcatcagctgatgcattgtttttagctcaggttttgataaggtgaaaagaatagtcaccagggttactcagacctgccagctctcggagtccttggtggttgaacttggagaaagaccgcatgaagatacttgtaagcacacatgatccctctgaattgttttactttcctgtaactgcttttgcttttaaaaattgaagaagttttaaacagggctttcatttggtcatccttgcaatccattggggtctagtttggaatctgacaactggaacaaaaagaaccttgaatccggtgcatgccttggttttggtgctgctgctgcttcccaagatcctcagcagggattaagaaggaacccggtgtgcacagcagatccccgaaattggtgggcttgacctcctggcaaattgctgcgtctttccacttgctgttcaggaccactaaatgctgaaatgtggatgcataccgaaataaaagcaattcattgtgtactaaaggttttttttttttttttaatttagtatttgtgtaaaaccaccttttgaagcagcaactatcaagtctgaaaagcaattgatgtttccattaatctttttctggggggaaaaccttagttctaaggatttaacatcctgtaagtgaagtttaacataacagtattccataagcagcctttttattgtcagaccattgcctgattttaatataataaaaaaaaagtgtgcgttaatatttaa

SEQ ID NO: 197525 - DNA, 2133 bp, Homo sapiens
  Payload ID: 18958
  Gene Name: ubiquitin-conjugating enzyme E2 variant 1
  Uniprot ID: Q13404
  ENST ID: ENST00000371674
  CDS Start-End: 46-489
gggggggtgaagaaggggccggccttcaagcaagagcgacgcaagatggcagccaccacgggctcgggagtaaaagtccctcgcaatttccgactgttggaagaactcgaagaaggccagaaaggagtaggagatggcacagttagctggggtctagaagatgacgaagacatgacacttacaagatggacagggatgataattgggcctccaagaacaatttatgaaaaccgaatatacagccttaaaatagaatgtggacctaaatacccagaagcacccccctttgtaagatttgtaacaaaaattaatatgaatggagtaaatagttctaatggagtggtggacccaagagccatatcagtgctagcaaaatggcagaattcatatagcatcaaagttgtcctgcaagagcttcggcgcctaatgatgtctaaagaaaatatgaaactccctcagccgcccgaaggacagtgttacagcaattaatcaaaaagaaaaaccacaggcccttccccttccccccaattcgatttaatcagtcttcattttccacagtagtaaattttctagatacgtcttgtagacctcaaagtaccggaaaggaagctcccattcaaaggaaatttatcttaagatactgtaaatgatactaattttttgtccatttgaaatatataagttgtgctataacaaatcatcctgtcaagtgtaaccactgtccacgtagttgaacttctgggatcaagaaagtctatttaaattgattcccatcataactggtggggcacatctaactcaactgtgaaaagacacatcacacaatcaccttgctgctgattacacggcctggggtctctgccttctccccttaccctcccgcctcccaccctccctgcaacaacagccctctagcctggggggcttgttagagtagatgtgaaggtttcaggtcgcagcctgtgggactactgctaggtgtgtggggtgtttcgcctgcacccctggtttctttaagtcttaagtgatgccccttccaaaccatcatcctgtccccacgctcctccactcccgcccttggccgaagcatagattgtaacccctccactcccctctgagattggccttcggtgaggaattcagggctttccccatatcttctctcccccacctttatcgaggggtgctgctttttctccctcctcctcaagttcctttttgcaccgtcaccacccaacaccttccatgacacttccttgctttggccagaagccatcaggtaaggttggaaagagcctctgacctcccttgtttagttttggaaccatactcactcactctccaccagcctgggaaatgaatattgggtcctcagccctgccaccctctgctgtcatcagctgatgcattgtttttagctcaggttttgataaggtgaaaagaatagtcaccagggttactcagacctgccagctctcggagtccttggtggttgaacttggagaaagaccgcatgaagatacttgtaagcacacatgatccctctgaattgttttactttcctgtaactgcttttgcttttaaaaattgaagaagttttaaacagggctttcatttggtcatccttgcaatccattggggtctagtttggaatctgacaactggaacaaaaagaaccttgaatccggtgcatgccttggttttggtgctgctgctgcttcccaagatcctcagcagggattaagaaggaacccggtgtgcacagcagatccccgaaattggtgggcttgacctcctggcaaattgctgcgtctttccacttgctgttcaggaccactaaatgctgaaatgtggatgcataccgaaataaaagcaattcattgtgtactaaaggttttttttttttttttaatttagtatttgtgtaaaaccaccttttgaagcagcaactatcaagtctgaaaagcaattgatgtttccattaatctttttctggggggaaaaccttagttctaaggatttaacatcctgtaagtgaagtttaacataacagtattccataagcagcctttttattgtcagaccattgcctgattttaatataataaaaaaaaagtgtgcgttaatatttaa

SEQ ID NO: 197526 - DNA, 2459 bp, Homo sapiens
  Payload ID: 18958
  Gene Name: ubiquitin-conjugating enzyme E2 variant 1
  Uniprot ID: Q13404
  ENST ID: ENST00000371677
  CDS Start-End: 303-815
gcctaacctcttcctgcgatgagctcggcacgggaattattattgtcaattttacttgcaagaagtttcctacaagagccaaggaatccatgcgagtaaacatttacgggcaccatagataaaaggcttgtgttttaatcctcatcctctccacctgttagctctgagtctcagttttctcatctctaaaaatggggatattcacaggagttgctgcatcgagttgtgaggattaaaagttggatgtaacggcttgcaatcctatgaggttgatactactatcctcatagaaggggaaactgatgccaggagaggttcaagcgtcttacctgaagtcacaaagcaaactgagtgatgaaggaagacttgaacctagaaaatttcactgcaaaggagtaaaagtccctcgcaatttccgactgttggaagaactcgaagaaggccagaaaggagtaggagatggcacagttagctggggtctagaagatgacgaagacatgacacttacaagatggacagggatgataattgggcctccaagaacaatttatgaaaaccgaatatacagccttaaaatagaatgtggacctaaatacccagaagcacccccctttgtaagatttgtaacaaaaattaatatgaatggagtaaatagttctaatggagtggtggacccaagagccatatcagtgctagcaaaatggcagaattcatatagcatcaaagttgtcctgcaagagcttcggcgcctaatgatgtctaaagaaaatatgaaactccctcagccgcccgaaggacagtgttacagcaattaatcaaaaagaaaaaccacaggcccttccccttccccccaattcgatttaatcagtcttcattttccacagtagtaaattttctagatacgtcttgtagacctcaaagtaccggaaaggaagctcccattcaaaggaaatttatcttaagatactgtaaatgatactaattttttgtccatttgaaatatataagttgtgctataacaaatcatcctgtcaagtgtaaccactgtccacgtagttgaacttctgggatcaagaaagtctatttaaattgattcccatcataactggtggggcacatctaactcaactgtgaaaagacacatcacacaatcaccttgctgctgattacacggcctggggtctctgccttctccccttaccctcccgcctcccaccctccctgcaacaacagccctctagcctggggggcttgttagagtagatgtgaaggtttcaggtcgcagcctgtgggactactgctaggtgtgtggggtgtttcgcctgcacccctggtttctttaagtcttaagtgatgccccttccaaaccatcatcctgtccccacgctcctccactcccgcccttggccgaagcatagattgtaacccctccactcccctctgagattggccttcggtgaggaattcagggctttccccatatcttctctcccccacctttatcgaggggtgctgctttttctccctcctcctcaagttcctttttgcaccgtcaccacccaacaccttccatgacacttccttgctttggccagaagccatcaggtaaggttggaaagagcctctgacctcccttgtttagttttggaaccatactcactcactctccaccagcctgggaaatgaatattgggtcctcagccctgccaccctctgctgtcatcagctgatgcattgtttttagctcaggttttgataaggtgaaaagaatagtcaccagggttactcagacctgccagctctcggagtccttggtggttgaacttggagaaagaccgcatgaagatacttgtaagcacacatgatccctctgaattgttttactttcctgtaactgcttttgcttttaaaaattgaagaagttttaaacagggctttcatttggtcatccttgcaatccattggggtctagtttggaatctgacaactggaacaaaaagaaccttgaatccggtgcatgccttggttttggtgctgctgctgcttcccaagatcctcagcagggattaagaaggaacccggtgtgcacagcagatccccgaaattggtgggcttgacctcctggcaaattgctgcgtctttccacttgctgttcaggaccactaaatgctgaaatgtggatgcataccgaaataaaagcaattcattgtgtactaaaggttttttttttttttttaatttagtatttgtgtaaaaccaccttttgaagcagcaactatcaagtctgaaaagcaattgatgtttccattaatctttttctggggggaaaaccttagttctaaggatttaacatcctgtaagtgaagtttaacataacagtattccataagcagcctttttattgtcagaccattgcctgattttaatataataaaaaaaaagtgtgcgttaatatttaa

SEQ ID NO: 197527 - DNA, 1956 bp, Homo sapiens
  Payload ID: 18958
  Gene Name: ubiquitin-conjugating enzyme E2 variant 1
  ENST ID: ENST00000420027
  CDS Start-End: 1-312
atggagaagggacttaatactaaaaacttcactgaacaaacaatttatgaaaaccgaatatacagccttaaaatagaatgtggacctaaatacccagaagcacccccctttgtaagatttgtaacaaaaattaatatgaatggagtaaatagttctaatggagtggtggacccaagagccatatcagtgctagcaaaatggcagaattcatatagcatcaaagttgtcctgcaagagcttcggcgcctaatgatgtctaaagaaaatatgaaactccctcagccgcccgaaggacagtgttacagcaattaatcaaaaagaaaaaccacaggcccttccccttccccccaattcgatttaatcagtcttcattttccacagtagtaaattttctagatacgtcttgtagacctcaaagtaccggaaaggaagctcccattcaaaggaaatttatcttaagatactgtaaatgatactaattttttgtccatttgaaatatataagttgtgctataacaaatcatcctgtcaagtgtaaccactgtccacgtagttgaacttctgggatcaagaaagtctatttaaattgattcccatcataactggtggggcacatctaactcaactgtgaaaagacacatcacacaatcaccttgctgctgattacacggcctggggtctctgccttctccccttaccctcccgcctcccaccctccctgcaacaacagccctctagcctggggggcttgttagagtagatgtgaaggtttcaggtcgcagcctgtgggactactgctaggtgtgtggggtgtttcgcctgcacccctggtttctttaagtcttaagtgatgccccttccaaaccatcatcctgtccccacgctcctccactcccgcccttggccgaagcatagattgtaacccctccactcccctctgagattggccttcggtgaggaattcagggctttccccatatcttctctcccccacctttatcgaggggtgctgctttttctccctcctcctcaagttcctttttgcaccgtcaccacccaacaccttccatgacacttccttgctttggccagaagccatcaggtaaggttggaaagagcctctgacctcccttgtttagttttggaaccatactcactcactctccaccagcctgggaaatgaatattgggtcctcagccctgccaccctctgctgtcatcagctgatgcattgtttttagctcaggttttgataaggtgaaaagaatagtcaccagggttactcagacctgccagctctcggagtccttggtggttgaacttggagaaagaccgcatgaagatacttgtaagcacacatgatccctctgaattgttttactttcctgtaactgcttttgcttttaaaaattgaagaagttttaaacagggctttcatttggtcatccttgcaatccattggggtctagtttggaatctgacaactggaacaaaaagaaccttgaatccggtgcatgccttggttttggtgctgctgctgcttcccaagatcctcagcagggattaagaaggaacccggtgtgcacagcagatccccgaaattggtgggcttgacctcctggcaaattgctgcgtctttccacttgctgttcaggaccactaaatgctgaaatgtggatgcataccgaaataaaagcaattcattgtgtactaaaggttttttttttttttttaatttagtatttgtgtaaaaccaccttttgaagcagcaactatcaagtctgaaaagcaattgatgtttccattaatctttttctggggggaaaaccttagttctaaggatttaacatcctgtaagtgaagtttaacataacagtattccataagcagcctttttattgtcagaccattgcctgattttaatataataaaaaaaaagtgtgcgttaatatttaa

SEQ ID NO: 197528 - DNA, 2387 bp, Homo sapiens
  Payload ID: 18958
  Gene Name: ubiquitin-conjugating enzyme E2 variant 1
  Uniprot ID: Q13404
  ENST ID: ENST00000415862
  CDS Start-End: 432-743
gcctaacctcttcctgcgatgagctcggcacgggaattattattgtcaattttacttgcaagaagtttcctacaagagccaaggaatccatgcgagtaaacatttacgggcaccatagataaaaggcttgtgttttaatcctcatcctctccacctgttagctctgagtctcagttttctcatctctaaaaatggggatattcacaggagttgctgcatcgagttgtgaggattaaaagttggatgtaacggcttggtaattatgagctcttctagtgtcccttcctcttccctgtgcccaaggggttttaggaaagcattttatctccacagcaatcctatgaggttgatactactatcctcatagaaggggaaactgatgccaggagaggttcaagcgtcttacctgaagtcacaaagcaaactgagtgatgaaggaagacttgaacctagaaaatttcactgcaaagacaatttatgaaaaccgaatatacagccttaaaatagaatgtggacctaaatacccagaagcacccccctttgtaagatttgtaacaaaaattaatatgaatggagtaaatagttctaatggagtggtggacccaagagccatatcagtgctagcaaaatggcagaattcatatagcatcaaagttgtcctgcaagagcttcggcgcctaatgatgtctaaagaaaatatgaaactccctcagccgcccgaaggacagtgttacagcaattaatcaaaaagaaaaaccacaggcccttccccttccccccaattcgatttaatcagtcttcattttccacagtagtaaattttctagatacgtcttgtagacctcaaagtaccggaaaggaagctcccattcaaaggaaatttatcttaagatactgtaaatgatactaattttttgtccatttgaaatatataagttgtgctataacaaatcatcctgtcaagtgtaaccactgtccacgtagttgaacttctgggatcaagaaagtctatttaaattgattcccatcataactggtggggcacatctaactcaactgtgaaaagacacatcacacaatcaccttgctgctgattacacggcctggggtctctgccttctccccttaccctcccgcctcccaccctccctgcaacaacagccctctagcctggggggcttgttagagtagatgtgaaggtttcaggtcgcagcctgtgggactactgctaggtgtgtggggtgtttcgcctgcacccctggtttctttaagtcttaagtgatgccccttccaaaccatcatcctgtccccacgctcctccactcccgcccttggccgaagcatagattgtaacccctccactcccctctgagattggccttcggtgaggaattcagggctttccccatatcttctctcccccacctttatcgaggggtgctgctttttctccctcctcctcaagttcctttttgcaccgtcaccacccaacaccttccatgacacttccttgctttggccagaagccatcaggtaaggttggaaagagcctctgacctcccttgtttagttttggaaccatactcactcactctccaccagcctgggaaatgaatattgggtcctcagccctgccaccctctgctgtcatcagctgatgcattgtttttagctcaggttttgataaggtgaaaagaatagtcaccagggttactcagacctgccagctctcggagtccttggtggttgaacttggagaaagaccgcatgaagatacttgtaagcacacatgatccctctgaattgttttactttcctgtaactgcttttgcttttaaaaattgaagaagttttaaacagggctttcatttggtcatccttgcaatccattggggtctagtttggaatctgacaactggaacaaaaagaaccttgaatccggtgcatgccttggttttggtgctgctgctgcttcccaagatcctcagcagggattaagaaggaacccggtgtgcacagcagatccccgaaattggtgggcttgacctcctggcaaattgctgcgtctttccacttgctgttcaggaccactaaatgctgaaatgtggatgcataccgaaataaaagcaattcattgtgtactaaaggttttttttttttttttaatttagtatttgtgtaaaaccaccttttgaagcagcaactatcaagtctgaaaagcaattgatgtttccattaatctttttctggggggaaaaccttagttctaaggatttaacatcctgtaagtgaagtttaacataacagtattccataagcagcctttttattgtcagaccattgcctgattttaatataataaaaaaaaagtgtgcgttaatatttaa

SEQ ID NO: 197529 - DNA, 1155 bp, Homo sapiens
  Payload ID: 18958
  Gene Name: ubiquitin-conjugating enzyme E2 variant 1
  ENST ID: ENST00000483534
  CDS Start-End: 383-652
cccgcctaacctcttcctgcgatgagctcggcacgggaattattattgtcaattttacttgcaagaagtttcctacaagagccaaggaatccatgcgagtaaacatttacgggcaccatagataaaaggcttgtgttttaatcctcatcctctccacctgttagctctgagtctcagttttctcatctctaaaaatggggatattcacaggagttgctgcatcgagttgtgaggattaaaagttggatgtaacggcttggtaattatgagctcttctagtgtcccttcctcttccctgtgcccaaggggttttaggaaagcattttatctccacagcaatcctatgaggttgatactactatcctcatagaaggggaaactgatgccaggagaggttcaagcgtcttacctgaagtcacaaagcaaactgagtgatgaaggaagacttgaacctagaaaatttcactgcaaaggagtaaaagtccctcgcaatttccgactgttggaagaactcgaagaaggccagaaaggagtaggagatggcacagttagctggggtctagaagatgacgaagacatgacacttacaagatggacagggatgataattgggcctccaagatttcagtttatatatttgaacctcctctgatgctgtttaacccctctaaatgacaatttatgaaaaccgaatatacagccttaaaatagaatgtggacctaaatacccagaagcacccccctttgtaagatttgtaacaaaaattaatatgaatggagtaaatagttctaatggagtggtggacccaagagccatatcagtgctagcaaaatggcagaattcatatagcatcaaagttgtcctgcaagagcttcggcgcctaatgatgtctaaagaaaatatgaaactccctcagccgcccgaaggacagtgttacagcaattaatcaaaaagaaaaaccacaggcccttccccttccccccaattcgatttaatcagtcttcattttccacagtagtaaattttctagatacgtcttgtagacctcaaagtaccggaaaggaagctcccattcaaaggaaatttatcttaagatactgtaaatgatactaattttttgtccatttgaaatatataagttgtgctataacaaa

SEQ ID NO: 197530 - DNA, 2258 bp, Homo sapiens
  Payload ID: 18958
  Gene Name: ubiquitin-conjugating enzyme E2 variant 1
  ENST ID: ENST00000557021
  CDS Start-End: 297-614
gcatcagggccgggggacgggtaaggggggggtgaagaaggggccggccttcaagcaagagcgacgcaagatggcagccaccacgggctcggttttatgtttgctacaggagacttaatccagtatagctgaataatccagttggctgctgtgcagatgaaaatgccagtgttttccaaacaagcagttcaagagtaaaagtccctcgcaatttccgactgttggaagaactcgaagaaggccagaaaggagtaggagatggcacagttagctggggtctagaagatgacgaagacatgacacttacaagatggacagggatgataattgggcctccaagaacaatttatgaaaaccgaatatacagccttaaaatagaatgtggacctaaatacccagaagcacccccctttgtaagatttgtaacaaaaattaatatgaatggagtaaatagttctaatggagtggtggacccaagagccatatcagtgctagcaaaatggcagaattcatatagcatcaaagttgtcctgcaagagcttcggcgcctaatgatgtctaaagaaaatatgaaactccctcagccgcccgaaggacagtgttacagcaattaatcaaaaagaaaaaccacaggcccttccccttccccccaattcgatttaatcagtcttcattttccacagtagtaaattttctagatacgtcttgtagacctcaaagtaccggaaaggaagctcccattcaaaggaaatttatcttaagatactgtaaatgatactaattttttgtccatttgaaatatataagttgtgctataacaaatcatcctgtcaagtgtaaccactgtccacgtagttgaacttctgggatcaagaaagtctatttaaattgattcccatcataactggtggggcacatctaactcaactgtgaaaagacacatcacacaatcaccttgctgctgattacacggcctggggtctctgccttctccccttaccctcccgcctcccaccctccctgcaacaacagccctctagcctggggggcttgttagagtagatgtgaaggtttcaggtcgcagcctgtgggactactgctaggtgtgtggggtgtttcgcctgcacccctggtttctttaagtcttaagtgatgccccttccaaaccatcatcctgtccccacgctcctccactcccgcccttggccgaagcatagattgtaacccctccactcccctctgagattggccttcggtgaggaattcagggctttccccatatcttctctcccccacctttatcgaggggtgctgctttttctccctcctcctcaagttcctttttgcaccgtcaccacccaacaccttccatgacacttccttgctttggccagaagccatcaggtaaggttggaaagagcctctgacctcccttgtttagttttggaaccatactcactcactctccaccagcctgggaaatgaatattgggtcctcagccctgccaccctctgctgtcatcagctgatgcattgtttttagctcaggttttgataaggtgaaaagaatagtcaccagggttactcagacctgccagctctcggagtccttggtggttgaacttggagaaagaccgcatgaagatacttgtaagcacacatgatccctctgaattgttttactttcctgtaactgcttttgcttttaaaaattgaagaagttttaaacagggctttcatttggtcatccttgcaatccattggggtctagtttggaatctgacaactggaacaaaaagaaccttgaatccggtgcatgccttggttttggtgctgctgctgcttcccaagatcctcagcagggattaagaaggaacccggtgtgcacagcagatccccgaaattggtgggcttgacctcctggcaaattgctgcgtctttccacttgctgttcaggaccactaaatgctgaaatgtggatgcataccgaaataaaagcaattcattgtgtactaaaggttttttttttttttttaatttagtatttgtgtaaaaccaccttttgaagcagcaactatcaagtctgaaaagcaattgatgtttccattaatctttttctggggggaaaaccttagttctaaggatttaacatcctgtaagtgaagtttaacataacagtattccataagcagcctttttattgtcagaccattgcctgattttaatataataaaaaaaaagtgtgcgttaatatttaa

SEQ ID NO: 197531 - DNA, 2432 bp, Homo sapiens
  Payload ID: 18958
  Gene Name: ubiquitin-conjugating enzyme E2 variant 1
  ENST ID: ENST00000617119
  CDS Start-End: 471-788
gcatcagggccgggggacgggtaaggggggggtgaagaaggggccggccttcaagcaagagcgacgcaagatggcagccaccacgggctcggctggaacagtgctgagtcaattcatttaccatgacgctgccccaggcactcccagaagagagattctgagtcaggccagactgctgggtaaaacttctcaccagaataacactcctaccgggtcgtaataaacgaaggggcccagtgtgctggtggtagccagcaataaggtgctgttgcagctcagccctgcttgcagtcactcggttggctacctacaatctgggttaacagctgcccggttctaacttctccagaccctgacagttaaaaagagtaaaagtccctcgcaatttccgactgttggaagaactcgaagaaggccagaaaggagtaggagatggcacagttagctggggtctagaagatgacgaagacatgacacttacaagatggacagggatgataattgggcctccaagaacaatttatgaaaaccgaatatacagccttaaaatagaatgtggacctaaatacccagaagcacccccctttgtaagatttgtaacaaaaattaatatgaatggagtaaatagttctaatggagtggtggacccaagagccatatcagtgctagcaaaatggcagaattcatatagcatcaaagttgtcctgcaagagcttcggcgcctaatgatgtctaaagaaaatatgaaactccctcagccgcccgaaggacagtgttacagcaattaatcaaaaagaaaaaccacaggcccttccccttccccccaattcgatttaatcagtcttcattttccacagtagtaaattttctagatacgtcttgtagacctcaaagtaccggaaaggaagctcccattcaaaggaaatttatcttaagatactgtaaatgatactaattttttgtccatttgaaatatataagttgtgctataacaaatcatcctgtcaagtgtaaccactgtccacgtagttgaacttctgggatcaagaaagtctatttaaattgattcccatcataactggtggggcacatctaactcaactgtgaaaagacacatcacacaatcaccttgctgctgattacacggcctggggtctctgccttctccccttaccctcccgcctcccaccctccctgcaacaacagccctctagcctggggggcttgttagagtagatgtgaaggtttcaggtcgcagcctgtgggactactgctaggtgtgtggggtgtttcgcctgcacccctggtttctttaagtcttaagtgatgccccttccaaaccatcatcctgtccccacgctcctccactcccgcccttggccgaagcatagattgtaacccctccactcccctctgagattggccttcggtgaggaattcagggctttccccatatcttctctcccccacctttatcgaggggtgctgctttttctccctcctcctcaagttcctttttgcaccgtcaccacccaacaccttccatgacacttccttgctttggccagaagccatcaggtaaggttggaaagagcctctgacctcccttgtttagttttggaaccatactcactcactctccaccagcctgggaaatgaatattgggtcctcagccctgccaccctctgctgtcatcagctgatgcattgtttttagctcaggttttgataaggtgaaaagaatagtcaccagggttactcagacctgccagctctcggagtccttggtggttgaacttggagaaagaccgcatgaagatacttgtaagcacacatgatccctctgaattgttttactttcctgtaactgcttttgcttttaaaaattgaagaagttttaaacagggctttcatttggtcatccttgcaatccattggggtctagtttggaatctgacaactggaacaaaaagaaccttgaatccggtgcatgccttggttttggtgctgctgctgcttcccaagatcctcagcagggattaagaaggaacccggtgtgcacagcagatccccgaaattggtgggcttgacctcctggcaaattgctgcgtctttccacttgctgttcaggaccactaaatgctgaaatgtggatgcataccgaaataaaagcaattcattgtgtactaaaggttttttttttttttttaatttagtatttgtgtaaaaccaccttttgaagcagcaactatcaagtctgaaaagcaattgatgtttccattaatctttttctggggggaaaaccttagttctaaggatttaacatcctgtaagtgaagtttaacataacagtattccataagcagcctttttattgtcagaccattgcctgattttaatataataaaaaaaaagtgtgcgttaatatttaa

SEQ ID NO: 197532 - DNA, 2297 bp, Homo sapiens
  Payload ID: 18958
  Gene Name: ubiquitin-conjugating enzyme E2 variant 1
  ENST ID: ENST00000625172
  CDS Start-End: 336-653
gcatcagggccgggggacgggtaaggggggggtgaagaaggggccggccttcaagcaagagcgacgcaagatggcagccaccacgggctcggcctggtcaccagccaggggcagtatccacccacattactgagggaggagccaaaagccaagggagactggtgatgctcggactagagcccaggcatttttaactcctgttccctcaccagcctgcaggaaatggaaaaggagtaaaagtccctcgcaatttccgactgttggaagaactcgaagaaggccagaaaggagtaggagatggcacagttagctggggtctagaagatgacgaagacatgacacttacaagatggacagggatgataattgggcctccaagaacaatttatgaaaaccgaatatacagccttaaaatagaatgtggacctaaatacccagaagcacccccctttgtaagatttgtaacaaaaattaatatgaatggagtaaatagttctaatggagtggtggacccaagagccatatcagtgctagcaaaatggcagaattcatatagcatcaaagttgtcctgcaagagcttcggcgcctaatgatgtctaaagaaaatatgaaactccctcagccgcccgaaggacagtgttacagcaattaatcaaaaagaaaaaccacaggcccttccccttccccccaattcgatttaatcagtcttcattttccacagtagtaaattttctagatacgtcttgtagacctcaaagtaccggaaaggaagctcccattcaaaggaaatttatcttaagatactgtaaatgatactaattttttgtccatttgaaatatataagttgtgctataacaaatcatcctgtcaagtgtaaccactgtccacgtagttgaacttctgggatcaagaaagtctatttaaattgattcccatcataactggtggggcacatctaactcaactgtgaaaagacacatcacacaatcaccttgctgctgattacacggcctggggtctctgccttctccccttaccctcccgcctcccaccctccctgcaacaacagccctctagcctggggggcttgttagagtagatgtgaaggtttcaggtcgcagcctgtgggactactgctaggtgtgtggggtgtttcgcctgcacccctggtttctttaagtcttaagtgatgccccttccaaaccatcatcctgtccccacgctcctccactcccgcccttggccgaagcatagattgtaacccctccactcccctctgagattggccttcggtgaggaattcagggctttccccatatcttctctcccccacctttatcgaggggtgctgctttttctccctcctcctcaagttcctttttgcaccgtcaccacccaacaccttccatgacacttccttgctttggccagaagccatcaggtaaggttggaaagagcctctgacctcccttgtttagttttggaaccatactcactcactctccaccagcctgggaaatgaatattgggtcctcagccctgccaccctctgctgtcatcagctgatgcattgtttttagctcaggttttgataaggtgaaaagaatagtcaccagggttactcagacctgccagctctcggagtccttggtggttgaacttggagaaagaccgcatgaagatacttgtaagcacacatgatccctctgaattgttttactttcctgtaactgcttttgcttttaaaaattgaagaagttttaaacagggctttcatttggtcatccttgcaatccattggggtctagtttggaatctgacaactggaacaaaaagaaccttgaatccggtgcatgccttggttttggtgctgctgctgcttcccaagatcctcagcagggattaagaaggaacccggtgtgcacagcagatccccgaaattggtgggcttgacctcctggcaaattgctgcgtctttccacttgctgttcaggaccactaaatgctgaaatgtggatgcataccgaaataaaagcaattcattgtgtactaaaggttttttttttttttttaatttagtatttgtgtaaaaccaccttttgaagcagcaactatcaagtctgaaaagcaattgatgtttccattaatctttttctggggggaaaaccttagttctaaggatttaacatcctgtaagtgaagtttaacataacagtattccataagcagcctttttattgtcagaccattgcctgattttaatataataaaaaaaaagtgtgcgttaatatttaa

SEQ ID NO: 197533 - DNA, 4373 bp, Homo sapiens
  Payload ID: 18959
  Gene Name: ubiquitin-conjugating enzyme E2 variant 2
  Uniprot ID: Q15819
  ENST ID: ENST00000523111
  CDS Start-End: 56-493
gacgcgcgacggttcgtgcgtgcgtgcgggcggctgcgtcgggctgcaggagaagatggcggtctccacaggagttaaagttcctcgtaattttcgcttgttggaagaacttgaagaaggacaaaaaggagtaggcgacggtacagttagctggggccttgaagatgatgaagatatgacacttacaaggtggacaggcatgattattgggccaccaaggacaaattatgaaaacagaatatatagcctgaaagtagaatgtggacctaaatacccagaagctcctccgtcagttagatttgtaacaaaaattaatatgaacggaataaataattccagtgggatggtggatgcccggagcataccagtgttagcaaaatggcaaaattcatatagcattaaagttgtacttcaagagctaagacgtctaatgatgtccaaagaaaatatgaagcttccacagccaccagaaggacaaacatacaacaattaattttagtggatctcaaacttgtcttaaatcaacaaccttctactcatgttaatgtcttgattaaatatcacaatgcaaaatacacattaagtaaaagaattccagctggtaaacatgacctggacatttgtaagaatatatttaatatatgtacacccattatgttttcaggtaacaggaggaaaaatgcagcacaattttttttctcttgaaaggcactgtcatttaaacataaacctggagtactcgaaatagaattcaggtttacaagatgaaagcgtgtggagaagtgtcagatggcagtggaagcatgtgtgtttctaaaaagtaaaaatctcaagaaaacagaaatggcatgctttacccatcttacttagtgaaagagagctgcagttgaaattgtttaaaaagtagcaggtacaatgaatattgtcacagatgtgttaatttttgaagcaatgtgggtgctgactactagtagtatcaaaaatatgttcaggattgttttgatacctgtatttataataaaaaatgttggggggagttgatgaattcctgttaaaagctgttcttgtgtgttacatgtaacagacatggtaaatatttgtttacagtctttgtttaacaaaccatgcatttaagtttaagtgaagtcaacaaaaaggaaataggtgtatggatatgtgattttgagattaaagttagtcttaaaatgtaaataaaatgtgaaacgtgtcctcagagactgtgccatttctattatgttgatgtatatgtacagtaccttgccagggaagcaaaaattggaattattgtagcttttcatgtatacacacttttatttaccctattttgtgtacttcttgtgaattataatttgcagactatttcagaaaagaaattatctagtttaatttcttctttggacaaggagtcctaggtattatattttgagtttgatttcaccagaaataataatattaaaaagatctttgcattctggcagttcttttaggattataggttgcaaattatccaaatatatatcccattttttaaagcataatatcttttttagttgtttttctgtgaagcttttggttaataaatagggtcaactaattggagacttttctcttccaattagggcttttaatactaacaaggataactttattcattcctcgtattctctactctaacaaatatgaactctgaagttgaaaagtcatttatgttccgctttcaccaaagtgacgtgaggctttaggtcactgtttcacttcaaagtactggatccaaagctttgttgaaaatgctgtttgatgaattcactgaagaatatagaaaggtggtcaggtaaagtctacttttattttgtcaagcttaataatttgtgtcatactttaccccagtatatataggcaaaccaaaaccttatcaaatattaaattagttgtttaaactttgcttataaagtattggccatgtggtggctcatgccgctaatcccagcactttgggaggctgagacgggcagatcacttgaggtcaggagcttgagaccagcctggccaacatgatgaaaccctgtctctactaaaaatacaaaaaattagccaggtgtggtggtgggtacttgtagtcccagctactcgggaggctgggcaggagaactacttgaaactggcagacagaggttgcagtgccgagagcgcaccactgctccagcctgggcaacagagcaagactccatctcaaaaaaaaaaaaaaaaagaaaaatattaataattgaccttggctgtatattaaaatagttacttttatagtagagcacatttctcaaacatgccctgaaaggcttttatcaagctcatataaagttaaagctttgagctaccttttcttggccaataaagtcactgacagtttatgtaaacattaatttcaacatggctgttgcattttaattatcaaaaatgtttaaaatgctttaagatgacacatagagaacatacacatacatacaaattagtgcatttgtaatttgttaaatttgaaatgaactattaccttgaaatatagtctttaaaaatttttaatggttaaagattaaattgaatgaaactgtagtctaatggtaactgatgatctgaatccgtctctctgataacctcctttccattttgaaaatgtgtcttattatacatggaagctagtaactacgtgaatgctgttggcaggatgagggtctgggtacctcagtctcttgtcctgtttccttcccccaaatccaccattgtgaagttgccaaccccctgccgccttcccctgccaagtacatgttgtcagagtcagccctataatgttcatttcccctcttgtttgtgggattatggatctctgcagaaatctgcatgccaattaacccatttctaaagcagaatccattttgcatgtcacaatcaagatgtacttggcaatctaagacacactgggagactgtaagaggaattaatatagaaaagctcttaattataataacatttggaagaaatttttcctttgttttgtaaagtggctaaggttgtaggagtgtgtggtatttattaccttttaaatgaactgtaaatttgccttagaaatttgtttaaaaggctagcaagtgagacccttgaggatgatcatatactaataaagattaccaaaagaaacttcttgtcctgttaggtcagtgttatgatttaatggttttaattacttaaccaattttaagaattgacaatttttaaaaatatttttttctaccattctaaagtaatgtcttttgttgtgggtttatgtgtaactacaggattttggaacataaacattttgaaggatagtcaatggtatttagtcttggatataaaaatagagaaaatttatagctttatgttattaaaataatttatcacacagagtgatttgaggttttcgcagagtagatttgtttgactcatggtttattagtctggattacttaagaacaatatgttgattttaatgttaattcccactaaatatataatattgataaatacatgtgaaattaatattgtttggaaaatgtagaggacacagctgggaattatgaatgcttttttcttaataggtttggtgtgtgtggctttgaatggttctgctgatgcatcatggaaagacagcagggaactgtagcctgccatcaaaactgtatcaactcttttaatgagcatgtgactgtattaggtacattttgaagaatataagtactgatgataaagtctagtatgcataataggattttggaggcatttcaggaattttccttttatagtatgctttttaggcatctgtatgtgtaatatcatagtatcatttattgctgggatggatcgaaaagcactgcttttacttttctgataagtatcaaaatgattttccagtaccaacttgactggcttttaattattgtcacacacacacaaaattcaactcctcaaggtttgggaaaattgtgtatttttttgtatacaagataaaagtgtcataaaaaggaatggatgaattgttgataggaacattagcagttaatttttacctgatactgagtttactgtaaaataggaaatgcataggaaggaatacctcctaaataatatgccttatagaatgatgaaatcttaccatagttcatactgaaaatgttgtttatttaaaagtattgtggagtgttgaaaataaagatacacaataagtattttctgaagagaaaattaatgaaggtatttaatgatataggaaataagtgacaagttaaagtccattttgtttcaataaaggagttgtgcaaactcaa

SEQ ID NO: 197534 - DNA, 1322 bp, Homo sapiens
  Payload ID: 18959
  Gene Name: ubiquitin-conjugating enzyme E2 variant 2
  ENST ID: ENST00000521346
  CDS Start-End: 353-670
gtgcgtgcgggcggctgcgtcgggctgcaggagaagatggcggtctccacagagtcactcatgtggttgcatcagctggtgaagggataggcttgttgcccgggacgccttgctccccctccctgcagcctctccaggtggccagttaggacttcctcacatcccggtggtgtcagggtgttcagaattcttacatgatggttggcttccaaaagaacgaaagcagaagttagcattcctcttacaaggagttaaagttcctcgtaattttcgcttgttggaagaacttgaagaaggacaaaaaggagtaggcgacggtacagttagctggggccttgaagatgatgaagatatgacacttacaaggtggacaggcatgattattgggccaccaaggacaaattatgaaaacagaatatatagcctgaaagtagaatgtggacctaaatacccagaagctcctccgtcagttagatttgtaacaaaaattaatatgaacggaataaataattccagtgggatggtggatgcccggagcataccagtgttagcaaaatggcaaaattcatatagcattaaagttgtacttcaagagctaagacgtctaatgatgtccaaagaaaatatgaagcttccacagccaccagaaggacaaacatacaacaattaattttagtggatctcaaacttgtcttaaatcaacaaccttctactcatgttaatgtcttgattaaatatcacaatgcaaaatacacattaagtaaaagaattccagctggtaaacatgacctggacatttgtaagaatatatttaatatatgtacacccattatgttttcaggtaacaggaggaaaaatgcagcacaattttttttctcttgaaaggcactgtcatttaaacataaacctggagtactcgaaatagaattcaggtttacaagatgaaagcgtgtggagaagtgtcagatggcagtggaagcatgtgtgtttctaaaaagtaaaaatctcaagaaaacagaaatggcatgctttacccatcttacttagtgaaagagagctgcagttgaaattgtttaaaaagtagcaggtacaatgaatattgtcacagatgtgttaatttttgaagcaatgtgggtgctgactactagtagtatcaaaaatatgttcaggattgttttgatacctgtatttataataaaaaatgttggggggagttgatgaattcctgttaaaagctgttcttgtgtgttacatgtaacagacatggtaaatatttgtttacagtctttgtttaacaaaccatgcatttaagtttaagtgaa

SEQ ID NO: 197535 - DNA, 2450 bp, Homo sapiens
  Payload ID: 18959
  Gene Name: ubiquitin-conjugating enzyme E2 variant 2
  ENST ID: ENST00000520809
  CDS Start-End: 1391-1708
ctgaataaactcttaaaaagcagacacactttacttgtgtaaacactcttcttttttttttttttaaatggaatttctctcttgttgcccaggctggtgtgcaatggtgtgatcttggctcaccgcaacctccacctcccgggttcaagcgattctcctgcctcagcctcccgagtagctgggattccaggcatgtgccaccatgcccggctaatttcgtatttctaatagagatggggttcctccatgttggtcaggctggtcacgaactcccaatctcaggtgatctgcctgcctcggcctcccaaagtgctgggattacaggcccagccgtatccactcttttaaatttaggcatccatgtcactggaattatgtttttcacaggatcacttttaaattcattaagaagtttctttatgtatataagcctattcattttacttgaaaggttttctgtcttcccaaagtcaaatccttactaactaaaattaggaattttgaaaaaccatccatgaaaatctcacaaacacattaaaaaatgtattatctaaggtgcataaaattaaactccatattaccaatagcatttaagaaactcatataaaatgataatgttttctttaaagagacatactgaaagccaagtcagttgttcacaggaggtggttttgcaccattatttgaactttgatgtgtgaatttgctttagaagtccatggtctgtttactctctgacagattctgttttcacatgcccctcacatgaaggttcactcctcattcttttttttttttttttgagacaggttgggtgggactgcttcaggattctaaaagacagtaccttctggtgcactttctaagatggaacataattctactctttgaaaatcattagagagtatatattaatgaactttggcttctatgaactttctgggcatgcctgtttgattggtgcagagtccttggctgtaacagaaacatcaaatagggaaaacgatttccttatggttgattgacttacatcagtataaaattgatgaggaatttatatacacgttgtatactgctgttaatgtttggtacagtgctttctttagtgttttcattttgaggggttattagattcagcattttctggagcagaatgctttttaaaggggatttggtctttttgggaaataatttataaaggttaatttggaaaaagctgaatttaaatacgtgtagctcttataattatgagctttttacatttacactgacgttcttttgtataggagttaaagttcctcgtaattttcgcttgttggaagaacttgaagaaggacaaaaaggagtaggcgacggtacagttagctggggccttgaagatgatgaagatatgacacttacaaggtggacaggcatgattattgggccaccaaggacaaattatgaaaacagaatatatagcctgaaagtagaatgtggacctaaatacccagaagctcctccgtcagttagatttgtaacaaaaattaatatgaacggaataaataattccagtgggatggtggatgcccggagcataccagtgttagcaaaatggcaaaattcatatagcattaaagttgtacttcaagagctaagacgtctaatgatgtccaaagaaaatatgaagcttccacagccaccagaaggacaaacatacaacaattaattttagtggatctcaaacttgtcttaaatcaacaaccttctactcatgttaatgtcttgattaaatatcacaatgcaaaatacacattaagtaaaagaattccagctggtaaacatgacctggacatttgtaagaatatatttaatatatgtacacccattatgttttcaggtaacaggaggaaaaatgcagcacaattttttttctcttgaaaggcactgtcatttaaacataaacctggagtactcgaaatagaattcaggtttacaagatgaaagcgtgtggagaagtgtcagatggcagtggaagcatgtgtgtttctaaaaagtaaaaatctcaagaaaacagaaatggcatgctttacccatcttacttagtgaaagagagctgcagttgaaattgtttaaaaagtagcaggtacaatgaatattgtcacagatgtgttaatttttgaagcaatgtgggtgctgactactagtagtatcaaaaatatgttcaggattgttttgatacctgtatttataataaaaaatgttggggggagttgatgaattcctgttaaaagctgttcttgtgtgttacatgtaacagacatggtaaatatttgtttacagtctttgtttaacaaaccatgcatttaagtttaagtgaagtcaacaaaaaggaaataggtgtatggatatgtgattttgagattaaagttagtcttaaaatgtaaataaaatgtgaaacgtgtcctcag

SEQ ID NO: 197536 - DNA, 612 bp, Homo sapiens
  Payload ID: 18959
  Gene Name: ubiquitin-conjugating enzyme E2 variant 2
  ENST ID: ENST00000517630
  CDS Start-End: 226-543
gaagatggcggtctccacaggtcggttcccgggccgggctgcgtgattttccgctccgacccggctctgcccctccgtctgctgctggcgcccgagcgctgaccgtgcgggagaagcccgagagttaaagttcctcgtaattttcgcttgttggaagaacttgaagaaggacaaaaaggagtaggcgacggtacagttagctggggccttgaagatgatgaagatatgacacttacaaggtggacaggcatgattattgggccaccaaggacaaattatgaaaacagaatatatagcctgaaagtagaatgtggacctaaatacccagaagctcctccgtcagttagatttgtaacaaaaattaatatgaacggaataaataattccagtgggatggtggatgcccggagcataccagtgttagcaaaatggcaaaattcatatagcattaaagttgtacttcaagagctaagacgtctaatgatgtccaaagaaaatatgaagcttccacagccaccagaaggacaaacatacaacaattaattttagtggatctcaaacttgtcttaaatcaacaaccttctactcatgttaatgtcttgattaaatatc

SEQ ID NO: 197537 - DNA, 918 bp, Homo sapiens
  Payload ID: 18959
  Gene Name: ubiquitin-conjugating enzyme E2 variant 2
  ENST ID: ENST00000523432
  CDS Start-End: 1-329
gtgcgtgcgtgcgggcggctgcgtcgggctgcaggagaagatggcggtctccacagacaaattatgaaaacagaatatatagcctgaaagtagaatgtggacctaaatacccagaagctcctccgtcagttagatttgtaacaaaaattaatatgaacggaataaataattccagtgggatggtggatgcccggagcataccagtgttagcaaaatggcaaaattcatatagcattaaagttgtacttcaagagctaagacgtctaatgatgtccaaagaaaatatgaagcttccacagccaccagaaggacaaacatacaacaattaattttagtggatctcaaacttgtcttaaatcaacaaccttctactcatgttaatgtcttgattaaatatcacaatgcaaaatacacattaagtaaaagaattccagctggtaaacatgacctggacatttgtaagaatatatttaatatatgtacacccattatgttttcaggtaacaggaggaaaaatgcagcacaattttttttctcttgaaaggcactgtcatttaaacataaacctggagtactcgaaatagaattcaggtttacaagatgaaagcgtgtggagaagtgtcagatggcagtggaagcatgtgtgtttctaaaaagtaaaaatctcaagaaaacagaaatggcatgctttacccatcttacttagtgaaagagagctgcagttgaaattgtttaaaaagtagcaggtacaatgaatattgtcacagatgtgttaatttttgaagcaatgtgggtgctgactactagtagtatcaaaaatatgttcaggattgttttgatacctgtatttataataaaaaatgttggggggagttgatgaattcctgttaaaagctgttcttgtgtgttacatgtaac

SEQ ID NO: 197538 - DNA, 735 bp, Homo sapiens
  Payload ID: 18959
  Gene Name: ubiquitin-conjugating enzyme E2 variant 2
  ENST ID: ENST00000518360
  CDS Start-End: 1-463
gctgcaggagaagatggcggtctccacaggagttaaagttcctcgtaattttcgcttgttggaagaacttgaagaaggacaaaaaggagtaggcgacggtacagttagctggggccttgaagatgatgaagatatgacacttacaaggtggacaggcatgattattgggccaccaaggacaaattatgaaaacagaatatatagcctgaaagtagaatgtggacctaaatacccagaagctcctccgtcagttagatttgtaacaaaaattaatatgaacggaataaataattccagtgggatgagtctcactctgtcacccaggctggagtacaattgtgcgatcttggctcactgcaacctctgcctcccggcttcaagtgattctcctgcctcaacctcccgagtagctgggattacaggcacctgccatcatgcccagttaatttttgtatttttgtagagacggggtttcacaatggccaggctggtctcgaactcctgaccttagttgatccgcccggctcggcctcccaaagtgctgggattacaggtggatgcccggagcataccagtgttagcaaaatggcaaaattcatatagcattaaagttgtacttcaagagctaagacgtctaatgatgtccaaagaaaatatgaagcttccacagccaccagaaggacaaacatacaacaattaattttagtggatctcaaacttgtcttaaatcaacaa

SEQ ID NO: 197539 - DNA, 625 bp, Homo sapiens
  Payload ID: 18959
  Gene Name: ubiquitin-conjugating enzyme E2 variant 2
  ENST ID: ENST00000520595
  CDS Start-End: 1-158
gagttaaagttcctcgtaattttcgcttgttggaagaacttgaagaaggacaaaaaggagtaggcgacggtacagttagctggggccttgaagatgatgaagatatgacacttacaaggtggacaggcatgattattgggccaccaaggctggaataattgaggaaggctgaacagtggaggaagttgcctttggaatgatccctaaaggactgactggtaggatttcagaaggtggtgatggggatggagaacattccagatagagaggagaaaagacaaattatgaaaacagaatatatagcctgaaagtagaatgtggacctaaatacccagaagctcctccgtcagttagatttgtaacaaaaattaatatgaacggaataaataattccagtgggatggtggatgcccggagcataccagtgttagcaaaatggcaaaattcatatagcattaaagttgtacttcaagagctaagacgtctaatgatgtccaaagaaaatatgaagcttccacagccaccagaaggacaaacatacaacaattaattttagtggatctcaaacttgtcttaaatcaacaaccttctactcatgttaatgtcttgattaaatatcacaatg

SEQ ID NO: 197540 - DNA, 4290 bp, Homo sapiens
  Payload ID: 18960
  Gene Name: ubiquitin-conjugating enzyme E2, J1
  Uniprot ID: Q9Y385
  ENST ID: ENST00000435041
  CDS Start-End: 280-1236
ccgggcgcccggttcagcgccgccccggccggcgccggtgcctgccaggcactcagggaggcgggggcgcagtggaggaggcggcgccatcgcgaagcgagcgcctcgcccgcactcagccttgccaccccgcccgcagtccaggctggactgggcggcatttgccgaggctcctcggccaggccccgtccgcccgagccgcgctgagacccgggcagcggccgcgtggagaggaggtggcagcggcccgggaggccggagccaagccagcgacccaccatggagacccgctacaacctgaagagtccggctgttaaacgtttaatgaaagaagcggcagaattgaaagatccaacagatcattaccatgcgcagcctttagaggataacctttttgaatggcacttcacggttagagggcccccagactccgattttgatggaggagtttatcacgggcggatagtactgccaccagagtatcccatgaaaccaccaagcattattctcctaacggctaatggtcgatttgaagtgggcaagaaaatctgtttgagcatctcaggccatcatcctgaaacttggcagccttcgtggagtataaggacagcattattagccatcattgggtttatgccaacaaaaggagagggagccataggttctctagattacactcctgaggaaagaagagcacttgccaaaaaatcacaagatttctgttgtgaaggatgtggctctgccatgaaggatgtcctgttgcctttaaaatctggaagcgattcaagccaagctgaccaagaagccaaagaactggctaggcaaataagctttaaggcagaagtcaattcatctggaaagactatctctgagtcagacttaaaccactctttttcactaactgatttacaagatgatatacctacaacattccagggtgctacggccagtacatcgtacggactccagaattcctcagcagcatcctttcatcaacctacccaacctgtagctaagaatacctccatgagccctcgacagcgccgggcccagcagcagagtcagagaaggttgtctacttcaccagatgtaatccagggccaccagccaagagacaaccacactgatcatggtgggtcagctgtactgattgtcatcctgactttggcattggcagctcttatattccgacgaatatatctggcaaacgaatacatatttgactttgagttataatatggttttgtgacttatgagctgtgactcaactgcttcattaaacattctgcattgggtataatctaagaattgtttacaaaaagattattttgtatttacccttcattcctttttttgatccttgtaagtttagtataaatatatctagacattcagactgtgtctagcagttacgtcctgcttaaagggactagaagtcaaagttccttgtctcactatttgatctgctttgcagggaaataacttgttttttctcatgtttcatcttctttttatgtaaatttgtaatactttcctatattgccctttgaaatttttggataaaagatgatgttttaagttccaatgagtattactagttactcaataccacttattgagtactctgtttctacgtatgtagaatgtatagggatagaagagttgaaaagggaaagcaaaactcctcaagtagcttccttaaaatgtcattcataggagatgtactggaattgctcattctgtgactttatttgtgtcctaaacattcttcagtgaaaataattttatttcagtcaaacatttatgaggaaatgagatcacatctttgtcactggatgctacttgaagagggagtactttgtaaccactttgatatgctgttatcaccaccccctgccctctgctgccataatcacacaaatttaaaaagaaagaaaacagtcttccatagatttttaaggaagaaagggcccaagccaggagatcgcttggttttcttccagaagttaaatggggggatctgaagatttgaatgtttggtctgctttgaaatgtatgtcttttgggatgtattatatgcctagctttataatcagtataaattttaattattccaggaatatgcataatattgaaatatttcatgtcctattttaatagaaaacctcagggcccaagtaacagtgatagaagttagaaaaacctttacttagaattgtccacctagtcagagcccaagaaagaattttcagtggaaaaatcaatatataacttagtgctagctagcgccacagactctagtagataatattatcatcataatggctggtgaaaccatataatcacagaaaaacattgccttcagcatgttcagttcgcagcactgagggcactcttgagggtgttgttaatgaagatttaatttttaaatacaggtggttccaagctttcaaataggttatgctccaaaagtgttatttgtaagttaatttttttacaagtcaaacaatgttggaagtggtatttaggttctagatcggtccacgaaagttagcccatatgtatatcttgaatagtataggggagggtattcataaagtccttatgtggttttaactaagtgaaattatggacaagagaaataattgtaaaatcgtcttaaaggaaaatttaatttttactcctgtttatgggacattcgttctattaactgtcagacacaatttctgttttcatctgagagccagttttcctttatttctacatctaaaataagaacatattgtacactattatataatacagaattgtcttaaactttaataaattcgcattttaaaggtgtttacagattattttttatatctgtagctgaatttgttaaagtctaaaaagctcaaggactttatgaagatctcattatatgaggaaaatcataggttaccattttataactctattgccataagaaaatacactctaaaatcttgatttgaaacatattagaaaccttgattcagtgctcagtggtctcctagtaagaagtcaccgacggtagcgtcatatgagaagaaagaaatccccaccacctcaacctctgctgagattgtgtgctaggaacagccttccctccgtttcccctcagtcaaacttgagccagcctctggatcgatgtgatcttattgcatgtttccatggggtgtacctatactttaagccaatcctgctgcattcactgctaagttaaataaaaagccaagaagattttgcactgtgcagatcctttgctatctgacttgcatctcttcccccacctgtcagctagccacctgcttgtttgtgttgggatattttttagcacctgaagcaccatctgaaaggggcaccattttcttcttccctttgatctcacatatgctccctaaaaatccttaagttgtcaatctgatccccagtgtgaggttaatgagcaaaattggtctttggggccctttttgtccaagccccactgaaaggcctcttcagaaaactattatctttaaagccctactttaactccttaattccagcatacagctaaaactggatgtatattctggcaagtaaaggctgaggactcctctttaatcctcagatctagataactcatgacattttatttgaccaacatagcacatgatgagatatcaaggtaattaaaatagcatgcttgaaaaaaaaatacgtaatctgtttcacctgtaactgtttaagccaataaacttttcaaaatttatgtaatgtggggcttttatgtagcactttacgttttcatgctgcttattgttttattctactgaaaaaaatgaatttcaagattctcaacttttttaatttcaaaaattgtttattgttttgactataggaatacaaaatttcctattttgggagaataagaactctttttgtcatttttggctatgaataaactttctggtcttttgagaccacccatttttatagatcagaatcagaaaacaggtaaacctcactcacacatttggactcatttgaacaaaaatctaggccaaaatactgaaaagcctatgtgtttttttaattggaagtatatgtaaggttaatgcatttagtgaacgtgactaacaaagactaatgtgcacattaacagatgtactttttaaggttttatgggaggctgtgcattgctcaaaagctgttgggaacgccttctgaacagttgccttcagaactagtttgagctgctcaataaaaccagtgactttactcata

SEQ ID NO: 197541 - DNA, 1733 bp, Homo sapiens
  Payload ID: 18961
  Gene Name: ubiquitin-conjugating enzyme E2, J2
  Uniprot ID: Q8N2K1
  ENST ID: ENST00000349431
  CDS Start-End: 221-1000
cggaccgcgcaccggaagcagaagctaggctggttccgccccgcgagcggccatcttggaggctgaggcggcggcggcggcgctgcggcgggttcggtgggcccaatcccggggcggtgcggctgtttcgggcgcgggccccgcttttccgcaccctgctccggcctcgactacggcgagcctgagcgcggcggcggcccacgcgcagcgacagggagagatgagcagcaccagcagtaagagggctccgaccacggcaacccagaggctgaagcaggactaccttcgcattaagaaagacccggtgccttacatctgtgccgagcccctcccttcgaatattctcgagtggcactatgtcgtccgaggcccagagatgaccccttatgaaggtggctattatcatggaaaactaatttttcccagagaatttcctttcaaacctcccagtatctatatgatcactcccaacgggaggtttaagtgcaacaccaggctgtgtctttctatcacggatttccacccggacacgtggaacccggcctggtctgtctccaccatcctgactgggctcctgagcttcatggtggagaagggccccaccctgggcagtatagagacgtcggacttcacgaaaagacaactggcagtgcagagtttagcatttaatttgaaagataaagtcttttgtgaattatttcctgaagtcgtggaggagattaaacaaaaacagaaagcacaagacgaactcagtagcagaccccagactctccccttgccagacgtggttccagacggggagacgcacctcgtccagaacgggattcagctgctcaacgggcatgcgccgggggccgtcccaaacctcgcagggctccagcaggccaaccggcaccacggactcctgggtggcgccctggcgaacttgtttgtgatagttgggtttgcagcctttgcttacacggtcaagtacgtgctgaggagcatcgcgcaggagtgaggcccaggcgccgagacccaaggcgccactgagggcaccgcgcaccagagcgtgacctcggcaggctggacacactgcccagcacaggcagacccaccaggctcctaggtttagcttttaaaaacctgaaaggggaagcaaaaaccaaaatgtgtgactgggctttggaggagactggagcctcagccctgtcctggccacgggccgctggggctggtgtgggtgggccttgtgtgctggatttgtagcttatcttccgtgttgtctttggacctgttttagtaaacccgtttttcattttattagatgtggtcacttagaaatgcaaacttgctgccgaccgcgggctgctcctgcgttcttggagctcctggcgcgtttctcggagctcccggctcctcagcgggtgggaacctcggggcccaggggtggagctggcgtccgcgggtgctggtctggcctggccgtgtggtgatgaggcttagcggggccagtgacggccgtggctcaggatccataagtcggggtttggtctcagcatttacaaatgtgtttacagtcagaatgaaacacattccttctagaaagtgcttgggggtttttgctgccctggaagccaggagcctgctcactccaaccacaagtcgcccttgactgcggcggccgcgagcggggcgggggctgccggtgccctccgcaggccgggcctcctgggcgcccctcggtgctgcag

SEQ ID NO: 197542 - DNA, 2387 bp, Homo sapiens
  Payload ID: 18961
  Gene Name: ubiquitin-conjugating enzyme E2, J2
  ENST ID: ENST00000347370
  CDS Start-End: 475-1098
ggttccgccccgcgagcggccatcttggaggctgaggcggcggcggcggcgctgcggcgggttcggtgggcccaatcccggggcggtgcggctgtttcgggcgcgggccccgcttttccgcaccctgctccggcctcgactacggcgagcctgagcgcggcggcggcccacgcgcagcgacagggagagatgagcagcaccagcagtaagagggctccgaccacggcaacccagaggctgaagcaggactaccttcgcattaagaaagacccggtgccttacatctgtgccgagcccctcccttcgaatattctcgagtggtaaggctccgcgccactgatcgccctgcgctgactgtcgctgccacgcaggcctctgccggcccctgctgggcgagcctggtgccccagtcatggcattggcaaggtgctcctgcaccctcccccggggcactatgtcgtccgaggcccagagatgaccccttatgaaggtggctattatcatggaaaactaatttttcccagagaatttcctttcaaacctcccagtatctatatgatcactcccaacgggaggtttaagtgcaacaccaggctgtgtctttctatcacggatttccacccggacacgtggaacccggcctggtctgtctccaccatcctgactgggctcctgagcttcatggtggagaagggccccaccctgggcagtatagagacgtcggacttcacgaaaagacaactggcagtgcagagtttagcatttaatttgaaagataaagtcttttgtgaattatttcctgaagtcgtggaggagattaaacaaaaacagaaagcacaagacgaactcagtagcagaccccagactctccccttgccagacgtggttccagacggggagacgcacctcgtccagaacgggattcagctgctcaacgggcatgcgccgggggccgtcccaaacctcgcagggctccagcaggccaaccggcaccacggactcctgggtggcgccctggcgaacttgtttgtgatagttgggtttgcagcctttgcttacacggtcaagtacgtgctgaggagcatcgcgcaggagtgaggcccaggcgccgagacccaaggcgccactgagggcaccgcgcaccagagcgtgacctcggcaggctggacacactgcccagcacaggcagacccaccaggctcctaggtttagcttttaaaaacctgaaaggggaagcaaaaaccaaaatgtgtgactgggctttggaggagactggagcctcagccctgtcctggccacgggccgctggggctggtgtgggtgggccttgtgtgctggatttgtagcttatcttccgtgttgtctttggacctgttttagtaaacccgtttttcattttattagatgtggtcacttagaaatgcaaacttgctgccgaccgcgggctgctcctgcgttcttggagctcctggcgcgtttctcggagctcccggctcctcagcgggtgggaacctcggggcccaggggtggagctggcgtccgcgggtgctggtctggcctggccgtgtggtgatgaggcttagcggggccagtgacggccgtggctcaggatccataagtcggggtttggtctcagcatttacaaatgtgtttacagtcagaatgaaacacattccttctagaaagtgcttgggggtttttgctgccctggaagccaggagcctgctcactccaaccacaagtcgcccttgactgcggcggccgcgagcggggcgggggctgccggtgccctccgcaggccgggcctcctgggcgcccctcggtgctgcaggctggggggccttgggtacctgcagagccttttctctgaattccttatgtccggtgggccagaagcccgtcctcctatgctggtggaaggcggaggaccggagtccctgcagaaggccccgtgcactcgggggcctccctcacatcccgtgccccctgcgctggccttcacagtaggtaatggctccggcccgggtgttcgctgtccacggaacatggcagaggggcaccccggcccggaaagacgccagagccagcaggggctgtttcgggccgcgtggctccccgggtctcggccgtctcccctcttctgcgtctgttccgtgacttcgcctgggtgggatgtaccgcaggtgcatcgcgtcgaggtggggcacggccgccggcaagaaacccaccctgtccggaggcgggcgtgagacaagcccagcccgcacgcgctcatctttcttcgttttttgatcagtttattcagaattgctctataatttaccaattgtatgtatttaacctattcttgtggaaaaaaaaggtctttcattatatctttatttctg

SEQ ID NO: 197543 - DNA, 1047 bp, Homo sapiens
  Payload ID: 18961
  Gene Name: ubiquitin-conjugating enzyme E2, J2
  Uniprot ID: Q8N2K1
  ENST ID: ENST00000360466
  CDS Start-End: 229-1008
tccggcctcgactacggcgagcctgagcgcggcggcggcccacgcgcagcgacagggagaggtgagcgcgctcgcaggcctgcgccgggtcctcgggcccgctcgtcccccctgccggagccggccacagcggcggcccggggctgctggggaccctgcgcgacgcttctccgttcgcgcccgccgcccgcggggccccggcccgagcctgcctgcgcggaacccgagatgagcagcaccagcagtaagagggctccgaccacggcaacccagaggctgaagcaggactaccttcgcattaagaaagacccggtgccttacatctgtgccgagcccctcccttcgaatattctcgagtggcactatgtcgtccgaggcccagagatgaccccttatgaaggtggctattatcatggaaaactaatttttcccagagaatttcctttcaaacctcccagtatctatatgatcactcccaacgggaggtttaagtgcaacaccaggctgtgtctttctatcacggatttccacccggacacgtggaacccggcctggtctgtctccaccatcctgactgggctcctgagcttcatggtggagaagggccccaccctgggcagtatagagacgtcggacttcacgaaaagacaactggcagtgcagagtttagcatttaatttgaaagataaagtcttttgtgaattatttcctgaagtcgtggaggagattaaacaaaaacagaaagcacaagacgaactcagtagcagaccccagactctccccttgccagacgtggttccagacggggagacgcacctcgtccagaacgggattcagctgctcaacgggcatgcgccgggggccgtcccaaacctcgcagggctccagcaggccaaccggcaccacggactcctgggtggcgccctggcgaacttgtttgtgatagttgggtttgcagcctttgcttacacggtcaagtacgtgctgaggagcatcgcgcaggagtgaggcccaggcgccgagacccaaggcgccactgagggcacc

SEQ ID NO: 197544 - DNA, 1057 bp, Homo sapiens
  Payload ID: 18961
  Gene Name: ubiquitin-conjugating enzyme E2, J2
  ENST ID: ENST00000400929
  CDS Start-End: 216-839
tggttccgccccgcgagcggccatcttggaggctgaggcggcggcggcggcgctgcggcgggttcggtgggcccaatcccggggcggtgcggctgtttcgggcgcgggccccgcttttccgcaccctgctccggcctcgactacggcgagcctgagcgcggcggcggcccacgcgcagcgacagggagaggcactatgtcgtccgaggcccagagatgaccccttatgaaggtggctattatcatggaaaactaatttttcccagagaatttcctttcaaacctcccagtatctatatgatcactcccaacgggaggtttaagtgcaacaccaggctgtgtctttctatcacggatttccacccggacacgtggaacccggcctggtctgtctccaccatcctgactgggctcctgagcttcatggtggagaagggccccaccctgggcagtatagagacgtcggacttcacgaaaagacaactggcagtgcagagtttagcatttaatttgaaagataaagtcttttgtgaattatttcctgaagtcgtggaggagattaaacaaaaacagaaagcacaagacgaactcagtagcagaccccagactctccccttgccagacgtggttccagacggggagacgcacctcgtccagaacgggattcagctgctcaacgggcatgcgccgggggccgtcccaaacctcgcagggctccagcaggccaaccggcaccacggactcctgggtggcgccctggcgaacttgtttgtgatagttgggtttgcagcctttgcttacacggtcaagtacgtgctgaggagcatcgcgcaggagtgaggcccaggcgccgagacccaaggcgccactgagggcaccgcgcaccagagcgtgacctcggcaggctggacacactgcccagcacaggcagacccaccaggctcctaggtttagcttttaaaaacctgaaaggggaagcaaaaaccaaaatgtgtgactgggctttggaggagactggagcctcagccctgtcctggccacgggccgctggggctggt

SEQ ID NO: 197545 - DNA, 1021 bp, Homo sapiens
  Payload ID: 18961
  Gene Name: ubiquitin-conjugating enzyme E2, J2
  Uniprot ID: Q8N2K1
  ENST ID: ENST00000400930
  CDS Start-End: 169-996
atcttggaggctgaggcggcggcggcggcgctgcggcgggttcggtgggcccaatcccggggcggtgcggctgtttcgggcgcgggccccgcttttccgcaccctgctccggcctcgactacggcgagcctgagcgcggcggcggcccacgcgcagcgacagggagagatgagcagcaccagcagtaagagggctccgaccacggcaacccagaggctgaagcaggactaccttcgcattaagaaagacccggtgccttacatctgtgccgagcccctcccttcgaatattctcgagtggttcaagcgattctcctggctcagcctcctgagtagctgggattacaggcactatgtcgtccgaggcccagagatgaccccttatgaaggtggctattatcatggaaaactaatttttcccagagaatttcctttcaaacctcccagtatctatatgatcactcccaacgggaggtttaagtgcaacaccaggctgtgtctttctatcacggatttccacccggacacgtggaacccggcctggtctgtctccaccatcctgactgggctcctgagcttcatggtggagaagggccccaccctgggcagtatagagacgtcggacttcacgaaaagacaactggcagtgcagagtttagcatttaatttgaaagataaagtcttttgtgaattatttcctgaagtcgtggaggagattaaacaaaaacagaaagcacaagacgaactcagtagcagaccccagactctccccttgccagacgtggttccagacggggagacgcacctcgtccagaacgggattcagctgctcaacgggcatgcgccgggggccgtcccaaacctcgcagggctccagcaggccaaccggcaccacggactcctgggtggcgccctggcgaacttgtttgtgatagttgggtttgcagcctttgcttacacggtcaagtacgtgctgaggagcatcgcgcaggagtgaggcccaggcgccgagacccaaggcg

SEQ ID NO: 197546 - DNA, 1056 bp, Homo sapiens
  Payload ID: 18961
  Gene Name: ubiquitin-conjugating enzyme E2, J2
  ENST ID: ENST00000435198
  CDS Start-End: 469-1056
cgcgagcggccatcttggaggctgaggcggcggcggcggcgctgcggcgggttcggtgggcccaatcccggggcggtgcggctgtttcgggcgcgggccccgcttttccgcaccctgctccggcctcgactacggcgagcctgagcgcggcggcggcccacgcgcagcgacagggagaggtgagcgcgctcgcaggcctgcgccgggtcctcgggcccgctcgtcccccctgccggagccggccacagcggcggcccggggctgctggggaccctgcgcgacgcttctccgttcgcgcccgccgcccgcggggccccggcccgagcctgcctgcgcggaacccgaggtcggttacggcgggctcccggagctccgggtcagggtcatgtcggggacttgaccactcggccgggtttcccgtcagctgggacacttgcagctgccccaggacgggcagcctcgatcctgatgagcagcaccagcagtaagagggctccgaccacggcaacccagaggctgaagcaggactaccttcgcattaagaaagacccggtgccttacatctgtgccgagcccctcccttcgaatattctcgagtggcactatgtcgtccgaggcccagagatgaccccttatgaaggtggctattatcatggaaaactaatttttcccagagaatttcctttcaaacctcccagtatctatatgatcactcccaacgggaggtttaagtgcaacaccaggctgtgtctttctatcacggatttccacccggacacgtggaacccggcctggtctgtctccaccatcctgactgggctcctgagcttcatggtggagaagggccccaccctgggcagtatagagacgtcggacttcacgaaaagacaactggcagtgcagagtttagcatttaatttgaaagataaagtcttttgtgaattatttcctgaagtcgtggaggagattaaacaaaaacagaaagcacaagacgaactcagtagcagaccccagactctccccttgccagacgtggttccagacggggagacgcac

SEQ ID NO: 197547 - DNA, 643 bp, Homo sapiens
  Payload ID: 18961
  Gene Name: ubiquitin-conjugating enzyme E2, J2
  ENST ID: ENST00000422076
  CDS Start-End: 340-643
ggccatcttggaggctgaggcggcggcggcggcgctgcggcgggttcggtgggcccaatcccggggcggtgcggctgtttcgggcgcgggccccgcttttccgcaccctgctccggcctcgactacggcgagcctgagcgcggcggcggcccacgcgcagcgacagggagaggtgagcgcgctcgcaggcctgcgccgggtcctcgggcccgctcgtcccccctgccggagccggccacagcggcggcccggggctgctggggaccctgcgcgacgcttctccgttcgcgcccgccgcccgcggggccccggcccgagcctgcctgcgcggaacccgagatgagcagcaccagcagtaagagggctccgaccacggcaacccagaggctgaagcaggactaccttcgcattaagaaagacccggtgccttacatctgtgccgagcccctcccttcgaatattctcgagtggttcaagcgattctcctggctcagcctcctgagtagctgggattacaggcactatgtcgtccgaggcccagagatgaccccttatgaaggtggctattatcatggaaaactaatttttcccagagaatttcctttcaaacctcccagtatctatatgatcactcccaacggga

SEQ ID NO: 197548 - DNA, 2455 bp, Homo sapiens
  Payload ID: 18961
  Gene Name: ubiquitin-conjugating enzyme E2, J2
  ENST ID: ENST00000450390
  CDS Start-End: 189-320
gttccgccccgcgagcggccatcttggaggctgaggcggcggcggcggcgctgcggcgggttcggtgggcccaatcccggggcggtgcggctgtttcgggcgcgggccccgcttttccgcaccctgctccggcctcgactacggcgagcctgagcgcggcggcggcccacgcgcagcgacagggagagatgagcagcaccagcagtaagagggctccgaccacggcaacccagaggctgaagcaggactaccttcgcattaagaaagacccggtgccttacatctgtgccgagcccctcccttcgaatattctcgagtgagaaaagatatttcagtgagttgaaaggaaatgtgtttcggcttggtcaggggtccaccttctctggctcacagaggaggcccagcccaggcaggcggaggatacccagggtgaggcggagccccttggccaccagagtgctctctgcccccagtgttgaaaatcacatgtggccccaggacatcgctggcaggcactatgtcgtccgaggcccagagatgaccccttatgaaggtggctattatcatggaaaactaatttttcccagagaatttcctttcaaacctcccagtatctatatgatcactcccaacgggaggtttaagtgcaacaccaggctgtgtctttctatcacggatttccacccggacacgtggaacccggcctggtctgtctccaccatcctgactgggctcctgagcttcatggtggagaagggccccaccctgggcagtatagagacgtcggacttcacgaaaagacaactggcagtgcagagtttagcatttaatttgaaagataaagtcttttgtgaattatttcctgaagtcgtggaggagattaaacaaaaacagaaagcacaagacgaactcagtagcagaccccagactctccccttgccagacgtggttccagacggggagacgcacctcgtccagaacgggattcagctgctcaacgggcatgcgccgggggccgtcccaaacctcgcagggctccagcaggccaaccggcaccacggactcctgggtggcgccctggcgaacttgtttgtgatagttgggtttgcagcctttgcttacacggtcaagtacgtgctgaggagcatcgcgcaggagtgaggcccaggcgccgagacccaaggcgccactgagggcaccgcgcaccagagcgtgacctcggcaggctggacacactgcccagcacaggcagacccaccaggctcctaggtttagcttttaaaaacctgaaaggggaagcaaaaaccaaaatgtgtgactgggctttggaggagactggagcctcagccctgtcctggccacgggccgctggggctggtgtgggtgggccttgtgtgctggatttgtagcttatcttccgtgttgtctttggacctgttttagtaaacccgtttttcattttattagatgtggtcacttagaaatgcaaacttgctgccgaccgcgggctgctcctgcgttcttggagctcctggcgcgtttctcggagctcccggctcctcagcgggtgggaacctcggggcccaggggtggagctggcgtccgcgggtgctggtctggcctggccgtgtggtgatgaggcttagcggggccagtgacggccgtggctcaggatccataagtcggggtttggtctcagcatttacaaatgtgtttacagtcagaatgaaacacattccttctagaaagtgcttgggggtttttgctgccctggaagccaggagcctgctcactccaaccacaagtcgcccttgactgcggcggccgcgagcggggcgggggctgccggtgccctccgcaggccgggcctcctgggcgcccctcggtgctgcaggctggggggccttgggtacctgcagagccttttctctgaattccttatgtccggtgggccagaagcccgtcctcctatgctggtggaaggcggaggaccggagtccctgcagaaggccccgtgcactcgggggcctccctcacatcccgtgccccctgcgctggccttcacagtaggtaatggctccggcccgggtgttcgctgtccacggaacatggcagaggggcaccccggcccggaaagacgccagagccagcaggggctgtttcgggccgcgtggctccccgggtctcggccgtctcccctcttctgcgtctgttccgtgacttcgcctgggtgggatgtaccgcaggtgcatcgcgtcgaggtggggcacggccgccggcaagaaacccaccctgtccggaggcgggcgtgagacaagcccagcccgcacgcgctcatctttcttcgttttttgatcagtttattcagaattgctctataatttaccaattgtatgtatttaacctattcttgtggaaaaaaaaggtctttcattatatctttatttctgaattt

SEQ ID NO: 197549 - DNA, 886 bp, Homo sapiens
  Payload ID: 18961
  Gene Name: ubiquitin-conjugating enzyme E2, J2
  ENST ID: ENST00000466752
  CDS Start-End: 151-285
gcggcggcggcgctgcggcgggttcggtgggcccaatcccggggcggtgcggctgtttcgggcgcgggccccgcttttccgcaccctgctccggcctcgactacggcgagcctgagcgcggcggcggcccacgcgcagcgacagggagagatgagcagcaccagcagtaagagggctccgaccacggcaacccagaggctgaagcaggactaccttcgcattaagaaagacccggtgccttacatctgtgccgagcccctcccttcgaatattctcgagtggtaaggctccgcgccactgatcgccctgcgctgactgtcgctgccacgcaggcctctgccggcccctgctgggcgagcctggtgccccagtcatggcattggcaaggtgctcctgcaccctcccccgggagaaaagatatttcagtgagttgaaaggaaatgtgtttcggcttggtcaggggtccaccttctctggctcacagaggaggcccagcccaggcaggcggaggatacccagggtgaggcggagccccttggccaccagagtgctctctgcccccagtgttgaaaatcacatgtggccccaggacatcgctggcaggcactatgtcgtccgaggcccagagatgaccccttatgaaggtggctattatcatggaaaactaatttttcccagagaatttcctttcaaacctcccagtatctatatgatcactcccaacgggaggtttaagtgcaacaccaggctgtgtctttctatcacggatttccacccggacacgtggaacccggcctggtctgtctccaccatcctgactgggctcctgagcttcatggtggagaagggccccaccctgggcagtatagagacgtcggacttcacg

SEQ ID NO: 197550 - DNA, 767 bp, Homo sapiens
  Payload ID: 18961
  Gene Name: ubiquitin-conjugating enzyme E2, J2
  ENST ID: ENST00000477894
  CDS Start-End: 190-492
ggttccgccccgcgagcggccatcttggaggctgaggcggcggcggcggcgctgcggcgggttcggtgggcccaatcccggggcggtgcggctgtttcgggcgcgggccccgcttttccgcaccctgctccggcctcgactacggcgagcctgagcgcggcggcggcccacgcgcagcgacagggagagatgagcagcaccagcagtaagagggctccgaccacggcaacccagaggctgaagcaggactaccttcgcattaagaaagacccggtgccttacatctgtgccgagcccctcccttcgaatattctcgagtggcactatgtcgtccgaggcccagagatgaccccttatgaaggaatcccagttctggatcatctgcaactagggcagccagagtgcgggagtacatctgtagggtgggccctccatcatcgtgtcattgcccatgaccagcgttggggatgccagcaggccgtggtgagataaggcccgggagcaggtgtccagggcgtgttaaagtacttgttacgatgcgtgtgtgtgccttcagctgatctgaagaatatataccaccgagtggctattatcatggaaaactaatttttcccagagaatttcctttcaaacctcccagtatctatatgatcactcccaacgggaggtttaagtgcaacaccaggctgtgtctttctatcacggatttccacccggacacgtggaacccggcctggtctgtctccaccatcctgactgggctcctg

SEQ ID NO: 197551 - DNA, 1256 bp, Homo sapiens
  Payload ID: 18961
  Gene Name: ubiquitin-conjugating enzyme E2, J2
  ENST ID: ENST00000464036
  CDS Start-End: 200-517
aagctaggctggttccgccccgcgagcggccatcttggaggctgaggcggcggcggcggcgctgcggcgggttcggtgggcccaatcccggggcggtgcggctgtttcgggcgcgggccccgcttttccgcaccctgctccggcctcgactacggcgagcctgagcgcggcggcggcccacgcgcagcgacagggagagatgagcagcaccagcagtaagagggctccgaccacggcaacccagaggctgaagcaggactaccttcgcattaagaaagacccggtgccttacatctgtgccgagcccctcccttcgaatattctcgagtggcactatgtcgtccgaggcccagagatgaccccttatgaaggaatcccagttctggatcatctgcaactagggcagccagagtgcgggagtacatctgtagggtgggccctccatcatcgtgtcattgcccatgaccagcgttggggatgccagcaggccgtggtggctattatcatggaaaactaatttttcccagagaatttcctttcaaacctcccagtatctatatgatcactcccaacgggaggtttaagtgcaacaccaggctgtgtctttctatcacggatttccacccggacacgtggaacccggcctggtctgtctccaccatcctgactgggctcctgagcttcatggtggagaagggccccaccctgggcagtatagagacgtcggacttcacgaaaagacaactggcagtgcagagtttagcatttaatttgaaagataaagtcttttgtgaattatttcctgaagtcgtggaggagattaaacaaaaacagaaagcacaagacgaactcagtagcagaccccagactctccccttgccagacgtggttccagacggggagacgcacctcgtccagaacgggattcagctgctcaacgggcatgcgccgggggccgtcccaaacctcgcagggctccagcaggccaaccggcaccacggactcctgggtggcgccctggcgaacttgtttgtgatagttgggtttgcagcctttgcttacacggtcaagtacgtgctgaggagcatcgcgcaggagtgaggcccaggcgccgagacccaaggcgccactgagggcaccgcgcaccagagcgtgacctcggcaggctggacacactgcccagcacaggcagacccaccaggctcctaggtttagcttttaaaaacctgaaaggggaagcaaaaaccaaaatgtgt

SEQ ID NO: 197552 - DNA, 530 bp, Homo sapiens
  Payload ID: 18961
  Gene Name: ubiquitin-conjugating enzyme E2, J2
  ENST ID: ENST00000502382
  CDS Start-End: 318-530
ggttccgccccgcgagcggccatcttggaggctgaggcggcggcggcggcgctgcggcgggttcggtgggcccaatcccggggcggtgcggctgtttcgggcgcgggccccgcttttccgcaccctgctccggcctcgactacggcgagcctgagcgcggcggcggcccacgcgcagcgacagggagagaattgggggaaatagccccctggcctcctgggggacgtgagaatgctgttctgtgtgaagctcaggaagagtggctggggaaacagcagttgaatcgtgaacatgattttaaaagcctctccaagcagatgagcagcaccagcagtaagagggctccgaccacggcaacccagaggctgaagcaggactaccttcgcattaagaaagacccggtgccttacatctgtgccgagcccctcccttcgaatattctcgagtggcactatgtcgtccgaggcccagagatgaccccttatgaaggtggctattatcatggaaaactaatttttcccagagaattt

SEQ ID NO: 197553 - DNA, 472 bp, Homo sapiens
  Payload ID: 18961
  Gene Name: ubiquitin-conjugating enzyme E2, J2
  ENST ID: ENST00000509720
  CDS Start-End: 292-472
gaggctgaggcggcggcggcggcgctgcggcgggttcggtgggcccaatcccggggcggtgcggctgtttcgggcgcgggccccgcttttccgcaccctgctccggcctcgactacggcgagcctgagcgcggcggcggcccacgcgcagcgacagggagaggcactatgtcgtccgaggcccagagatgaccccttatgaaggctgtgtctttctatcacggatttccacccggacacgtggaacccggcctggtctgtctccaccatcctgactgggctcctgagcttcatggtggagaagggccccaccctgggcagtatagagacgtcggacttcacgaaaagacaactggcagtgcagagtttagcatttaatttgaaagataaagtcttttgtgaattatttcctgaagtcgtggaggagattaaacaaaaacagaaagcacaagacgaactcagtagcagacccc

SEQ ID NO: 197554 - DNA, 814 bp, Homo sapiens
  Payload ID: 18961
  Gene Name: ubiquitin-conjugating enzyme E2, J2
  ENST ID: ENST00000503294
  CDS Start-End: 169-303
atcttggaggctgaggcggcggcggcggcgctgcggcgggttcggtgggcccaatcccggggcggtgcggctgtttcgggcgcgggccccgcttttccgcaccctgctccggcctcgactacggcgagcctgagcgcggcggcggcccacgcgcagcgacagggagagatgagcagcaccagcagtaagagggctccgaccacggcaacccagaggctgaagcaggactaccttcgcattaagaaagacccggtgccttacatctgtgccgagcccctcccttcgaatattctcgagtggtaaggctccgcgccactgatcgccctgcgctgactgtcgctgccacgcaggcctctgccggcccctgctgggcgagcctggtgccccagtcatggcattggcaaggtgctcctgcaccctcccccggggcactatgtcgtccgaggcccagagatgaccccttatgaaggaatcccagttctggatcatctgcaactagggcagccagagtgcgggagtacatctgtagggtgggccctccatcatcgtgtcattgcccatgaccagcgttggggatgccagcaggccgtggtggctattatcatggaaaactaatttttcccagagaatttcctttcaaacctcccagtatctatatgatcactcccaacgggaggtttaagtgcaacaccaggctgtgtctttctatcacggatttccacccggacacgtggaacccggcctggtctgtctccaccatcctgactgggctcctgagcttcatggtggagaagggccccaccctgggcagtat

SEQ ID NO: 197555 - DNA, 1028 bp, Homo sapiens
  Payload ID: 18961
  Gene Name: ubiquitin-conjugating enzyme E2, J2
  ENST ID: ENST00000473215
  CDS Start-End: 185-319
cgccccgcgagcggccatcttggaggctgaggcggcggcggcggcgctgcggcgggttcggtgggcccaatcccggggcggtgcggctgtttcgggcgcgggccccgcttttccgcaccctgctccggcctcgactacggcgagcctgagcgcggcggcggcccacgcgcagcgacagggagagatgagcagcaccagcagtaagagggctccgaccacggcaacccagaggctgaagcaggactaccttcgcattaagaaagacccggtgccttacatctgtgccgagcccctcccttcgaatattctcgagtggtaaggctccgcgccactgatcgccctgcgctgactgtcgctgccacgcaggcctctgccggcccctgctgggcgagcctggtgccccagtcatggcattggcaaggtgctcctgcaccctcccccggggcactatgtcgtccgaggcccagagatgaccccttatgaaggtggctattatcatggaaaactaatttttcccagagaatttcctttcaaacctcccagtatctatatgatcactcccaacgggaggtttaagtgcaacaccaggctgtgtctttctatcacggatttccacccggacacgtggaacccggcctggtctgtctccaccatcctgactgggctcctgagcttcatggtggagaagggccccaccctgggcagtatagagacgtcggacttcacgaaaagacaactggcagtgcagagtttagcatttaatttgaaagataaagtcttttgtgaattatttcctgaagtcgtggaggagattaaacaaaaacagaaagcacaagacgaactcagtagcagaccccagactctccccttgccagacgtggttccagacggggagacgcacctcgtccagaacgggattcagctgctcaacgggcatgcgccgggggccgtcccaaacctcgcagggctccagcaggccaaccggcaccacggactcctgggtggcgccctggcgaacttgtttgtga

SEQ ID NO: 197556 - DNA, 750 bp, Homo sapiens
  Payload ID: 18961
  Gene Name: ubiquitin-conjugating enzyme E2, J2
  ENST ID: ENST00000488418
  CDS Start-End: 620-750
cgggtcagggtcatgtcggggacttgaccactcggccgggtttcccgtcagctgggacacttgcagctgccccaggacgggcagcctcgatcctggttcgtcagtggatcacgggagtctgtgtcgggggagggctgccgtcgagcccgccgtcgcctcgcccctgaactgttagactccagactgccccgtaaaccccgagagaaacgagcgtgcccgggactgtgcttagggccagcgtttctgggaaacccgggcggtgacagtgggagaccaccgccggccggcgagtgagacacgagcccggaacaagtctctaagcggcgccgggcctcgccatccacacctgccagttccctgcatcctttcagcccctggccaggtgtcacctcctggcgtccttttcagtgcctgccacttagtgcgtgtgtatttaactctagtccggttgccatcctcttgccagacccagataggaagcggctgaaaggtcgggcctcagcccggtgggaggtgggcagcgaagagtgtacagcgggcttggctggggcaggtcggtggccccgcgccctgctccaggggaaccagactgtgtaatctggcttccgaagaaaggatcatgagcagcaccagcagtaagagggctccgaccacggcaacccagaggctgaagcaggactaccttcgcattaagaaagacccggtgccttacatctgtgccgagcccctcccttcgaatattctcgagtg

SEQ ID NO: 197557 - DNA, 718 bp, Homo sapiens
  Payload ID: 18962
  Gene Name: ubiquitin-conjugating enzyme E2A
  ENST ID: ENST00000346330
  CDS Start-End: 177-626
acactggggtggtgcttagccggcgccagaccgaccctcgacttcggagaggcagcgcggttcctctgggtgcttccgcctccccttctcctgcttctccagcctcttcggcctcctcgcccgccgcgggaacccgagaccccagtgtatgccccacccctgaccccgctcgcgacatgtccaccccggctcggcggcgcctcatgcgggacttcaagaggttgcaggaggatcctccagccggagtcagcggggctccgtccgagaacaacataatggtgtggaacgcggtcattttcgggcctgaagggaccccgtttgaggatggaacatttaaacttacaatagaattcactgaagaatatccaaataaaccacctacagttagatttgtctctaagatgttccatccaaatgatggtagtatatgtctggacatacttcagaaccgttggagtccaacctatgatgtgtcttccattctaacatccatacagtctctgttggatgaacccaatcccaatagtccagcaaacagccaggctgctcagctgtaccaggagaacaaacgggaatatgaaaagcgtgtttctgcaatagtagaacaaagctggcgtgattgttgaccccgggtacagtttaaagaagctggccataagaaaaatatatattgatgtgtttgtcacctccctactcctgtcattacatttactttatt

SEQ ID NO: 197558 - DNA, 1874 bp, Homo sapiens
  Payload ID: 18962
  Gene Name: ubiquitin-conjugating enzyme E2A
  Uniprot ID: P49459
  ENST ID: ENST00000371558
  CDS Start-End: 246-704
gtacggcctgtccggcgctcgacgttccacccccctctctctgctctcaggttggttcagcccccgtctacactggggtggtgcttagccggcgccagaccgaccctcgacttcggagaggcagcgcggttcctctgggtgcttccgcctccccttctcctgcttctccagcctcttcggcctcctcgcccgccgcgggaacccgagaccccagtgtatgccccacccctgaccccgctcgcgacatgtccaccccggctcggcggcgcctcatgcgggacttcaagaggttgcaggaggatcctccagccggagtcagcggggctccgtccgagaacaacataatggtgtggaacgcggtcattttcgggcctgaagggaccccgtttgaggatggaacatttaaacttacaatagaattcactgaagaatatccaaataaaccacctacagttagatttgtctctaagatgttccatccaaatgtctatgcagatggtagtatatgtctggacatacttcagaaccgttggagtccaacctatgatgtgtcttccattctaacatccatacagtctctgttggatgaacccaatcccaatagtccagcaaacagccaggctgctcagctgtaccaggagaacaaacgggaatatgaaaagcgtgtttctgcaatagtagaacaaagctggcgtgattgttgaccccgggtacagtttaaagaagctggccataagaaaaatatatattgatgtgtttgtcacctccctactcctgtcattacatttactttattaaaagcaaaataactgttgtgctgtttccatcttccttgccaagttttcctaccccttctaccctctccttaaacatcagaaaacaccctctatgaaatcaaatgtactgtacctgggttacttgcaaaaattactaatgcttcagtttttctgttgtatttcatttccagttttcaggcagttatttttattattgtactttaagcttttaagatgaattgttatacaagaggtgcttatgcttagcttgatgaccaggatgttatttttaacaaaatgattgctgaagtgtttcatcctggctggtccttcacttgtgttggatttagaagtgaatgtgtttggaatatggcctacagagaatagaaacaaatccatgtaaacaattttgaaggaggcatgggagctaaaaatcctgtgatactaagatctcagtcatatgaattacaacgtagtatttactggcaagaaggagaaagttgaaggactcagctaaaggagtacagcaattgtagtaactgacacatcctctctttgcaagctgctgactgggcacactcatgccaagtttcagaattattggtcttctgggtttttgctttttaaaagaggtgtgggagcagaggaatggaaacaatcgtgagtttttgagctagggaaagttggagctcctttaatctttttaaaggatcagtgctgccctaagtgaataaactcaattgtccatctttattttagagttttaatgaattcaaggaagggagcatagcatatctgtggcaaactattttccactcaaatcctgagttattgctgcatgctttaatttcttccctttcagcatctgagaaccttaaagccaatgtctgcgatctttttttggatatttatacttttagatatatagtacctttaagtagcagtatgggacaaggcttgtaaatgttttgtctaatgttctattgtcaccttttatgcatttatcacttccaaatctaactttgcacaagtaacccatgtaaaaaaaaatgtacatttttcaaaagttgtaaataaaaataaccttaaaatttcata

SEQ ID NO: 197559 - DNA, 1435 bp, Homo sapiens
  Payload ID: 18962
  Gene Name: ubiquitin-conjugating enzyme E2A
  ENST ID: ENST00000631185
  CDS Start-End: 150-521
agaccgaccctcgacttcggagaggcagcgcggttcctctgggtgcttccgcctccccttctcctgcttctccagcctcttcggcctcctcgcccgccgcgggaacccgagaccccagtgtatgccccacccctgaccccgctcgcgacatgtccaccccggctcggcggcgcctcatgcgggacttcaagaggttgcaggaggatcctccagccggagtcagcggggctccgtccgagaacaacataatggtgtggaacgcggtcattttcgggcctgaagggaccccgtttgaggatggaacatttaaacttacaatagaattcactgaagaatatccaaataaaccacctacagttagatttgtctctaagatgttccatccaaatgtctatgcagatggtagtatatgtctggacatacttcagaaccgttggagtccaacctatgatgtgtcttccattctaacatccatacagatcctctgggtgaagagcctgtatggcattgtgaacttttgacagatggataagtgggctgtgttttttgaagaattttcaaagcctcgtcggcagctgcatgtttacttgttttcttggttccataaccttcagctaagcagtgatcttgtaaaaacactcgacaacgccatgtgcgatttggcatcatctcatatttgtattcaattgacatcttgttgaatgaggcagaattgttaaggataccaattgcatcatttgcattttctgtaatgacaaaattggtccagtgtttggcagaagcattaaaaattggctgcccggaagcatctttacccagcaccaccaggtcttctggtggcttcagagctggaggaaattcataggaggacatgccaatctgacacaccacgaggtcctctccaaatgtatgcttgaatttccgccggacaactctaacttcaatacgtttctgcaagagttttacagctagctctgtagctcgatccctggacccattcttgctgccagcataacctgtagttaagtagatattttggcatctaacttcacaagcatagccatcagttagaagttttttatttttggggatgtcggcaggaggaatttcctttaaaggagcatatatatactcaggatttgtcttacacgcctgaatacaacgagttaacatatatgtataattaattttatcagatccagaagtcatttctggattagaaaggttcttccagattgtcgccgttaatttttcaataaaatactgcttctcggctaccacagactcgggaaatgtctgtgatggtgaaggctcaggagttgactgagagtttgcctgctgtgatgtggtgcttggggcagggttcccactgtcaaaatacatgttggctgttacaggctggtcttttgtgagaatgaatcctgatgaatcacaa

SEQ ID NO: 197560 - DNA, 557 bp, Homo sapiens
  Payload ID: 18962
  Gene Name: ubiquitin-conjugating enzyme E2A
  ENST ID: ENST00000629303
  CDS Start-End: 135-329
ttcggagaggcagcgcggttcctctgggtgcttccgcctccccttctcctgcttctccagcctcttcggcctcctcgcccgccgcgggaacccgagaccccagtgtatgccccacccctgaccccgctcgcgacatgtccaccccggctcggcggcgcctcatgcgggacttcaagaggttgcaggaggatcctccagccggagtcagcggggctccgtccgagaacaacataatggtgtggaacgcggtcattttcgggcctgaagggaccccgtttgaggatgacggagttgcgccctgtcacccaggctggagtgcgatggtgtgatctcggctcactgcaacctccgcctcccaggttcaagcgattctcctgcctcagcctcctgagtagctgggattacaggaacatttaaacttacaatagaattcactgaagaatatccaaataaaccacctacagttagatttgtctctaagatgttccatccaaatgtctatgcagatggtagtatatgtctggacatacttcagaaccgttggagtccaacctatg

SEQ ID NO: 197561 - DNA, 1771 bp, Homo sapiens
  Payload ID: 18962
  Gene Name: ubiquitin-conjugating enzyme E2A
  Uniprot ID: P49459
  ENST ID: ENST00000630695
  CDS Start-End: 368-601
agaccgaccctcgacttcggagaggcagcgcggttcctctgggtgcttccgcctccccttctcctgcttctccagcctcttcggcctcctcgcccgccgcgggaacccgagaccccagtgtatgccccacccctgaccccgctcgcgacatgtccaccccggctcggcggcgcctcatgcgggacttcaagaggaggatcctccagccggagtcagcggggctccgtccgagaacaacataatggtgtggaacgcggtcattttcgggcctgaagggaccccgtttgaggatggaacatttaaacttacaatagaattcactgaagaatatccaaataaaccacctacagttagatttgtctctaagatgttccatccaaatgtctatgcagatggtagtatatgtctggacatacttcagaaccgttggagtccaacctatgatgtgtcttccattctaacatccatacagtctctgttggatgaacccaatcccaatagtccagcaaacagccaggctgctcagctgtaccaggagaacaaacgggaatatgaaaagcgtgtttctgcaatagtagaacaaagctggcgtgattgttgaccccgggtacagtttaaagaagctggccataagaaaaatatatattgatgtgtttgtcacctccctactcctgtcattacatttactttattaaaagcaaaataactgttgtgctgtttccatcttccttgccaagttttcctaccccttctaccctctccttaaacatcagaaaacaccctctatgaaatcaaatgtactgtacctgggttacttgcaaaaattactaatgcttcagtttttctgttgtatttcatttccagttttcaggcagttatttttattattgtactttaagcttttaagatgaattgttatacaagaggtgcttatgcttagcttgatgaccaggatgttatttttaacaaaatgattgctgaagtgtttcatcctggctggtccttcacttgtgttggatttagaagtgaatgtgtttggaatatggcctacagagaatagaaacaaatccatgtaaacaattttgaaggaggcatgggagctaaaaatcctgtgatactaagatctcagtcatatgaattacaacgtagtatttactggcaagaaggagaaagttgaaggactcagctaaaggagtacagcaattgtagtaactgacacatcctctctttgcaagctgctgactgggcacactcatgccaagtttcagaattattggtcttctgggtttttgctttttaaaagaggtgtgggagcagaggaatggaaacaatcgtgagtttttgagctagggaaagttggagctcctttaatctttttaaaggatcagtgctgccctaagtgaataaactcaattgtccatctttattttagagttttaatgaattcaaggaagggagcatagcatatctgtggcaaactattttccactcaaatcctgagttattgctgcatgctttaatttcttccctttcagcatctgagaaccttaaagccaatgtctgcgatctttttttggatatttatacttttagatatatagtacctttaagtagcagtatgggacaaggcttgtaaatgttttgtctaatgttctattgtcaccttttatgcatttatcacttccaaatctaactttgcacaagtaacccatgtaaaaaaaaatgtacatttttcaaaagttgtaaataaaaataaccttaaaatttcata

SEQ ID NO: 197562 - DNA, 1381 bp, Homo sapiens
  Payload ID: 18962
  Gene Name: ubiquitin-conjugating enzyme E2A
  Uniprot ID: P49459
  ENST ID: ENST00000625938
  CDS Start-End: 167-535
ggtgcttagccggcgccagaccgaccctcgacttcggagaggcagcgcggttcctctgggtgcttccgcctccccttctcctgcttctccagcctcttcggcctcctcgcccgccgcgggaacccgagaccccagtgtatgccccacccctgaccccgctcgcgacatgtccaccccggctcggcggcgcctcatgcgggacttcaagaggttgcaggaggatcctccagccggagtcagcggggctccgtccgagaacaacataatggtgtggaacgcggtcattttcgggcctgaagggaccccgtttgaggatgtctatgcagatggtagtatatgtctggacatacttcagaaccgttggagtccaacctatgatgtgtcttccattctaacatccatacagtctctgttggatgaacccaatcccaatagtccagcaaacagccaggctgctcagctgtaccaggagaacaaacgggaatatgaaaagcgtgtttctgcaatagtagaacaaagctggcgtgattgttgaccccgggtacagtttaaagaagctggccataagaaaaatatatattgatgtgtttgtcacctccctactcctgtcattacatttactttattaaaagcaaaataactgttgtgctgtttccatcttccttgccaagttttcctaccccttctaccctctccttaaacatcagaaaacaccctctatgaaatcaaatgtactgtacctgggttacttgcaaaaattactaatgcttcagtttttctgttgtatttcatttccagttttcaggcagttatttttattattgtactttaagcttttaagatgaattgttatacaagaggtgcttatgcttagcttgatgaccaggatgttatttttaacaaaatgattgctgaagtgtttcatcctggctggtccttcacttgtgttggatttagaagtgaatgtgtttggaatatggcctacagagaatagaaacaaatccatgtaaacaattttgaaggaggcatgggagctaaaaatcctgtgatactaagatctcagtcatatgaattacaacgtagtatttactggcaagaaggagaaagttgaaggactcagctaaaggagtacagcaattgtagtaactgacacatcctctctttgcaagctgctgactgggcacactcatgccaagtttcagaattattggtcttctgggtttttgctttttaaaagaggtgtgggagcagaggaatggaaacaatcgtgagtttttgagctagggaaagttggagctcctttaatctttttaaaggatcagtgctgccctaagtgaataaactcaattgtccatctttattttagagttttaatgaattc

SEQ ID NO: 197563 - DNA, 934 bp, Homo sapiens
  Payload ID: 18962
  Gene Name: ubiquitin-conjugating enzyme E2A
  ENST ID: ENST00000628549
  CDS Start-End: 209-568
ttcaagaggtaaaccgaggggacggccgaggccgggggttgcgagctggggcacagggcgggtcccgaggcgcgccgggcggggagggctggggagcggccgggagcgggcgccagtgccggcctagggggacccctgtctgtcttcccgaaggttgcaggaggatcctccagccggagtcagcggggctccgtccgagaacaacataatggtgtggaacgcggtcattttcgggcctgaagggaccccgtttgaggatggaacatttaaacttacaatagaattcactgaagaatatccaaataaaccacctacagttagatttgtctctaagatgttccatccaaatgtctatgcagatggtagtatatgtctggacatacttcagaaccgttggagtccaacctatgatgtgtcttccattctaacatccatacagtctctgttggatgaacccaatcccaatagtccagcaaacagccaggctgctcagctgtaccaggagaacaaacgggaatatgaaaagcgtgtttctgcaatagtagaacaaagctggcgtgattgttgaccccgggtacagtttaaagaagctggccataagaaaaatatatattgatgtgtttgtcacctccctactcctgtcattacatttactttattaaaagcaaaataactgttgtgctgtttccatcttccttgccaagttttcctaccccttctaccctctccttaaacatcagaaaacaccctctatgaaatcaaatgtactgtacctgggttacttgcaaaaattactaatgcttcagtttttctgttgtatttcatttccagttttcaggcagttatttttattattgtactttaagcttttaagatgaattgttatacaagaggtgcttatgcttagcttgatgaccaggatgttatttttaac

SEQ ID NO: 197564 - DNA, 2515 bp, Homo sapiens
  Payload ID: 18963
  Gene Name: ubiquitin-conjugating enzyme E2B
  Uniprot ID: P63146
  ENST ID: ENST00000265339
  CDS Start-End: 418-876
cgtccctctttctccaccccgccgagcctaaactagtgacggggagggagacgggatagtgtttctgtttcgtggtctttgaatccacaacctctagtctgaacacagagaacacaaatttgtctattacttcaggaagcccagggggaaccgcgccccgctgaagggctcggggaaggcgcgctcccgcgtcccgccccctcctcccccagcactcacactgtggtagcggcggagggcggagggatccggaggcggcggagggagacgtcattgcagggttgtttgtcagtctcggcggcggcggcggcggcggcggcggcggcgatccacagtgattcggccgccgcgccggggggtgggggggctgcgcgggactttttttttttcagactgaccgcggggcagctgcggagcatgtcgaccccggcccggaggaggctcatgcgggatttcaagcggttacaagaggacccacctgtgggtgtcagtggcgcaccatctgaaaacaacatcatgcagtggaatgcagttatatttggaccagaagggacaccttttgaagatggtacttttaaactagtaatagaattttctgaagaatatccaaataaaccaccaactgttaggtttttatccaaaatgtttcatccaaatgtgtatgctgatggtagcatatgtttagatatccttcagaatcgatggagtccaacatatgatgtatcttctatcttaacatcaattcagtctctgctggatgaaccgaatcctaacagtccagccaatagccaggcagcacagctttatcaggaaaacaaacgagaatatgagaaaagagtttcggccattgttgaacaaagctggaatgattcataatagacaactggtctgttaatctttttcatcattgttgtgtataatttacctctcattagaaaggctaacaaattttaagtgccacaggttttaaggattctgcagaaaaaaaagaaaaaagtccttcagtttagaacctacaaaagcttgtgtatcttgattaatgtactttttattgcatggtgtgaactaagttattgctgcataaatttgtaatatatcctgtttgtatttttttccaagtgtataatgttggtgtggagttttcatgacagaatatacacattttgtaaatctgtacttttttcaaatattgaatgccttatttttgaattctttagatttttaaattggagaaaagcacttaaagttttttatatatgaatattacatgtaaagctgttaaaatacataacttcagtgcaagagactttgtcacttatttccttatgtgtgtaggaggggttaataagtctctagctctccatctattgatagtttcatttacaatttcaaaagaacattcttatattttatcaaggaagtcttcaaatttgattctaaatagcgattataatctccaactttattttgaatgtacctctattagtttcaattgagtaattctagacataactggtttgactctgtccaactctgtatttaggccatttgttacagtttcttcatgcattacttactgttaaaactgtaccttttgcgatttcacagttggcacttctgccatgagcagagaactgatgcgacttgttttgctgcttggtagcactttaaaaaattttttgattaatgaagaaagtaaaaccataaacatttgccaaaaattcatgccccagtattagcaatgaattagttgcattggtttgagaaaggcacatattggagggaaatcttggtgtaacttaaatatttgaaaattacctttaatgcaatgcatatctgtttattctgggaaatgttttaatgccagggcctgctgagttgcttcttcttgtggagattttttttttaatctcctgagttgtataaaagttgtactgcatcttagtttactggataaatttaaaacacagtattgtagaaagctaatacaaaactatcctatgccttcaaatagtatagaaaatggaaaatatacaagtaaattctgttgaaccacctgtgtagtctctctagtagttaaaacagctattttagtaaccccaagagtttcttctcatatccataaaattggattacagtatggcaatatctacagcttctattcattatgcaacgtttaacattgattggataaatgcttataggctgggccaggtggctcccacctgtagtcccagcactttgggaggcaaaggcgggaggatcacttgaggccaggactttgagaccagccagggcaacataataagacttttctctactttaaattttttaaaaaattagttgggcatagtggcacttgcctgtagtctcagctacttaggaggctgaggtggcagaatagcttatgcctaggaggttgaggctgcagtgagctgtgattatgccattgcactccagcctgggtgacagagcaataccctgtctttaaaaataaaagctattacttggcaaa

SEQ ID NO: 197565 - DNA, 644 bp, Homo sapiens
  Payload ID: 18963
  Gene Name: ubiquitin-conjugating enzyme E2B
  ENST ID: ENST00000507277
  CDS Start-End: 1-424
cccggcccggaggaggctcatgcgggatttcaagcggttacaagaggacccacctgtgggtgtcagtggcgcaccatctgaaaacaacatcatgcagtggaatgcagttatatttggaccagaagggacaccttttgaagatggtacttttaaactagtaatagaattttctgaagaatatccaaataaaccaccaactgttaggtttttatccaaaatgtttcatccaaatgatatccttcagaatcgatggagtccaacatatgatgtatcttctatcttaacatcaattcagtctctgctggatgaaccgaatcctaacagtccagccaatagccaggcagcacagctttatcaggaaaacaaacgagaatatgagaaaagagtttcggccattgttgaacaaagctggaatgattcataatagacaactggtctgttaatctttttcatcattgttgtgtataatttacctctcattagaaaggctaacaaattttaagtgccacaggttttaaggattctgcagaaaaaaaagaaaaaagtccttcagtttagaacctacaaaagcttgtgtatcttgattaatgtactttttattgcatggtgtgaactaagttattgctgcataaatttgtaatata

SEQ ID NO: 197566 - DNA, 415 bp, Homo sapiens
  Payload ID: 18963
  Gene Name: ubiquitin-conjugating enzyme E2B
  ENST ID: ENST00000510021
  CDS Start-End: 128-262
agtctcggcggcggcggcggcggcggcggcggcggcgatccacagtgattcggccgccgcgccggggggtgggggggctgcgcgggactttttttttttcagactgaccgcggggcagctgcggagcatgtcgaccccggcccggaggaggctcatgcgggatttcaagcggttacaagaggacccacctgtgggtgtcagtggcgcaccatctgaaaacaacatcatgcagtggaatgcagttatatttggtgtatgctgatggtagcatatgtttagatatccttcagaatcgatggagtccaacatatgatgtatcttctatcttaacatcaattcagtctctgctggatgaaccgaatcctaacagtccagccaatagccaggcagcacagctttatcaggaaaacaaacg

SEQ ID NO: 197567 - DNA, 500 bp, Homo sapiens
  Payload ID: 18963
  Gene Name: ubiquitin-conjugating enzyme E2B
  ENST ID: ENST00000506787
  CDS Start-End: 1-417
tcgaccccggcccggaggaggctcatgcgggatttcaagcggttacaagaggacccacctgtgggtgtcagtggcgcaccatctgaaaacaacatcatgcagtggaatgcagttatatttggaccagaagggacaccttttgaagatggtacttttaaactagtaatagaattttctgaagaatatccaaataaaccaccaactgttaggtttttatccaaaatgtttcatccaaatgtgtatgctgatggtagcatatgtttagatatccttcagaatcgatggagtccaacatatgatgtatcttctatcttaacatcaattcagtgtcttgctctgttgcccagactggagtgcaatggcacaatcttggctcaccgcaacctctgcctcccgggttcaatctctgctggatgaaccgaatcctaacagtccagccaatagccaggcagcacagctttatcaggaaaacaaacgagaatatgagaaaagagtttcgg

SEQ ID NO: 197568 - DNA, 476 bp, Homo sapiens
  Payload ID: 18964
  Gene Name: ubiquitin-conjugating enzyme E2C
  ENST ID: ENST00000243893
  CDS Start-End: 39-191
gttctccgagttcctgtctctctgccaacgccgcccggatggcttcccaaaaccgcgacccagccgccactagcgtcgccgccgcccgtaaaggagctgagccgagcgggggcgccgcccggggtccggtgggcaaaaggctacagcaggagctgatgaccctcatgaacccaacattgatagtcccttgaacacacatgctgccgagctctggaaaaaccccacagcttttaagaagtacctgcaagaaacctactcaaagcaggtcaccagccaggagccctgacccaggctgcccagcctgtccttgtgtcgtctttttaatttttccttagatggtctgtcctttttgtgatttctgtataggactctttatcttgagctgtggtatttttgttttgtttttgtcttttaaattaagcctcggttgagcccttgtatattaaataaatgcatttttgtccttttttagacaa

SEQ ID NO: 197569 - DNA, 665 bp, Homo sapiens
  Payload ID: 18964
  Gene Name: ubiquitin-conjugating enzyme E2C
  Uniprot ID: O00762
  ENST ID: ENST00000352551
  CDS Start-End: 23-475
tctctctgccaacgccgcccggatggcttcccaaaaccgcgacccagccgccactagcgtcgccgccgcccgtaaaggagctgagccgagcgggggcgccgcccggggtccggtgggcaaaaggctacagcaggagctgatgaccctcatggtatatgaagacctgaggtataagctctcgctagagttccccagtggctacccttacaatgcgcccacagtgaagttcctcacgccctgctatcaccccaacgtggacacccagggtaacatatgcctggacatcctgaaggaaaagtggtctgccctgtatgatgtcaggaccattctgctctccatccagagccttctaggagaacccaacattgatagtcccttgaacacacatgctgccgagctctggaaaaaccccacagcttttaagaagtacctgcaagaaacctactcaaagcaggtcaccagccaggagccctgacccaggctgcccagcctgtccttgtgtcgtctttttaatttttccttagatggtctgtcctttttgtgatttctgtataggactctttatcttgagctgtggtatttttgttttgtttttgtcttttaaattaagcctcggttgagcccttgtatattaaataaatgcatttttgtccttttttagacaa

SEQ ID NO: 197570 - DNA, 737 bp, Homo sapiens
  Payload ID: 18964
  Gene Name: ubiquitin-conjugating enzyme E2C
  Uniprot ID: O00762
  ENST ID: ENST00000335046
  CDS Start-End: 62-547
cgcagtcctgcagttgcagtcgtgttctccgagttcctgtctctctgccaacgccgcccggatggcttcccaaaaccgcgacccagccgccactagcgtcgccgccgcccgtaaaggagctgagccgagcgggggcgccgcccggggtccggtgggcaaaaggctacagcaggagctgatgaccctcatgatgtctggcgataaagggatttctgccttccctgaatcagacaaccttttcaaatgggtagggaccatccatggagcagctggaacagcagtggggagcatcagaaccagctcaacagtttgtctactgtccggtcccagagaaactcaagattctagcaagccccttgtgtggggcttgggttgggacatgaggctgctgctggagcttactctgcaactgtttctccaaatgccagaacccaacattgatagtcccttgaacacacatgctgccgagctctggaaaaaccccacagcttttaagaagtacctgcaagaaacctactcaaagcaggtcaccagccaggagccctgacccaggctgcccagcctgtccttgtgtcgtctttttaatttttccttagatggtctgtcctttttgtgatttctgtataggactctttatcttgagctgtggtatttttgttttgtttttgtcttttaaattaagcctcggttgagcccttgtatattaaataaatgcatttttgtccttttttagacaa

SEQ ID NO: 197571 - DNA, 850 bp, Homo sapiens
  Payload ID: 18964
  Gene Name: ubiquitin-conjugating enzyme E2C
  Uniprot ID: O00762
  ENST ID: ENST00000356455
  CDS Start-End: 121-660
gagccattgattggtcgacgcccccagagggttacaattcaaacgcgggcgggcgggcccgcagtcctgcagttgcagtcgtgttctccgagttcctgtctctctgccaacgccgcccggatggcttcccaaaaccgcgacccagccgccactagcgtcgccgccgcccgtaaaggagctgagccgagcgggggcgccgcccggggtccggtgggcaaaaggctacagcaggagctgatgaccctcatgatgtctggcgataaagggatttctgccttccctgaatcagacaaccttttcaaatgggtagggaccatccatggagcagctggaacagtatatgaagacctgaggtataagctctcgctagagttccccagtggctacccttacaatgcgcccacagtgaagttcctcacgccctgctatcaccccaacgtggacacccagggtaacatatgcctggacatcctgaaggaaaagtggtctgccctgtatgatgtcaggaccattctgctctccatccagagccttctaggagaacccaacattgatagtcccttgaacacacatgctgccgagctctggaaaaaccccacagcttttaagaagtacctgcaagaaacctactcaaagcaggtcaccagccaggagccctgacccaggctgcccagcctgtccttgtgtcgtctttttaatttttccttagatggtctgtcctttttgtgatttctgtataggactctttatcttgagctgtggtatttttgttttgtttttgtcttttaaattaagcctcggttgagcccttgtatattaaataaatgcatttttgtccttttttagacaa

SEQ ID NO: 197572 - DNA, 914 bp, Homo sapiens
  Payload ID: 18964
  Gene Name: ubiquitin-conjugating enzyme E2C
  Uniprot ID: O00762
  ENST ID: ENST00000372568
  CDS Start-End: 302-724
ggtgagattcgagagatgggggacaggccaggagctcagaccgctctttgagactctcccgaaggagaatgggagggtaggggcgctgccagactccttccctggtgggcctagatgaagacgctcaaggaccctcgtgacttggccgagacaggggaagggagaagttgagtcgggcaaggaagagatgctaaagcctggggaattaagaacatgccagaatcatcccgagggagtctggaattagggagggtgaggactcgctaggatcgtcctgtggatctggctacagcaggagctgatgaccctcatgatgtctggcgataaagggatttctgccttccctgaatcagacaaccttttcaaatgggtagggaccatccatggagcagctggaacagtatatgaagacctgaggtataagctctcgctagagttccccagtggctacccttacaatgcgcccacagtgaagttcctcacgccctgctatcaccccaacgtggacacccagggtaacatatgcctggacatcctgaaggaaaagtggtctgccctgtatgatgtcaggaccattctgctctccatccagagccttctaggagaacccaacattgatagtcccttgaacacacatgctgccgagctctggaaaaaccccacagcttttaagaagtacctgcaagaaacctactcaaagcaggtcaccagccaggagccctgacccaggctgcccagcctgtccttgtgtcgtctttttaatttttccttagatggtctgtcctttttgtgatttctgtataggactctttatcttgagctgtggtatttttgttttgtttttgtcttttaaattaagcctcggttgagcccttgtatattaaataaatgcatttttgtccttttttagacaa

SEQ ID NO: 197573 - DNA, 641 bp, Homo sapiens
  Payload ID: 18964
  Gene Name: ubiquitin-conjugating enzyme E2C
  ENST ID: ENST00000405520
  CDS Start-End: 121-360
gagccattgattggtcgacgcccccagagggttacaattcaaacgcgggcgggcgggcccgcagtcctgcagttgcagtcgtgttctccgagttcctgtctctctgccaacgccgcccggatggcttcccaaaaccgcgacccagccgccactagcgtcgccgccgcccgtaaaggagctgagccgagcgggggcgccgcccggggtccggtgggcaaaaggctacagcaggagctgatgaccctcatgatgtctggcgataaagggatttctgccttccctgaatcagacaaccttttcaaatgggtagggaccatccatggagcagctggaacaaacccaacattgatagtcccttgaacacacatgctgccgagctctggaaaaaccccacagcttttaagaagtacctgcaagaaacctactcaaagcaggtcaccagccaggagccctgacccaggctgcccagcctgtccttgtgtcgtctttttaatttttccttagatggtctgtcctttttgtgatttctgtataggactctttatcttgagctgtggtatttttgttttgtttttgtcttttaaattaagcctcggttgagcccttgtatattaaataaatgcatttttgtccttttttag

SEQ ID NO: 197574 - DNA, 705 bp, Homo sapiens
  Payload ID: 18964
  Gene Name: ubiquitin-conjugating enzyme E2C
  ENST ID: ENST00000617055
  CDS Start-End: 121-519
gagccattgattggtcgacgcccccagagggttacaattcaaacgcgggcgggcgggcccgcagtcctgcagttgcagtcgtgttctccgagttcctgtctctctgccaacgccgcccggatggcttcccaaaaccgcgacccagccgccactagcgtcgccgccgcccgtaaaggagctgagccgagcgggggcgccgcccggggtccggtgggcaaaaggctacagcaggagctgatgaccctcatggcagtggggagcatcagaaccagctcaacagtttgtctactgtccggtcccagagaaactcaagattctagcaagccccttgtgtggggcttgggttgggacatgaggctgctgctggagcttactctgcaactgtttctccaaatgccagaacccaacattgatagtcccttgaacacacatgctgccgagctctggaaaaaccccacagcttttaagaagtacctgcaagaaacctactcaaagcaggtcaccagccaggagccctgacccaggctgcccagcctgtccttgtgtcgtctttttaatttttccttagatggtctgtcctttttgtgatttctgtataggactctttatcttgagctgtggtatttttgttttgtttttgtcttttaaattaagcctcggttgagcccttgtatattaaataaatgcatttttgtccttttttag

SEQ ID NO: 197575 - DNA, 2659 bp, Homo sapiens
  Payload ID: 18965
  Gene Name: ubiquitin-conjugating enzyme E2D 1
  Uniprot ID: P51668
  ENST ID: ENST00000373910
  CDS Start-End: 228-671
aaacaaaagagtctcgccggcgtccccgcccgcacactcgcgcacactcgcgctcgggcgcacacggagcagggaccggcgcccggagcgagccagggagcggctaaccggggacccaccgcgcggagccagcctagctgccagcgagcccaacccgcgacgacccacgcccctgagccccgcagccgacccctgccggccggtgtccccaccgccatccctgacccatggcgctgaagaggattcagaaagaattgagtgatctacagcgcgatccacctgctcactgttcagctggacctgtgggagatgacttgttccactggcaagccactattatggggcctcctgatagcgcatatcaaggtggagtcttctttctcactgtacattttccgacagattatccttttaaaccaccaaagattgctttcacaacaaaaatttaccatccaaacataaacagtaatggaagtatttgtctcgatattctgaggtcacaatggtcaccagctctgactgtatcaaaagttttattgtccatatgttctctactttgtgatcctaatccagatgaccccttagtaccagatattgcacaaatctataaatcagacaaagaaaaatacaacagacatgcaagagaatggactcagaaatatgcaatgtaaaaatcaaaaacattttcatatataccagagtactgtaaaatctaggtttttttcaacattagcagtaaattgagcactgtttactgtttcattgtaccatgaaaccatttgatttttacccattttaaatgtgtttctgaagcaagacaaaacaaacttccaaaaatacccttaagactgtgatgagagcatttatcattttgtatgcattgagaaagacatttattatggtttttaagatacttggacatctgcatcttcagcttacaagatctacaatgcagctgaaaagcaaccaaattattttttgctgaaactagatgtttttacatgagaaatactgtatgtgttgtctaagatgtcagttttataaatctgtattcagatttcattctttgttagctcactttataatttgtatttttttactgtatagactaaatatattctatttacatgtatgtcaactcattacttttttcctgtgaacagtattgaaaaaccccaacggctgataattaagtgaattaactgtgtctcccttgtcttaggatattctgtagattgattgcagatttcttaaatctgaaatgatctttacactgtaattctcagcatactgattatggagaaacacttgttttgattttgttatacttgacttaactttattgcaatgtgaattaattgcactgctaagtaggaagatgtgtaacttttatttgttgctattcacatttgaattttttcctgtataggcaatattatattgacaccttttacagatcttactgtagctttttccatataaataaaatgctttttctactatttgtcttgattacttaaaaaaataaaaatataagtaaggatcaaaactctaaaattttgcatgaaaattacatccaaattgtgaaaatcagatctattttgtttgccattagtcaccattagttatataaattttattgttttaggttagtatctctttactaaattgtcagtctataagataatatatgttgatcccttgctgtagaggagaatttagagtaatttggggtttgtcttggattatatctaaatggattatttgttaaaagtactgaaatgagtataaggcagtatcacccatccaaaagaaaggtctttatagacctgcacagtcactagattaattcattaaaatgcccccaccctgatgtaattgacattacatttcttaacattttaaaatctagaatttctaaaatggaatttaatgccatcacaatttgaaaaactttttttttttttttactatagaagttacaaaggaagttctaaaattatgcctccctctgtttttataagttgccatcgaaaagtgatttaaataagcaggttatctttatagattttaaagaaaactagaaagttttaatgttttaacttggggaaaaatacatctctttaatgtttagcatgcttgtcaaccttgagtgagtgtcatttttaagaacagttgtagcccttctgattattgcagtagctgtagaagtatgtaagaatatgtgatgggtgtagtcattagcaaagcatttaaatcacttgagtattttgtcatggttcattattattaaagcacaaaataacctattgttagaaaatatgtgtttttataaatgaatgtaaaataattaaatgaattgtgaaatggatgtttaagaaaatataggcttaaaaagtaaatctataaaatgatgtcttaaaacagccatatcatgaaaaattctacttagctatattattataagctacatttgccctgaatttgaacactcaacatcactagatttaaatatttagtatattttgatagtaaagggttttgtttcttgaatatcttcactttaaacaaaaaaaaaaaacaactttcatttgtgtggcatttatttttggaagtgtcttcttttttttctttattaaagtttttgaaacttgcctaa

SEQ ID NO: 197576 - DNA, 2621 bp, Homo sapiens
  Payload ID: 18965
  Gene Name: ubiquitin-conjugating enzyme E2D 1
  ENST ID: ENST00000615793
  CDS Start-End: 306-635
aaaagagtctcgccggcgtccccgcccgcacactcgcgcacactcgcgctcgggcgcacacggagcagggaccggcgcccggagcgagccagggagcggctaaccggggacccaccgcgcggagccagcctagctgccagcgagcccaacccgcgacgacccacgcccctgagccccgcagccgacccctgccggccggtgtccccaccgccatccctgacccatggcgctgaagaggattcagaaagaattgagtgatctacagcgcgatccacctgctcactgttcagctggacctgtgggagatgactcctgatagcgcatatcaaggtggagtcttctttctcactgtacattttccgacagattatccttttaaaccaccaaagattgctttcacaacaaaaatttaccatccaaacataaacagtaatggaagtatttgtctcgatattctgaggtcacaatggtcaccagctctgactgtatcaaaagttttattgtccatatgttctctactttgtgatcctaatccagatgaccccttagtaccagatattgcacaaatctataaatcagacaaagaaaaatacaacagacatgcaagagaatggactcagaaatatgcaatgtaaaaatcaaaaacattttcatatataccagagtactgtaaaatctaggtttttttcaacattagcagtaaattgagcactgtttactgtttcattgtaccatgaaaccatttgatttttacccattttaaatgtgtttctgaagcaagacaaaacaaacttccaaaaatacccttaagactgtgatgagagcatttatcattttgtatgcattgagaaagacatttattatggtttttaagatacttggacatctgcatcttcagcttacaagatctacaatgcagctgaaaagcaaccaaattattttttgctgaaactagatgtttttacatgagaaatactgtatgtgttgtctaagatgtcagttttataaatctgtattcagatttcattctttgttagctcactttataatttgtatttttttactgtatagactaaatatattctatttacatgtatgtcaactcattacttttttcctgtgaacagtattgaaaaaccccaacggctgataattaagtgaattaactgtgtctcccttgtcttaggatattctgtagattgattgcagatttcttaaatctgaaatgatctttacactgtaattctcagcatactgattatggagaaacacttgttttgattttgttatacttgacttaactttattgcaatgtgaattaattgcactgctaagtaggaagatgtgtaacttttatttgttgctattcacatttgaattttttcctgtataggcaatattatattgacaccttttacagatcttactgtagctttttccatataaataaaatgctttttctactatttgtcttgattacttaaaaaaataaaaatataagtaaggatcaaaactctaaaattttgcatgaaaattacatccaaattgtgaaaatcagatctattttgtttgccattagtcaccattagttatataaattttattgttttaggttagtatctctttactaaattgtcagtctataagataatatatgttgatcccttgctgtagaggagaatttagagtaatttggggtttgtcttggattatatctaaatggattatttgttaaaagtactgaaatgagtataaggcagtatcacccatccaaaagaaaggtctttatagacctgcacagtcactagattaattcattaaaatgcccccaccctgatgtaattgacattacatttcttaacattttaaaatctagaatttctaaaatggaatttaatgccatcacaatttgaaaaactttttttttttttttactatagaagttacaaaggaagttctaaaattatgcctccctctgtttttataagttgccatcgaaaagtgatttaaataagcaggttatctttatagattttaaagaaaactagaaagttttaatgttttaacttggggaaaaatacatctctttaatgtttagcatgcttgtcaaccttgagtgagtgtcatttttaagaacagttgtagcccttctgattattgcagtagctgtagaagtatgtaagaatatgtgatgggtgtagtcattagcaaagcatttaaatcacttgagtattttgtcatggttcattattattaaagcacaaaataacctattgttagaaaatatgtgtttttataaatgaatgtaaaataattaaatgaattgtgaaatggatgtttaagaaaatataggcttaaaaagtaaatctataaaatgatgtcttaaaacagccatatcatgaaaaattctacttagctatattattataagctacatttgccctgaatttgaacactcaacatcactagatttaaatatttagtatattttgatagtaaagggttttgtttcttgaatatcttcactttaaacaaaaaaaaaaaacaactttcatttgtgtggcatttatttttggaagtgtcttcttttttttctttattaaagtttttgaaacttgcct

SEQ ID NO: 197577 - DNA, 444 bp, Homo sapiens
  Payload ID: 18966
  Gene Name: ubiquitin-conjugating enzyme E2D 2
  ENST ID: ENST00000253815
  CDS Start-End: 1-444
ctgtctctactaaaaatacaaaaagaattgaatgatctggcacgggaccctccagcacagtgttcagcaggtcctgttggagatgatatgttccattggcaagctacaataatggggccaaatgacagtccctatcagggtggagtatttttcttgacaattcatttcccaacagattaccccttcaaaccacctaaggttgcatttacaacaagaatttatcatccaaatattaacagtaatggcagcatttgtcttgatattctacgatcacagtggtctccagcactaactatttcaaaagtactcttgtccatctgttctctgttgtgtgatcccaatccagatgatcctttagtgcctgagattgctcggatctacaaaacagatagagaaaagtacaacagaatagctcgggaatggactcagaagtatgcgatgtaa

SEQ ID NO: 197578 - DNA, 2702 bp, Homo sapiens
  Payload ID: 18966
  Gene Name: ubiquitin-conjugating enzyme E2D 2
  Uniprot ID: P62837
  ENST ID: ENST00000398733
  CDS Start-End: 627-1070
gcttcgcagcgtcacgccctccggggccgtggcggcgacggcggtgcgtagcttactcacaggggcggcccgtatccctccgccgccggcgcggctcggccctccctcccctggcccgccaatccccgcgcctcccgacctgcccctcggtcgggcccaccccgtgctccgacggccccaccccggcggcgcagcccgcccgcccgcgcgtccctcggtccacctgcagcagggaggaagacaggcaatccctccggctgtccgaccaagagaggccggccgagcccgaggcttgggcttttgctttctggcggagggatctgcggcggtttaggaggcggcgctgatcctgggaggaagaggcagctacggcggcggcggcggtggcggctagggcggcggcgaataaaggggccgccgccgggtgatgcggtgaccgctgcggcaggcccaggagctgagtgggccccggccctcagcccgtcccgccggacccgctttcctcaactctccatcttctcctgccgaccgagatcgccgaggcggcctcaggctccctagccccttccccgtcccttccccgcccccgtccccgccccgggggccgccgccacccgcctcccaccatggctctgaagagaatccacaaggaattgaatgatctggcacgggaccctccagcacagtgttcagcaggtcctgttggagatgatatgttccattggcaagctacaataatggggccaaatgacagtccctatcagggtggagtatttttcttgacaattcatttcccaacagattaccccttcaaaccacctaaggttgcatttacaacaagaatttatcatccaaatattaacagtaatggcagcatttgtcttgatattctacgatcacagtggtctccagcactaactatttcaaaagtactcttgtccatctgttctctgttgtgtgatcccaatccagatgatcctttagtgcctgagattgctcggatctacaaaacagatagagaaaagtacaacagaatagctcgggaatggactcagaagtatgcgatgtaattaaagaaattattggataacctctacaaataaagataggggaactctgaaagagaaagtccttttgatttccatttgactgctttctatgagcccacgcctcatcttcccctgtgcacatgtttacctgatacagcagtgctgcgtgttgtacatacttggaacaacaaactagaaatactgtacttctgtaccaacattgcctcctagcagagaagtgtgtgtgtgacaagccagttctacaggcattacctaggtgtgagactaaaagcttttcttattgacttaaatttggataacagcaaggtgtgaggggggtggtgggtatggtgtgtgcttggatgggaaagaaaaggctccactcacctataggagattatttttaagtggaatccatttaaactcaaaacagttatgaaaagcaaggtgaagaacatgaagctgtgtctgtattcattttattccgaaggagctacgtcttaggtgaaagttatgaccaaccagattaaactctacccacatcctgcattttaaggtctaagtttaactggtcaacatttaaatggattggagctattagtacatcaagtgtgatgggctttgttcccaactcttttacatctccctaccccttcaacctttggcctttcagcccttctttctctcttccatattctttggtttgtatgtggtttctcagttaatacatagctaatagctcttatttttcttatgtttttaaccgcttaggtctatttggatgtaagggtgaaaattcatttgatggaaatacttgtgtatatttaaagacccaattgctcctctggagcttgtactttcaagaatgattaatctgtgtaataaactggttactacagtcattacatataattttgtgtgaataggctttttcatttttaagaagtttgtctagctgagattagtggtggattttctcccacttctgaaatgttcatttatactggttgcattttaagatcatgaaacaattccagttacattgtaaaaaggatatcttacgagtaattttattgaacaagttagaggcataagcttaagagcatttccatgaaacaacacatgcagcattccaggaacttgattgttaaattcaataagaaatttgctttattaatgaaactaagctgcatttcatcaaaaccttgtgacattcccttggtacataggacataaaacacagaggcattgctatttggtaagttaagcttctgtgattgtaattataaaagagcaacattgaccaaacctgggaaacaagagcacagtcttgtttggagagtctacataattactttgcactaacatttgcaggatgttcacacaattttaaattgtactgtatgtggctttttgaagtcttcccttgaccctagtaaaatatagcttgaaacttgtaaacaactgtgtttgccagaaacatcattcatgtgaactaggcaagttaccttttttccccccttcttttcctaattgtaaactaggccaacctgaaagccatggctgatgctctagccatcaggttctttcaaatgcatctttacactcttgcacaaaagttaaggaataaatgtccactgcttttggttttaa

SEQ ID NO: 197579 - DNA, 901 bp, Homo sapiens
  Payload ID: 18966
  Gene Name: ubiquitin-conjugating enzyme E2D 2
  Uniprot ID: P62837
  ENST ID: ENST00000398734
  CDS Start-End: 67-510
gccccttccccgtcccttccccgcccccgtccccgccccgggggccgccgccacccgcctcccaccatggctctgaagagaatccacaaggaattgaatgatctggcacgggaccctccagcacagtgttcagcaggtcctgttggagatgatatgttccattggcaagctacaataatggggccaaatgacagtccctatcagggtggagtatttttcttgacaattcatttcccaacagattaccccttcaaaccacctaaggttgcatttacaacaagaatttatcatccaaatattaacagtaatggcagcatttgtcttgatattctacgatcacagtggtctccagcactaactatttcaaaagtactcttgtccatctgttctctgttgtgtgatcccaatccagatgatcctttagtgcctgagattgctcggatctacaaaacagatagagaaaagtacaacagaatagctcgggaatggactcagaagtatgcgatgtaattaaagaaattattggataacctctacaaataaagataggggaactctgaaagagaaagtccttttgatttccatttgactgctttctatgagcccacgcctcatcttcccctgtgcacatgtttacctgatacagcagtgctgcgtgttgtacatacttggaacaacaaactagaaatactgtacttctgtaccaacattgcctcctagcagagaagtgtgtgtgtgacaagccagttctacaggcattacctaggtctatttggatgtaagggtgaaaattcatttgatggaaatacttgtgtatatttaaagacccaattgctcctctggagcttgtactttcaagaatgattaatctgtgtaataaactggttactacagtcattac

SEQ ID NO: 197580 - DNA, 1113 bp, Homo sapiens
  Payload ID: 18966
  Gene Name: ubiquitin-conjugating enzyme E2D 2
  Uniprot ID: P62837
  ENST ID: ENST00000505548
  CDS Start-End: 443-799
agcgttcctccccggctgcccttccaggcccgcatggtgtggactcttagggcttctctccagtctgggactgccgctgcacttgagggccattgtcgggccaggatggcggggttggggccgaggggggcgctggggcgttgggcggccccttcgacagaggtcgaaagggcttctcgccccatttctgttccctcctcccacacctgccctagctccctccacaaaaccgcctgagctcgggctgacagaggaagccgttttgcccgatccacaagtatatcctgagttcacttacctcttgggtggcagcacacatcggtccaccctgcttgtccagaaactgttaagagttggaagttcagaagaaaaaaaaaaggaattgaatgatctggcacgggaccctccagcacagtgttcagcaggtcctgttggagatgatatgttccattggcaagctacaataatggggccaaatgacagtccctatcagggtggagtatttttcttgacaattcatttcccaacagattaccccttcaaaccacctaaggttgcatttacaacaagaatttatcatccaaatattaacagtaatggcagcatttgtcttgatattctacgatcacagtggtctccagcactaactatttcaaaagtactcttgtccatctgttctctgttgtgtgatcccaatccagatgatcctttagtgcctgagattgctcggatctacaaaacagatagagaaaagtacaacagaatagctcgggaatggactcagaagtatgcgatgtaattaaagaaattattggataacctctacaaataaagataggggaactctgaaagagaaagtccttttgatttccatttgactgctttctatgagcccacgcctcatcttcccctgtgcacatgtttacctgatacagcagtgctgcgtgttgtacatacttggaacaacaaactagaaatactgtacttctgtaccaacattgcctcctagcagagaagtgtgtgtgtgacaagccagttctacaggcattacctaggtgtgagactaaaagcttttcttattgacttaaatttggataacagcaaggtgtgagg

SEQ ID NO: 197581 - DNA, 1170 bp, Homo sapiens
  Payload ID: 18966
  Gene Name: ubiquitin-conjugating enzyme E2D 2
  ENST ID: ENST00000505007
  CDS Start-End: 877-1170
cttcgcagcgtcacgccctccggggccgtggcggcgacggcggtgcgtagcttactcacaggggcggcccgtatccctccgccgccggcgcggctcggccctccctcccctggcccgccaatccccgcgcctcccgacctgcccctcggtcgggcccaccccgtgctccgacggccccaccccggcggcgcagcccgcccgcccgcgcgtccctcggtccacctgcagcagggaggaagacaggcaatccctccggctgtccgaccaagagaggccggccgagcccgaggcttgggcttttgctttctggcggagggatctgcggcggtttaggaggcggcgctgatcctgggaggaagaggcagctacggcggcggcggcggtggcggctagggcggcggcgaataaaggggccgccgccgggtgatgcggtgaccgctgcggcaggcccaggagctgagtgggccccggccctcagcccgtcccgccggacccgctttcctcaactctccatcttctcctgccgaccgagatcgccgaggcggcctcaggctccctagccccttccccgtcccttccccgcccccgtccccgccccgggggccgccgccacccgcctcccaccatggctctgaagagaatccacaagctccctccacaaaaccgcctgagctcgggctgacagaggaagccgttttgcccgatccacaagtatatcctgagttcacttacctcttgggtggcagcacacatcggtccaccctgcttgtccagaaactgttaagagttggaagttcagaagaaaaaaaaaaggaattgaatgatctggcacgggaccctccagcacagtgttcagcaggtcctgttggagatgatatgttccattggcaagctacaataatggggccaaatgacagtccctatcagggtggagtatttttcttgacaattcatttcccaacagattaccccttcaaaccacctaaggttgcatttacaacaagaatttatcatccaaatattaacagtaatggcagcatttgtcttgatattctacgatcacagtggtctccagcactaactatttcaaaagtactcttgtccatctgttctctgttgtgtgatcccaatccagatgatcctttagtgcctgagattgctcggatctac

SEQ ID NO: 197582 - DNA, 656 bp, Homo sapiens
  Payload ID: 18966
  Gene Name: ubiquitin-conjugating enzyme E2D 2
  Uniprot ID: P62837
  ENST ID: ENST00000511725
  CDS Start-End: 246-602
catccctgtgggggactccggccagcctgagtgacgcgatccaaagagcgctcccgggtaggaaattgccctggtggaatgcctcgccagagcagcgtgtagcaggcccccgcggaggattaacacagtggctgaacaccgggaaggaactggcacttgggagtccggacatctgaaacttggaattgaatgatctggcacgggaccctccagcacagtgttcagcaggtcctgttggagatgatatgttccattggcaagctacaataatggggccaaatgacagtccctatcagggtggagtatttttcttgacaattcatttcccaacagattaccccttcaaaccacctaaggttgcatttacaacaagaatttatcatccaaatattaacagtaatggcagcatttgtcttgatattctacgatcacagtggtctccagcactaactatttcaaaagtactcttgtccatctgttctctgttgtgtgatcccaatccagatgatcctttagtgcctgagattgctcggatctacaaaacagatagagaaaagtacaacagaatagctcgggaatggactcagaagtatgcgatgtaattaaagaaattattggataacctctacaaataaagataggggaactctgaaaga

SEQ ID NO: 197583 - DNA, 1087 bp, Homo sapiens
  Payload ID: 18967
  Gene Name: ubiquitin-conjugating enzyme E2D 3
  Uniprot ID: P61077
  ENST ID: ENST00000321805
  CDS Start-End: 464-907
gtagttccgtcagagcggacatcttgtggctgtgtcgtgcgcgtgagccccgtagggccggggaggcaccagctgccgcgcggggaggaggccgaggccgcagcttgagggaggccccggcccctctaggccgggaagttaaacttgtagccaccacctccgctcttcccgtcaccctcgcccccacttcgggccgaaagcacggtacagaggctgttggtggctttgccacgccaccccacccaccccggatcgcggctgtcttaagggacctggattcatcaggggctcttcggggcctgtgcgagtgctgatctgctccgtttttgcaaaaggcgcctgtgtctggcagagctggtgtgagacgagacaatcctgccccgccgccgggataatcaagagttttggccggacctttgagcatacaccgagagagtgaggagccagacgacaagcacacactatggcgctgaaacggattaataaggaacttagtgatttggcccgtgaccctccagcacaatgttctgcaggtccagttggggatgatatgtttcattggcaagccacaattatgggacctaatgacagcccatatcaaggcggtgtattctttttgacaattcattttcctacagactaccccttcaaaccacctaaggttgcatttacaacaagaatttatcatccaaatattaacagtaatggcagcatttgtctcgatattctaagatcacagtggtcgcctgctttaacaatttctaaagttcttttatccatttgttcactgctatgtgatccaaacccagatgaccccctagtgccagagattgcacggatctataaaacagacagagataagtacaacagaatatctcgggaatggactcagaagtatgccatgtgatgctaccttaaagtcagaataacctgcattatagctggaataaactttaaattactgttccttttttgattttcttatccggctgctcccctatcagacctcatcttttttaattttattttttgtttacctccctccattcattcacatgctcatctgagaagacttaagttcttccag

SEQ ID NO: 197584 - DNA, 896 bp, Homo sapiens
  Payload ID: 18967
  Gene Name: ubiquitin-conjugating enzyme E2D 3
  Uniprot ID: P61077
  ENST ID: ENST00000338145
  CDS Start-End: 290-733
gggaactggcgggtagcgaggccctcctcggaatctcgtgtgaaggtggccctcctcttgggcctttaacgtctgtagatgctggagaccagcagaaaggatactgtgtgcgatgagataagcatgtgagaatgctttctaaccgaaagtgcctttcaaaagcgcctgtgtctggcagagctggtgtgagacgagacaatcctgccccgccgccgggataatcaagagttttggccggacctttgagcatacaccgagagagtgaggagccagacgacaagcacacactatggcgctgaaacggattaataaggaacttagtgatttggcccgtgaccctccagcacaatgttctgcaggtccagttggggatgatatgtttcattggcaagccacaattatgggacctaatgacagcccatatcaaggcggtgtattctttttgacaattcattttcctacagactaccccttcaaaccacctaaggttgcatttacaacaagaatttatcatccaaatattaacagtaatggcagcatttgtctcgatattctaagatcacagtggtcgcctgctttaacaatttctaaagttcttttatccatttgttcactgctatgtgatccaaacccagatgaccccctagtgccagagattgcacggatctataaaacagacagagataagtacaacagaatatctcgggaatggactcagaagtatgccatgtgatgctaccttaaagtcagaataacctgcattatagctggaataaactttaaattactgttccttttttgattttcttatccggctgctcccctatcagacctcatcttttttaattttattttttgtttacctccctccattcattcacatgctcatctgagaa

SEQ ID NO: 197585 - DNA, 711 bp, Homo sapiens
  Payload ID: 18967
  Gene Name: ubiquitin-conjugating enzyme E2D 3
  ENST ID: ENST00000350435
  CDS Start-End: 118-543
agttgcagcttttcacccgaagctatttatccgagggacaccgggaactgatgtaaaaggcattctggaagctcccttttccttttggctggagagtgggggtggataaggggtgcgatggcagaacttagtgatttggcccgtgaccctccagcacaatgttctgcaggtccagttggggatgatatgtttcattggcaagccacaattatgggacctaatgacagcccatatcaaggcggtgtattctttttgacaattcattttcctacagactaccccttcaaaccacctaaggttgcatttacaacaagaatttatcatccaaatattaacagtaatggcagcatttgtctcgatattctaagatcacagtggtcgcctgctttaacaatttctaaagttcttttatccatttgttcactgctatgtgatccaaacccagatgaccccctagtgccagagattgcacggatctataaaacagacagagataagtacaacagaatatctcgggaatggactcagaagtatgccatgtgatgctaccttaaagtcagaataacctgcattatagctggaataaactttaaattactgttccttttttgattttcttatccggctgctcccctatcagacctcatcttttttaattttattttttgtttacctccctccattcattcacatgctcatctgagaagactt

SEQ ID NO: 197586 - DNA, 838 bp, Homo sapiens
  Payload ID: 18967
  Gene Name: ubiquitin-conjugating enzyme E2D 3
  Uniprot ID: P61077
  ENST ID: ENST00000349311
  CDS Start-End: 244-687
ctcgatgcttctctgagcctaagggtttccgccactcgttcaccctccccccagctcatgatcctcctccctcccccgccctcctggtccaatctccgatctgtttagtaagaaggcgcctgtgtctggcagagctggtgtgagacgagacaatcctgccccgccgccgggataatcaagagttttggccggacctttgagcatacaccgagagagtgaggagccagacgacaagcacacactatggcgctgaaacggattaataaggaacttagtgatttggcccgtgaccctccagcacaatgttctgcaggtccagttggggatgatatgtttcattggcaagccacaattatgggacctaatgacagcccatatcaaggcggtgtattctttttgacaattcattttcctacagactaccccttcaaaccacctaaggttgcatttacaacaagaatttatcatccaaatattaacagtaatggcagcatttgtctcgatattctaagatcacagtggtcgcctgctttaacaatttctaaagttcttttatccatttgttcactgctatgtgatccaaacccagatgaccccctagtgccagagattgcacggatctataaaacagacagagataagtacaacagaatatctcgggaatggactcagaagtatgccatgtgatgctaccttaaagtcagaataacctgcattatagctggaataaactttaaattactgttccttttttgattttcttatccggctgctcccctatcagacctcatcttttttaattttattttttgtttacctccctccattcattcacatg

SEQ ID NO: 197587 - DNA, 2389 bp, Homo sapiens
  Payload ID: 18967
  Gene Name: ubiquitin-conjugating enzyme E2D 3
  Uniprot ID: P61077
  ENST ID: ENST00000343106
  CDS Start-End: 615-1061
agaatagctcgctgcgaggatagcaatacacatcaagtctcccttcctttatttccttccttttcccggccgcacctttggacagaaaccgaaagcagcccggcgtccgtccggagtcttatgcttccccctccccccttgcctttctttgccctagtgacgccggtatagcgccgactaggccccggctcctcctctgctgggctccggaccctgccccgcacccacccctttctcctacgcctcttcctctcccacccgggtctcttcctttctagaggccgggaagttaaacttgtagccaccacctccgctcttcccgtcaccctcgcccccacttcgggccgaaagcacggtacagaggctgttggtggctttgccacgccaccccacccaccccggatcgcggctgtcttaagggacctggattcatcaggggctcttcggggcctgtgcgagtgctgatctgctccgtttttgcaaaaggcgcctgtgtctggcagagctggtgtgagacgagacaatcctgccccgccgccgggataatcaagagttttggccggacctttgagcatacaccgagagagtgaggagccagacgacaagcacacactatggcgctgaaacggattaataaggaacttagtgatttggcccgtgaccctccagcacaatgttctgcaggtccagttggggatgatatgtttcattggcaagccacaattatgggacctaatgacagcccatatcaaggcggtgtattctttttgacaattcattttcctacagactaccccttcaaaccacctaaggttgcatttacaacaagaatttatcatccaaatattaacagtaatggcagcatttgtctcgatattctaagatcacagtggtcgcctgctttaacaatttctaaagttcttttatccatttgttcactgctatgtgatccaaacccagatgaccccctagtgccagagattgcacggatctataaaacagacagagataagtacaataggttagcaagagagtggacagagaaatacgctatgttgtagggtacaacagaatatctcgggaatggactcagaagtatgccatgtgatgctaccttaaagtcagaataacctgcattatagctggaataaactttaaattactgttccttttttgattttcttatccggctgctcccctatcagacctcatcttttttaattttattttttgtttacctccctccattcattcacatgctcatctgagaagacttaagttcttccagctttggacaataactgcttttagaaactgtaaagtagttacaagagaacagttgcccaagactcagaatttttaaaaaaaaaaatggagcatgtgtattatgtggccaatgtcttcactctaacttggttatgagactaaaaccattcctcactgctctaacatgctgaagaaatcatctgagggggagggagatggatgctcagttgtcacatcaaaggatacagcattattctagcagcatccattcttgtttaagccttccactgttagagatttgaggttacatgatatgctttatgctcataactgatgtggctggagaattggtattgaatttatagcatcagcagaacagaaaatgtgatgtattttatgcatgtcaataaaggaatgacctgttcttgttctacagagaatggaaattggaagtcaaacaccctttgtattccaaaatagggtctcaaacattttgtaattttcatttaaattgttaggaggcttggagctattagttaatctatcttccaatacactgtttaatatagcactgaataaatgatgcaagttgtcaatggatgagtgatcaactaatagctctgctagtaattgatttatttttcttcaataaagttgcataaaccaatgagttagctgcctggattaatcagtatgggaaacaatcttttgtaaatgcaaagctgttttttgtatatactgttgggatttgcttcattgtttgacatcaaatgatgatgtaaagttcgaaagagtgaatattttgccatgttcagttaaagtgcacagtctgttacaggttgacacattgcttgacctgatttatgcagaattaataagctatttggatagtgtagctttaatgtgctgcacatgatactggcagccctagagttcatagatggacttttgggacccagcagttttgaaatgtgtttatggagtttaagaaatttattttccaggtgcagcccctgtctaactgaaatttctcttcaccttgtacacttgacagctgaaaaaaaacaacatgggagtaataatgggtcaaaatttgcaaaataaagtactgttttggtgtggg

SEQ ID NO: 197588 - DNA, 660 bp, Homo sapiens
  Payload ID: 18967
  Gene Name: ubiquitin-conjugating enzyme E2D 3
  Uniprot ID: P61077
  ENST ID: ENST00000357194
  CDS Start-End: 153-602
cgcggcggactgccgaggcgcgggaactggcgggtagcgaggccctcctcggaatctcgtgtgaaggtggccctcctcttgggcctttaacgtctgtagatgctggagaccagcagaaaggatactgtgtgcgatgagataagcatgtgagaatgctttctaaccgaaagtgcctttcaaaagaacttagtgatttggcccgtgaccctccagcacaatgttctgcaggtccagttggggatgatatgtttcattggcaagccacaattatgggacctaatgacagcccatatcaaggcggtgtattctttttgacaattcattttcctacagactaccccttcaaaccacctaaggttgcatttacaacaagaatttatcatccaaatattaacagtaatggcagcatttgtctcgatattctaagatcacagtggtcgcctgctttaacaatttctaaagttcttttatccatttgttcactgctatgtgatccaaacccagatgaccccctagtgccagagattgcacggatctataaaacagacagagataagtacaacagaatatctcgggaatggactcagaagtatgccatgtgatgctaccttaaagtcagaataacctgcattatagctggaataaactttaaattactgt

SEQ ID NO: 197589 - DNA, 2368 bp, Homo sapiens
  Payload ID: 18967
  Gene Name: ubiquitin-conjugating enzyme E2D 3
  Uniprot ID: P61077
  ENST ID: ENST00000394801
  CDS Start-End: 486-929
accaagtgaggaaactgggggacgctgtggggaggggcgtggggctggatcgcgcagcggctgcttcctttaccttcctcccatggtctccttccggttctcgatgcttctctgagcctaagggtttccgccactcgttcaccctccccccagctcatgatcctcctccctcccccgccctcctggtccaatctccgatctgtttagtaagaaggtgctgttccgagaagaaggaaaagggcttgacacgtattcactcggccccggacgtgggaagcaagccgtctggcttcggcctcacatcggtcttgtgctcgggacggcggcgttggcggactgatccgcggcggtgaagaggcgcctgtgtctggcagagctggtgtgagacgagacaatcctgccccgccgccgggataatcaagagttttggccggacctttgagcatacaccgagagagtgaggagccagacgacaagcacacactatggcgctgaaacggattaataaggaacttagtgatttggcccgtgaccctccagcacaatgttctgcaggtccagttggggatgatatgtttcattggcaagccacaattatgggacctaatgacagcccatatcaaggcggtgtattctttttgacaattcattttcctacagactaccccttcaaaccacctaaggttgcatttacaacaagaatttatcatccaaatattaacagtaatggcagcatttgtctcgatattctaagatcacagtggtcgcctgctttaacaatttctaaagttcttttatccatttgttcactgctatgtgatccaaacccagatgaccccctagtgccagagattgcacggatctataaaacagacagagataagtacaacagaatatctcgggaatggactcagaagtatgccatgtgatgctaccttaaagtcagaataacctgcattatagctggaataaactttaaattactgttccttttttgattttcttatccggctgctcccctatcagacctcatcttttttaattttattttttgtttacctccctccattcattcacatgctcatctgagaagacttaagttcttccagctttggacaataactgcttttagaaactgtaaagtagttacaagagaacagttgcccaagactcagaatttttaaaaaaaaaaatggagcatgtgtattatgtggccaatgtcttcactctaacttggttatgagactaaaaccattcctcactgctctaacatgctgaagaaatcatctgagggggagggagatggatgctcagttgtcacatcaaaggatacagcattattctagcagcatccattcttgtttaagccttccactgttagagatttgaggttacatgatatgctttatgctcataactgatgtggctggagaattggtattgaatttatagcatcagcagaacagaaaatgtgatgtattttatgcatgtcaataaaggaatgacctgttcttgttctacagagaatggaaattggaagtcaaacaccctttgtattccaaaatagggtctcaaacattttgtaattttcatttaaattgttaggaggcttggagctattagttaatctatcttccaatacactgtttaatatagcactgaataaatgatgcaagttgtcaatggatgagtgatcaactaatagctctgctagtaattgatttatttttcttcaataaagttgcataaaccaatgagttagctgcctggattaatcagtatgggaaacaatcttttgtaaatgcaaagctgttttttgtatatactgttgggatttgcttcattgtttgacatcaaatgatgatgtaaagttcgaaagagtgaatattttgccatgttcagttaaagtgcacagtctgttacaggttgacacattgcttgacctgatttatgcagaattaataagctatttggatagtgtagctttaatgtgctgcacatgatactggcagccctagagttcatagatggacttttgggacccagcagttttgaaatgtgtttatggagtttaagaaatttattttccaggtgcagcccctgtctaactgaaatttctcttcaccttgtacacttgacagctgaaaaaaaacaacatgggagtaataatgggtcaaaatttgcaaaataaagtactgttttggtgtgggagttgtcatgaggctgtgttgaagtgacttatctatgtgggatattgagtatccattgaaatggatttgttcagccatttacattaatgagcatttaaatgcaacagatatcatttcaggtgacttaacatgaatgaataaaagtcaatgctattgga

SEQ ID NO: 197590 - DNA, 2227 bp, Homo sapiens
  Payload ID: 18967
  Gene Name: ubiquitin-conjugating enzyme E2D 3
  Uniprot ID: P61077
  ENST ID: ENST00000394803
  CDS Start-End: 345-788
ccaaccaccggcataagcattcaggggcgttgctttcctggcagtggcccgccccagttcgagccggtgccttactgcgtctcgcgagaacttatgcattttggaggcggaaccccgtcaggaaaagcgcacaaaactgctcttaagtcattgcagagctaccgcttcggttagccagccacgaagttctcgcgagagtcgtctcctcgataccaagcgcctgtgtctggcagagctggtgtgagacgagacaatcctgccccgccgccgggataatcaagagttttggccggacctttgagcatacaccgagagagtgaggagccagacgacaagcacacactatggcgctgaaacggattaataaggaacttagtgatttggcccgtgaccctccagcacaatgttctgcaggtccagttggggatgatatgtttcattggcaagccacaattatgggacctaatgacagcccatatcaaggcggtgtattctttttgacaattcattttcctacagactaccccttcaaaccacctaaggttgcatttacaacaagaatttatcatccaaatattaacagtaatggcagcatttgtctcgatattctaagatcacagtggtcgcctgctttaacaatttctaaagttcttttatccatttgttcactgctatgtgatccaaacccagatgaccccctagtgccagagattgcacggatctataaaacagacagagataagtacaacagaatatctcgggaatggactcagaagtatgccatgtgatgctaccttaaagtcagaataacctgcattatagctggaataaactttaaattactgttccttttttgattttcttatccggctgctcccctatcagacctcatcttttttaattttattttttgtttacctccctccattcattcacatgctcatctgagaagacttaagttcttccagctttggacaataactgcttttagaaactgtaaagtagttacaagagaacagttgcccaagactcagaatttttaaaaaaaaaaatggagcatgtgtattatgtggccaatgtcttcactctaacttggttatgagactaaaaccattcctcactgctctaacatgctgaagaaatcatctgagggggagggagatggatgctcagttgtcacatcaaaggatacagcattattctagcagcatccattcttgtttaagccttccactgttagagatttgaggttacatgatatgctttatgctcataactgatgtggctggagaattggtattgaatttatagcatcagcagaacagaaaatgtgatgtattttatgcatgtcaataaaggaatgacctgttcttgttctacagagaatggaaattggaagtcaaacaccctttgtattccaaaatagggtctcaaacattttgtaattttcatttaaattgttaggaggcttggagctattagttaatctatcttccaatacactgtttaatatagcactgaataaatgatgcaagttgtcaatggatgagtgatcaactaatagctctgctagtaattgatttatttttcttcaataaagttgcataaaccaatgagttagctgcctggattaatcagtatgggaaacaatcttttgtaaatgcaaagctgttttttgtatatactgttgggatttgcttcattgtttgacatcaaatgatgatgtaaagttcgaaagagtgaatattttgccatgttcagttaaagtgcacagtctgttacaggttgacacattgcttgacctgatttatgcagaattaataagctatttggatagtgtagctttaatgtgctgcacatgatactggcagccctagagttcatagatggacttttgggacccagcagttttgaaatgtgtttatggagtttaagaaatttattttccaggtgcagcccctgtctaactgaaatttctcttcaccttgtacacttgacagctgaaaaaaaacaacatgggagtaataatgggtcaaaatttgcaaaataaagtactgttttggtgtgggagttgtcatgaggctgtgttgaagtgacttatctatgtgggatattgagtatccattgaaatggatttgttcagccatttacattaatgagcatttaaatgcaacagatatcatttcaggtgacttaacatgaatgaataaaagtcaatgctattgga

SEQ ID NO: 197591 - DNA, 4166 bp, Homo sapiens
  Payload ID: 18967
  Gene Name: ubiquitin-conjugating enzyme E2D 3
  Uniprot ID: P61077
  ENST ID: ENST00000394804
  CDS Start-End: 694-1137
accaagtgaggaaactgggggacgctgtggggaggggcgtggggctggatcgcgcagcggctgcttcctttaccttcctcccatggtctccttccggttctcgatgcttctctgagcctaagggtttccgccactcgttcaccctccccccagctcatgatcctcctccctcccccgccctcctggtccaatctccgatctgtttagtaagaaggtgctgttccgagaagaaggaaaagggcttgacacgtattcactcggccccggacgtgggaagcaagccgtctggcttcggcctcacatcggtcttgtgctcgggacggcggcgttggcggactgatccgcggcggtgaagagaggccgggaagttaaacttgtagccaccacctccgctcttcccgtcaccctcgcccccacttcgggccgaaagcacggtacagaggctgttggtggctttgccacgccaccccacccaccccggatcgcggctgtcttaagggacctggattcatcaggggctcttcggggcctgtgcgagtgctgatctgctccgtttttgcaaaaggcgcctgtgtctggcagagctggtgtgagacgagacaatcctgccccgccgccgggataatcaagagttttggccggacctttgagcatacaccgagagagtgaggagccagacgacaagcacacactatggcgctgaaacggattaataaggaacttagtgatttggcccgtgaccctccagcacaatgttctgcaggtccagttggggatgatatgtttcattggcaagccacaattatgggacctaatgacagcccatatcaaggcggtgtattctttttgacaattcattttcctacagactaccccttcaaaccacctaaggttgcatttacaacaagaatttatcatccaaatattaacagtaatggcagcatttgtctcgatattctaagatcacagtggtcgcctgctttaacaatttctaaagttcttttatccatttgttcactgctatgtgatccaaacccagatgaccccctagtgccagagattgcacggatctataaaacagacagagataagtacaacagaatatctcgggaatggactcagaagtatgccatgtgatgctaccttaaagtcagaataacctgcattatagctggaataaactttaaattactgttccttttttgattttcttatccggctgctcccctatcagacctcatcttttttaattttattttttgtttacctccctccattcattcacatgctcatctgagaagacttaagttcttccagctttggacaataactgcttttagaaactgtaaagtagttacaagagaacagttgcccaagactcagaatttttaaaaaaaaaaatggagcatgtgtattatgtggccaatgtcttcactctaacttggttatgagactaaaaccattcctcactgctctaacatgctgaagaaatcatctgagggggagggagatggatgctcagttgtcacatcaaaggatacagcattattctagcagcatccattcttgtttaagccttccactgttagagatttgaggttacatgatatgctttatgctcataactgatgtggctggagaattggtattgaatttatagcatcagcagaacagaaaatgtgatgtattttatgcatgtcaataaaggaatgacctgttcttgttctacagagaatggaaattggaagtcaaacaccctttgtattccaaaatagggtctcaaacattttgtaattttcatttaaattgttaggaggcttggagctattagttaatctatcttccaatacactgtttaatatagcactgaataaatgatgcaagttgtcaatggatgagtgatcaactaatagctctgctagtaattgatttatttttcttcaataaagttgcataaaccaatgagttagctgcctggattaatcagtatgggaaacaatcttttgtaaatgcaaagctgttttttgtatatactgttgggatttgcttcattgtttgacatcaaatgatgatgtaaagttcgaaagagtgaatattttgccatgttcagttaaagtgcacagtctgttacaggttgacacattgcttgacctgatttatgcagaattaataagctatttggatagtgtagctttaatgtgctgcacatgatactggcagccctagagttcatagatggacttttgggacccagcagttttgaaatgtgtttatggagtttaagaaatttattttccaggtgcagcccctgtctaactgaaatttctcttcaccttgtacacttgacagctgaaaaaaaacaacatgggagtaataatgggtcaaaatttgcaaaataaagtactgttttggtgtgggagttgtcatgaggctgtgttgaagtgacttatctatgtgggatattgagtatccattgaaatggatttgttcagccatttacattaatgagcatttaaatgcaacagatatcatttcaggtgacttaacatgaatgaataaaagtcaatgctattggattgttttttgtttgacaagtgctatctgtgccactgatttaacttctgtagtaacaagggcattaccattcttcacctttcctaattctgatcccatagttttacatttttcctgtttattttgattttgttcactgctttatttcttaaagttctagcacatctgtgactcctccacttccacatttttgcactgcttacacttacgtgcaatcttattccttgtctgcacacacatgtggaaagctagaaataaatgttaaaacttactttttataaacattttaatatgtagtttggacatgatttattgacttaaggttcttctctaaactggaagtgaaatgcatgccttctgaagatgttctggctttgttaattctgtaatcatttcattggggaaaaaaccagctacgcagtttttccaatgagtgaattttttcattttgtgttttgcttaaaacggctccttcagggtagatgtcatactgcataacttttttggattcaaattatgaatgagaaattagttaacattctgctccacaaggtaagaaaaactgctctttggctctattttcaaaattacttctgagatgcatatagtctcaaaataacagctttagtaggcatatcacttcttgaaagccaaacatgagtgtaagacacttttatgaaacacggtggatccctaactggctttcaaattgacctttatagccttagacaacccttaggtatttacggagatgacttctttgattgtcataacaattagtggatgtgtccagttctctgtatctttgacttgatgctttatacatcatttcatttgttgcttctaagggaataagccatagaggcttctccaggtttaaaagaacagtaaagtacctggaaaaccaacatttttgaatgtatggacactggacatgagatatgtacaatgaaatcttaaaagaatctaagaatttgccctctttgccccactccacccagtaatttgacattactagtgccatgtataggacccaactgagtattagaatcagttttgactatgtctttgtatttcctaaatcttttaatgcataaaccgaattagggtccagttggcctgttaatggtaaatttacattttaaatgactcagtttgtttttcctgggcgagtttgcaatgtgataatcagattttttaaaactgattaatttgctttcttgtgtgggtgtactcacattttaaagtatgaaccacagttaactagtggtctcaggggtagtgaaacactcacttttttttttgtttgtttttttttgtttgttgaaatggcttagttgaagtatacttaaggtactgatcatgctgtgttagtaatttgggcggggaggggggtaactcagccatgttttgtgttggcataacaaaactgttaatgattgttgattacacttttaagtgaatttgtcttttatgaggaacccagtgcaagtcactaaatattgtctaatagtgacatctgcataagacttgtaatagctgaagttaattgagcttaaaggaattgttaccattaaagtctgtgtttaaag

SEQ ID NO: 197592 - DNA, 3990 bp, Homo sapiens
  Payload ID: 18967
  Gene Name: ubiquitin-conjugating enzyme E2D 3
  Uniprot ID: P61077
  ENST ID: ENST00000453744
  CDS Start-End: 515-958
gttcaccctccccccagctcatgatcctcctccctcccccgccctcctggtccaatctccgatctgtttagtaagaaggtgctgttccgagaagaaggaaaagggcttgacacgtattcactcggccccggacgtgggaagcaagccgtctggcttcggcctcacatcggtcttgtgctcgggacggcggcgttggcggactgatccgcggcggtgaagaggcaggaggagggggaggggcggagcgtggcagctggcagtagttccgtcagagcggacatcttgtggctgtgtcgtgcgcgtgagccccgtagggccggggaggcaccagctgccgcgcggggaggaggccgaggccgcagcttgagggaggccccggcccctctgcgcctgtgtctggcagagctggtgtgagacgagacaatcctgccccgccgccgggataatcaagagttttggccggacctttgagcatacaccgagagagtgaggagccagacgacaagcacacactatggcgctgaaacggattaataaggaacttagtgatttggcccgtgaccctccagcacaatgttctgcaggtccagttggggatgatatgtttcattggcaagccacaattatgggacctaatgacagcccatatcaaggcggtgtattctttttgacaattcattttcctacagactaccccttcaaaccacctaaggttgcatttacaacaagaatttatcatccaaatattaacagtaatggcagcatttgtctcgatattctaagatcacagtggtcgcctgctttaacaatttctaaagttcttttatccatttgttcactgctatgtgatccaaacccagatgaccccctagtgccagagattgcacggatctataaaacagacagagataagtacaacagaatatctcgggaatggactcagaagtatgccatgtgatgctaccttaaagtcagaataacctgcattatagctggaataaactttaaattactgttccttttttgattttcttatccggctgctcccctatcagacctcatcttttttaattttattttttgtttacctccctccattcattcacatgctcatctgagaagacttaagttcttccagctttggacaataactgcttttagaaactgtaaagtagttacaagagaacagttgcccaagactcagaatttttaaaaaaaaaaatggagcatgtgtattatgtggccaatgtcttcactctaacttggttatgagactaaaaccattcctcactgctctaacatgctgaagaaatcatctgagggggagggagatggatgctcagttgtcacatcaaaggatacagcattattctagcagcatccattcttgtttaagccttccactgttagagatttgaggttacatgatatgctttatgctcataactgatgtggctggagaattggtattgaatttatagcatcagcagaacagaaaatgtgatgtattttatgcatgtcaataaaggaatgacctgttcttgttctacagagaatggaaattggaagtcaaacaccctttgtattccaaaatagggtctcaaacattttgtaattttcatttaaattgttaggaggcttggagctattagttaatctatcttccaatacactgtttaatatagcactgaataaatgatgcaagttgtcaatggatgagtgatcaactaatagctctgctagtaattgatttatttttcttcaataaagttgcataaaccaatgagttagctgcctggattaatcagtatgggaaacaatcttttgtaaatgcaaagctgttttttgtatatactgttgggatttgcttcattgtttgacatcaaatgatgatgtaaagttcgaaagagtgaatattttgccatgttcagttaaagtgcacagtctgttacaggttgacacattgcttgacctgatttatgcagaattaataagctatttggatagtgtagctttaatgtgctgcacatgatactggcagccctagagttcatagatggacttttgggacccagcagttttgaaatgtgtttatggagtttaagaaatttattttccaggtgcagcccctgtctaactgaaatttctcttcaccttgtacacttgacagctgaaaaaaaacaacatgggagtaataatgggtcaaaatttgcaaaataaagtactgttttggtgtgggagttgtcatgaggctgtgttgaagtgacttatctatgtgggatattgagtatccattgaaatggatttgttcagccatttacattaatgagcatttaaatgcaacagatatcatttcaggtgacttaacatgaatgaataaaagtcaatgctattggattgttttttgtttgacaagtgctatctgtgccactgatttaacttctgtagtaacaagggcattaccattcttcacctttcctaattctgatcccatagttttacatttttcctgtttattttgattttgttcactgctttatttcttaaagttctagcacatctgtgactcctccacttccacatttttgcactgcttacacttacgtgcaatcttattccttgtctgcacacacatgtggaaagctagaaataaatgttaaaacttactttttataaacattttaatatgtagtttggacatgatttattgacttaaggttcttctctaaactggaagtgaaatgcatgccttctgaagatgttctggctttgttaattctgtaatcatttcattggggaaaaaaccagctacgcagtttttccaatgagtgaattttttcattttgtgttttgcttaaaacggctccttcagggtagatgtcatactgcataacttttttggattcaaattatgaatgagaaattagttaacattctgctccacaaggtaagaaaaactgctctttggctctattttcaaaattacttctgagatgcatatagtctcaaaataacagctttagtaggcatatcacttcttgaaagccaaacatgagtgtaagacacttttatgaaacacggtggatccctaactggctttcaaattgacctttatagccttagacaacccttaggtatttacggagatgacttctttgattgtcataacaattagtggatgtgtccagttctctgtatctttgacttgatgctttatacatcatttcatttgttgcttctaagggaataagccatagaggcttctccaggtttaaaagaacagtaaagtacctggaaaaccaacatttttgaatgtatggacactggacatgagatatgtacaatgaaatcttaaaagaatctaagaatttgccctctttgccccactccacccagtaatttgacattactagtgccatgtataggacccaactgagtattagaatcagttttgactatgtctttgtatttcctaaatcttttaatgcataaaccgaattagggtccagttggcctgttaatggtaaatttacattttaaatgactcagtttgtttttcctgggcgagtttgcaatgtgataatcagattttttaaaactgattaatttgctttcttgtgtgggtgtactcacattttaaagtatgaaccacagttaactagtggtctcaggggtagtgaaacactcacttttttttttgtttgtttttttttgtttgttgaaatggcttagttgaagtatacttaaggtactgatcatgctgtgttagtaatttgggcggggaggggggtaactcagccatgttttgtgttggcataacaaaactgttaatgattgttgattacacttttaagtgaatttgtcttttatgaggaacccagtgcaagtcactaaatattgtctaatagtgacatctgcataagacttgtaatagctgaagttaattgagcttaaaggaattgttaccattaaagtctgtgtttaaagaca

SEQ ID NO: 197593 - DNA, 604 bp, Homo sapiens
  Payload ID: 18967
  Gene Name: ubiquitin-conjugating enzyme E2D 3
  ENST ID: ENST00000508249
  CDS Start-End: 458-604
gcattttggaggcggaaccccgtcaggaaaagcgcacaaaactgctcttaagtcattgcagagctaccgcttcggttagccagccacgaagttctcgcgagagtcgtctcctcgataccaaaggccgggaagttaaacttgtagccaccacctccgctcttcccgtcaccctcgcccccacttcgggccgaaagcacggtacagaggctgttggtggctttgccacgccaccccacccaccccggatcgcggctgtcttaagggacctggattcatcaggggctcttcggggcctgtgcgagtgctgatctgctccgtttttgcaaaaggcgcctgtgtctggcagagctggtgtgagacgagacaatcctgccccgccgccgggataatcaagagttttggccggacctttgagcatacaccgagagagtgaggagccagacgacaagcacacactatggcgctgaaacggattaataaggaacttagtgatttggcccgtgaccctccagcacaatgttctgcaggtccagttggggatgatatgtttcattggcaagccacaattatgggacctaatgacagcccatatcaaggcggtgta

SEQ ID NO: 197594 - DNA, 680 bp, Homo sapiens
  Payload ID: 18967
  Gene Name: ubiquitin-conjugating enzyme E2D 3
  ENST ID: ENST00000502563
  CDS Start-End: 360-467
cacccgggtctcttcctttctagaggccgggaagttaaacttgtagccaccacctccgctcttcccgtcaccctcgcccccacttcgggccgaaagcacggtacagaggctgttggtggctttgccacgccaccccacccaccccggatcgcggctgtcttaagggacctggattcatcaggggctcttcggggcctgtgcgagtgctgatctgctccgtttttgcaaaaggcgcctgtgtctggcagagctggtgtgagacgagacaatcctgccccgccgccgggataatcaagagttttggccggacctttgagcatacaccgagagagtgaggagccagacgacaagcacacactatggcgctgaaacggattaataaggaacttagtgatttggcccgtgaccctccagcacaatgttctgcaggtccagttggggatgataagttttttttctttttctagtgtttcattggcaagccacaattatgggacctaatgacagcccatatcaaggcggtgtattctttttgacaattcattttcctacagactaccccttcaaaccacctaaggttgcatttacaacaagaatttatcatccaaatattaacagtaatggcagcatttgtctcgatattctaagatcacagtggtcgcctgctttaacaatttcta

SEQ ID NO: 197595 - DNA, 574 bp, Homo sapiens
  Payload ID: 18967
  Gene Name: ubiquitin-conjugating enzyme E2D 3
  ENST ID: ENST00000502404
  CDS Start-End: 202-558
ccttttggctggagagtgggggtggataaggggtgcgatggcagtaagggaaagctaatagggtggagtgtttacagctaacttgaaaaaaatgtcatggaataaattcagccttactagaaaaattgtggagtgtcggaacttagtgatttggcccgtgaccctccagcacaatgttctgcaggtccagttggggatgatatgtttcattggcaagccacaattatgggacctaatgacagcccatatcaaggcggtgtattctttttgacaattcattttcctacagactaccccttcaaaccacctaaggttgcatttacaacaagaatttatcatccaaatattaacagtaatggcagcatttgtctcgatattctaagatcacagtggtcgcctgctttaacaatttctaaagttcttttatccatttgttcactgctatgtgatccaaacccagatgaccccctagtgccagagattgcacggatctataaaacagacagagataagtacaacagaatatctcgggaatggactcagaagtatgccatgtgatgctaccttaaagtca

SEQ ID NO: 197596 - DNA, 582 bp, Homo sapiens
  Payload ID: 18967
  Gene Name: ubiquitin-conjugating enzyme E2D 3
  ENST ID: ENST00000510129
  CDS Start-End: 225-332
gtgtcgtgcgcgtgagccccgtagggccggggaggcaccagctgccgcgcggggaggaggccgaggccgcagcttgagggaggccccggcccctctgcgcctgtgtctggcagagctggtgtgagacgagacaatcctgccccgccgccgggataatcaagagttttggccggacctttgagcatacaccgagagagtgaggagccagacgacaagcacacactatggcgctgaaacggattaataaggaacttagtgatttggcccgtgaccctccagcacaatgttctgcaggtccagttggggatgataagttttttttctttttctagtgtttcattggcaagccacaattatgggacctaatgacagcccatatcaaggcggtgtattctttttgacaattcattttcctacagactaccccttcaaaccacctaaggttgcatttacaacaagaatttatcatccaaatattaacagtaatggcagcatttgtctcgatattctaagatcacagtggtcgcctgctttaacaatttctaaagttcttttatccatttgttcactgctatgtgatcc

SEQ ID NO: 197597 - DNA, 743 bp, Homo sapiens
  Payload ID: 18967
  Gene Name: ubiquitin-conjugating enzyme E2D 3
  ENST ID: ENST00000505307
  CDS Start-End: 254-400
agttccgtcagagcggacatcttgtggctgtgtcgtgcgcgtgagccccgtagggccggggaggcaccagctgccgcgcggggaggaggccgaggccgcagcttgagggaggccccggcccctctgcgcctgtgtctggcagagctggtgtgagacgagacaatcctgccccgccgccgggataatcaagagttttggccggacctttgagcatacaccgagagagtgaggagccagacgacaagcacacactatggcgctgaaacggattaataaggaacttagtgatttggcccgtgaccctccagcacaatgttctgcaggtccagttggggatgatatgtttcattggcaagccacaattatgggacctataagcaactatatgctggataattgaatattcagaattatggataccatctaagaatttcagagaattagagcgcactaaaacatcctgggaatgacagcccatatcaaggcggtgtattctttttgacaattcattttcctacagactaccccttcaaaccacctaaggttgcatttacaacaagaatttatcatccaaatattaacagtaatggcagcatttgtctcgatattctaagatcacagtggtcgcctgctttaacaatttctaaagttcttttatccatttgttcactgctatgtgatccaaacccagatgaccccctagtgccagagattgcacggatctataaaacagacagagataa

SEQ ID NO: 197598 - DNA, 568 bp, Homo sapiens
  Payload ID: 18967
  Gene Name: ubiquitin-conjugating enzyme E2D 3
  ENST ID: ENST00000508974
  CDS Start-End: 203-370
agggccggggaggcaccagctgccgcgcggggaggaggccgaggccgcagcttgagggaggccccggcccctctgcgcctgtgtctggcagagctggtgtgagacgagacaatcctgccccgccgccgggataatcaagagttttggccggacctttgagcatacaccgagagagtgaggagccagacgacaagcacacactatggcgctgaaacggattaataaggaacttagtgatttggcccgtgaccctccagcacaatgttctgcaggtccagttggggatgatatgtttcattggcaagccacaattatgggacctcaaaattcctttctatcctgggtagataagcaactatatgctggataattgaatattcagaattatggataccatctaagaatttcagagaattagagcgcactaaaacatcctgggaatgacagcccatatcaaggcggtgtattctttttgacaattcattttcctacagactaccccttcaaaccacctaaggttgcatttacaacaagaatttatcatccaaatattaacagtaatggcagc

SEQ ID NO: 197599 - DNA, 547 bp, Homo sapiens
  Payload ID: 18967
  Gene Name: ubiquitin-conjugating enzyme E2D 3
  ENST ID: ENST00000508238
  CDS Start-End: 259-547
agcgaggccctcctcggaatctcgtgtgaaggtggccctcctcttgggcctttaacgtctgtagatgctggagaccagcagaaaggatactgtgtgcgatgagataagcatgtgagaatgctttctaaccgaaagtgcctttcaaaaagctggtgtgagacgagacaatcctgccccgccgccgggataatcaagagttttggccggacctttgagcatacaccgagagagtgaggagccagacgacaagcacacactatggcgctgaaacggattaataaggaacttagtgatttggcccgtgaccctccagcacaatgttctgcaggtccagttggggatgatatgtttcattggcaagccacaattatgggacctaatgacagcccatatcaaggcggtgtattctttttgacaattcattttcctacagactaccccttcaaaccacctaaggttgcatttacaacaagaatttatcatccaaatattaacagtaatggcagcatttgtctcgatattctaagatcacagtggtcgcctgctt

SEQ ID NO: 197600 - DNA, 593 bp, Homo sapiens
  Payload ID: 18967
  Gene Name: ubiquitin-conjugating enzyme E2D 3
  ENST ID: ENST00000514755
  CDS Start-End: 217-363
gcacaaaactgctcttaagtcattgcagagctaccgcttcggttagccagccacgaagttctcgcgagagtcgtctcctcgataccaagcgcctgtgtctggcagagctggtgtgagacgagacaatcctgccccgccgccgggataatcaagagttttggccggacctttgagcatacaccgagagagtgaggagccagacgacaagcacacactatggcgctgaaacggattaataaggaacttagtgatttggcccgtgaccctccagcacaatgttctgcaggtccagttggggatgatatgtttcattggcaagccacaattatgggacctataagcaactatatgctggataattgaatattcagaattatggataccatctaagaatttcagagaattagagcgcactaaaacatcctgggaatgacagcccatatcaaggcggtgtattctttttgacaattcattttcctacagactaccccttcaaaccacctaaggttgcatttacaacaagaatttatcatccaaatattaacagtaatggcagcatttgtctcgatattctaagatcacagtggtcgcct

SEQ ID NO: 197601 - DNA, 662 bp, Homo sapiens
  Payload ID: 18967
  Gene Name: ubiquitin-conjugating enzyme E2D 3
  ENST ID: ENST00000503418
  CDS Start-End: 373-519
gagcctaagggtttccgccactcgttcaccctccccccagctcatgatcctcctccctcccccgccctcctggtccaatctccgatctgtttagtaagaaggtgctgttccgagaagaaggaaaagggcttgacacgtattcactcggccccggacgtgggaagcaagccgtctggcttcggcctcacatcggtcttgtgctcgggacggcggcgttggcggactgatccgcggcggtgaagaggcgcctgtgtctggcagagctggtgtgagacgagacaatcctgccccgccgccgggataatcaagagttttggccggacctttgagcatacaccgagagagtgaggagccagacgacaagcacacactatggcgctgaaacggattaataaggaacttagtgatttggcccgtgaccctccagcacaatgttctgcaggtccagttggggatgatatgtttcattggcaagccacaattatgggacctataagcaactatatgctggataattgaatattcagaattatggataccatctaagaatttcagagaattagagcgcactaaaacatcctgggaatgacagcccatatcaaggcggtgtattctttttgacaattcattttcctacagactaccccttcaaaccacctaag

SEQ ID NO: 197602 - DNA, 577 bp, Homo sapiens
  Payload ID: 18967
  Gene Name: ubiquitin-conjugating enzyme E2D 3
  ENST ID: ENST00000507845
  CDS Start-End: 191-547
cttttccttttggctggagagtgggggtggataaggggtgcgatggcaagggtggagtgtttacagctaacttgaaaaaaatgtcatggaataaattcagccttactagaaaaattgtggagtgtcggaacttagtgatttggcccgtgaccctccagcacaatgttctgcaggtccagttggggatgatatgtttcattggcaagccacaattatgggacctaatgacagcccatatcaaggcggtgtattctttttgacaattcattttcctacagactaccccttcaaaccacctaaggttgcatttacaacaagaatttatcatccaaatattaacagtaatggcagcatttgtctcgatattctaagatcacagtggtcgcctgctttaacaatttctaaagttcttttatccatttgttcactgctatgtgatccaaacccagatgaccccctagtgccagagattgcacggatctataaaacagacagagataagtacaacagaatatctcgggaatggactcagaagtatgccatgtgatgctaccttaaagtcagaataacctgcatt

SEQ ID NO: 197603 - DNA, 601 bp, Homo sapiens
  Payload ID: 18967
  Gene Name: ubiquitin-conjugating enzyme E2D 3
  ENST ID: ENST00000508476
  CDS Start-End: 385-601
gctctaacttctatcccgcattttaagatggcggctgctttaactggttcaggctctttccggcatctcctttcgtaataatgtgaattaatatgatttgttaaatgttaacttttatatcgcgttgtgcactgctctaagatcctctgctcaaaacttacctaaattcaaactcttaaactgtatttcccttttttgtgacttgtatttgtgtgatgtgtttggttgttgcacaatcgaagagggtggagtgtttacagctaacttgaaaaaaatgtcatggaataaattcagccttactagaaaaattgtggagtgtcggaacttagtgatttggcccgtgaccctccagcacaatgttctgcaggtccagttggggatgatatgtttcattggcaagccacaattatgggacctaatgacagcccatatcaaggcggtgtattctttttgacaattcattttcctacagactaccccttcaaaccacctaaggttgcatttacaacaagaatttatcatccaaatattaacagtaatggcagcatttgtctcgatattctaagatcacagtggtcgcctgctttaacaatttctaaag

SEQ ID NO: 197604 - DNA, 599 bp, Homo sapiens
  Payload ID: 18967
  Gene Name: ubiquitin-conjugating enzyme E2D 3
  ENST ID: ENST00000502690
  CDS Start-End: 365-599
acaaaactgctcttaagtcattgcagagctaccgcttcggttagccagccacgaagttctcgcgagagtcgtctcctcgataccaataagaaggtgctgttccgagaagaaggaaaagggcttgacacgtattcactcggccccggacgtgggaagcaagccgtctggcttcggcctcacatcggtcttgtgctcgggacggcggcgttggcggactgatccgcggcggtgaagaggcgcctgtgtctggcagagctggtgtgagacgagacaatcctgccccgccgccgggataatcaagagttttggccggacctttgagcatacaccgagagagtgaggagccagacgacaagcacacactatggcgctgaaacggattaataaggaacttagtgatttggcccgtgaccctccagcacaatgttctgcaggtccagttggggatgatatgtttcattggcaagccacaattatgggacctaatgacagcccatatcaaggcggtgtattctttttgacaattcattttcctacagactaccccttcaaaccacctaaggttgcatttacaacaagaatttatcatccaaatatta

SEQ ID NO: 197605 - DNA, 527 bp, Homo sapiens
  Payload ID: 18967
  Gene Name: ubiquitin-conjugating enzyme E2D 3
  ENST ID: ENST00000505207
  CDS Start-End: 123-479
ccttttggctggagagtgggggtggataaggggtgcgatggcagtaagggaaagctaatgaacttagtgatttggcccgtgaccctccagcacaatgttctgcaggtccagttggggatgatatgtttcattggcaagccacaattatgggacctaatgacagcccatatcaaggcggtgtattctttttgacaattcattttcctacagactaccccttcaaaccacctaaggttgcatttacaacaagaatttatcatccaaatattaacagtaatggcagcatttgtctcgatattctaagatcacagtggtcgcctgctttaacaatttctaaagttcttttatccatttgttcactgctatgtgatccaaacccagatgaccccctagtgccagagattgcacggatctataaaacagacagagataagtacaacagaatatctcgggaatggactcagaagtatgccatgtgatgctaccttaaagtcagaataacctgcattatagctggaataaacttt

SEQ ID NO: 197606 - DNA, 578 bp, Homo sapiens
  Payload ID: 18967
  Gene Name: ubiquitin-conjugating enzyme E2D 3
  ENST ID: ENST00000504211
  CDS Start-End: 129-485
gcattttaagatggcggctgctttaactggttcaggctctttccggcatctcctttcgtaataatgaacttagtgatttggcccgtgaccctccagcacaatgttctgcaggtccagttggggatgatatgtttcattggcaagccacaattatgggacctaatgacagcccatatcaaggcggtgtattctttttgacaattcattttcctacagactaccccttcaaaccacctaaggttgcatttacaacaagaatttatcatccaaatattaacagtaatggcagcatttgtctcgatattctaagatcacagtggtcgcctgctttaacaatttctaaagttcttttatccatttgttcactgctatgtgatccaaacccagatgaccccctagtgccagagattgcacggatctataaaacagacagagataagtacaacagaatatctcgggaatggactcagaagtatgccatgtgatgctaccttaaagtcagaataacctgcattatagctggaataaactttaaattactgttccttttttgattttcttatccggctgctccccta

SEQ ID NO: 197607 - DNA, 587 bp, Homo sapiens
  Payload ID: 18967
  Gene Name: ubiquitin-conjugating enzyme E2D 3
  ENST ID: ENST00000508635
  CDS Start-End: 127-186
attttaagatggcggctgctttaactggttcaggctctttccggcatctcctttcgtaataatgaacttagtgatttggcccgtgaccctccagcacaatgttctgcaggtccagttggggatgatatgtttcattggcaagccacaattatgggacctataagcaactatatgctggataattgaatattcagaattatggataccatctaagaatttcagagaattagagcgcactaaaacatcctgggaatgacagcccatatcaaggcggtgtattctttttgacaattcattttcctacagactaccccttcaaaccacctaaggttgcatttacaacaagaatttatcatccaaatattaacagtaatggcagcatttgtctcgatattctaagatcacagtggtcgcctgctttaacaatttctaaagttcttttatccatttgttcactgctatgtgatccaaacccagatgaccccctagtgccagagattgcacggatctataaaacagacagagataagtacaacagaatatctcgggaatggactcagaagtatgccatgtgatgctaccttaaa

SEQ ID NO: 197608 - DNA, 3472 bp, Homo sapiens
  Payload ID: 18967
  Gene Name: ubiquitin-conjugating enzyme E2D 3
  ENST ID: ENST00000618836
  CDS Start-End: 1-447
atgctgagtttaaaaaaaaaaaaaaaggaacttagtgatttggcccgtgaccctccagcacaatgttctgcaggtccagttggggatgatatgtttcattggcaagccacaattatgggacctaatgacagcccatatcaaggcggtgtattctttttgacaattcattttcctacagactaccccttcaaaccacctaaggttgcatttacaacaagaatttatcatccaaatattaacagtaatggcagcatttgtctcgatattctaagatcacagtggtcgcctgctttaacaatttctaaagttcttttatccatttgttcactgctatgtgatccaaacccagatgaccccctagtgccagagattgcacggatctataaaacagacagagataagtacaacagaatatctcgggaatggactcagaagtatgccatgtgatgctaccttaaagtcagaataacctgcattatagctggaataaactttaaattactgttccttttttgattttcttatccggctgctcccctatcagacctcatcttttttaattttattttttgtttacctccctccattcattcacatgctcatctgagaagacttaagttcttccagctttggacaataactgcttttagaaactgtaaagtagttacaagagaacagttgcccaagactcagaatttttaaaaaaaaaaatggagcatgtgtattatgtggccaatgtcttcactctaacttggttatgagactaaaaccattcctcactgctctaacatgctgaagaaatcatctgagggggagggagatggatgctcagttgtcacatcaaaggatacagcattattctagcagcatccattcttgtttaagccttccactgttagagatttgaggttacatgatatgctttatgctcataactgatgtggctggagaattggtattgaatttatagcatcagcagaacagaaaatgtgatgtattttatgcatgtcaataaaggaatgacctgttcttgttctacagagaatggaaattggaagtcaaacaccctttgtattccaaaatagggtctcaaacattttgtaattttcatttaaattgttaggaggcttggagctattagttaatctatcttccaatacactgtttaatatagcactgaataaatgatgcaagttgtcaatggatgagtgatcaactaatagctctgctagtaattgatttatttttcttcaataaagttgcataaaccaatgagttagctgcctggattaatcagtatgggaaacaatcttttgtaaatgcaaagctgttttttgtatatactgttgggatttgcttcattgtttgacatcaaatgatgatgtaaagttcgaaagagtgaatattttgccatgttcagttaaagtgcacagtctgttacaggttgacacattgcttgacctgatttatgcagaattaataagctatttggatagtgtagctttaatgtgctgcacatgatactggcagccctagagttcatagatggacttttgggacccagcagttttgaaatgtgtttatggagtttaagaaatttattttccaggtgcagcccctgtctaactgaaatttctcttcaccttgtacacttgacagctgaaaaaaaacaacatgggagtaataatgggtcaaaatttgcaaaataaagtactgttttggtgtgggagttgtcatgaggctgtgttgaagtgacttatctatgtgggatattgagtatccattgaaatggatttgttcagccatttacattaatgagcatttaaatgcaacagatatcatttcaggtgacttaacatgaatgaataaaagtcaatgctattggattgttttttgtttgacaagtgctatctgtgccactgatttaacttctgtagtaacaagggcattaccattcttcacctttcctaattctgatcccatagttttacatttttcctgtttattttgattttgttcactgctttatttcttaaagttctagcacatctgtgactcctccacttccacatttttgcactgcttacacttacgtgcaatcttattccttgtctgcacacacatgtggaaagctagaaataaatgttaaaacttactttttataaacattttaatatgtagtttggacatgatttattgacttaaggttcttctctaaactggaagtgaaatgcatgccttctgaagatgttctggctttgttaattctgtaatcatttcattggggaaaaaaccagctacgcagtttttccaatgagtgaattttttcattttgtgttttgcttaaaacggctccttcagggtagatgtcatactgcataacttttttggattcaaattatgaatgagaaattagttaacattctgctccacaaggtaagaaaaactgctctttggctctattttcaaaattacttctgagatgcatatagtctcaaaataacagctttagtaggcatatcacttcttgaaagccaaacatgagtgtaagacacttttatgaaacacggtggatccctaactggctttcaaattgacctttatagccttagacaacccttaggtatttacggagatgacttctttgattgtcataacaattagtggatgtgtccagttctctgtatctttgacttgatgctttatacatcatttcatttgttgcttctaagggaataagccatagaggcttctccaggtttaaaagaacagtaaagtacctggaaaaccaacatttttgaatgtatggacactggacatgagatatgtacaatgaaatcttaaaagaatctaagaatttgccctctttgccccactccacccagtaatttgacattactagtgccatgtataggacccaactgagtattagaatcagttttgactatgtctttgtatttcctaaatcttttaatgcataaaccgaattagggtccagttggcctgttaatggtaaatttacattttaaatgactcagtttgtttttcctgggcgagtttgcaatgtgataatcagattttttaaaactgattaatttgctttcttgtgtgggtgtactcacattttaaagtatgaaccacagttaactagtggtctcaggggtagtgaaacactcacttttttttttgtttgtttttttttgtttgttgaaatggcttagttgaagtatacttaaggtactgatcatgctgtgttagtaatttgggcggggaggggggtaactcagccatgttttgtgttggcataacaaaactgttaatgattgttgattacacttttaagtgaatttgtcttttatgaggaacccagtgcaagtcactaaatattgtctaatagtgacatctgcataagacttgtaatagctgaagttaattgagcttaaaggaattgttaccattaaagtctgtgttt

SEQ ID NO: 197609 - DNA, 3974 bp, Homo sapiens
  Payload ID: 18968
  Gene Name: ubiquitin-conjugating enzyme E2D 4 (putative)
  Uniprot ID: Q9Y2X8
  ENST ID: ENST00000222402
  CDS Start-End: 90-533
cggcgtgcagcttggtggcggctgagccggcagcgggccgcctcaggcagccccggccgggccgcccgggtccccggcagcggggtaggatggcgctaaagcggatccagaaggaattaaccgacttgcagagggatcctcctgcccagtgttctgcaggacctgtcggtgatgacttgttccactggcaggccaccatcatgggcccgaatgacagtccttaccaaggaggtgttttcttcctgaccatccactttcctacagattacccgttcaagcccccaaaggttgctttcacaaccaaaatttatcaccctaatatcaacagcaatggcagcatctgccttgatatcctgcggtctcagtggtctccagcgttgactgtgtcaaaagttctcttgtccatctgctcgctgctctgcgaccccaaccccgatgaccccctggtgccagagatagcacacacctacaaggccgacagagagaagtacaacagactagcaagagagtggacacaaaaatatgctatgtaagtgccttggaggttttacatgagacactgtccaagagaagctggcagagaggtcttcccttaaaactttgggctgttggctgagccattcaaagagcatcatctgttcttcaaacaaatgttggtcacccactctctccagctgcagcatgttggtgccattttcagcaattacggctttgacagtgccacctctttgatgccaaatcagcaaccattgttgttatgatctgcagtcttcctggtgacactggaatctctctctctgccgcctcagtttgtctgctggtctcttggggggccaggccctgcacgtctctcctacccggcctcaaatggtgctgctgcccatgatggtaccacaccagggcctcagcctggcccctcaccacataccctttgccttttagaactcagtgccatcctgggtgcccagggcagagcaggctttgttcgcacctcatctgctgcagaaccacatcctgaggagtctcagcttatcctggagggaattgggaacagtgtcactgggaagtgaaggcctagccctgtggcttccaccagtctcctcctgcagtgccacgtggtggcatttctcgcctcacaccaagaagcagcaagtggaaaatttcaggatacaaagcacataacaccccataagagatgattatgtttttagaagcaagagcaaaattatgaaacctctagagatttgggtcatgttactccatttgatgaagattctcactaccgcccgctcctcccataggagcctacactaagtccaagtgtgagccattcacagactagaacacaaggagggagagagactcttaaacgtaaataaaaatgcaattcactcacaactctaaatgataattgacatttcagcctctttcttttaggcaaaacagaagatacacactattaacagttatttgaagccttaaattacaatagcctgttaggtgatcggctttctgccttggctttctgatgcagcacattttaagatttgcctttaaagctttgagccttgagattaggttagttaggaagaggacaacaaagggaagagattattctaataaaacttccacagagggaagaaaattgaggagcttcagatctctaaagccaaattcaacctgatctttctaggttggttataaagctggtccacttccaggaagtgatgtgtaggtgaataggaacaaaaggtgaagaagcagtaaaactgtgaccaagtggccagatggggcttttgccggctgattgaaaggaagtctacagacctaacataagcagtcagccaaaggtggctgtgggaggttgatttcttccagaaacttccaagttgtggctacaaatttattgccagatattttcccactgagaatactgaggttattcacataatcacttccttaacaaaggaagaagcacttttaacttgggctgcattccctttgtgagggtccacatttaggatcctcctgctaccataaggccccttttggggttctttgggtgtggctgcatctcaccatgttgaggattgccttttttttttttttttttttttttttttaacacagagccttgctctgtctcccaggctggagtgcagtggtgcgatcttggctcactgcaacctctgcctcccaggttcaagcaattctcctgcctcagcctcccaagtagccggaattacaggcatgtgccaccatgctgggctaatttttgtatttttagtggagacggtgtttcaccatgttggccaggctgttcttgaactcctggcctcaagtgacccgcccacattggcctcccaaagtgctgggattacaggcgtgagcccccgtgcccagcaaggattgctgttttaattcttgtatcttcgttgcttctttggtctttgcttaaacaaaacaataaagcttaatagttggggagaatgctgttaccagtgtcctctaggaaggctgttagcatatggctctactgagcagcagtgccatctggtgcctgagatcatgtgcttcaggcagttgtcacactgcatctacagccaagcatcacagaaacacttcactcatgtggtcagggaaggtgggactgattcacatgttagagacaggtcagatgggaaaattaaggcccaacttggtgttggggaataaccatactctggtctttcaagtgtagtagctgatgattcccaagaaactgatgaattttctgagtccagacaaaatttccccaagcctgctctctctgttggatatacataatagagaaagtcaaatcagccctttggggtttgtggtaaaaattcactcacccattgaagcctaaggtggctttgtaccttccagatctctcagcaaatcccctgggcagaaatgtcacctgcttgccatgtctttgaggggttcaggtcagcctggagaacaggctccttaggtcaaaaaccttgttttaagagccactgtggtacagtcaatgtaacccacttgtgcagaagccatgcttccaaggaaggtctcaggttgacaactagacatcaaatctgagaagccaactgtggagtaatgtgtttttttctctgtggacaagagtgatcagaaaggtgcttgatcttgaacaattgatccatgatgaaaaaatgaccattagctctcccccagaagcgtctgtgtttgctgaatggagctgagattttgatccgctatcagactccagaaagatccaggagttccaagaacatggcaaagagtcaaaatcttaggacaaggaattaaaatgccagaatgcaaatgtccaacaggcctggtagctcacagctatcaacaccctagaattccacactgcctcactgcagttgctcaaggatgggtatgtttctgtctctgaaattcgggaaaaagccttaagtgccagagaaggtgcttccaagactgtctgcagaattcctttcctagggtctgtctctggtacccaaaagggcagagaaggaaccctaagattagcatagagccactcatctctcctcccctccccaccccttcttcccctgcttccattccccatggctctctcctctgactgtgaaacacttcctctccagcagtgttgggaaagttctggacctctactggatctagccataaatggtggtcttcagaaaaatggagattgtggctgccagcacccacaagacagcagcctcatgccatgcaggcagcaagccatcctgaacagcgttcctcccagagtctgtttcctcacctgctgttcactggtgagaggaaaagggacttgttctcccttgaccagttttctagttttcctgttcccaccctggtctttgcctgatgacagagaaactttctaaaaaaaaacaaaaacaaaagctataaaaaatctgcaaaacacccta

SEQ ID NO: 197610 - DNA, 849 bp, Homo sapiens
  Payload ID: 18968
  Gene Name: ubiquitin-conjugating enzyme E2D 4 (putative)
  ENST ID: ENST00000450743
  CDS Start-End: 96-224
ggctcccggcgtgcagcttggtggcggctgagccggcagcgggccgcctcaggcagccccggccgggccgcccgggtccccggcagcggggtaggatggcgctaaagcggatccagaaggctgtacaagaagcatggtgccagcatctgcttctggtgaggcctcaggaagcttacaatcatggcagaaagcaaaggagaagcaggcgtgtcacctggaattaaccgacttgcagagggatcctcctgcccagtgttctgcaggacctgtcggtgatgacttgttccactggcaggccaccatcatgggcccgaatgacagtccttaccaaggaggtgttttcttcctgaccatccactttcctacagattacccgttcaagcccccaaaggttgctttcacaaccaaaatttatcaccctaatatcaacagcaatggcagcatctgccttgatatcctgcggtctcagtggtctccagcgttgactgtgtcaaaagttctcttgtccatctgctcgctgctctgcgaccccaaccccgatgaccccctggtgccagagatagcacacacctacaaggccgacagagagaagtacaacagactagcaagagagtggacacaaaaatatgctatgtaagtgccttggaggttttacatgagacactgtccaagagaagctggcagagaggtcttcccttaaaactttgggctgttggctgagccattcaaagagcatcatctgttcttcaaacaaatgttggtcacccactctctccagctgcagcatgttggtgccattttcagcaattacggctttgacagtgccacctctttgatgccaaatcagca

SEQ ID NO: 197611 - DNA, 783 bp, Homo sapiens
  Payload ID: 18968
  Gene Name: ubiquitin-conjugating enzyme E2D 4 (putative)
  ENST ID: ENST00000446008
  CDS Start-End: 18-386
cccggcagcggggtaggatggcgctaaagcggatccagaaggaattaaccgacttgcagagggatcctcctgcccagtgttctgcaggacctgtcggtgatgacttgttccactggcaggccaccatcatgggcccgaatgacagtccttaccaaggaggtgttttcttcctgaccatccactttcctacagattacccgttcaagcccccaaaggttgctttcacaaccaaaatttatcaccctaatatcaacagcaatggcagcatctgccttgatatcctgcggtctcagtggtctccagcgttgactgtgtcaaaaggtagagatgctgatggcatgctctgtgtgctcttttacacatgtttttaccccagcactgactgagtggaaatggaagctcagagaaagaagtcacctttcccaggtcacatagccctgtccactgctgtgcccttaagtggatatccttacacgcctacgaggcagcaccagcagaactttgtgccccgctccctggcgcttctcagcagtcaattgccctggtgtgctcaagactgtcacatgggtgcaagaagaaaatactgattctacttatatttttttatccaaaaataagaaaggcaaatattacattaccttctctgttccctcatttattcatctaataagcacaaaacggactgtgagtcagccctgaaggaagatacagggcatgcctccgggggcctcgaagttggtggagaaatcctcccttcccaaaataaatgatgttgagcacatg

SEQ ID NO: 197612 - DNA, 789 bp, Homo sapiens
  Payload ID: 18968
  Gene Name: ubiquitin-conjugating enzyme E2D 4 (putative)
  ENST ID: ENST00000454350
  CDS Start-End: 92-211
cccggcgtgcagcttggtggcggctgagccggcagcgggccgcctcaggcagccccggccgggccgcccgggtccccggcagcggggtaggatggcgctaaagcggatccagaaggaattaaccgacttgcagagggatcctcctgcccagtgttctgcaggacctgtcggtgatgactgttgctttcacaaccaaaatttatcaccctaatatcaacagcaatggcagcatctgccttgatatcctgcggtctcagtggtctccagcgttgactgtgtcaaaagttctcttgtccatctgctcgctgctctgcgaccccaaccccgatgaccccctggtgccagagatagcacacacctacaaggccgacagagagaagtacaacagactagcaagagagtggacacaaaaatatgctatgtaagtgccttggaggttttacatgagacactgtccaagagaagctggcagagaggtcttcccttaaaactttgggctgttggctgagccattcaaagagcatcatctgttcttcaaacaaatgttggtcacccactctctccagctgcagcatgttggtgccattttcagcaattacggctttgacagtgccacctctttgatgccaaatcagcaaccattgttgttatgatctgcagtcttcctggtgacactggaatctctctctctgccgcctcagtttgtctgctggtctcttggggggccaggccctgcacgtctctcctacccggcctcaaatggtgctgctgcccatgatggtaccacac

SEQ ID NO: 197613 - DNA, 743 bp, Homo sapiens
  Payload ID: 18968
  Gene Name: ubiquitin-conjugating enzyme E2D 4 (putative)
  ENST ID: ENST00000443780
  CDS Start-End: 90-218
cggcgtgcagcttggtggcggctgagccggcagcgggccgcctcaggcagccccggccgggccgcccgggtccccggcagcggggtaggatggcgctaaagcggatccagaaggctgtacaagaagcatggtgccagcatctgcttctggtgaggcctcaggaagcttacaatcatggcagaaagcaaaggagaagcaggcgtgtcacctggaattaaccgacttgcagagggatcctcctgcccagtgttctgcaggacctgtcggtgatgacttgttccactggcaggccaccatcatgggcccgaatgacagtccttaccaaggaggtgttttcttcctgaccatccactttcctacagattacccgttcaagcccccaaaggttgctttcacaaccaaaatttatcaccctaatatcaacagcaatggcagcatctgccttgatatcctgcggtctcagtggtctccagcgttgactgtgtcaaaaggtagagatgctgatggcatgctctgtgtgctcttttacacatgtttttaccccagcactgactgagtggaaatggaagctcagagaaagaagtcacctttcccaggtcacatagccctgtccactgctgtgcccttaagtggatatccttacacgcctacgaggcagcaccagcagaactttgtgccccgctccctggcgcttctcagcagtcaattgccctggtgtgctcaagactgtcacatgggtgcaa

SEQ ID NO: 197614 - DNA, 1040 bp, Homo sapiens
  Payload ID: 18968
  Gene Name: ubiquitin-conjugating enzyme E2D 4 (putative)
  ENST ID: ENST00000440899
  CDS Start-End: 64-192
ccggcagcgggccgcctcaggcagccccggccgggccgcccgggtccccggcagcggggtaggatggcgctaaagcggatccagaaggctgtacaagaagcatggtgccagcatctgcttctggtgaggcctcaggaagcttacaatcatggcagaaagcaaaggagaagcaggcgtgtcacctggaattaaccgacttgcagagggatcctcctgcccagtgttctgcaggacctgtcggtgatgacttgttccactggcaggccaccatcatgggcccgaatgacagtccttaccaaggaggtgttttcttcctgaccatccactttcctacagattacccgttcaagcccccaaagagtttcgctcttgttgcccaggatggagtgcaatggcgtgatctcggctcaccgcaacatccacctcccaggttgctttcacaaccaaaatttatcaccctaatatcaacagcaatggcagcatctgccttgatatcctgcggtctcagtggtctccagcgttgactgtgtcaaaagttctcttgtccatctgctcgctgctctgcgaccccaaccccgatgaccccctggtgccagagatagcacacacctacaaggccgacagagagaagtacaacagactagcaagagagtggacacaaaaatatgctatgtaagtgccttggaggttttacatgagacactgtccaagagaagctggcagagaggtcttcccttaaaactttgggctgttggctgagccattcaaagagcatcatctgttcttcaaacaaatgttggtcacccactctctccagctgcagcatgttggtgccattttcagcaattacggctttgacagtgccacctctttgatgccaaatcagcaaccattgttgttatgatctgcagtcttcctggtgacactggaatctctctctctgccgcctcagtttgtctgctggtctcttggggggccaggccctgcacgtctctcctacccggcctcaaatggtgctgctgcccatgatggtaccacac

SEQ ID NO: 197615 - DNA, 288 bp, Homo sapiens
  Payload ID: 18968
  Gene Name: ubiquitin-conjugating enzyme E2D 4 (putative)
  ENST ID: ENST00000454428
  CDS Start-End: 44-172
gcagccccggccgggccgcccgggtccccggcagcggggtaggatggcgctaaagcggatccagaaggctgtacaagaagcatggtgccagcatctgcttctggtgaggcctcaggaagcttacaatcatggcagaaagcaaaggagaagcaggcgtgtcacctggaattaaccgacttgcagagggatcctcctgcccagtgttctgcaggacctgtcggtgatgactgttgctttcacaaccaaaatttatcaccctaatatcaacagcaatggcagcatctgcct

SEQ ID NO: 197616 - DNA, 921 bp, Homo sapiens
  Payload ID: 18968
  Gene Name: ubiquitin-conjugating enzyme E2D 4 (putative)
  ENST ID: ENST00000415051
  CDS Start-End: 44-268
gcagccccggccgggccgcccgggtccccggcagcggggtaggatggcgctaaagcggatccagaaggaattaaccgacttgcagagggatcctcctgcccagtgttctgcaggacctgtcggtgatgacttgttccactggcaggccaccatcatgggcccgaatgacagtccttaccaaggaggtgttttcttcctgaccatccactttcctacagattacccgttcaagcccccaaaggtgaggtccctctcccaactcccctgatgtttggatgaaggacagcatgtgacaaggggcccttcaagtcaggttgctttcacaaccaaaatttatcaccctaatatcaacagcaatggcagcatctgccttgatatcctgcggtctcagtggtctccagcgttgactgtgtcaaaagttctcttgtccatctgctcgctgctctgcgaccccaaccccgatgaccccctggtgccagagatagcacacacctacaaggccgacagagagaagtacaacagactagcaagagagtggacacaaaaatatgctatgtaagtgccttggaggttttacatgagacactgtccaagagaagctggcagagaggtcttcccttaaaactttgggctgttggctgagccattcaaagagcatcatctgttcttcaaacaaatgttggtcacccactctctccagctgcagcatgttggtgccattttcagcaattacggctttgacagtgccacctctttgatgccaaatcagcaaccattgttgttatgatctgcagtcttcctggtgacactggaatctctctctctgccgcctcagtttgtctgctggtctcttggggggccaggccctgcacgtctctcctacccggcctcaaatggtgctgctgcccatgatggtaccac

SEQ ID NO: 197617 - DNA, 478 bp, Homo sapiens
  Payload ID: 18968
  Gene Name: ubiquitin-conjugating enzyme E2D 4 (putative)
  ENST ID: ENST00000473007
  CDS Start-End: 1-96
gaattaaccgacttgcagagggatcctcctgcccagtgttctgcaggacctgtcggtgatgactgttgctttcacaaccaaaatttatcaccctaatatcaacagcaatggcagcatctgccttgatatcctgcggtctcagtggtctccagcgttgactgtgtcaaaaggtacaacagactagcaagagagtggacacaaaaatatgctatgtaagtgccttggaggttttacatgagacactgtccaagagaagctggcagagaggtcttcccttaaaactttgggctgttggctgagccattcaaagagcatcatctgttcttcaaacaaatgttggtcacccactctctccagctgcagcatgttggtgccattttcagcaattacggctttgacagtgccacctctttgatgccaaatcagcaaccattgttgttatgatctgcagtcttcctggtgacactggaatctctct

SEQ ID NO: 197618 - DNA, 1511 bp, Homo sapiens
  Payload ID: 18969
  Gene Name: ubiquitin-conjugating enzyme E2E 1
  Uniprot ID: P51965
  ENST ID: ENST00000306627
  CDS Start-End: 220-801
ggcggcggcggaggagtggtgtgtgtgcgagcgtgtgtggctgggggaagccattgcctgtttaatagttgctgttgctgcacttccgcttctctcccagcgagagagagacacgagtggccaggcccagccgcagccgcagcagcagccgccgcggcggcacggaggagccagacacaaagagaggggctgtttgcggggtggggtggggggttcgctatgtcggatgacgattcgagggccagcaccagctcctcctcatcttcgtcttccaaccagcaaaccgagaaagaaacaaacacccccaagaagaaggagagtaaagtcagcatgagcaaaaactccaaactcctctccaccagcgccaagagaattcagaaggagctggcggacatcactttagaccctccacctaattgcagtgctggtcccaaaggcgataacatctatgaatggagatcaaccattctagggcctccaggatccgtgtatgagggtggtgtattctttctcgatatcacttttacaccagaatatcccttcaagcctccaaaggttacatttcggacaagaatctatcattgtaatattaacagtcaaggtgttatttgcttggacatattgaaagataattggagtccagcactaaccatttctaaagtcctcctttctatctgctcacttcttacagactgtaatcctgccgaccccttggtgggaagtattgccactcagtatatgaccaacagagcagaacatgacagaatggccagacagtggaccaagagatacgctacataaattggggtttcacaattcttacattatttgtctgtcacagaagagagctgcttatgattttgaaggggtcagggagggtgggagttggtaaagagtagggtatttctataacagatattattcagtcttatttcctaagattttgttgtaacttaaggtatcttgctacagtagacagaattggtaatagcaacttttaaaattgtcattagttctgcaatattagctgaaatgtagtacagaaaagaatgtacatttagacatttgggttcagttgcttgtagtctgtaaatttaaaacagcttaatttggtacaggttacacatatggccatttatgtaaagtccctctaagactacatactttttgtttaaaacaaaattggaatttgttttcccttcttggaagggaacattgatatttaacagagtttttagagattgtcatctcatatatataaaatggacacgtggctataaaacaccatataagagatgagtagtgcgttttattttatatgccaatctactttgtttaaaaaaggtctgaatcaggacttgtgaaaacctgtagtgaaataccttaagctgttaactaactgtaaggcgtggaataggagttgctcagtggattggttctatgttgtggactacttaagtctgcatttgttactgtgctaataaacaatattaaaaaccacctaataaaca

SEQ ID NO: 197619 - DNA, 1398 bp, Homo sapiens
  Payload ID: 18969
  Gene Name: ubiquitin-conjugating enzyme E2E 1
  Uniprot ID: P51965
  ENST ID: ENST00000346855
  CDS Start-End: 158-688
taatagttgctgttgctgcacttccgcttctctcccagcgagagagagacacgagtggccaggcccagccgcagccgcagcagcagccgccgcggcggcacggaggagccagacacaaagagaggggctgtttgcggggtggggtggggggttcgctatgtcggatgacgattcgagggccagcaccagctcctcctcatcttcgtcttccaaccagcaaaccgagaaagaaacaaacacccccaagaagaaggagagtaaagtcagcatgagcaaaaactccaaactcctctccaccagcgccaagagtgctggtcccaaaggcgataacatctatgaatggagatcaaccattctagggcctccaggatccgtgtatgagggtggtgtattctttctcgatatcacttttacaccagaatatcccttcaagcctccaaaggttacatttcggacaagaatctatcattgtaatattaacagtcaaggtgttatttgcttggacatattgaaagataattggagtccagcactaaccatttctaaagtcctcctttctatctgctcacttcttacagactgtaatcctgccgaccccttggtgggaagtattgccactcagtatatgaccaacagagcagaacatgacagaatggccagacagtggaccaagagatacgctacataaattggggtttcacaattcttacattatttgtctgtcacagaagagagctgcttatgattttgaaggggtcagggagggtgggagttggtaaagagtagggtatttctataacagatattattcagtcttatttcctaagattttgttgtaacttaaggtatcttgctacagtagacagaattggtaatagcaacttttaaaattgtcattagttctgcaatattagctgaaatgtagtacagaaaagaatgtacatttagacatttgggttcagttgcttgtagtctgtaaatttaaaacagcttaatttggtacaggttacacatatggccatttatgtaaagtccctctaagactacatactttttgtttaaaacaaaattggaatttgttttcccttcttggaagggaacattgatatttaacagagtttttagagattgtcatctcatatatataaaatggacacgtggctataaaacaccatataagagatgagtagtgcgttttattttatatgccaatctactttgtttaaaaaaggtctgaatcaggacttgtgaaaacctgtagtgaaataccttaagctgttaactaactgtaaggcgtggaataggagttgctcagtggattggttctatgttgtggactacttaagtctgcatttgttactgtgctaataaacaatattaaaaaccacctaataaaca

SEQ ID NO: 197620 - DNA, 1166 bp, Homo sapiens
  Payload ID: 18969
  Gene Name: ubiquitin-conjugating enzyme E2E 1
  ENST ID: ENST00000452012
  CDS Start-End: 1-456
agaattcagaaggagctggcggacatcactttagaccctccacctaattgcagtgctggtcccaaaggcgataacatctatgaatggagatcaaccattctagggcctccaggatccgtgtatgagggtggtgtattctttctcgatatcacttttacaccagaatatcccttcaagcctccaaaggcctcagttttctttctaggacaggttacatttcggacaagaatctatcattgtaatattaacagtcaaggtgttatttgcttggacatattgaaagataattggagtccagcactaaccatttctaaagtcctcctttctatctgctcacttcttacagactgtaatcctgccgaccccttggtgggaagtattgccactcagtatatgaccaacagagcagaacatgacagaatggccagacagtggaccaagagatacgctacataaattggggtttcacaattcttacattatttgtctgtcacagaagagagctgcttatgattttgaaggggtcagggagggtgggagttggtaaagagtagggtatttctataacagatattattcagtcttatttcctaagattttgttgtaacttaaggtatcttgctacagtagacagaattggtaatagcaacttttaaaattgtcattagttctgcaatattagctgaaatgtagtacagaaaagaatgtacatttagacatttgggttcagttgcttgtagtctgtaaatttaaaacagcttaatttggtacaggttacacatatggccatttatgtaaagtccctctaagactacatactttttgtttaaaacaaaattggaatttgttttcccttcttggaagggaacattgatatttaacagagtttttagagattgtcatctcatatatataaaatggacacgtggctataaaacaccatataagagatgagtagtgcgttttattttatatgccaatctactttgtttaaaaaaggtctgaatcaggacttgtgaaaacctgtagtgaaataccttaagctgttaactaactgtaaggcgtggaataggagttgctcagtggattggttctatgttgtggactacttaagtctgcatttgttactgtgctaataaacaatattaaaaaccacctaataaaca

SEQ ID NO: 197621 - DNA, 622 bp, Homo sapiens
  Payload ID: 18969
  Gene Name: ubiquitin-conjugating enzyme E2E 1
  ENST ID: ENST00000442670
  CDS Start-End: 182-622
aatgggcctgcagactttgaaaagcgagtggagggcggtgggcggccgcgtgcgcccctggtcaatgccctcctgacagcacccgagttccttatttacactggctgcatggtttgtgtgtttctgttttgtttctctccccctgcaggggctgtttgcggggtggggtggggggttcgctatgtcggatgacgattcgagggccagcaccagctcctcctcatcttcgtcttccaaccagcaaaccgagaaagaaacaaacacccccaagaagaaggagagtaaagtcagcatgagcaaaaactccaaactcctctccaccagcgccaagagaattcagaaggagctggcggacatcactttagaccctccacctaattgcagtgctggtcccaaaggcgataacatctatgaatggagatcaaccattctagggcctccaggatccgtgtatgagggtggtgtattctttctcgatatcacttttacaccagaatatcccttcaagcctccaaaggttacatttcggacaagaatctatcattgtaatattaacagtcaaggtgttatttgcttggacatattgaaagataattggagtccagcactaaccatttctaaa

SEQ ID NO: 197622 - DNA, 1224 bp, Homo sapiens
  Payload ID: 18969
  Gene Name: ubiquitin-conjugating enzyme E2E 1
  Uniprot ID: P51965
  ENST ID: ENST00000424381
  CDS Start-End: 34-516
agtctatccccagtgtgagctagagagcggaccatgaaggaagtgggcagaccccgggaagttagaggacgcccggggaaaagcagaattcagaaggagctggcggacatcactttagaccctccacctaattgcagtgctggtcccaaaggcgataacatctatgaatggagatcaaccattctagggcctccaggatccgtgtatgagggtggtgtattctttctcgatatcacttttacaccagaatatcccttcaagcctccaaaggttacatttcggacaagaatctatcattgtaatattaacagtcaaggtgttatttgcttggacatattgaaagataattggagtccagcactaaccatttctaaagtcctcctttctatctgctcacttcttacagactgtaatcctgccgaccccttggtgggaagtattgccactcagtatatgaccaacagagcagaacatgacagaatggccagacagtggaccaagagatacgctacataaattggggtttcacaattcttacattatttgtctgtcacagaagagagctgcttatgattttgaaggggtcagggagggtgggagttggtaaagagtagggtatttctataacagatattattcagtcttatttcctaagattttgttgtaacttaaggtatcttgctacagtagacagaattggtaatagcaacttttaaaattgtcattagttctgcaatattagctgaaatgtagtacagaaaagaatgtacatttagacatttgggttcagttgcttgtagtctgtaaatttaaaacagcttaatttggtacaggttacacatatggccatttatgtaaagtccctctaagactacatactttttgtttaaaacaaaattggaatttgttttcccttcttggaagggaacattgatatttaacagagtttttagagattgtcatctcatatatataaaatggacacgtggctataaaacaccatataagagatgagtagtgcgttttattttatatgccaatctactttgtttaaaaaaggtctgaatcaggacttgtgaaaacctgtagtgaaataccttaagctgttaactaactgtaaggcgtggaataggagttgctcagtggattggttctatgttgtggactacttaagtctgcatttgttactgtgctaataaacaatattaaaaaccacctaataaa

SEQ ID NO: 197623 - DNA, 585 bp, Homo sapiens
  Payload ID: 18969
  Gene Name: ubiquitin-conjugating enzyme E2E 1
  ENST ID: ENST00000467766
  CDS Start-End: 34-537
agtctatccccagtgtgagctagagagcggaccatgaaggaagtgggcagaccccgggaagttagaggacgcccggggaaaagcagaattcagaaggagctggcggacatcactttagaccctccacctaattgcagtgctggtcccaaaggcgataacatctatgaatggagatcaaccattctagggcctccaggatccgtgtatgagggtggtgtattctttctcgatatcacttttacaccagaatatcccttcaagcctccaaaggttacatttcggacaagaatctatcattgtaatattaacagtcaaggtgttatttgcttggacatattgaaagataattggagtccagcactaaccatttctaaagtcctcctttctatctgctcacttcttacagactgtaatcctggtaaggttcataattctttaccttgttttattcttccttacctgaaaaatacttgtttccaaaagctttcaaaggacaaaactaatttttctgcacaagtttgtgaatacaaaaactaatcggcttttcaaaagaaagttttaatcaagttcagtctactagttgag

SEQ ID NO: 197624 - DNA, 1330 bp, Homo sapiens
  Payload ID: 18970
  Gene Name: ubiquitin-conjugating enzyme E2E 2
  ENST ID: ENST00000335798
  CDS Start-End: 110-388
actttccaggactcaggggcagccacagcgacagccgcgggcagcagcctcaggagccggagctggaacggccgggggcggcggcagcggcggcgctgagggatctaaaatgtccactgaggcacaaagagttgatgacagtccaagcactagtggaggaagttccgatggagatcaacgtgaaagtgttcagcaagaaccagaaagagaacaagttcagcccaagaaaaaggagggaaaaatatccagcaaaaccgctgctaaattgtcaactagtgctaaaagaattcagaaggaacttgcagaaatcacattggaccctcctcccaactgtaggttaccttccgaacaagaatctatcactgtaatattaacagccaaggtgtgatctgtctggacatcttaaaggacaactggagtccggctttaactatttctaaagttctcctctccatctgctcacttcttacagattgcaaccctgctgaccctctggtgggcagcatcgccacacagtacatgaccaacagagcagagcatgaccggatggccagacagtggaccaagcggtacgccacataggggcctgctgcctgccgccccgcgggacctgtgcaagcacattcaccaagtgcatcggtagccctgcccacccctccagacctcggttcttattttcctatttttattaaatttggaaccattttgtgatggtatgttgtccatcttcccatcccagttcttcctgccccccttcctctctcccacgctctcttttatctctcattttattcccttgttgatttctgttaacttgaaagatttgggattttttcccacctcatcatagatgggaacttttgttttcagtgcaaacaatgttggagctgtaatagtaagagctttcttacaaagctttgtattactgtgtggttttgttttttttgttgttgtttatttgattttgatttttttttcttttatgtgatctttgggaaaacacattcagaattatatctcgtttctacttaaatgtagtgcttagggttaattttttgtactgaagtctttattggtgggtgcatgctactgggaacaagtttttgtacaaaagcttcaatcagaatcactgtgcattactgagactctgtttatcactagccttctgtccctcccgcagaagactgttggattgaacaaaataatatgtattttgatttacttaaagtgcttgtaaatttcttagggacctgccacttttgactgtggatcagttgatgtacacttgtattattaaagcactcaataaatcactgtggctgataactgc

SEQ ID NO: 197625 - DNA, 2748 bp, Homo sapiens
  Payload ID: 18970
  Gene Name: ubiquitin-conjugating enzyme E2E 2
  Uniprot ID: Q96LR5
  ENST ID: ENST00000396703
  CDS Start-End: 181-786
gacaggcgtggtcgggtgcgtggtgcgtgggtccggctttcggtgactagacggtccgcaggggacatcccgtccctggggcctccccagtctccctccccctcgcgcctgggcagctctctcccagggcttcggctcgagcctgcgacctgcacggacacccccccctcaggatctaaaatgtccactgaggcacaaagagttgatgacagtccaagcactagtggaggaagttccgatggagatcaacgtgaaagtgttcagcaagaaccagaaagagaacaagttcagcccaagaaaaaggagggaaaaatatccagcaaaaccgctgctaaattgtcaactagtgctaaaagaattcagaaggaacttgcagaaatcacattggaccctcctcccaactgtagtgctggacccaaaggagacaacatttatgaatggaggtcaactatattgggacccccaggatctgtctatgaaggaggggtgttctttcttgacattaccttttcaccagactatccgtttaaaccccctaaggttaccttccgaacaagaatctatcactgtaatattaacagccaaggtgtgatctgtctggacatcttaaaggacaactggagtccggctttaactatttctaaagttctcctctccatctgctcacttcttacagattgcaaccctgctgaccctctggtgggcagcatcgccacacagtacatgaccaacagagcagagcatgaccggatggccagacagtggaccaagcggtacgccacataggggcctgctgcctgccgccccgcgggacctgtgcaagcacattcaccaagtgcatcggtagccctgcccacccctccagacctcggttcttattttcctatttttattaaatttggaaccattttgtgatggtatgttgtccatcttcccatcccagttcttcctgccccccttcctctctcccacgctctcttttatctctcattttattcccttgttgatttctgttaacttgaaagatttgggattttttcccacctcatcatagatgggaacttttgttttcagtgcaaacaatgttggagctgtaatagtaagagctttcttacaaagctttgtattactgtgtggttttgttttttttgttgttgtttatttgattttgatttttttttcttttatgtgatctttgggaaaacacattcagaattatatctcgtttctacttaaatgtagtgcttagggttaattttttgtactgaagtctttattggtgggtgcatgctactgggaacaagtttttgtacaaaagcttcaatcagaatcactgtgcattactgagactctgtttatcactagccttctgtccctcccgcagaagactgttggattgaacaaaataatatgtattttgatttacttaaagtgcttgtaaatttcttagggacctgccacttttgactgtggatcagttgatgtacacttgtattattaaagcactcaataaatcactgtggctgataactgcacttctggtaacccgacatttgctttgtgtcctggtgaccgctgtagccctacgtgcagtgaggcttgtctaattcaattacaggttcaagtgtatttttcatctcaaacctctaatatttctttggagttgagttgcttagcatgtggaatttctccagctgtcagtagcctgatgattttatggttgttatagtaaattgctatcattttacatattgactgggcattctttctgttacagccttctttatcaacaattaaaatatgtaactccaaaaatagccttcttgtgaaagtgaagtctgagctaatcattgtgttcagccactttcaactttatttctctcaaaattgttacagtgattgccctcaagctttgtattgttcatttttgttgttgttgttgttgttgttgctgctcttttttctccatgattttagcaaaagaagtaaactcaactgtattggtcacggtcagcccattcaatgacaagggtgtctgtctggcttcaccttcaggctattttagtgtgcagctataggaggcagaggaaacgtgggtggtgtagtttctaaaacacgctgacttgctgattgataattcagggttattagtgtaacaaagcgtagtggaaactcctactcctgctgcaccatacagttacagaccctaccatactcttggtctcatttaaggaaccattaacaccttcactgctgaaaagcaggatttataagcataagtcatccacctctaaatattttaacatttaaaatgcctgattcaaaagatacagtttttgttgtttttaactagttaaaaataaatcctaagaaaatatatttaaatattgcaaatgccacttctaaaccaaaatacctgagaatattttttgtctttttaataacgattttaccattcattttatttaaaaacatttctcagcatagcagggcactgtatggtctctgatgcactactcaaccctctagttgtagtagagggagccacagacagtacataaatgcattgggcagagctatattccagtgaaactttatttaccaccataggcatgggatttggcccatgggttgtagtttgccaatccctgacacagaccaacatagactgggggctggatgaaaaacaaataacgatgtgtcatttctttctttaacataaaataaattcaatatggtacaacactg

SEQ ID NO: 197626 - DNA, 665 bp, Homo sapiens
  Payload ID: 18970
  Gene Name: ubiquitin-conjugating enzyme E2E 2
  ENST ID: ENST00000452894
  CDS Start-End: 172-665
gcgcactcgcgggtgcgcgcgcggacggccgggcggcggcggctcccggaggtggtggcttcactttccaggactcaggggcagccacagcgacagccgcgggcagcagcctcaggagccggagctggaacggccgggggcggcggcagcggcggcgctgagggatctaaaatgtccactgaggcacaaagagttgatgacagtccaagcactagtggaggaagttccgatggagatcaacgtgaaagtgttcagcaagaaccagaaagagaacaagttcagcccaagaaaaaggagggaaaaatatccagcaaaaccgctgctaaattgtcaactagtgctaaaagaattcagaaggaacttgcagaaatcacattggaccctcctcccaactgtagcaccaacataacactgaaaggaaatgctcattcaattctcaattggatttttggattttggatgcccactagtgctggacccaaaggagacaacatttatgaatggaggtcaactatattgggacccccaggatctgtctatgaaggaggggtgttctttcttgacattaccttttcaccagactatccgtttaaaccccctaaggttaccttccgaacaagaatctatcactgtaatattaacagccaaggtgtgatctgtctgga

SEQ ID NO: 197627 - DNA, 1248 bp, Homo sapiens
  Payload ID: 18970
  Gene Name: ubiquitin-conjugating enzyme E2E 2
  Uniprot ID: Q96LR5
  ENST ID: ENST00000425792
  CDS Start-End: 252-857
gaggagggaggcgcgcggcgccgcatggccgacgtggggctcgcgctctcgcggtctctcccgggcgggcgcgcaggcacgcgcactcgcgggtgcgcgcgcggacggccgggcggcggcggctcccggaggtggtggcttcactttccaggactcaggggcagccacagcgacagccgcgggcagcagcctcaggagccggagctggaacggccgggggcggcggcagcggcggcgctgagggatctaaaatgtccactgaggcacaaagagttgatgacagtccaagcactagtggaggaagttccgatggagatcaacgtgaaagtgttcagcaagaaccagaaagagaacaagttcagcccaagaaaaaggagggaaaaatatccagcaaaaccgctgctaaattgtcaactagtgctaaaagaattcagaaggaacttgcagaaatcacattggaccctcctcccaactgtagtgctggacccaaaggagacaacatttatgaatggaggtcaactatattgggacccccaggatctgtctatgaaggaggggtgttctttcttgacattaccttttcaccagactatccgtttaaaccccctaaggttaccttccgaacaagaatctatcactgtaatattaacagccaaggtgtgatctgtctggacatcttaaaggacaactggagtccggctttaactatttctaaagttctcctctccatctgctcacttcttacagattgcaaccctgctgaccctctggtgggcagcatcgccacacagtacatgaccaacagagcagagcatgaccggatggccagacagtggaccaagcggtacgccacataggggcctgctgcctgccgccccgcgggacctgtgcaagcacattcaccaagtgcatcggtagccctgcccacccctccagacctcggttcttattttcctatttttattaaatttggaaccattttgtgatggtatgttgtccatcttcccatcccagttcttcctgccccccttcctctctcccacgctctcttttatctctcattttattcccttgttgatttctgttaacttgaaagatttgggattttttcccacctcatcatagatgggaacttttgttttcagtgcaaacaatgttggagctgtaatagtaagagctttcttacaaagctttgtattactgtgtggttttgttttttttgttgttgtttatttgattttgattttt

SEQ ID NO: 197628 - DNA, 579 bp, Homo sapiens
  Payload ID: 18970
  Gene Name: ubiquitin-conjugating enzyme E2E 2
  ENST ID: ENST00000427371
  CDS Start-End: 144-413
tttcggtgactagacggtccgcaggggacatcccgtccctggggcctccccagtctccctccccctcgcgcctgggcagctctctcccagggcttcggctcgagcctgcgacctgcacggacacccccccctcaggatctaaaatgtccactgaggcacaaagagttgatgacagtccaagcactagtggaggaagttccgatggagatcaacgtgaaagtgttcagcaagaaccagaaagagaacaagttcagcccaagaaaaaggagggaaaaatatccagcaaaaccgctgctaaattgtcaactagtgctaaaagaattcagaaggaacttgcagaaatcacattggaccctcctcccaactgtaggctgttcctgattcgatctgcttgcatctcttctaacttgtgagtgacttggaaggagcagacttcatcttacttctattcatttctcaattaactatgactaacatacactaggcacccaaaaagttaagatgatagcagtaatgaagagaaatggaccttgagtttcagaaacttgtattctaatggaccttcaaaagatggcaagt

SEQ ID NO: 197629 - DNA, 282 bp, Homo sapiens
  Payload ID: 18970
  Gene Name: ubiquitin-conjugating enzyme E2E 2
  ENST ID: ENST00000613545
  CDS Start-End: 1-282
agtgctggacccaaaggagacaacatttatgaatggaggtcaactatattgggacccccaggatctgtctatgaaggaggggtgttctttcttgacattaccttttcaccagactatccgtttaaaccccctaaggttaccttccgaacaagaatctatcactgtaatattaacagccaaggtgtgatctgtctggacatcttaaaggacaactggagtccggctttaactatttctaaagttctcctctccatctgctcacttcttacagattgcaaccct

SEQ ID NO: 197630 - DNA, 267 bp, Homo sapiens
  Payload ID: 18970
  Gene Name: ubiquitin-conjugating enzyme E2E 2
  ENST ID: ENST00000628311
  CDS Start-End: 1-267
atgtccactgaggcacaaagagttgatgacagtccaagcactagtggaggaagttccgatggagatcaacgtgaaagtgttcagcaagaaccagaaagagaacaagttcagcccaagaaaaaggagggaaaaatatccagcaaaaccgctgctaaattgtcaactagtgctaaaagaattcagaaggaacttgcagaaatcacattggaccctcctcccaactgtaggctgttcctgattcgatctgcttgcatctcttctaacttg

SEQ ID NO: 197631 - DNA, 1347 bp, Homo sapiens
  Payload ID: 18971
  Gene Name: ubiquitin-conjugating enzyme E2E 3
  Uniprot ID: Q969T4
  ENST ID: ENST00000392415
  CDS Start-End: 188-811
gcaggggccagcccgccgggtccccgccgcgctctttgtcctggccgcgcgcgggcggacgcgtgcacccccagggtgaggggaggtgtggagagcgcgcacgggagcgcgcgggaacagctcgcgcccgccgggcgtcggcggcgcgcgcccctccgccagttttccaagagataacttcaccaagatgtccagtgataggcaaaggtccgatgatgagagccccagcaccagcagtggcagttcagatgcggaccagcgagacccagccgctccagagcctgaagaacaagaggaaagaaaaccttctgccacccagcagaagaaaaacaccaaactctctagcaaaaccactgctaagttatccactagtgctaaaagaattcagaaggagctagctgaaataacccttgatcctcctcctaattgcagtgctgggcctaaaggagataacatttatgaatggagatcaactatacttggtccaccgggttctgtatatgaaggtggtgtgttttttctggatatcacattttcatcagattatccatttaagccaccaaaggttactttccgcaccagaatctatcactgcaacatcaacagtcagggagtcatctgtctggacatccttaaagacaactggagtcccgctttgactatttcaaaggttttgctgtctatttgttcccttttgacagactgcaaccctgcggatcctctggttggaagcatagccactcagtatttgaccaacagagcagaacacgacaggatagccagacagtggaccaagagatacgcaacataattcacataatttgtatgcagtgtgaaggagcagaaggcatcttctcactgtgctgcaaatctttatagcctttacaatacggacttctgtgtatatgttatactgattctactctgcttttatcctttggagcctgggagactccccaaaaaggtaaatgctatcaagagtagaactttgtagctgtagattagttatgtttaaaacgcctacttgcaagtcttgcttctttgggatatcaaaatgtattttgtgatgtactaaggatactggtcctgaagtctaccaaatattatagtgcattttagcctaattcattatctgtatgaagttataaaagtagctgtagatggctaggaattatgtcatttgtattaaacccagatctatttctgagtatgtggttcatgctgttgtgaaaaatgttttaccttttacctttgtcagtttgtaatgagaggatttccttttaccctttgtagctcagagagcacctgatgtatcatctcaaacacaataaacatgctcctgaaggc

SEQ ID NO: 197632 - DNA, 1570 bp, Homo sapiens
  Payload ID: 18971
  Gene Name: ubiquitin-conjugating enzyme E2E 3
  Uniprot ID: Q969T4
  ENST ID: ENST00000410062
  CDS Start-End: 394-1017
gaacttgctgactgcgcggccgggaggagccgagccgggcggcggcggcgggaggctacagcgcgcgggggtctcccgcgtcccctccgcctcgccgggagctcgcgccctcgcccagccgagctcccacccccgcttttttccgaaggcgctgggcggcgccaccctccggccggagcccggcactgcacaaccccctccgactttcaatgttccacactccccggccagagcctcctcggcttctttttttccctccccccccttcccccccccacagctgcctccatttccttaaggaagggtttttttctctctccctcccccacaccgtagcggcgcgcgagcgggccgggcgggcggccgagttttccaagagataacttcaccaagatgtccagtgataggcaaaggtccgatgatgagagccccagcaccagcagtggcagttcagatgcggaccagcgagacccagccgctccagagcctgaagaacaagaggaaagaaaaccttctgccacccagcagaagaaaaacaccaaactctctagcaaaaccactgctaagttatccactagtgctaaaagaattcagaaggagctagctgaaataacccttgatcctcctcctaattgcagtgctgggcctaaaggagataacatttatgaatggagatcaactatacttggtccaccgggttctgtatatgaaggtggtgtgttttttctggatatcacattttcatcagattatccatttaagccaccaaaggttactttccgcaccagaatctatcactgcaacatcaacagtcagggagtcatctgtctggacatccttaaagacaactggagtcccgctttgactatttcaaaggttttgctgtctatttgttcccttttgacagactgcaaccctgcggatcctctggttggaagcatagccactcagtatttgaccaacagagcagaacacgacaggatagccagacagtggaccaagagatacgcaacataattcacataatttgtatgcagtgtgaaggagcagaaggcatcttctcactgtgctgcaaatctttatagcctttacaatacggacttctgtgtatatgttatactgattctactctgcttttatcctttggagcctgggagactccccaaaaaggtaaatgctatcaagagtagaactttgtagctgtagattagttatgtttaaaacgcctacttgcaagtcttgcttctttgggatatcaaaatgtattttgtgatgtactaaggatactggtcctgaagtctaccaaatattatagtgcattttagcctaattcattatctgtatgaagttataaaagtagctgtagatggctaggaattatgtcatttgtattaaacccagatctatttctgagtatgtggttcatgctgttgtgaaaaatgttttaccttttacctttgtcagtttgtaatgagaggatttccttttaccctttgtagctcagagagcacctgatgtatcatctcaaacacaataaacatgctcctgaaggcatagtttcctgtcgtaa

SEQ ID NO: 197633 - DNA, 602 bp, Homo sapiens
  Payload ID: 18971
  Gene Name: ubiquitin-conjugating enzyme E2E 3
  ENST ID: ENST00000602475
  CDS Start-End: 193-528
gactttcaatgttccacactccccggccagagcctcctcggcttctttttttccctccccccccttcccccccccacagctgcctccatttccttaaggaagggtttttttctctctccctcccccacaccgtagcggcgcgcgagcgggccgggcgggcggccgagttttccaagagataacttcaccaagatgtccagtgataggcaaaggtccgatgatgagagccccagcaccagcagtggcagttcagatgcggaccagcgagacccagccgctccagagcctgaagaacaagaggaaagaaaaccttctgccacccagcagaagaaaaacaccaaactctctagcaaaaccactgctaagttatccactagtgctaaaagaattcagaaggagctagctgaaataacccttgatcctcctcctaattgcaggaaaatcagcaagtcttgcatagagtgtaaggacattcagattgagaatgaagaacttgtcctttcagtctcttcttccctatcaatatgagataaaaacataataaaatcacttgtaaatctagagaaatagaaagtgatttttttttccacataccaattttg

SEQ ID NO: 197634 - DNA, 752 bp, Homo sapiens
  Payload ID: 18971
  Gene Name: ubiquitin-conjugating enzyme E2E 3
  ENST ID: ENST00000602479
  CDS Start-End: 229-752
ccaagggcggcaggggccagcccgccgggtccccgccgcgctctttgtcctggccgcgcgcgggcggacgcgtgcacccccagggtgaggggaggtgtggagagcgcgcacgggagcgcgcgggaacagctcgcgcccgccgggcgtcggcggcgcgcgcccctccgccagcggcgcgcgagcgggccgggcgggcggccgagttttccaagagataacttcaccaagatgtccagtgataggcaaaggtccgatgatgagagccccagcaccagcagtggcagttcagatgcggaccagcgagacccagccgctccagagcctgaagaacaagaggaaagaaaaccttctgccacccagcagaagaaaaacaccaaactctctagcaaaaccactgctaagttatccactagtgctaaaagaattcagaaggagctagctgaaataacccttgatcctcctcctaattgcagtgctgggcctaaaggagataacatttatgaatggagatcaactatacttggtccaccgggttctgtatatgaaggtggtgtgttttttctggatatcacattttcatcagattatccatttaagccaccaaaggttactttccgcaccagaatctatcactgcaacatcaacagtcagggagtcatctgtctggacatccttaaagacaactggagtcccgctttgactatttcaaaggttttgctgtctatttgttcccttttgacagactgcaaccc

SEQ ID NO: 197635 - DNA, 744 bp, Homo sapiens
  Payload ID: 18971
  Gene Name: ubiquitin-conjugating enzyme E2E 3
  ENST ID: ENST00000602499
  CDS Start-End: 376-744
gggggcgggggcgggcagctttgttcgcgccgggcgcccgcgtcgccggtgtccgcgagccgcggcggggccggctgggctgctcgcatcacttggcgcccggcgcggcgagcgctacccgcggcccccgcgcggccctccccacaaagggccgcggagctgcgtggccgccgccgccggccgtggctcgcctccgcgggcgcggaaatttgttgcacttcttggggctttgtttatttgtttgttttttctctgggtttcttatttttttcgttattttggacaaaatgtcggtccgtgatataaaaattgagcgaggaaccttggtggcattgggagctttgcagaagttttccaagagataacttcaccaagatgtccagtgataggcaaaggtccgatgatgagagccccagcaccagcagtggcagttcagatgcggaccagcgagacccagccgctccagagcctgaagaacaagaggaaagaaaaccttctgccacccagcagaagaaaaacaccaaactctctagcaaaaccactgctaagttatccactagtgctaaaagaattcagaaggagctagctgaaataacccttgatcctcctcctaattgcagtgctgggcctaaaggagataacatttatgaatggagatcaactatacttggtccaccgggttctgtatatgaaggtggtgtgttttttctggatatcacattttcatcagattatccatttaag

SEQ ID NO: 197636 - DNA, 654 bp, Homo sapiens
  Payload ID: 18971
  Gene Name: ubiquitin-conjugating enzyme E2E 3
  ENST ID: ENST00000602303
  CDS Start-End: 129-654
caatatgaagagctacggccaagttcatgcagtcacaggcaatgacaactatatcaccaatgctgcctggctgagagtgatttaagacatcattgattggaagttttccaagagataacttcaccaagatgtccagtgataggcaaaggtccgatgatgagagccccagcaccagcagtggcagttcagatgcggaccagcgagacccagccgctccagagcctgaagaacaagaggaaagaaaaccttctgccacccagcagaagaaaaacaccaaactctctagcaaaaccactgctaagttatccactagtgctaaaagaattcagaaggagctagctgaaataacccttgatcctcctcctaattgcagtgctgggcctaaaggagataacatttatgaatggagatcaactatacttggtccaccgggttctgtatatgaaggtggtgtgttttttctggatatcacattttcatcagattatccatttaagccaccaaaggttactttccgcaccagaatctatcactgcaacatcaacagtcagggagtcatctgtctggacatccttaaagacaactggagtcccgctttgactatttcaaaggttttgctgtctatttgttcccttttgacagactgcaaccctg

SEQ ID NO: 197637 - DNA, 766 bp, Homo sapiens
  Payload ID: 18971
  Gene Name: ubiquitin-conjugating enzyme E2E 3
  ENST ID: ENST00000602291
  CDS Start-End: 182-705
gccagcccgccgggtccccgccgcgctctttgtcctggccgcgcgcgggcggacgcgtgcacccccagggtgaggggaggtgtggagagcgcgcacgggagcgcgcgggaacagctcgcgcccgccgggcgtcggcggcgcgcgcccctccgccagttttccaagagataacttcaccaagatgtccagtgataggcaaaggtccgatgatgagagccccagcaccagcagtggcagttcagatgcggaccagcgagacccagccgctccagagcctgaagaacaagaggaaagaaaaccttctgccacccagcagaagaaaaacaccaaactctctagcaaaaccactgctaagttatccactagtgctaaaagaattcagaaggagctagctgaaataacccttgatcctcctcctaattgcagtgctgggcctaaaggagataacatttatgaatggagatcaactatacttggtccaccgggttctgtatatgaaggtggtgtgttttttctggatatcacattttcatcagattatccatttaagccaccaaaggttactttccgcaccagaatctatcactgcaacatcaacagtcagggagtcatctgtctggacatccttaaagacaactggagtcccgctttgactatttcaaaggttttgctgtctatttgttcccttttgacagactgcaaccctgcggatcctctggttggaagcatagccactcagtatttgaccaacagagcagaacacgac

SEQ ID NO: 197638 - DNA, 1556 bp, Homo sapiens
  Payload ID: 18971
  Gene Name: ubiquitin-conjugating enzyme E2E 3
  Uniprot ID: Q969T4
  ENST ID: ENST00000602710
  CDS Start-End: 380-1003
tcacttggcgcccggcgcggcgagcgctacccgcggcccccgcgcggccctccccacaaagggccgcggagctgcgtggccgccgccgccggccgtggctcgcctccgcgggcgcggaaatttgttgcacttcttggggctttgtttatttgtttgttttttctctgggtttcttatttttttcgttattttggacaaaatgtcggtccgtgatataaaaattgagcgaggaaccttggtggcattgggagctttgcagaaggtgcagtttgaattctgcttttcccagggtggcagctcggtcttggccggatgaatcttcgctgctggccgtggaaacagctagagcagctcttttccaagagataacttcaccaagatgtccagtgataggcaaaggtccgatgatgagagccccagcaccagcagtggcagttcagatgcggaccagcgagacccagccgctccagagcctgaagaacaagaggaaagaaaaccttctgccacccagcagaagaaaaacaccaaactctctagcaaaaccactgctaagttatccactagtgctaaaagaattcagaaggagctagctgaaataacccttgatcctcctcctaattgcagtgctgggcctaaaggagataacatttatgaatggagatcaactatacttggtccaccgggttctgtatatgaaggtggtgtgttttttctggatatcacattttcatcagattatccatttaagccaccaaaggttactttccgcaccagaatctatcactgcaacatcaacagtcagggagtcatctgtctggacatccttaaagacaactggagtcccgctttgactatttcaaaggttttgctgtctatttgttcccttttgacagactgcaaccctgcggatcctctggttggaagcatagccactcagtatttgaccaacagagcagaacacgacaggatagccagacagtggaccaagagatacgcaacataattcacataatttgtatgcagtgtgaaggagcagaaggcatcttctcactgtgctgcaaatctttatagcctttacaatacggacttctgtgtatatgttatactgattctactctgcttttatcctttggagcctgggagactccccaaaaaggtaaatgctatcaagagtagaactttgtagctgtagattagttatgtttaaaacgcctacttgcaagtcttgcttctttgggatatcaaaatgtattttgtgatgtactaaggatactggtcctgaagtctaccaaatattatagtgcattttagcctaattcattatctgtatgaagttataaaagtagctgtagatggctaggaattatgtcatttgtattaaacccagatctatttctgagtatgtggttcatgctgttgtgaaaaatgttttaccttttacctttgtcagtttgtaatgagaggatttccttttaccctttgtagctcagagagcacctgatgtatcatctcaaacacaataaacatgctcctgaaggcatagtttcctgtcgtaa

SEQ ID NO: 197639 - DNA, 909 bp, Homo sapiens
  Payload ID: 18971
  Gene Name: ubiquitin-conjugating enzyme E2E 3
  Uniprot ID: Q969T4
  ENST ID: ENST00000602959
  CDS Start-End: 145-768
cggccaagggcggcaggggccagcccgccgggtccccgccgcgctctttgtcctggccgcgcgcgggcggacgcgtgcacccccaggcggcgcgcgagcgggccgggcgggcggccgagttttccaagagataacttcaccaagatgtccagtgataggcaaaggtccgatgatgagagccccagcaccagcagtggcagttcagatgcggaccagcgagacccagccgctccagagcctgaagaacaagaggaaagaaaaccttctgccacccagcagaagaaaaacaccaaactctctagcaaaaccactgctaagttatccactagtgctaaaagaattcagaaggagctagctgaaataacccttgatcctcctcctaattgcagtgctgggcctaaaggagataacatttatgaatggagatcaactatacttggtccaccgggttctgtatatgaaggtggtgtgttttttctggatatcacattttcatcagattatccatttaagccaccaaaggttactttccgcaccagaatctatcactgcaacatcaacagtcagggagtcatctgtctggacatccttaaagacaactggagtcccgctttgactatttcaaaggttttgctgtctatttgttcccttttgacagactgcaaccctgcggatcctctggttggaagcatagccactcagtatttgaccaacagagcagaacacgacaggatagccagacagtggaccaagagatacgcaacataattcacataatttgtatgcagtgtgaaggagcagaaggcatcttctcactgtgctgcaaatctttatagcctttacaatacggacttctgtgtatatgttatactgattctactctgcttttatcctttggagcctgggaga

SEQ ID NO: 197640 - DNA, 446 bp, Homo sapiens
  Payload ID: 18971
  Gene Name: ubiquitin-conjugating enzyme E2E 3
  ENST ID: ENST00000602632
  CDS Start-End: 21-413
caagagataacttcaccaagatgtccagtgataggcaaaggtccgatgatgagagccccagcaccagcagtggcagttcagatgcggaccagcgagacccagccgctccagagcctgaagaacaagaggaaagaaaaccttctgccacccagcagaagaaaaacaccaaactctctagcaaaaccactgctaagttatccactagtgctaaaagaattcagaaggagctagctgaaataacccttgatcctcctcctaattgcagagggtgtccttgtcctctcctagtcaccacttgtgcaaacagcgaaagtttagaaaggaaaatcagcaagtcttgcatagagtgtaaggacattcagattgagaatgaagaacttgtcctttcagtctcttcttccctatcaatatgagataaaaacataataaaatcacttgtaaatcta

SEQ ID NO: 197641 - DNA, 2009 bp, Homo sapiens
  Payload ID: 18972
  Gene Name: ubiquitin-conjugating enzyme E2F (putative)
  Uniprot ID: Q969M7
  ENST ID: ENST00000272930
  CDS Start-End: 195-752
aaagcgcccgctgctgtctcggctgccgcgggcgagagcggccgagtccccgccccgccacttccggtcccgccgccgggagccggtgcggctgtgaggggccgcgtctcgcagcagccgcccggaccgggcatggtgttgggcgccgggcccgcctcgcctgtctcggggagcccagggtaaaggcagcagtaatgctaacgctagcaagtaaactgaagcgtgacgatggtctcaaagggtcccggacggcagccacagcgtccgactcgactcggagggtttctgtgagagacaaattgcttgttaaagaggttgcagaacttgaagctaatttaccttgtacatgtaaagtgcattttcctgatccaaacaagcttcattgttttcagctaacagtaaccccagatgagggttactaccagggtggaaaatttcagtttgaaactgaagttcccgatgcgtacaacatggtgcctcccaaagtgaaatgcctgaccaagatctggcaccccaacatcacagagacaggggaaatatgtctgagtttattgagagaacattcaattgatggcactggctgggctcccacaagaacattaaaggatgtcgtttggggattaaactctttgtttactgatcttttgaattttgatgatccactgaatattgaagctgcagaacatcatttgcgggacaaggaggacttccggaataaagtggatgactacatcaaacgttatgccagatgataaaaggggacgattgcaggcccatggactgtgttacagtttgtctctaacatgaaacagcaagaggtagccccctctcccgtcctcatgctccctctcagtcccctggattgccccagtcctgtgaccatgttgccctgaagaagaccatcttcatgactgctcattgtagatggagaattcaacataaatacagcaagaaaatgtgtttgggcttctgaagagttgtctgcttaccttaacatgtttacttttttgaacttgtactgtataggctgttggtgaaattcttaagaagttgtaatgaactcaaaattgaggccagagcttgctttcccttttcccaaacaaaattggttttctgcacaagcgatgctaatgatgtgttcagtgtaactcgcagattggcaataagatacccgctacaaactgtgattggatgcaaaatctcttagcttctttcacgaatgttggccctgcctagatgttgtgaagcctcccagaatgcatagagtcattcactgtagatctcttattgaaatgcgtattttatttaatgtaagtatattttggaacagatttgtaatttgtacaattcaatgctttaattattttttctattctcatttagtttgtattttcattgtatagagcagacagaaagatgttgggtcaagcaactattgaagagaaatacaaagaaaatatgaaaggcacattattcattttgtccaaatgcaatgagaatctcactcttaaaaatcagctcttgctttcgggtccggatgtggtgagcacattttggagccctttgaagctagatttggatgatcaaaacaaaaaggcagggagcccattctaacatgctgcccagaggaaactggctggagcctggaccagctggggttgatgcttttgcagtggtcatgtgattgtgacctggtagctacttatcagagagccagaccctgctgtcctgggagacaggagcgatgcctcaggaatcagcccaatgtctgatgtcactgagactgtacctgtggccttcttctgagtttgctatggctccaggccctgccggtggggtgagcctcctaggccttggaggaccaggagtcaacagtggcatatgccatcctcggccaggttaatatactgcagaggaaaagccctgaagagaggcaagtggatttactccagcatgtagacatttgaaccagtgaaatcaaacacaaaataaatgtctgtctagtttca

SEQ ID NO: 197642 - DNA, 924 bp, Homo sapiens
  Payload ID: 18972
  Gene Name: ubiquitin-conjugating enzyme E2F (putative)
  Uniprot ID: Q969M7
  ENST ID: ENST00000409953
  CDS Start-End: 7-492
ccgggcatggtgttgggcgccgggcccgcctcgcctgtctcggggagcccagaggttgcagaacttgaagctaatttaccttgtacatgtaaagtgcattttcctgatccaaacaagcttcattgttttcagctaacagtaaccccagatgagggttactaccagggtggaaaatttcagtttgaaactgaagttcccgatgcgtacaacatggtgcctcccaaagtgaaatgcctgaccaagatctggcaccccaacatcacagagacaggggaaatatgtctgagtttattgagagaacattcaattgatggcactggctgggctcccacaagaacattaaaggatgtcgtttggggattaaactctttgtttactgatcttttgaattttgatgatccactgaatattgaagctgcagaacatcatttgcgggacaaggaggacttccggaataaagtggatgactacatcaaacgttatgccagatgataaaaggggacgattgcaggcccatggactgtgttacagtttgtctctaacatgaaacagcaagaggtagccccctctcccgtcctcatgctccctctcagtcccctggattgccccagtcctgtgaccatgttgccctgaagaagaccatcttcatgactgctcattgtagatggagaattcaacataaatacagcaagaaaatgtgtttgggcttctgaagagttgtctgcttaccttaacatgtttacttttttgaacttgtactgtataggctgttggtgaaattcttaagaagttgtaatgaactcaaaattgaggccagagcttgctttcccttttcccaaacaaaattggttttctgcacaagcgatgctaatgatgtgttcagtgtaactcgcagattggcaataagatacccgctacaaactg

SEQ ID NO: 197643 - DNA, 1138 bp, Homo sapiens
  Payload ID: 18972
  Gene Name: ubiquitin-conjugating enzyme E2F (putative)
  ENST ID: ENST00000409332
  CDS Start-End: 68-559
cgggcatggtgttgggcgccgggcccgcctcgcctgtctcggggagcccagggtaaaggcagcagtaatgctaacgctagcaagtaaactgaagcgtgacgatggtctcaaagggtcccggacggcagccacagcgtccgactcgactcggagggtttctgtgagagacaaattgcttgttaaagaggttgcagaacttgaagctaatttaccttatgagggttactaccagggtggaaaatttcagtttgaaactgaagttcccgatgcgtacaacatggtgcctcccaaagtgaaatgcctgaccaagatctggcaccccaacatcacagagacaggggaaatatgtctgagtttattgagagaacattcaattgatggcactggctgggctcccacaagaacattaaaggatgtcgtttggggattaaactctttgtttactgatcttttgaattttgatgatccactgaatattgaagctgcagaacatcatttgcgggacaaggaggacttccggaataaagtggatgactacatcaaacgttatgccagatgataaaaggggacgattgcaggcccatggactgtgttacagtttgtctctaacatgaaacagcaagaggtagccccctctcccgtcctcatgctccctctcagtcccctggattgccccagtcctgtgaccatgttgccctgaagaagaccatcttcatgactgctcattgtagatggagaattcaacataaatacagcaagaaaatgtgtttgggcttctgaagagttgtctgcttaccttaacatgtttacttttttgaacttgtactgtataggctgttggtgaaattcttaagaagttgtaatgaactcaaaattgaggccagagcttgctttcccttttcccaaacaaaattggttttctgcacaagcgatgctaatgatgtgttcagtgtaactcgcagattggcaataagatacccgctacaaactgtgattggatgcaaaatctcttagcttctttcacgaatgttggccctgcctagatgttgtgaagcctcccagaatgcatagagtcattcactgtagatctcttattgaaatgcgtattttatttaatgtaagtatattttggaacaga

SEQ ID NO: 197644 - DNA, 837 bp, Homo sapiens
  Payload ID: 18972
  Gene Name: ubiquitin-conjugating enzyme E2F (putative)
  Uniprot ID: Q969M7
  ENST ID: ENST00000409633
  CDS Start-End: 136-630
acttccggtcccgccgccgggagccggtgcggctgtgaggggccgcgtctcgcagcagccgcccggaccgggcatggtgttgggcgccgggcccgcctcgcctgtctcggggagcccagggtaaaggcagcagtaatgctaacgctagcaagtaaactgaagcgtgacgatggtctcaaagggtcccggacggcagccacagcgtccgactcgactcggagggtttctgtgagagacaaattgcttgttaaagaggttgcagaacttgaagctaatttaccttgtacatgtaaagtgcattttcctgatccaaacaagcttcattgttttcagctaacagtaaccccagatgagggttactaccagggtggaaaatttcagtttgaaactgaagttcccgatgcgtacaacatggtgcctcccaaagtgaaatgcctgaccaagatctggcaccccaacatcacagagacaggggaaatatgtctgagtttattgagagaacattcaattgatggcactggctgggctcccacaagaacattaaaggatgtcgtttggggattaaactctttgtttactgaggacttccggaataaagtggatgactacatcaaacgttatgccagatgataaaaggggacgattgcaggcccatggactgtgttacagtttgtctctaacatgaaacagcaagaggtagccccctctcccgtcctcatgctccctctcagtcccctggattgccccagtcctgtgaccatgttgccctgaagaagaccatcttcatgactgctcattgtagatggagaattcaacataaatacagcaagaaaatgt

SEQ ID NO: 197645 - DNA, 760 bp, Homo sapiens
  Payload ID: 18972
  Gene Name: ubiquitin-conjugating enzyme E2F (putative)
  ENST ID: ENST00000455999
  CDS Start-End: 132-437
ccggtcccgccgccgggagccggtgcggctgtgaggggccgcgtctcgcagcagccgcccggaccgggcatggtgttgggcgccgggcccgcctcgcctgtctcggggagcccagggtaaaggcagcagtaatgctaacgctagcaagtaaactgaagcgtgacgatggtctcaaagggtcccggacggcagccacagcgtccgactcgactcggagggtttctgtgagagacaaattgcttgttaaagaggttgcagaacttgaagctaatttaccttgtacatgtaaagtgcattttcctgatccaaacaagcttcattgttttcagctaacagtaaccccagatgagggttactaccagggtggaaaatttcagtttgaaactgaagttcccgatgcgtacaacatggtgtttattgagagaacattcaattgatggcactggctgggctcccacaagaacattaaaggatgtcgtttggggattaaactctttgtttactgatcttttgaattttgatgatccactgaatattgaagctgcagaacatcatttgcgggacaaggaggacttccggaataaagtggatgactacatcaaacgttatgccagatgataaaaggggacgattgcaggcccatggactgtgttacagtttgtctctaacatgaaacagcaagaggtagccccctctcccgtcctcatgctccctctcagtcccctggattgccccagtcctgtgaccatgttgccctgaa

SEQ ID NO: 197646 - DNA, 552 bp, Homo sapiens
  Payload ID: 18972
  Gene Name: ubiquitin-conjugating enzyme E2F (putative)
  ENST ID: ENST00000416292
  CDS Start-End: 136-552
acttccggtcccgccgccgggagccggtgcggctgtgaggggccgcgtctcgcagcagccgcccggaccgggcatggtgttgggcgccgggcccgcctcgcctgtctcggggagcccagggtaaaggcagcagtaatgctaacgctagcaagtaaactgaagcgtgacgatggtctcaaagggtcccggacggcagccacagcgtccgactcgactcggagggtttctgtgagagacaaattgcttgttaaagatgagggttactaccagggtggaaaatttcagtttgaaactgaagttcccgatgcgtacaacatggtgcctcccaaagtgaaatgcctgaccaagatctggcaccccaacatcacagagacaggggaaatatgtctgagtttattgagagaacattcaattgatggcactggctgggctcccacaagaacattaaaggatgtcgtttggggattaaactctttgtttactgatcttttgaattttgatgatccactgaatattgaagctgcagaacatcatttgcgggacaaggaggac

SEQ ID NO: 197647 - DNA, 803 bp, Homo sapiens
  Payload ID: 18972
  Gene Name: ubiquitin-conjugating enzyme E2F (putative)
  Uniprot ID: Q969M7
  ENST ID: ENST00000433241
  CDS Start-End: 70-432
accgggcatggtgttgggcgccgggcccgcctcgcctgtctcggggagcccagggtaaaggcagcagtaatgctaacgctagcaagtaaactgaagcgtgacgatggtctcaaagggtcccggacggcagccacagcgtccgactcgactcggagggtttctgtgagagacaaattgcttgttaaagaggttgcagaacttgaagctaatttaccttgtacatgtaaagtgcattttcctgatccaaacaagcttcattgttttcagctaacagtaaccccagatgagggttactaccagggtggaaaatttcagtttgaaactgaagttcccgatgcgtacaacatggtgcctcccaaagtgaaatgcctgaccaagatctggcaccccaacatcacagagacaggggaaatatgtctgaggatcttttgaattttgatgatccactgaatattgaagctgcagaacatcatttgcgggacaaggaggacttccggaataaagtggatgactacatcaaacgttatgccagatgataaaaggggacgattgcaggcccatggactgtgttacagtttgtctctaacatgaaacagcaagaggtagccccctctcccgtcctcatgctccctctcagtcccctggattgccccagtcctgtgaccatgttgccctgaagaagaccatcttcatgactgctcattgtagatggagaattcaacataaatacagcaagaaaatgtgtttgggcttctgaagagttgtctgcttaccttaacatgtttacttttttgaacttgtac

SEQ ID NO: 197648 - DNA, 561 bp, Homo sapiens
  Payload ID: 18972
  Gene Name: ubiquitin-conjugating enzyme E2F (putative)
  ENST ID: ENST00000448502
  CDS Start-End: 136-561
acttccggtcccgccgccgggagccggtgcggctgtgaggggccgcgtctcgcagcagccgcccggaccgggcatggtgttgggcgccgggcccgcctcgcctgtctcggggagcccagggtaaaggcagcagtaatgctaacgctagcaagtaaactgaagcgtgacgatggtctcaaagggtcccggacggcagccacagcgtccgactcgactcggagggtttctgtgagagacaaattgcttgttaaagaggttgcagaacttgaagctaatttaccttgtacatgtaaagtgcattttcctgatccaaacaagcttcattgttttcagctaacagtaaccccaggatttttttgttttgttttgtgttttttgatagatgagggttactaccagggtggaaaatttcagtttgaaactgaagttcccgatgcgtacaacatggtgcctcccaaagtgaaatgcctgaccaagatctggcaccccaacatcacagagacaggggaaatatgtctgagtttattgagagaacattcaattgatggcactggctgggct

SEQ ID NO: 197649 - DNA, 831 bp, Homo sapiens
  Payload ID: 18972
  Gene Name: ubiquitin-conjugating enzyme E2F (putative)
  ENST ID: ENST00000445676
  CDS Start-End: 60-296
cgccgggagccggtgcggctgtgaggggccgcgtctcgcagcagccgcccggaccgggcatggtgttgggcgccgggcccgcctcgcctgtctcggggagcccagaggttgcagaacttgaagctaatttaccttgtacatgtaaagtgcattttcctgatccaaacaagcttcattgttttcagctaacagtaaccccagcctcccaaagtgaaatgcctgaccaagatctggcaccccaacatcacagagacaggggaaatatgtctgagtttattgagagaacattcaattgatggcactggctgggctcccacaagaacattaaaggatgtcgtttggggattaaactctttgtttactgatcttttgaattttgatgatccactgaatattgaagctgcagaacatcatttgcgggacaaggaggacttccggaataaagtggatgactacatcaaacgttatgccagatgataaaaggggacgattgcaggcccatggactgtgttacagtttgtctctaacatgaaacagcaagaggtagccccctctcccgtcctcatgctccctctcagtcccctggattgccccagtcctgtgaccatgttgccctgaagaagaccatcttcatgactgctcattgtagatggagaattcaacataaatacagcaagaaaatgtgtttgggcttctgaagagttgtctgcttaccttaacatgtttacttttttgaacttgtactgtataggctgttggtgaaattcttaagaagttgtaatgaactcaaaattgaggccagagcttgctttcccttttcccaaacaaaat

SEQ ID NO: 197650 - DNA, 571 bp, Homo sapiens
  Payload ID: 18972
  Gene Name: ubiquitin-conjugating enzyme E2F (putative)
  ENST ID: ENST00000439780
  CDS Start-End: 90-461
gtctcgcagcagccgcccggaccgggcatggtgttgggcgccgggcccgcctcgcctgtctcggggagcccagggtaaaggcagcagtaatgctaacgctagcaagtaaactgaagcgtgacgatggtctcaaagggtcccggacggcagccacagcgtccgactcgactcggagggtttctgtgagagacaaattgcttgttaaagaggttgcagaacttgaagctaatttaccttgtacatgtaaagtgcattttcctgatccaaacaagcttcattgttttcagctaacagtaaccccagatgagggttactaccagggtggaaaatttcagtttgaaactgaagttcccgatgcgtacaacatggtgcctcccaaagtgaaatgcctgaccaagatctggcaccccaacatcacagagacaggggaaatatgtctgaggatgtcgtttggggattaaactctttgtttactgatcttttgaattttgatgatccactgaatattgaagctgcagaacatcatttgcgggacaaggaggacttccggaataaagtggatgactacatc

SEQ ID NO: 197651 - DNA, 2100 bp, Homo sapiens
  Payload ID: 18972
  Gene Name: ubiquitin-conjugating enzyme E2F (putative)
  Uniprot ID: Q969M7
  ENST ID: ENST00000414443
  CDS Start-End: 195-656
aaagcgcccgctgctgtctcggctgccgcgggcgagagcggccgagtccccgccccgccacttccggtcccgccgccgggagccggtgcggctgtgaggggccgcgtctcgcagcagccgcccggaccgggcatggtgttgggcgccgggcccgcctcgcctgtctcggggagcccagggtaaaggcagcagtaatgctaacgctagcaagtaaactgaagcgtgacgatggtctcaaagggtcccggacggcagccacagcgtccgactcgactcggagggtttctgtgagagacaaattgcttgttaaagatgagggttactaccagggtggaaaatttcagtttgaaactgaagttcccgatgcgtacaacatggtgcctcccaaagtgaaatgcctgaccaagatctggcaccccaacatcacagagacaggggaaatatgtctgagtttattgagagaacattcaattgatggcactggctgggctcccacaagaacattaaaggatgtcgtttggggattaaactctttgtttactgatcttttgaattttgatgatccactgaatattgaagctgcagaacatcatttgcgggacaaggaggacttccggaataaagtggatgactacatcaaacgttatgccagatgataaaaggggacgattgcaggcccatggactgtgttacagtttgtctctaacatgaaacagcaagaggtagccccctctcccgtcctcatgctccctctcagtcccctggattgccccagtcctgtgaccatgttgccctgaagaagaccatcttcatgactgctcattgtagatggagaattcaacataaatacagcaagaaaatgtgtttgggcttctgaagagttgtctgcttaccttaacatgtttacttttttgaacttgtactgtataggctgttggtgaaattcttaagaagttgtaatgaactcaaaattgaggccagagcttgctttcccttttcccaaacaaaattggttttctgcacaagcgatgctaatgatgtgttcagtgtaactcgcagattggcaataagatacccgctacaaactgtgattggatgcaaaatctcttagcttctttcacgaatgttggccctgcctagatgttgtgaagcctcccagaatgcatagagtcattcactgtagatctcttattgaaatgcgtattttatttaatgtaagtatattttggaacagatttgtaatttgtacaattcaatgctttaattattttttctattctcatttagtttgtattttcattgtatagagcagacagaaagatgttgggtcaagcaactattgaagagaaatacaaagaaaatatgaaaggcacattattcattttgtccaaatgcaatgagaatctcactcttaaaaatcagctcttgctttcgggtccggatgtggtgagcacattttggagccctttgaagctagatttggatgatcaaaacaaaaaggcagggagcccattctaacatgctgcccagaggaaactggctggagcctggaccagctggggttgatgcttttgcagtggtcatgtgattgtgacctggtagctacttatcagagagccagaccctgctgtcctgggagacaggagcgatgcctcaggaatcagcccaatgtctgatgtcactgagactgtacctgtggccttcttctgagtttgctatggctccaggccctgccggtggggtgagcctcctaggccttggaggaccaggagtcaacagtggcatatgccatcctcggccaggttaatatactgcagaggaaaagccctgaagagaggcaagtggatttactccagcatgtagacatttgaaccagtgaaatcaaacacaaaataaatgtctgtctagtttcatttgctgcctgcctaacactctcaaacttaactgccagcttccttagacctctggattcccccatctgccatctactgggtttagtttgtttttcttaatttatagaatctctgattgtgagatcagtctgtcacggagacccagcaggtgaggaatgtaggccttgcttcctctttgcacccatta

SEQ ID NO: 197652 - DNA, 648 bp, Homo sapiens
  Payload ID: 18972
  Gene Name: ubiquitin-conjugating enzyme E2F (putative)
  ENST ID: ENST00000434655
  CDS Start-End: 134-648
gttaccgaaatgctgccttagagcgtaatttgcaggaaagaggaagttttgttttaaaccagatcttcaagagttgaagcatattgaagaaggaaaagaattctgaagcaactgcagggtaaaggcagcagtaatgctaacgctagcaagtaaactgaagcgtgacgatggtctcaaagggtcccggacggcagccacagcgtccgactcgactcggagggtttctgtgagagacaaattgcttgttaaagaggttgcagaacttgaagctaatttaccttgtacatgtaaagtgcattttcctgatccaaacaagcttcattgttttcagctaacagtaaccccagatgagggttactaccagggtggaaaatttcagtttgaaactgaagttcccgatgcgtacaacatggtgcctcccaaagtgaaatgcctgaccaagatctggcaccccaacatcacagagacaggggaaatatgtctgagtttattgagagaacattcaattgatggcactggctgggctcccacaagaacattaaaggatgtcgtttggggattaaactctttgtttactgatcttttgaattttgatgatccactgaatattgaagctgcagaacatcatttgcgggacaaggaggactt

SEQ ID NO: 197653 - DNA, 1292 bp, Homo sapiens
  Payload ID: 18972
  Gene Name: ubiquitin-conjugating enzyme E2F (putative)
  ENST ID: ENST00000454786
  CDS Start-End: 75-218
cccggaccgggcatggtgttgggcgccgggcccgcctcgcctgtctcggggagcccagggtaaaggcagcagtaatgctaacgctagcaagtaaactgaagcgtgacgatggtctcaaagggtcccggacggcagccacagcgtccgactcgactcggagggtttctgtgagagacaaattgcttgttaaaggtcaaagcctacggcgaatcttgtgaaaaattagttctcttcacggaattaataacatatagtgttctagagttttcgtgacttctgctatccatgttgaggttgcagaacttgaagctaatttaccttgtacatgtaaagtgcattttcctgatccaaacaagcttcattgttttcagctaacagtaaccccagaatttggctggtgtgatgcttctttgcttactgtgcctactgagtaggccaccccatcatctgatacagagacacctgatctgttctcacattggtctgtcccctgccttaaatgtaactccaagtcagattctctcgtgggatgctcaggcttcctgaaatgagggttactaccagggtggaaaatttcagtttgaaactgaagttcccgatgcgtacaacatggtgcctcccaaagtgaaatgcctgaccaagatctggcaccccaacatcacagagacaggggaaatatgtctgagtttattgagagaacattcaattgatggcactggctgggctcccacaagaacattaaaggatgtcgtttggggattaaactctttgtttactgatcttttgaattttgatgatccactgaatattgaagctgcagaacatcatttgcgggacaaggaggacttccggaataaagtggatgactacatcaaacgttatgccagatgataaaaggggacgattgcaggcccatggactgtgttacagtttgtctctaacatgaaacagcaagaggtagccccctctcccgtcctcatgctccctctcagtcccctggattgccccagtcctgtgaccatgttgccctgaagaagaccatcttcatgactgctcattgtagatggagaattcaacataaatacagcaagaaaatgtgtttgggcttctgaagagttgtctgcttaccttaacatgtttacttttttgaacttgtactgtataggctgttggtgaaattcttaagaagttgtaatgaactcaaaattgaggccagagcttgctttcccttttcccaaacaaaattggttttctgcacaagcgatgctaatgatgtgttcagtgtaactcgc

SEQ ID NO: 197654 - DNA, 984 bp, Homo sapiens
  Payload ID: 18972
  Gene Name: ubiquitin-conjugating enzyme E2F (putative)
  ENST ID: ENST00000417231
  CDS Start-End: 124-267
gccgccgggagccggtgcggctgtgaggggccgcgtctcgcagcagccgcccggaccgggcatggtgttgggcgccgggcccgcctcgcctgtctcggggagcccagggtaaaggcagcagtaatgctaacgctagcaagtaaactgaagcgtgacgatggtctcaaagggtcccggacggcagccacagcgtccgactcgactcggagggtttctgtgagagacaaattgcttgttaaaggtcaaagcctacggcgaatcttgtgaaaaattagttctcttcacggaattaataacatatagtgttctagagttttcgtgacttctgctatccatgttgaggttgcagaacttgaagctaatttaccttgtacatgtaaagtgcattttcctgatccaaacaagcttcattgttttcagctaacagtaaccccagatgagggttactaccagggtggaaaatttcagtttgaaactgaagttcccgatgcgtacaacatggtgcctcccaaagtgaaatgcctgaccaagatctggcaccccaacatcacagagacaggggaaatatgtctgagtttattgagagaacattcaattgatggcactggctgggctcccacaagaacattaaaggatgtcgtttggggattaaactctttgtttactgatcttttgaattttgatgatccactgaatattgaagctgcagaacatcatttgcgggacaaggaggacttccggaataaagtggatgactacatcaaacgttatgccagatgataaaaggggacgattgcaggcccatggactgtgttacagtttgtctctaacatgaaacagcaagaggtagccccctctcccgtcctcatgctccctctcagtcccctggattgccccagtcctgtgaccatgttgccctgaagaagaccatcttcatgactgctcattgtagatggagaattcaacataaatacagcaagaaaa

SEQ ID NO: 197655 - DNA, 1242 bp, Homo sapiens
  Payload ID: 18972
  Gene Name: ubiquitin-conjugating enzyme E2F (putative)
  Uniprot ID: Q969M7
  ENST ID: ENST00000441728
  CDS Start-End: 205-513
ttttttttttaaagcgcccgctgctgtctcggctgccgcgggcgagagcggccgagtccccgccccgccacttccggtcccgccgccgggagccggtgcggctgtgaggggccgcgtctcgcagcagccgcccggaccgggcatggtgttgggcgccgggcccgcctcgcctgtctcggggagcccagggtaaaggcagcagtaatgctaacgctagcaagtaaactgaagcgtgacgatggtctcaaagggtcccggacggcagccacagcgtccgactcgactcggagggtttctgtgagagacaaattgcttgttaaagaggttgcagaacttgaagctaatttaccttgtacatgtaaagtgcattttcctgatccaaacaagcttcattgttttcagctaacagtaaccccagcctcccaaagtgaaatgcctgaccaagatctggcaccccaacatcacagagacaggggaaatatgtctgagtttattgagagaacattcaattgatggcactggctgggctcccacaagaacattaaaggatgtcgtttggggattaaactctttgtttactgatcttttgaattttgatgatccactgaatattgaagctgcagaacatcatttgcgggacaaggaggacttccggaataaagtggatgactacatcaaacgttatgccagatgataaaaggggacgattgcaggcccatggactgtgttacagtttgtctctaacatgaaacagcaagaggtagccccctctcccgtcctcatgctccctctcagtcccctggattgccccagtcctgtgaccatgttgccctgaagaagaccatcttcatgactgctcattgtagatggagaattcaacataaatacagcaagaaaatgtgtttgggcttctgaagagttgtctgcttaccttaacatgtttacttttttgaacttgtactgtataggctgttggtgaaattcttaagaagttgtaatgaactcaaaattgaggccagagcttgctttcccttttcccaaacaaaattggttttctgcacaagcgatgctaatgatgtgttcagtgtaactcgcagattggcaataagatacccgctacaaactgtgattggatgcaaaatctcttagcttctttcacgaatgttggccctgcctagatgttgtgaagcctcccagaatgcatagagtcattcactgtagatctcttattgaaatgcgtat

SEQ ID NO: 197656 - DNA, 873 bp, Homo sapiens
  Payload ID: 18972
  Gene Name: ubiquitin-conjugating enzyme E2F (putative)
  ENST ID: ENST00000439338
  CDS Start-End: 110-301
gtgcggctgtgaggggccgcgtctcgcagcagccgcccggaccgggcatggtgttgggcgccgggcccgcctcgcctgtctcggggagcccagggtaaaggcagcagtaatgctaacgctagcaagtaaactgaagcgtgacgatggtctcaaagggtcccggacggcagccacagcgtccgactcgactcggagggtttctgtgagagacaaattgcttgttaaagaggttgcagaacttgaagctaatttaccttacagggtctctctttgttgcccaagttggagtacagtggcatgagtgtggctcactgcagtctcaacctcctgggctcaagtgatcttcccacctcagtctcctgagcagctgagacctcagacctcaggtacatgtaaagtgcattttcctgatccaaacaagcttcattgttttcagctaacagtaaccccagatgagggttactaccagggtggaaaatttcagtttgaaactgaagttcccgatgcgtacaacatggtgcctcccaaagtgaaatgcctgaccaagatctggcaccccaacatcacagagacaggggaaatatgtctgagtttattgagagaacattcaattgatggcactggctgggctcccacaagaacattaaaggatgtcgtttggggattaaactctttgtttactgatcttttgaattttgatgatccactgaatattgaagctgcagaacatcatttgcgggacaaggaggacttccggaataaagtggatgactacatcaaacgttatgccagatgataaaaggggacgattgcaggcccatggactgtgttacagtttgtctctaacatgaaacagcaagaggtagccccctc

SEQ ID NO: 197657 - DNA, 574 bp, Homo sapiens
  Payload ID: 18972
  Gene Name: ubiquitin-conjugating enzyme E2F (putative)
  ENST ID: ENST00000433568
  CDS Start-End: 136-396
acttccggtcccgccgccgggagccggtgcggctgtgaggggccgcgtctcgcagcagccgcccggaccgggcatggtgttgggcgccgggcccgcctcgcctgtctcggggagcccagggtaaaggcagcagtaatgctaacgctagcaagtaaactgaagcgtgacgatggtctcaaagggtcccggacggcagccacagcgtccgactcgactcggagggtttctgtgagagacaaattgcttgttaaagaggttgcagaacttgaagctaatttaccttgtacatgtaaagtgcattttcctgatccaaacaagcttcattgttttcagctaacagtaaccccagaatttggctggtgtgatgcttctttgcttactgtgcctactgagtaggccaccccatcatctgatacagagacacctgatctgttctcacattggtctgtcccctgccttaaatgtaactccaagtcagattctctcgtgggatgctcaggcttcctgaaatgagggttactaccagggtggaaaatttcagtttgaaactgaagttcccgatgcgtacaacatg

SEQ ID NO: 197658 - DNA, 830 bp, Homo sapiens
  Payload ID: 18972
  Gene Name: ubiquitin-conjugating enzyme E2F (putative)
  ENST ID: ENST00000440223
  CDS Start-End: 323-469
tggccgcgccctctgccaatgagcgaggtccgagaggcccgtcgcccagcccagtcccgatcggcgcacgccgctgttcgcgtgtctggttccaaataaagtttttcgcgactttgaattttttttttaaagcgcccgctgctgtctcggctgccgcgggcgagagcggccgagtccccgccccgccacttccggtcccgccgccgggagccggtgcggctgtgaggggccgcgtctcgcagcagccgcccggaccgggcatggtgttgggcgccgggcccgcctcgcctgtctcggggagcccagggtaaaggcagcagtaatgctaacgctagcaagtaaactgaagcgtgacgatggtctcaaagggtcccggacggcagccacagcgtccgactcgactcggagggtttctgtgagagacaaattgcttgttaaagacggggtctcactctgtcacgtagagtgagtggtgtagagcgcagtggtgtggtcccggcttactgcagcctcgacttcccaggctcaggtgatcctcccacttcaatatcttgagcagttgggactacagaggttgcagaacttgaagctaatttaccttgtacatgtaaagtgcattttcctgatccaaacaagcttcattgttttcagctaacagtaaccccagcctcccaaagtgaaatgcctgaccaagatctggcaccccaacatcacagagacaggggaaatatgtctgagtttattgagagaacattcaattgatggcactggctgggctcccacaagaacattaaaggatgtcgtttggggattaaactctttgtttactg

SEQ ID NO: 197659 - DNA, 472 bp, Homo sapiens
  Payload ID: 18972
  Gene Name: ubiquitin-conjugating enzyme E2F (putative)
  ENST ID: ENST00000434137
  CDS Start-End: 14-472
aaaggcagcagtaatgctaacgctagcaagtaaactgaagcgtgacgatggtctcaaagggtcccggacggcagccacagcgtccgactcgactcggagggtttctgtgagagacaaattgcttgttaaaggtacatgtaaagtgcattttcctgatccaaacaagcttcattgttttcagctaacagtaaccccagatgagggttactaccagggtggaaaatttcagtttgaaactgaagttcccgatgcgtacaacatggtgcctcccaaagtgaaatgcctgaccaagatctggcaccccaacatcacagagacaggggaaatatgtctgagtttattgagagaacattcaattgatggcactggctgggctcccacaagaacattaaaggatgtcgtttggggattaaactctttgtttactgatcttttgaattttgatgatccactgaatattgaagctgcagaa

SEQ ID NO: 197660 - DNA, 2135 bp, Homo sapiens
  Payload ID: 18972
  Gene Name: ubiquitin-conjugating enzyme E2F (putative)
  Uniprot ID: Q969M7
  ENST ID: ENST00000612130
  CDS Start-End: 134-691
gttaccgaaatgctgccttagagcgtaatttgcaggaaagaggaagttttgttttaaaccagatcttcaagagttgaagcatattgaagaaggaaaagaattctgaagcaactgcagggtaaaggcagcagtaatgctaacgctagcaagtaaactgaagcgtgacgatggtctcaaagggtcccggacggcagccacagcgtccgactcgactcggagggtttctgtgagagacaaattgcttgttaaagaggttgcagaacttgaagctaatttaccttgtacatgtaaagtgcattttcctgatccaaacaagcttcattgttttcagctaacagtaaccccagatgagggttactaccagggtggaaaatttcagtttgaaactgaagttcccgatgcgtacaacatggtgcctcccaaagtgaaatgcctgaccaagatctggcaccccaacatcacagagacaggggaaatatgtctgagtttattgagagaacattcaattgatggcactggctgggctcccacaagaacattaaaggatgtcgtttggggattaaactctttgtttactgatcttttgaattttgatgatccactgaatattgaagctgcagaacatcatttgcgggacaaggaggacttccggaataaagtggatgactacatcaaacgttatgccagatgataaaaggggacgattgcaggcccatggactgtgttacagtttgtctctaacatgaaacagcaagaggtagccccctctcccgtcctcatgctccctctcagtcccctggattgccccagtcctgtgaccatgttgccctgaagaagaccatcttcatgactgctcattgtagatggagaattcaacataaatacagcaagaaaatgtgtttgggcttctgaagagttgtctgcttaccttaacatgtttacttttttgaacttgtactgtataggctgttggtgaaattcttaagaagttgtaatgaactcaaaattgaggccagagcttgctttcccttttcccaaacaaaattggttttctgcacaagcgatgctaatgatgtgttcagtgtaactcgcagattggcaataagatacccgctacaaactgtgattggatgcaaaatctcttagcttctttcacgaatgttggccctgcctagatgttgtgaagcctcccagaatgcatagagtcattcactgtagatctcttattgaaatgcgtattttatttaatgtaagtatattttggaacagatttgtaatttgtacaattcaatgctttaattattttttctattctcatttagtttgtattttcattgtatagagcagacagaaagatgttgggtcaagcaactattgaagagaaatacaaagaaaatatgaaaggcacattattcattttgtccaaatgcaatgagaatctcactcttaaaaatcagctcttgctttcgggtccggatgtggtgagcacattttggagccctttgaagctagatttggatgatcaaaacaaaaaggcagggagcccattctaacatgctgcccagaggaaactggctggagcctggaccagctggggttgatgcttttgcagtggtcatgtgattgtgacctggtagctacttatcagagagccagaccctgctgtcctgggagacaggagcgatgcctcaggaatcagcccaatgtctgatgtcactgagactgtacctgtggccttcttctgagtttgctatggctccaggccctgccggtggggtgagcctcctaggccttggaggaccaggagtcaacagtggcatatgccatcctcggccaggttaatatactgcagaggaaaagccctgaagagaggcaagtggatttactccagcatgtagacatttgaaccagtgaaatcaaacacaaaataaatgtctgtctagtttcatttgctgcctgcctaacactctcaaacttaactgccagcttccttagacctctggattcccccatctgccatctactgggtttagtttgtttttcttaatttatagaatctctgattgtgagatcagtctgtcacggagacccagcaggtgaggaatgtaggccttgcttcctctttgcacccatta

SEQ ID NO: 197661 - DNA, 3974 bp, Homo sapiens
  Payload ID: 18973
  Gene Name: ubiquitin-conjugating enzyme E2G 1
  Uniprot ID: P62253
  ENST ID: ENST00000396981
  CDS Start-End: 167-679
accggcagcgaggcgccgctcccgccgcctcagcccggccttcctcggctccggcgctccggtcgcggggcccgggttcctcggcacaccccgctccagccgcccccagagcctgtccccagcccttcggaagccccggcgccagcccgggccctcggcagggaggatgacggagctgcagtcggcactgctactgcgaagacagctggcagaactcaacaaaaatccagtggaaggcttttctgcaggtttaatagatgacaatgatctctaccgatgggaagtccttattattggccctccagatacactttatgaaggtggtgtttttaaggctcatcttactttcccaaaagattatcccctccgacctcctaaaatgaaattcattacagaaatctggcacccaaatgttgataaaaatggtgatgtgtgcatttctattcttcatgagcctggggaagataagtatggttatgaaaagccagaggaacgctggctccctatccacactgtggaaaccatcatgattagtgtcatttctatgctggcagaccctaatggagactcacctgctaatgttgatgctgcgaaagaatggagggaagatagaaatggagaatttaaaagaaaagttgcccgctgtgtaagaaaaagccaagagactgcttttgagtgacatttatttagcagctagtaacttcacttatttcagggtctccaattgagaaacatggcactgtttttcctgcactctacccacctattgctggacttctgttgtacaagttggcaaacactggctggaactgggctgcaataaaacatgccagttatcaatgctgacaagagcctaacaagtgccaacttacagatgattacgcattttgaattctaatgaactgttttaaccttcaggaagaattgtaaagacctgtacatagcacaacatgatccggataatatatatactgttcatgtacatccacaaatacaccttgtaccaaataatgctttcttgtagtagaataagaatcgtgtaaattctaagagattttagcaggttttctttcctattcattgtttcttatcagtttaaaaggattcctttaagcatgtcagatgaaaagcaattaggattaaaagtttccatttaatttcccttaaacccttgaggcttcattaaactcttttcacttactaaacttttgtatcttctttgttttgacacactcccctttgcttttatctcttacctgccagaatgttctcaaatgatttagttcaaatactgaaatacttaatgagcaattacttgatttttaatgatgacttcgaaggagtcatcactaggtgctttgtcctttttgtattctagttgcacccacctcttggattggatatagcaataacatttattggccgttgtgagctcttgatcccagtcattacccctgagaactaaaaatagatggttcttaattcaacttactgaaaatttccccaaacaatagcaaatctgacttttccctcttcagttgcctggtattaaggttggataaatgaagcatgcacagctacaggctttctacttaacttctgggtttgctattacaaatcctatttactctcatacccttctccttagtccttcatatttctctgcctctattcttctatactgcagatttttctcacctattgtacaaagaaattgcgatgtatattttcatgtaatttgattttggaattctgtcaccttatgtagtgagttcttccaaaatataattttttttcaataattgtcaagttgttggcttttattgtattgaatgaaggctataatactgagtgccagagaagtggtttaggaaaatctcaggttgattccttatgcaaatgaacttttaatacttgaaaatcacatggccatggcagtatatgtatttggttctatctagattcttctgtgaatctaaaagcattacaggggtaaatgctttgctatttgacgtatagatcccgtcactaacaatagtacacttggatgtgattaatgtttgagcttcaatatatttcatatcatacagttttctaaaacaacttcagcaaatggtaaaatgaacatgtgcagtgttaaaggcaggccttaggctccttcatgtttgttgtgaggttgtgtgtgggaagtagtctttggcttataagggatagaacttgagacagtagcagatgggacatggtgtttgattgtgagaatcagtgagaattcgtgcatctctgctctgtggggtttggagaaatgctttggcagaagagtgaaagaactcctgccaagagcccagacctctacaaacgttgtatgtccttttttaagcagaaataaaatggttgaggatgtagtcacagtagagagtgatttttttctaagtccctgtcctctactctgaagcgttataaaaacctgtaaacattatacaaacccacaaaccttatagaaactcgtaagtgtgttgtgactggaaattgattcattagaacccagttttctttaagaactttgtgacttggttttttttttccttttccaaagactgtaaaaatagttgccccaaaatgtcagcactgcacaccctccagggacttggaatacaatcctttttacttttttttttttttttttaagaaactgggtctctctgtcacccaggctggagtgcagtggcaacgatcatagctaactgcagctttgacctcctgggctcaagtgatcctcctgcctcagcctcctgagtagctaggactacaggtgtatgccaccatgcctggctaatacaaaaaaattcttttaagagatgggatccctcccttttaaaatcagaacttgttcacatggtggttgcttgtggcaaaacggagttcaaattttgctctcctattgctataattctgctagcaatctgttgaggtgaaacttgggatctgactcttcagcaagcagcaaatgacctagtaactcagggacaactatttttgaactttaagtgccactttaatgcagttagtttgataaaaccatgtgggttttttttttagggctagctctacgggagtggaagtgagagccaggcatgagtgcgtctccacatgcttttccacctgccctgagtgtgttacatactgaaacaggcctacatagatgttacaacttcccttcctctgtcggagatgtcatctgtgcctttctcagtgttcatctgataatgtaaatttaaatgcctctacatttgatacgaaacccacattcaggtgacactgaacgaggtggcttttgtcccaccagtgcctcatcagtgtgaggcgattcctctctgctttaggaaaatgatttttccccctaaacttgtgccaaccatcaacaacatctccatagatcttatggattgtagaactgttggctgtttcctaaatttattccaagttctcgtagaggcatatagatttcagtctgtgcttgtatgggatagatgatctgagtggctttctggcctcttttttgagtttaaaatccatatgaggttgacgtgtcatactaaggtaacatgtttgtgaggttattccactagtactgtgatcacgtgggtgtcagtatctttaacggccttcattcttggttgtgagattttatttgatatgcccactcaccctcgacgaatctgcccgctttgggctgtggtgcctgtgtatctttgcccgtctggtctccagttggtggaattaccttttttgtactgccacttctcagcatctttgaaatttgacataatgttgcttcatttcagtttttttagttctgtaatttgttgattgtatttaactatgtgagttctgttgtgatgtttactgtattgtaaagcacctcattcatgtgatgagtgctctataaatcaataaatgatgacttagaggctgta

SEQ ID NO: 197662 - DNA, 863 bp, Homo sapiens
  Payload ID: 18973
  Gene Name: ubiquitin-conjugating enzyme E2G 1
  ENST ID: ENST00000574633
  CDS Start-End: 310-459
gggggaaggcaccggtggggccgacgggcgggttgaaggagggaagcgggcgagcgaagtcccagtgcgcgccgcggcagcccgggcaccctccccttccgggcgtgagtcgctgtgaaaagagctgaagcgagcggactcgcaccggcagcgaggcgccgctcccgccgcctcagcccggccttcctcggctccggcgctccggtcgcggggcccgggttcctcggcacaccccgctccagccgcccccagagcctgtccccagcccttcggaagccccggcgccagcccgggccctcggcagggaggatgacggagctgcagtcggcactgctactgcgaagacagctggcagaactcaacaaaaatccagtggaaggcttttctgcaggtttaatagatgacaatgatctctaccgatgggaagtccttattattggccctccagatacactttaaaagaatggagggaagatagaaatggagaatttaaaagaaaagttgcccgctgtgtaagaaaaagccaagagactgcttttgagtgacatttatttagcagctagtaacttcacttatttcagggtctccaattgagaaacatggcactgtttttcctgcactctacccacctattgctggacttctgttgtacaagttggcaaacactggctggaactgggctgcaataaaacatgccagttatcaatgctgacaagagcctaacaagtgccaacttacagatgattacgcattttgaattctaatgaactgttttaaccttcaggaagaattgtaaagacctgtacatagcacaacatgatccggataatatatatactgttcatgtacatccacaaatacac

SEQ ID NO: 197663 - DNA, 569 bp, Homo sapiens
  Payload ID: 18973
  Gene Name: ubiquitin-conjugating enzyme E2G 1
  ENST ID: ENST00000574059
  CDS Start-End: 552-569
aagatcaacaagagaccttcccttgtaagatgagaattgtgtagtaggtgactattagaagagtaaacaagtcttaagtctgtaaacattttttcagtaaatgcaatggagtaccagatatctctcgttactatgactaaagaaagttcaatggtgacctacttctgcctgagtattgctagaattctttctttatccttgaagttcagtaacttcatcaggatataactcggtcttggtgtgattctcttacattttcctgttaaatgatgttttcagtcccacttctcactactgatctccctcgtacgacggtcactgaactggcgcctctctggggttctgcccagaagattagccttcctccttcgctgcagctcctctaactcaacaaaaatccagtggaaggcttttctgcaggtttaatagatgacaatgatctctaccgatgggaagtccttattattggccctccagatacactttatgaaggtggtgtttttaaggctcatcttactttcccaaaagattatcccctccgacctcctaaaatgaaattcattacagaa

SEQ ID NO: 197664 - DNA, 1514 bp, Homo sapiens
  Payload ID: 18973
  Gene Name: ubiquitin-conjugating enzyme E2G 1
  ENST ID: ENST00000572484
  CDS Start-End: 641-940
ggcgggggaaggcaccggtggggccgacgggcgggttgaaggagggaagcgggcgagcgaagtcccagtgcgcgccgcggcagcccgggcaccctccccttccgggcgtgagtcgctgtgaaaagagctgaagcgagcggactcgcaccggcagcgaggcgccgctcccgccgcctcagcccggccttcctcggctccggcgctccggtcgcggggcccgggttcctcggcacaccccgctccagccgcccccagagcctgtccccagcccttcggaagccccggcgccagcccgggccctcggcagggaggatgacggagctgcagtcggcactgctactgcgaagacagctggcagatgttttcagtcccacttctcactactgatctccctcgtacgacggtcactgaactggcgcctctctggggttctgcccagaagattagccttcctccttcgctgcagctcctctaactcaacaaaaatccagtggaaggcttttctgcaggtttaatagatgacaatgatctctaccgatgggaagtccttattattggccctccagatacactttatgaaggtggtgtttttaaggctcatcttactttcccaaaagattatcccctccgacctcctaaaatgaaattcattacagaaatctggcacccaaatgttgataaaaatggtgatgtgtgcatttctattcttcatgagcctggggaagataagtatggttatgaaaagccagaggaacgctggctccctatccacactgtggaaaccatcatgattagtgtcatttctatgctggcagaccctaatggagactcacctgctaatgttgatgctgcgaaagaatggagggaagatagaaatggagaatttaaaagaaaagttgcccgctgtgtaagaaaaagccaagagactgcttttgagtgacatttatttagcagctagtaacttcacttatttcagggtctccaattgagaaacatggcactgtttttcctgcactctacccacctattgctggacttctgttgtacaagttggcaaacactggctggaactgggctgcaataaaacatgccagttatcaatgctgacaagagcctaacaagtgccaacttacagatgattacgcattttgaattctaatgaactgttttaaccttcaggaagaattgtaaagacctgtacatagcacaacatgatccggataatatatatactgttcatgtacatccacaaatacaccttgtaccaaataatgctttcttgtagtagaataagaatcgtgtaaattctaagagattttagcaggttttctttcctattcattgtttcttatcagtttaaaaggattcctttaagcatgtcagatgaaaagcaattaggattaaaagtttccatttaatttcccttaaacccttgaggcttcattaaactcttttcacttactaaacttttgtatcttctttgttttgacacactcccctttgcttttatctct

SEQ ID NO: 197665 - DNA, 984 bp, Homo sapiens
  Payload ID: 18973
  Gene Name: ubiquitin-conjugating enzyme E2G 1
  ENST ID: ENST00000571980
  CDS Start-End: 313-465
ggcgggggaaggcaccggtggggccgacgggcgggttgaaggagggaagcgggcgagcgaagtcccagtgcgcgccgcggcagcccgggcaccctccccttccgggcgtgagtcgctgtgaaaagagctgaagcgagcggactcgcaccggcagcgaggcgccgctcccgccgcctcagcccggccttcctcggctccggcgctccggtcgcggggcccgggttcctcggcacaccccgctccagccgcccccagagcctgtccccagcccttcggaagccccggcgccagcccgggccctcggcagggaggatgacggagctgcagtcggcactgctactgcgaagacagctggcagaactcaacaaaaatccagtggaaggcttttctgcaggtttaatagatgacaatgatctctaccgatgggaagtccttattattggccctccagatacactttattgataaaaatggtgatgtgtgcatttctattcttcatgagcctggggaagataagtatggttatgaaaagccagaggaacgctggctccctatccacactgtggaaaccatcatgattagtgtcatttctatgctggcagaccctaatggagactcacctgctaatgttgatgctgcgaaagaatggagggaagatagaaatggagaatttaaaagaaaagttgcccgctgtgtaagaaaaagccaagagactgcttttgagtgacatttatttagcagctagtaacttcacttatttcagggtctccaattgagaaacatggcactgtttttcctgcactctacccacctattgctggacttctgttgtacaagttggcaaacactggctggaactgggctgcaataaaacatgccagttatcaatgctgacaagagcctaacaagtgccaacttacagatgattacgcattttgaattctaatgaactgttttaaccttcaggaagaattgtaaagacct

SEQ ID NO: 197666 - DNA, 553 bp, Homo sapiens
  Payload ID: 18973
  Gene Name: ubiquitin-conjugating enzyme E2G 1
  ENST ID: ENST00000571953
  CDS Start-End: 318-553
tttagacattctctgttgacttcttgctatgacagatgttttcagtcccacttctcactactgatctccctcgtacgacggtcactgaactggcgcctctctggggttctgcccagaagattagccttcctccttcgctgcagctcctctaactcaacaaaaatccagtggaaggcttttctgcaggtttaatagatgacaatgatctctaccgatgggaagtccttattattggccctccagatacactttatgaaggtggtgtttttaaggctcatcttactttcccaaaagattatcccctccgacctcctaaaatgaaattcattacagaaatctggcacccaaatgttgataaaaatggtgatgtgtgcatttctattcttcatgagcctggggaagataagtatggttatgaaaagccagaggaacgctggctccctatccacactgtggaaaccatcatgattagtgtcatttctatgctggcagaccctaatggagactcacctgctaatgttgatgctgcgaaagaatggagggaagatagaaa

SEQ ID NO: 197667 - DNA, 721 bp, Homo sapiens
  Payload ID: 18974
  Gene Name: ubiquitin-conjugating enzyme E2G 2
  Uniprot ID: P60604
  ENST ID: ENST00000330942
  CDS Start-End: 226-639
tcgctcggcgcagctgttgcggggccatggcggggaccgcgctcaagaggctgatggccgagtacaaacccttgagaacgtgcagtgagagcttgaggaagaaggcctgacttgctgctgcggaattaggagggaaaagtgtatgcgttaaaaggggaaaggctcgttggtggagctttgaaagaattaacactgaatcctccggaaggaattgtagcaggccccatgaatgaagagaacttttttgaatgggaggcattgatcatgggcccagaagacacctgctttgagtttggtgtttttcctgccatcctgagtttcccacttgattacccgttaagtcccccaaagatgagatttacctgtgagatgtttcatcccaacatctaccctgatgggagagtctgcatttccatcctccacgcgccaggcgatgaccccatgggctacgagagcagcgcggagcggtggagtcctgtgcagagtgtggagaagatcctgctgtcggtggtgagcatgctggcagagcccaatgacgaaagtggagctaacgtggatgcgtccaaaatgtggcgcgatgaccgggagcagttctataagattgccaagcagatcgtccagaagtctctgggactgtgagacctggcctcgcacaggcgcgcacacaccgccaagcagctcagcattctcccccggcacacttagtgacagtgatgctctg

SEQ ID NO: 197668 - DNA, 3566 bp, Homo sapiens
  Payload ID: 18974
  Gene Name: ubiquitin-conjugating enzyme E2G 2
  Uniprot ID: P60604
  ENST ID: ENST00000345496
  CDS Start-End: 272-769
acaagaccaggaccctgaggcctctggaagtgccgggaccgaaccaaccccgcagagcgactaaggcgagggcaggagccaagagaatcgtagccgcggtcgcgggttgagctcccaccacccggacagcgcgcctcggcgatcgcgcacgcgccacgccccggaagagttcctgggcccgcgacggtggcccggaagcagtccccggtgtcggggcaggaggcacgcgcgcggctgaggcgaggtcgctcggcgcagctgttgcggggccatggcggggaccgcgctcaagaggctgatggccgagtacaaacaattaacactgaatcctccggaaggaattgtagcaggccccatgaatgaagagaacttttttgaatgggaggcattgatcatgggcccagaagacacctgctttgagtttggtgtttttcctgccatcctgagtttcccacttgattacccgttaagtcccccaaagatgagatttacctgtgagatgtttcatcccaacatctaccctgatgggagagtctgcatttccatcctccacgcgccaggcgatgaccccatgggctacgagagcagcgcggagcggtggagtcctgtgcagagtgtggagaagatcctgctgtcggtggtgagcatgctggcagagcccaatgacgaaagtggagctaacgtggatgcgtccaaaatgtggcgcgatgaccgggagcagttctataagattgccaagcagatcgtccagaagtctctgggactgtgagacctggcctcgcacaggcgcgcacacaccgccaagcagctcagcattctcccccggcacacttagtgacagtgatgctctgtgctggtaccaaacaaggcagacttgcaagaaccatggcatcttttttttttttcaaacctttcctacttcaaacaggcttctcttctgaaatgatgacttaatgtcgaatattgacagcttactgcagttttacagtattcctcacaaagggcttcaggtagattatcagagctgtcagcactacctctccccgctgaaaccagcagttcatggcttcctgtggattccctccctccctggagtgttgagggggttgtacctgccagacttccaggggacgatggaatacccagaacgctccttctgaagaaatggggccctgtagctgcagcacaggggaagggcccggcaccctttctgggtccttcctggttccctgtgggccccatgaggagtccattacttcctttcttccttcatattttacaggcagatgcttttcttataatctaattacatcttttcatttgttatatattacaaaccatcacacttagaaatacttccaggaaatgcttttttgaagtgtgaattaataagaaatggggtaaatagaaaagaaatttattgctgattggccaggtgcggtggttcgtgcctgtaatcccagctctttgggaggccaaggcaggtagatcacaaggtcaggaaattgagaccatcctggctaatacagtgaaaccccatgtctgctaaaattacaaaaaattagctgggcgtggtggtgcacgcctgtagtctcagctactcaggaggctgaggcaggagaatcgcttgaacccgggaggcagaggtagcagtgagctgaagtcccgccactgcactccagcctgggcaacagagcgagactcagtctcaaaaagaaaaaagaaatttattgctgatcacaaggacagacagttttttcccgaccatactcatcaaagatttacgtttgtatattagtaactagtgcattactagagcaggtgcaggtgaggtctttaaagtttcaatgaaagtttcttctggatctacagaaaaaatttttttttttcaatctaaaaactggaaattctagggtttttgtacattttggatgcactgggaatttattagcacaaaatcattctttgcaactcaaaattcagaagggactctaccatatcttagctcagagcacagaggagtgccttatccccacacttgactgggctgtggaggtgggcatgtgggcccctgggcccaggctggggacagagcccttgttttgtgacttaggattttgatgtggttcccatgttctctaacagggccagctgagcagcacaggccaggaggccacagtgtaagcaataacagatctgccacatgcagaagcaaatatcaggcctgtcgcacacgggcggcatttaaataggaatttctatttttgaaataagggatggtctatgaggcatacagtagatttgatgtgatccttttctccctcccttccataatggatcgtggtctgtgtgactgaacccacacagagtgtcatgggtgacagtttctggttgaagtagctccacgcctggcttctgtggacagcagattcttttccttctcacaaggggctcatttaaaatttggaggctgggtgctgtggctcacgcctgcaatcccagcactttgggagactgaggcgggcggatcatgaggtcaggagatcgcgaccatcctggctaacagtgaaaccctgtctccactaaaaatacaaaaaattagccgggcgtggtggcgggcgcctgtagtcccagctactctgaagactgaggcaggagaatggcgtgaacccaggaggcggagcttgcagtgagctgagatcacgccactgcactccagcctgggcaacagagtgagactctgtctcaaaaaaaaaaaaaaaaaaaatggaacgcagggcaagaactcgtatttggaaggagatgggggaaaggagcggtattatacctatgttgtatttgcaggcaaatgagatggagccctctctgtaaagaagagtcatttgtgcaagtagacggggtctgtgggtgcaggccctggaggggcacacaattgcctggaggcttctgtgagatcgggagagggaggagaggcagtctcttgacaaaataaagtatttttattcatttgtatttattaaatgaaaaaacaatcccatggtgtccctgttgtgtggtggaacctaatgactgttgaaataaagttctgtgttttccctgccctgcagtgtgtgtccctttgtcgtattgtcagaggagcctgtggccactgcccccagggagcacaccagatcatcccagctgggattcctcacggtgggggcttttctgcagacttgggttagctctggcatgttttcttctgtttctgatctcccttctgtcattctgtggtcttcctctggaattctcaggttagttggggtctgtgagacggatgtgttcactaacctataaatgacattttgcagctttttcagcagatgccattgtgtgagtggcacatttgaccactagaagccagcaggctgttccgactgcgcttccctcctgcagttgcttagaagcacagctccctgtcatcactcctctgtggtcctctgtggtcacggttggttgcgatgagacctgcctctgcgtcttgttacttagcatgtcaataaagaggcagattcctgtgtcagtga

SEQ ID NO: 197669 - DNA, 744 bp, Homo sapiens
  Payload ID: 18974
  Gene Name: ubiquitin-conjugating enzyme E2G 2
  ENST ID: ENST00000491513
  CDS Start-End: 76-222
agcagtccccggtgtcggggcaggaggcacgcgcgcggctgaggcgaggtcgctcggcgcagctgttgcggggccatggcggggaccgcgctcaagaggctgatggccgagtacaaacaattaacactgaatcctccggaaggaattgtagcaggccccatgaatgaagagaacttttttgaatgggaggcattgatcatatcagccctgctagggccatgagccgtgctggcatctgctgttgctgccgacagccctgagtgccgcctccaggggcccagaagacacctgctttgagtttggtgtttttcctgccatcctgagtttcccacttgattacccgttaagtcccccaaagatgagatttacctgtgagatgtttcatcccaacatctaccctgatgggagagtctgcatttccatcctccacgcgccaggcgatgaccccatgggctacgagagcagcgcggagcggtggagtcctgtgcagagtgtggagaagatcctgctgtcggtggtgagcatgctggcagagcccaatgacgaaagtggagctaacgtggatgcgtccaaaatgtggcgcgatgaccgggagcagttctataagattgccaagcagatcgtccagaagtctctgggactgtgagacctggcctcgcacaggcgcgcacacaccgccaagcagctcagcattctcccccggcacacttagtgacagtgatgctctgtgctggtaccaaacaa

SEQ ID NO: 197670 - DNA, 637 bp, Homo sapiens
  Payload ID: 18974
  Gene Name: ubiquitin-conjugating enzyme E2G 2
  ENST ID: ENST00000478200
  CDS Start-End: 79-378
ggaagcagtccccggtgtcggggcaggaggcacgcgcgcggctgaggcgaggtcgctcggcgcagctgttgcggggccatggcggggaccgcgctcaagaggctgatggccgagtacaaacaattaacactgaatcctccggaaggaattgtagcaggccccatgaatgaagagaacttttttgaatgggaggcattgatcatgggcccagaagacacctgctttgagtttggtgtttttcctgccatcctgagtttcccacttgattacccgttaagtcccccaaagatgagatttacctgtgagatgtttcatcccaacagtggacagcctgatgtccagggcaagtatgcatctagtttcttccactctccttgaatgagaagttgtggttcagttcctggatagtagagcgttcaccactgaacgttcaccactgaaacaatggatgagtggaaacacataggaccaggtatgaaagacaagactgtttgaagtctaccctgatgggagagtctgcatttccatcctccacgcgccaggcgatgaccccatgggctacgagagcagcgcggagcggtggagtcctgtgcagagtgtggagaagatcctgctgtcggtggtgagcatgctggca

SEQ ID NO: 197671 - DNA, 5151 bp, Homo sapiens
  Payload ID: 18975
  Gene Name: ubiquitin-conjugating enzyme E2H
  Uniprot ID: P62256
  ENST ID: ENST00000355621
  CDS Start-End: 395-946
ggggtagggaggccgactgagcaggagtcgtccgcttatagtggaggctgctaggagccggtcagagggtgagtggggagcaggcgagcgagccacagcaggcaggagggagcgtcgcgcggcgcagaggagcgccggggcagggccgcggcggaaccacagccggagaggggcagcccgagccgggcgccgcagggtccccacccccacccggccggacagtgcccggtgttcccccgtgcggggggcggcggcggcggctgacgggaccgccgggaccgcgggggtgttgccacctccaccgaggagccggcgcggccgcgggctcctcagagccggggccccgggcccgtgacagacgggccgaggaagggagagaggcggcggcgacaccatgtcatctcccagtccgggcaagaggcggatggacacggacgtggtcaagctcatcgagagtaaacatgaggttacgatcctgggaggacttaatgaatttgtagtgaagttttatggaccacaaggaacaccatatgaaggcggagtatggaaagttagagtggacctacctgataaataccctttcaaatctccatctataggattcatgaataaaattttccatcccaacattgatgaagcgtcaggaactgtgtgtctagatgtaattaatcaaacttggacagctctctatgatcttaccaatatatttgagtccttcctgcctcagttattggcctatcctaaccccatagatcctctcaatggtgacgctgcagccatgtacctccaccgaccagaagaatacaagcagaaaattaaagagtacatccagaaatacgccacggaggaggcgctgaaagaacaggaagagggtaccggggacagctcatcggagagctctatgtctgacttttccgaagatgaggcccaggatatggagttgtagtagaaaaagcacctgcttttcagaaagactattatttcctaaccatgagaagcagactataatattcatatttaaacaaagcaattttttttattactaaacaaggtttttatgaataatagcattgatatatatatattatatatcaccctttagatcttgatttcttggtcatttctcaacctgaggtgcatagcatattcccacattccatttggtagcaatatgcggtctgaatgcatgcattcatgagtccatgtggccaagtcagcctgtgtgctactgaactgtcgaaggaaatagccgctctgataggtagatgtgagtaaaaagaacaggaaaaaattgcttcttttattggtttccaaagaaacaaaccaaaccaaccagctcttggatgtgaagataaaatagtgcttttttgaaatggagaggaaaaacttggggaggaagaggcctgctgtgggggcatcggagccagccatgtaagaatcagagctgctccttcctgtgaatcctaggtggccctatgtcttctgtggagttacagtataaagcagggagctaattaagagtattaaaacttaaaaccattttttgactctgattttaagtacatttttatatgtcagttgctgcccttcacactaccaggccctgcagccacagtgttctgttggagaaacttggggaagtgttttctgaaccagttctttttcttggggtagagcgtgaaatccagacctgtttttgaaaggacagcacaggaggagaaaagtgactgggacgatgcttcctctcatccaaaacacatgcagagtcacatcctcatcctagtgtttggcagtttgagaccgctaccctgaacttaagagctttaaatatgagggttgtgtttctgggggggttatttttttggtgtgtgtgtgtgtgtattgtgcttagaaaggttgcagatttcatcttcacctaccaagaggcggccgcctccttggacaagccgctcatggaccattagacttgagaagacgacccacgtggtgactgcaaagccctgggtacttgccttcatgttctggtttggttttccctttttctgctgctcttggcagcagcctggtcatcatctgcttgtgggagtgggaaatgggtattttagacccaacacaggttctaaatttaaaacaaataataattggaacaaataaaggttcttgtacccagagtgattctacatgggaaaaacaaaccagcttttttcagagagtgaccgaataggaagaagggattcagaaatatgatgtagtagaacatgccctgcaggaagaaaatgttttctctcctgcgtatgttaagaggaaatcagtttaaaatgcctgctaatcaaatgtcgactcagctaaccatatgtccaggttgctgcagagtttctttcaaatctgagtgttgcctgctgaactcggaggggagtttggagaaattttagacagcagctctgtgttctttttttgccgcagccaataagataatagcagaattagccaatcctaaaaccttctaaagacgatttttgagcatcccactgggattatttaatttttctttttgacgtgtgtttttagtttagaagtgctgtattccacaaggtttaagtcagtgaggttggaagataccctatcttttttattcaaaaagcacaatcaatcttttgtttgaaaatctatataaagtacaacttgcttttagcatgattattttcctaaataaaaagacaaagaatttacttactttatgttaattacgggcatgaagcaaaaggttttctttaaaaaaaaaaaaaagtgcagtgatgtagggctgtggttagttaaccgtactgagttatccatctagcatctgtggcttgctggaagggtagtattaactatttaacatgtaatggtgtacttcactcttacctagcacgctgtcttctcattgctttgggggagggagggtctctctgctggcactgtctaacttgcttacctgctgactttgcagtttgcttgtgctatgacatttattgtaggtgctatttagggtaggcttaaagtgctgggtggtgatttgagttcaaacaataaaaaattgtattttttcaatattgtataaacaatagtgttctaattaccttaaaaaaaaataatgaccagttaagaattgcttttgatcttgtcaaaaaactgaatagaccccagtttcgggaaggtgtgtgagcagtgccatgactctgccccttacctaatcccacatctctctaatgataagacattggctcgcctctgaccagagccccagcaccagagagcggaagatgcagaattgtcaaatgacctgctgggggaggttgtaggagtttagcagatttgagtgtggctgcagagagagagagtgtgtgtatgtgtgcacatgtgtgagagtgtgagcgagagtgtgtgtgtgtccatctaagtgtgtgtgatgaaggtgggataaggctcctctgttagtgctggaagctcctgtaattgccgcatggatcccactgtgccctcttgttctgtgcaagtctgtcctgtctgggcactaaccttggtcccatgcatgtttatgttctgggtggggctttgcctctccactgggaaactgacttttgctgggttgaacagagtcccttatgctttttgtcctctccctgcgcctgggagaggtgggagtaggagcccaaacacacaggtacagaaagatctggaagaaggcctggcagtgaatccaaggactctgggcccccaacaatagatggtagcgtaagtctggagcagcggtgtttcaccaccaaatgcctttccaggctgcccttccaacactcaggagagcatccagatccctgggcagaggctctacattcttggctttagaggtggtggcagcggcagcaggtcagagccacttctggcggtttccctcccctttttagtgcccatagtttttggatcctcccttgagttttaccagcacaagccattctttgcccctgttcacataactgagctcaagctcttgccaaacaccaacaagcaagatggttgcaacctggcaacattgaatccaccacccttgggctccctctggaagccccagcaccggggggcttttgggcacagggtcagtggtagccatcttagacactgacatttggctttgtcgtcaatttcatcaccctccttgaggttactgtgcagtttcaaccagcattttatcctagtgaggtcattatcaggagttgccatatcatctctccagtacctaacatttctcatccacttcaaaagctgttctgactgccagctggctgatctaagctcctgaggaatgtctcctctcaaaggaatttttccctccaaaggccccctgaagtcctagttggcattggcctggcacatgctttatgttaggcctcccgttgggatggctgagaatcatgaaagacagatcctccgctagcctctgtgggtcaagtttctggacaccaagtctctgggaactagtgtttgattttaaatggcatgtggcccttccttgtttcagtgacttagaaaagtaaaagccatttaaaaaagttagcaagattttttatcgacttcccaactgggcttccagccttgttgaatgaaatcatctatctctgattgggcgcaacgaactgcatttctttggacttctgaatccatgtttgtgctttctctggcccgtgaacacctcggcgattctgttagggatgggatgagtgggaggaagccctttgagaagggggagccggccctgtcatgcgcaggttttccactcatctgaggaagagccagggctctgaatttagcctaacactcatcttggctgtgggcttgggaagaaatggccattatttacagattgtatttggtacatattgtgtgatacttgaaaagataaaagggactgccagcccctaactgaaatctgaagctttttatcgcttatttttcctcgccctgtctcctcccttccacctttctccttgcattgtgatgatctagtaggcacgtctgtcaacaggacacatgcctcctctgactataacctcttaatagttgtgtataatgaaaactgtaaacttttttaaataaacgtgtatataccttggcaaa

SEQ ID NO: 197672 - DNA, 561 bp, Homo sapiens
  Payload ID: 18975
  Gene Name: ubiquitin-conjugating enzyme E2H
  ENST ID: ENST00000496698
  CDS Start-End: 113-561
gttgcagggttttgtttatataactcaagttgtttggctaaattcttcagcatcgagagtaaacatgaggttacgatcctgggaggacttaatgaatttgtagtgaagttttatggaccacaaggaagtaagtacatgtgttgcaccatatgaaggcggagtatggaaagttagagtggacctacctgataaataccctttcaaatctccatctataggattcatgaataaaattttccatcccaacattgatgaagcgtcaggaactgtgtgtctagatgtaattaatcaaacttggacagctctctatgatcttaccaatatatttgagtccttcctgcctcagttattggcctatcctaaccccatagatcctctcaatggtgacgctgcagccatgtacctccaccgaccagaagaatacaagcagaaaattaaagagtacatccagaaatacgccacggaggaggcgctgaaagaacaggaagagggtaccggggacagctcatcggagagctctatgtctgacttttccgaagatgaggcccaggatatggagtt

SEQ ID NO: 197673 - DNA, 436 bp, Homo sapiens
  Payload ID: 18975
  Gene Name: ubiquitin-conjugating enzyme E2H
  ENST ID: ENST00000480245
  CDS Start-End: 1-189
aggcggatggacacggacgtggtcaagctcatcgagagtaaacatgaggttacgatcctgggaggacttaatgaatttgtagtgaagttttatggaccacaaggaacaccatatgaaggcggagtatggaaagttagagtggacctacctgataaataccctttcaaatctccatctatagaattataaattacctaattcccttctgctaaaagacgcaggacagagaagggattcatgaataaaattttccatcccaacattgatgaagcgtcaggaactgtgtgtctagatgtaattaatcaaacttggacagctctctatgatcttaccaatatatttgagtccttcctgcctcagttattggcctatcctaaccccatagatcctctcaatggtgacgctgcagccatgtacctccaccgaccagaagaat

SEQ ID NO: 197674 - DNA, 535 bp, Homo sapiens
  Payload ID: 18975
  Gene Name: ubiquitin-conjugating enzyme E2H
  Uniprot ID: P62256
  ENST ID: ENST00000473814
  CDS Start-End: 77-535
ccgcgggctcctcagagccggggccccgggcccgtgacagacgggccgaggaagggagagaggcggcggcgacaccatgtcatctcccagtccgggcaagaggcggatggacacggacgtggtcaagctcatcgagagtaaacatgaggttacgatcctgggaggacttaatgaatttgtagtgaagttttatggaccacaaggaacaccatatgaaggcggagtatggaaagttagagtggacctacctgataaataccctttcaaatctccatctatagatcttaccaatatatttgagtccttcctgcctcagttattggcctatcctaaccccatagatcctctcaatggtgacgctgcagccatgtacctccaccgaccagaagaatacaagcagaaaattaaagagtacatccagaaatacgccacggaggaggcgctgaaagaacaggaagagggtaccggggacagctcatcggagagctctatgtctgacttttccgaagatgaggcccaggatatggagttgtag

SEQ ID NO: 197675 - DNA, 758 bp, Homo sapiens
  Payload ID: 18975
  Gene Name: ubiquitin-conjugating enzyme E2H
  ENST ID: ENST00000472396
  CDS Start-End: 389-758
gggaggccgactgagcaggagtcgtccgcttatagtggaggctgctaggagccggtcagagggtgagtggggagcaggcgagcgagccacagcaggcaggagggagcgtcgcgcggcgcagaggagcgccggggcagggccgcggcggaaccacagccggagaggggcagcccgagccgggcgccgcagggtccccacccccacccggccggacagtgcccggtgttcccccgtgcggggggcggcggcggcggctgacgggaccgccgggaccgcgggggtgttgccacctccaccgaggagccggcgcggccgcgggctcctcagagccggggccccgggcccgtgacagacgggccgaggaagggagagaggcggcggcgacaccatgtcatctcccagtccgggcaagaggcggatggacacggacgtggtcaagctcatcgagagtaaacatgaggttacgatcctgggaggacttaatgaatttgtagtgaagttttatggaccacaaggaacaccatatgaaggcggagtatggaaagttagagtggacctacctgataaataccctttcaaatctccatctataggattcatgaataaaattttccatcccaacattgatgaagcgtcaggaactgtgtgtctagatgtaattaatcaaacttggacagctctctatgatcctctcaatggtgacgctgcagccatgtacctccaccgaccagaagaatacaagcagaaaattaaaggta

SEQ ID NO: 197676 - DNA, 572 bp, Homo sapiens
  Payload ID: 18975
  Gene Name: ubiquitin-conjugating enzyme E2H
  ENST ID: ENST00000490974
  CDS Start-End: 264-572
ggtgttcccccgtgcggggggcggcggcggcggctgacgggaccgccgggaccgcgggggtgttgccacctccaccgaggagccggcgcggccgcgggctcctcagagccggggccccgggcccgtgacagacgggccgaggaagggagagaggcggcggcgacaccatgtcatctcccagtccgggcaagaggcggatggacacggacgtggtcaagcttggcccctgctgaaggctagagctgcttgttttggaaaagcgtatgcaggcaaaaggccgcaggcaccgctcctcagcgctcattggccgccctgttactacccggaaaaggaggaggggaggagctaccaaacagctgatggacatcgagagtaaacatgaggttacgatcctgggaggacttaatgaatttgtagtgaagttttatggaccacaaggaacaccatatgaaggcggagtatggaaagttagagtggacctacctgataaataccctttcaaatctccatctataggattcatgaataaaattttccatcccaacattgatgaagcgtcaggaactgtgtgt

SEQ ID NO: 197677 - DNA, 2832 bp, Homo sapiens
  Payload ID: 18976
  Gene Name: ubiquitin-conjugating enzyme E2I
  Uniprot ID: P63279
  ENST ID: ENST00000325437
  CDS Start-End: 131-607
aactcgcgggagcgtcaccgtcctgcgacgcttcagaggatccttaggcctcagtggtctttgacccccggccccaggacctgaccccaaggaaacctccgggacctgtggctggagagggactttgaacatgtcggggatcgccctcagcagactcgcccaggagaggaaagcatggaggaaagaccacccatttggtttcgtggctgtcccaacaaaaaatcccgatggcacgatgaacctcatgaactgggagtgcgccattccaggaaagaaagggactccgtgggaaggaggcttgtttaaactacggatgcttttcaaagatgattatccatcttcgccaccaaaatgtaaattcgaaccaccattatttcacccgaatgtgtacccttcggggacagtgtgcctgtccatcttagaggaggacaaggactggaggccagccatcacaatcaaacagatcctattaggaatacaggaacttctaaatgaaccaaatatccaagacccagctcaagcagaggcctacacgatttactgccaaaacagagtggagtacgagaaaagggtccgagcacaagccaagaagtttgcgccctcataagcagcgaccttgtggcatcgtcaaaaggaagggattggtttggcaagaacttgtttacaacatttttgcaaatctaaagttgctccatacaatgactagtcacctgggggggttgggcgggcgccatcttccattgccgccgcgggtgtgcggtctcgattcgctgaattgcccgtttccatacagggtctcttccttcggtcttttgtatttttgattgttatgtaaaactcgcttttattttaatattgatgtcagtatttcaactgctgtaaaattataaacttttatacttgggtaagtcccccaggggcgagttcctcgctctgggatgcaggcatgcttctcaccgtgcagagctgcacttggcctcagctggctgtatggaaatgcaccctccctcctgccgctcctctctagaaccttctagaacctgggctgtgctgcttttgagcctcagaccccaggtcagcatctcggttctgcgccacttcctttgtgtttatatggcgttttgtctgtgttgctgtttagagtaaataaactgtttatataaaggttttggttgcattattatcattgaaagtgagaggaggcggcctcccagtgcccggccctccccacccacctgcagccccaccgcgggccaggaccaggctctccatctgcttcggatgcacgcaggctgtgaggctctgtcttgccctggatctttgtaaacagggctgtgtacaaagtgctgctgaggtttctgtgctccccgcatctgcgggctgtagagcgctgggcagctaagatctgcataggtcgggattggcatcgagaccctggcaactgcaccggtgccagctgtcttgggggccacaaggccaggtccagaccagggctgggggctgcctgaggactcctatccgggcagcctgctggcgggggttcccctcttcagtggccaggtcacagggatggagctgcgctgtgcatagggtgccacctcaggtgtctgtcccttgtgtcctcaggaggcagccttgctaccacccgtggcaaacgccaggtgctttttctgggagagcccacagccgtggccctccagggcttccccgacccttagcgccaggtagagggccctgggcagcctgtgtctggaattcttcgtcctgaggccacctgagtgtggtctgtcctggggaggctgtgcgcctcagcagccgtcctgacgctgagccctctgcaaaggttgggccggccaggcctcttggggctgcctgagccactgcaggaagtggcctggctgggaagttgggtgccggtcacctcccagcaggaaggcacagtggacagagatgggaagccctgggggacacagcccggtgctcccagccctccaacctctggctcccaacccagtctccccatcctagcgagcttggccctcctcagtttcgtttcaagccttggggctggagctggccctgctgccctggcaccccccggtggctggagctgggtccccgtggcccaagtgcagggtcccaagagggcagggcggggctccccaaaggagcaaagaatgcagggagggcggtccagggccctgggaaggggagctcggcaccctccaggtccgtgtgggactccagccgctgttggctgggaatcgaagttagaggtgacttccaaaggccccccgagccggcagtgccccccaccacccctccagcgactctgcggtgccagtgccttgttggcttttccggctacgcaccctgcagtcactgagctctcggtctgacgtctgatgtttgtggtttgtttataacacggggccttacctggggaattcagctggtttgaatatttgtagcccgctcccagaatgtcttattttgtaatgactgaactacatttagtaatagttacacatgtatatggttaatacatatggaaattcaatatattttgtagttaacgtattctgaagtaacggatgtttctcgccaatcgtagtgacttcagctaacgaaatgttcttttgtagtaccacggtcctcggcctaacgaaggacgtgaaccttgtaagaggagagctctgaaacgcggtcacctttgtttagtggaagggaaagtgtgttcccggcatgaggtgcctcggaattagtaaagaattgtgggcaatggattaaccactgtatctaagaatccaccattaaagcatttgcacagac

SEQ ID NO: 197678 - DNA, 3253 bp, Homo sapiens
  Payload ID: 18976
  Gene Name: ubiquitin-conjugating enzyme E2I
  Uniprot ID: P63279
  ENST ID: ENST00000355803
  CDS Start-End: 552-1028
gacccggtcctgcttgttgcgtgggcgggaggggggaccggaagcgcccctcccccacgggctcgccccgcccccgccgctcgcggtcccccacgtcccgcccgcgccccggcccagggccagcccccggtttagggagcatccacacttctcctcccgtcggtcatgctcgcattcggccttttgtacggggtcagctcattgggcggatgagaaggtgtccccgcctaccgccccgaactggccaattgcaaggggtttcacagggcgctgaactcgcgggagcgtcaccgtcctgcgacgcttcagaggatccttaggcctcagtggtctttgacccccggccccaggacctgaccccaaggaaacctccgggacctgtggctggagaggtgaccgccaggcatccggggagcctttggagatctcggcttcctttttcccccgctgcttgccggcgtgtcctcgggtggacgcgggcagcccgaaggggagtttacagacgctccctcacatcggggacgcggctcctttaagggcggactttgaacatgtcggggatcgccctcagcagactcgcccaggagaggaaagcatggaggaaagaccacccatttggtttcgtggctgtcccaacaaaaaatcccgatggcacgatgaacctcatgaactgggagtgcgccattccaggaaagaaagggactccgtgggaaggaggcttgtttaaactacggatgcttttcaaagatgattatccatcttcgccaccaaaatgtaaattcgaaccaccattatttcacccgaatgtgtacccttcggggacagtgtgcctgtccatcttagaggaggacaaggactggaggccagccatcacaatcaaacagatcctattaggaatacaggaacttctaaatgaaccaaatatccaagacccagctcaagcagaggcctacacgatttactgccaaaacagagtggagtacgagaaaagggtccgagcacaagccaagaagtttgcgccctcataagcagcgaccttgtggcatcgtcaaaaggaagggattggtttggcaagaacttgtttacaacatttttgcaaatctaaagttgctccatacaatgactagtcacctgggggggttgggcgggcgccatcttccattgccgccgcgggtgtgcggtctcgattcgctgaattgcccgtttccatacagggtctcttccttcggtcttttgtatttttgattgttatgtaaaactcgcttttattttaatattgatgtcagtatttcaactgctgtaaaattataaacttttatacttgggtaagtcccccaggggcgagttcctcgctctgggatgcaggcatgcttctcaccgtgcagagctgcacttggcctcagctggctgtatggaaatgcaccctccctcctgccgctcctctctagaaccttctagaacctgggctgtgctgcttttgagcctcagaccccaggtcagcatctcggttctgcgccacttcctttgtgtttatatggcgttttgtctgtgttgctgtttagagtaaataaactgtttatataaaggttttggttgcattattatcattgaaagtgagaggaggcggcctcccagtgcccggccctccccacccacctgcagccccaccgcgggccaggaccaggctctccatctgcttcggatgcacgcaggctgtgaggctctgtcttgccctggatctttgtaaacagggctgtgtacaaagtgctgctgaggtttctgtgctccccgcatctgcgggctgtagagcgctgggcagctaagatctgcataggtcgggattggcatcgagaccctggcaactgcaccggtgccagctgtcttgggggccacaaggccaggtccagaccagggctgggggctgcctgaggactcctatccgggcagcctgctggcgggggttcccctcttcagtggccaggtcacagggatggagctgcgctgtgcatagggtgccacctcaggtgtctgtcccttgtgtcctcaggaggcagccttgctaccacccgtggcaaacgccaggtgctttttctgggagagcccacagccgtggccctccagggcttccccgacccttagcgccaggtagagggccctgggcagcctgtgtctggaattcttcgtcctgaggccacctgagtgtggtctgtcctggggaggctgtgcgcctcagcagccgtcctgacgctgagccctctgcaaaggttgggccggccaggcctcttggggctgcctgagccactgcaggaagtggcctggctgggaagttgggtgccggtcacctcccagcaggaaggcacagtggacagagatgggaagccctgggggacacagcccggtgctcccagccctccaacctctggctcccaacccagtctccccatcctagcgagcttggccctcctcagtttcgtttcaagccttggggctggagctggccctgctgccctggcaccccccggtggctggagctgggtccccgtggcccaagtgcagggtcccaagagggcagggcggggctccccaaaggagcaaagaatgcagggagggcggtccagggccctgggaaggggagctcggcaccctccaggtccgtgtgggactccagccgctgttggctgggaatcgaagttagaggtgacttccaaaggccccccgagccggcagtgccccccaccacccctccagcgactctgcggtgccagtgccttgttggcttttccggctacgcaccctgcagtcactgagctctcggtctgacgtctgatgtttgtggtttgtttataacacggggccttacctggggaattcagctggtttgaatatttgtagcccgctcccagaatgtcttattttgtaatgactgaactacatttagtaatagttacacatgtatatggttaatacatatggaaattcaatatattttgtagttaacgtattctgaagtaacggatgtttctcgccaatcgtagtgacttcagctaacgaaatgttcttttgtagtaccacggtcctcggcctaacgaaggacgtgaaccttgtaagaggagagctctgaaacgcggtcacctttgtttagtggaagggaaagtgtgttcccggcatgaggtgcctcggaattagtaaagaattgtgggcaatggattaaccactgtatctaagaatccaccattaaagcatttgcacagac

SEQ ID NO: 197679 - DNA, 2976 bp, Homo sapiens
  Payload ID: 18976
  Gene Name: ubiquitin-conjugating enzyme E2I
  Uniprot ID: P63279
  ENST ID: ENST00000397514
  CDS Start-End: 276-752
gcgggcaacggggagcgctcggcggcgcgggaggcgctcggggccgggcggcaggagcggcgcgcgaggcaggcgtgcagagggcagccccgcgttaggccccgccccgcgcgccccgcccgcgccagggtcctcggagctgctctggctgcgcgcggagcgggctccggagggaagtcccgagacaaagggaagcgccgccgccgccgccccgctcggtcctccacctgtccgctacgctcgccggggctgcggccgcccgagggactttgaacatgtcggggatcgccctcagcagactcgcccaggagaggaaagcatggaggaaagaccacccatttggtttcgtggctgtcccaacaaaaaatcccgatggcacgatgaacctcatgaactgggagtgcgccattccaggaaagaaagggactccgtgggaaggaggcttgtttaaactacggatgcttttcaaagatgattatccatcttcgccaccaaaatgtaaattcgaaccaccattatttcacccgaatgtgtacccttcggggacagtgtgcctgtccatcttagaggaggacaaggactggaggccagccatcacaatcaaacagatcctattaggaatacaggaacttctaaatgaaccaaatatccaagacccagctcaagcagaggcctacacgatttactgccaaaacagagtggagtacgagaaaagggtccgagcacaagccaagaagtttgcgccctcataagcagcgaccttgtggcatcgtcaaaaggaagggattggtttggcaagaacttgtttacaacatttttgcaaatctaaagttgctccatacaatgactagtcacctgggggggttgggcgggcgccatcttccattgccgccgcgggtgtgcggtctcgattcgctgaattgcccgtttccatacagggtctcttccttcggtcttttgtatttttgattgttatgtaaaactcgcttttattttaatattgatgtcagtatttcaactgctgtaaaattataaacttttatacttgggtaagtcccccaggggcgagttcctcgctctgggatgcaggcatgcttctcaccgtgcagagctgcacttggcctcagctggctgtatggaaatgcaccctccctcctgccgctcctctctagaaccttctagaacctgggctgtgctgcttttgagcctcagaccccaggtcagcatctcggttctgcgccacttcctttgtgtttatatggcgttttgtctgtgttgctgtttagagtaaataaactgtttatataaaggttttggttgcattattatcattgaaagtgagaggaggcggcctcccagtgcccggccctccccacccacctgcagccccaccgcgggccaggaccaggctctccatctgcttcggatgcacgcaggctgtgaggctctgtcttgccctggatctttgtaaacagggctgtgtacaaagtgctgctgaggtttctgtgctccccgcatctgcgggctgtagagcgctgggcagctaagatctgcataggtcgggattggcatcgagaccctggcaactgcaccggtgccagctgtcttgggggccacaaggccaggtccagaccagggctgggggctgcctgaggactcctatccgggcagcctgctggcgggggttcccctcttcagtggccaggtcacagggatggagctgcgctgtgcatagggtgccacctcaggtgtctgtcccttgtgtcctcaggaggcagccttgctaccacccgtggcaaacgccaggtgctttttctgggagagcccacagccgtggccctccagggcttccccgacccttagcgccaggtagagggccctgggcagcctgtgtctggaattcttcgtcctgaggccacctgagtgtggtctgtcctggggaggctgtgcgcctcagcagccgtcctgacgctgagccctctgcaaaggttgggccggccaggcctcttggggctgcctgagccactgcaggaagtggcctggctgggaagttgggtgccggtcacctcccagcaggaaggcacagtggacagagatgggaagccctgggggacacagcccggtgctcccagccctccaacctctggctcccaacccagtctccccatcctagcgagcttggccctcctcagtttcgtttcaagccttggggctggagctggccctgctgccctggcaccccccggtggctggagctgggtccccgtggcccaagtgcagggtcccaagagggcagggcggggctccccaaaggagcaaagaatgcagggagggcggtccagggccctgggaaggggagctcggcaccctccaggtccgtgtgggactccagccgctgttggctgggaatcgaagttagaggtgacttccaaaggccccccgagccggcagtgccccccaccacccctccagcgactctgcggtgccagtgccttgttggcttttccggctacgcaccctgcagtcactgagctctcggtctgacgtctgatgtttgtggtttgtttataacacggggccttacctggggaattcagctggtttgaatatttgtagcccgctcccagaatgtcttattttgtaatgactgaactacatttagtaatagttacacatgtatatggttaatacatatggaaattcaatatattttgtagttaacgtattctgaagtaacggatgtttctcgccaatcgtagtgacttcagctaacgaaatgttcttttgtagtaccacggtcctcggcctaacgaaggacgtgaaccttgtaagaggagagctctgaaacgcggtcacctttgtttagtggaagggaaagtgtgttcccggcatgaggtgcctcggaattagtaaagaattgtgggcaatggattaaccactgtatctaagaatccaccattaaagcatttgcacaga

SEQ ID NO: 197680 - DNA, 3109 bp, Homo sapiens
  Payload ID: 18976
  Gene Name: ubiquitin-conjugating enzyme E2I
  Uniprot ID: P63279
  ENST ID: ENST00000397515
  CDS Start-End: 408-884
cagggtcctcggagctgctctggctgcgcgcggagcgggctccggagggaagtcccgagacaaagggaagcgccgccgccgccgccccgctcggtcctccacctgtccgctacgctcgccggggctgcggccgcccgaggctgccctgaggatctgtgtttggtgaaaaggagccaaattcacctgcagggcaggcggctctagcagcttcagaagcctggtgccctggcgacactggacctgccttggcttctttgatcccaaccccacccccgatttctgctctgctgactggggaagtcatcgtgccacccagaacctgagtgcgggcctctcagagctccttcgtccgtgggtctgccggggactgggccttgtctccctaacgagtgccagggactttgaacatgtcggggatcgccctcagcagactcgcccaggagaggaaagcatggaggaaagaccacccatttggtttcgtggctgtcccaacaaaaaatcccgatggcacgatgaacctcatgaactgggagtgcgccattccaggaaagaaagggactccgtgggaaggaggcttgtttaaactacggatgcttttcaaagatgattatccatcttcgccaccaaaatgtaaattcgaaccaccattatttcacccgaatgtgtacccttcggggacagtgtgcctgtccatcttagaggaggacaaggactggaggccagccatcacaatcaaacagatcctattaggaatacaggaacttctaaatgaaccaaatatccaagacccagctcaagcagaggcctacacgatttactgccaaaacagagtggagtacgagaaaagggtccgagcacaagccaagaagtttgcgccctcataagcagcgaccttgtggcatcgtcaaaaggaagggattggtttggcaagaacttgtttacaacatttttgcaaatctaaagttgctccatacaatgactagtcacctgggggggttgggcgggcgccatcttccattgccgccgcgggtgtgcggtctcgattcgctgaattgcccgtttccatacagggtctcttccttcggtcttttgtatttttgattgttatgtaaaactcgcttttattttaatattgatgtcagtatttcaactgctgtaaaattataaacttttatacttgggtaagtcccccaggggcgagttcctcgctctgggatgcaggcatgcttctcaccgtgcagagctgcacttggcctcagctggctgtatggaaatgcaccctccctcctgccgctcctctctagaaccttctagaacctgggctgtgctgcttttgagcctcagaccccaggtcagcatctcggttctgcgccacttcctttgtgtttatatggcgttttgtctgtgttgctgtttagagtaaataaactgtttatataaaggttttggttgcattattatcattgaaagtgagaggaggcggcctcccagtgcccggccctccccacccacctgcagccccaccgcgggccaggaccaggctctccatctgcttcggatgcacgcaggctgtgaggctctgtcttgccctggatctttgtaaacagggctgtgtacaaagtgctgctgaggtttctgtgctccccgcatctgcgggctgtagagcgctgggcagctaagatctgcataggtcgggattggcatcgagaccctggcaactgcaccggtgccagctgtcttgggggccacaaggccaggtccagaccagggctgggggctgcctgaggactcctatccgggcagcctgctggcgggggttcccctcttcagtggccaggtcacagggatggagctgcgctgtgcatagggtgccacctcaggtgtctgtcccttgtgtcctcaggaggcagccttgctaccacccgtggcaaacgccaggtgctttttctgggagagcccacagccgtggccctccagggcttccccgacccttagcgccaggtagagggccctgggcagcctgtgtctggaattcttcgtcctgaggccacctgagtgtggtctgtcctggggaggctgtgcgcctcagcagccgtcctgacgctgagccctctgcaaaggttgggccggccaggcctcttggggctgcctgagccactgcaggaagtggcctggctgggaagttgggtgccggtcacctcccagcaggaaggcacagtggacagagatgggaagccctgggggacacagcccggtgctcccagccctccaacctctggctcccaacccagtctccccatcctagcgagcttggccctcctcagtttcgtttcaagccttggggctggagctggccctgctgccctggcaccccccggtggctggagctgggtccccgtggcccaagtgcagggtcccaagagggcagggcggggctccccaaaggagcaaagaatgcagggagggcggtccagggccctgggaaggggagctcggcaccctccaggtccgtgtgggactccagccgctgttggctgggaatcgaagttagaggtgacttccaaaggccccccgagccggcagtgccccccaccacccctccagcgactctgcggtgccagtgccttgttggcttttccggctacgcaccctgcagtcactgagctctcggtctgacgtctgatgtttgtggtttgtttataacacggggccttacctggggaattcagctggtttgaatatttgtagcccgctcccagaatgtcttattttgtaatgactgaactacatttagtaatagttacacatgtatatggttaatacatatggaaattcaatatattttgtagttaacgtattctgaagtaacggatgtttctcgccaatcgtagtgacttcagctaacgaaatgttcttttgtagtaccacggtcctcggcctaacgaaggacgtgaaccttgtaagaggagagctctgaaacgcggtcacctttgtttagtggaagggaaagtgtgttcccggcatgaggtgcctcggaattagtaaagaattgtgggcaatggattaaccactgtatctaagaatccaccattaaagcatttgcacagac

SEQ ID NO: 197681 - DNA, 1708 bp, Homo sapiens
  Payload ID: 18976
  Gene Name: ubiquitin-conjugating enzyme E2I
  ENST ID: ENST00000402301
  CDS Start-End: 37-591
ccgtgctctgcctcctgtgttccagggactttgaacatgtcggggatcgccctcagcagactcgcccaggagaggaaagcatggaggaaagaccacccatttggtttcgtggctgtcccaacaaaaaatcccgatggcacgatgaacctcatgaactgggagtgcgccattccaggaaagaaagggactccgtgggaaggaggcttgtttaaactacggatgcttttcaaagatgattatccatcttcgccaccaaaatgtaaattcgaaccaccattatttcacccgaatgtgtacccttcggggacagtgtgcctgtccatcttagaggaggacaaggactggaggccagccatcacaatcaaacagatcctattaggaatacaggaacttctaaatgaaccaaatatccaagacccagctcaagcagaggcctacacgatttactggttagtagcagccctggccccgctggtggcagctcctccccgtcccagccaaggccgcctggcaggacgggagtggaggacacaggctcaccctacggacagccagggtccacgcctctgtggggaaggtcggggggcataaaccctgtgggcagcaggcaccgttgcacaccgtctgcggtgggcatggatggcgccggagccgtgtcccggggagggagcaggccaggtgacgggctgtcttgggccactgccccagtgagttgtggccagctaggaggggaaggaccctgggcgtgggtgccagaggaggccatgctgagaggcctctccaccggctcagcctcccatggaccccagcctcccgcgccgcccttgctgcttgtccccatcccctctacaacttggttccttctgtgggggggcccagcccagcagggctcagtgacgtgatgctgtcacacggaccctgggcttccaccctgtccctgtgaggtgctgctgtggctagaagggtccccgtgggcctggggtcctgtctgcaccgaggagggcctggtgtgagttaggatgcagacgacagccaaacagtgctggggaaagcagggaggaccctgccctgagcagaggccatgcgcccgcctgtcctgttccctctgcagctgttctgggcaggtccataagaaggtgggttggggcctccgaccccccactgctccgcctgcagcgttgagaaacccagccccatctcaccacgggtccccacacctctgagggggtctcagggcccccaatggccagggacccagaaggctcacctgcagccaccccacacatccctgccactgtgggcatcagaggccctctccctccagggtgcatctcctggtcaggaggggggaggctgaggggtcccggttgccttaggcccggcctgcacaggtcgtgaggaaaagcacctggtttcggccgggcgcagtggctcacgcttgtaatcccagcactttgggaggccgaggtgggtgaatcatgcggtcaggagttcgagaccagcctggccaacatggcgaaaccctcgtccctactaaaaatacaaaaaattagttgggcgtagtggtgggtgcctctaatcccagctacctgggaggctgagacaggagaatcacttgaacccgggaggcggaagttgcagtgagccgagatcctgccactgctctccagcctggcgacggaggaatgctgtctcaaaaaaaaaaaaa

SEQ ID NO: 197682 - DNA, 1842 bp, Homo sapiens
  Payload ID: 18976
  Gene Name: ubiquitin-conjugating enzyme E2I
  Uniprot ID: P63279
  ENST ID: ENST00000406620
  CDS Start-End: 809-1285
gggaagcgagagctgtgagtcctcaagtcgcagctgggctgctccacgtgggagtggagggtggaggaacgtgtggagtttcggagtccagcccagtgcggagacagccttgaaaccgtggttggcgggcgctccactccgctctgggctcgaaccctgcctgaccatagctgtgccccccactttctccctgtctggcccctggctccccccccctcacttagaggagggcacggggaagggcaaacggtccagagggcgggcggcctgcgggctcctctgcatcatgtgaggagggcgtggggaaggacatcccggtggggcccggtctggggctgcctccagcccgggctgcctgtcttggacttagtcgtggacctggaggccagtgcccggctggcccctgtcaccctctcgctgtgacgccagcgcctgctgactggaggacccaggttccttcgcctgctttttctcaggctgccctgaggatctgtgtttggtgaaaaggagccaaattcacctgcagggcaggcggctctagcagcttcagaagcctggtgccctggcgacactggacctgccttggcttctttgatcccaaccccacccccgatttctgctctgctgactggggaagtcatcgtgccacccagaacctgagtgcgggcctctcagagctccttcgtccgtgggtctgccggggactgggccttgtctccctaacgagtgccaggtgaggctgcggcggctccgacgcaggtggagctgctgacctggcccctttctgcggctgcgagggactttgaacatgtcggggatcgccctcagcagactcgcccaggagaggaaagcatggaggaaagaccacccatttggtttcgtggctgtcccaacaaaaaatcccgatggcacgatgaacctcatgaactgggagtgcgccattccaggaaagaaagggactccgtgggaaggaggcttgtttaaactacggatgcttttcaaagatgattatccatcttcgccaccaaaatgtaaattcgaaccaccattatttcacccgaatgtgtacccttcggggacagtgtgcctgtccatcttagaggaggacaaggactggaggccagccatcacaatcaaacagatcctattaggaatacaggaacttctaaatgaaccaaatatccaagacccagctcaagcagaggcctacacgatttactgccaaaacagagtggagtacgagaaaagggtccgagcacaagccaagaagtttgcgccctcataagcagcgaccttgtggcatcgtcaaaaggaagggattggtttggcaagaacttgtttacaacatttttgcaaatctaaagttgctccatacaatgactagtcacctgggggggttgggcgggcgccatcttccattgccgccgcgggtgtgcggtctcgattcgctgaattgcccgtttccatacagggtctcttccttcggtcttttgtatttttgattgttatgtaaaactcgcttttattttaatattgatgtcagtatttcaactgctgtaaaattataaacttttatacttgggtaagtcccccaggggcgagttcctcgctctgggatgcaggcatgcttctcaccgtgcagagctgcacttggcctcagctggctgtatggaaatgcaccctccctcctgccgctcctctctagaaccttctagaacctgggctgtgctgcttttgagcctcagaccccaggtcagcatctcggttctgcgccacttcctttgtgtttatatggcgttttgtctgtgttgctgtttagagtaaataaactgtttatataaa

SEQ ID NO: 197683 - DNA, 1217 bp, Homo sapiens
  Payload ID: 18976
  Gene Name: ubiquitin-conjugating enzyme E2I
  Uniprot ID: P63279
  ENST ID: ENST00000403747
  CDS Start-End: 320-796
ggagggaagtcccgagacaaagggaagcgccgccgccgccgccccgctcggtcctccacctgtccgctacgctcgccggggctgcggccgcccgaggctgccctgaggatctgtgtttggtgaaaaggagccaaattcacctgcagggcaggcggctctagcagcttcagaagcctggtgccctggcgacactggacctgccttggcttctttgatcccaaccccacccccgatttctgctctgctgactggggaagtcatcgtgccacccagaacctgagtgcgggcctctcagagctccttcgtccggactttgaacatgtcggggatcgccctcagcagactcgcccaggagaggaaagcatggaggaaagaccacccatttggtttcgtggctgtcccaacaaaaaatcccgatggcacgatgaacctcatgaactgggagtgcgccattccaggaaagaaagggactccgtgggaaggaggcttgtttaaactacggatgcttttcaaagatgattatccatcttcgccaccaaaatgtaaattcgaaccaccattatttcacccgaatgtgtacccttcggggacagtgtgcctgtccatcttagaggaggacaaggactggaggccagccatcacaatcaaacagatcctattaggaatacaggaacttctaaatgaaccaaatatccaagacccagctcaagcagaggcctacacgatttactgccaaaacagagtggagtacgagaaaagggtccgagcacaagccaagaagtttgcgccctcataagcagcgaccttgtggcatcgtcaaaaggaagggattggtttggcaagaacttgtttacaacatttttgcaaatctaaagttgctccatacaatgactagtcacctgggggggttgggcgggcgccatcttccattgccgccgcgggtgtgcggtctcgattcgctgaattgcccgtttccatacagggtctcttccttcggtcttttgtatttttgattgttatgtaaaactcgcttttattttaatattgatgtcagtatttcaactgctgtaaaattataaacttttatacttgggtaagtcccccaggggcgagttcctcgctctgggatgcaggcatgcttctcaccgtgcagagctgcacttggcctcagctggctgtatggaaatgcaccctccctcctgccgctcctctctaga

SEQ ID NO: 197684 - DNA, 396 bp, Homo sapiens
  Payload ID: 18976
  Gene Name: ubiquitin-conjugating enzyme E2I
  ENST ID: ENST00000566775
  CDS Start-End: 1-211
cctcagcagactcgcccaggagaggaaagcatggaggaaagaccacccatttggtttcgtggctgtcccaacaaaaaatcccgatggcacgatgaacctcatgaactgggagtgcgccattccaggaaagaaagggactccgtgggaaggaggcttgtttaaactacggatgcttttcaaagatgattatccatcttcgccaccaaaataaataacacagggtcctaaaagcccgtatatcctggaagcagagggtctgcgtcggaacagccgactctggaagggcgttggctatgtccctggacgtctcctgcagctcctcccatctcccctgagtctggcccagctggaaaggatgtgggggccacaggtaaattcgaaccaccattatttcac

SEQ ID NO: 197685 - DNA, 884 bp, Homo sapiens
  Payload ID: 18976
  Gene Name: ubiquitin-conjugating enzyme E2I
  ENST ID: ENST00000567074
  CDS Start-End: 472-884
ctcagttctgagcgcctgatactaaggcagggacccagcaccccacatccatctggggccccagccctgcctagtccccacctgatggtatggtgaggaccctgccatgtcagccaccacagggtggcagctaccccccagccgcagcggcccagcctctgaacatctgtctcctcaccttcgagcagaggccgcagcatgtgtcgcagaccagggctgggttggggccatggggaggggtcctacctgcccccgcctcccggtgatctgggcgccgctcacaaggcctcccctggtagacccccggggtcggacgacggcttgcaagaagagagtccctgctgggccaggccaccgtatgttaggagcaagcctgcctgctgcgggccacgtgcgcgtgctggggtggcaggagcccgctcgcctctcctgaccccgtgctctgcctcctgtgttccagggactttgaacatgtcggggatcgccctcagcagactcgcccaggagaggaaagcatggaggaaagaccacccatttggtttcgtggctgtcccaacaaaaaatcccgatggcacgatgaacctcatgaactgggagtgcgccattccaggaaagaaagggactccgtgggaaggaggcttgtttaaactacggatgcttttcaaagatgattatccatcttcgccaccaaaatgtaaattcgaaccaccattatttcacccgaatgtgtacccttcggggacagtgtgcctgtccatcttagaggaggacaaggactggaggccagccatcacaatcaaacagatcctattaggaatacaggaacttctaaatgaaccaaatatccaagacccagctcaagcagaggcctacacgatttactg

SEQ ID NO: 197686 - DNA, 538 bp, Homo sapiens
  Payload ID: 18976
  Gene Name: ubiquitin-conjugating enzyme E2I
  ENST ID: ENST00000567383
  CDS Start-End: 451-538
ggctgcgcgcggagcgggctccggagggaagtcccgagacaaagggaagcgccgccgccgccgccccgctcggtcctccacctgtccgctacgctcgccggggctgcggccgcccgaggctgccctgaggatctgtgtttggtgaaaaggagccaaattcacctgcagggcaggcggctctagcagcttcagaagcctggtgccctggcgacactggacctgccttggcttctttgatcccaaccccacccccgatttctgctctgctgactggggaagtcatcgtgccacccagaacctgagtgcgggcctctcagagctccttcgtccgtgggtctgccggggactgggccttgtctccctaacgagtgccaggtgaggctgcggcggctccgacgcaggtggagctgctgacctggcccctttctgcggctgcgagggactttgaacatgtcggggatcgccctcagcagactcgcccaggagaggaaagcatggaggaaagaccacccatttggtttcgtggctgtcccaacaa

SEQ ID NO: 197687 - DNA, 1098 bp, Homo sapiens
  Payload ID: 18976
  Gene Name: ubiquitin-conjugating enzyme E2I
  Uniprot ID: P63279
  ENST ID: ENST00000566587
  CDS Start-End: 463-939
cgcggggcgggggtcgggccgaggcctctactcctgttgggcccgggcccccgactgccccgcgccccgccccgccgagccgggccccgcgccgcggccgagctttccggggagcccgagaggccccgcgctcggcgccggctcggtccgcgctgctggcgccgctgggctgcggcccgagcggccgggccgccgcaggccttcggggccggggctcccccacttcgcccccgaggtgcgcctggcgcggggccggggcagccacctgcagccggggccccgcgaggccgcgccttcctcctgcgcggggagcggcttccggggtcacggtcgccccgcggacggataggatgggccgcggggggagagtcttggattgcaacatcgctggctcgcgggggtgggggccggcgagcgggcttgttttcggtgccttaaaaccaaaacaagtggactttgaacatgtcggggatcgccctcagcagactcgcccaggagaggaaagcatggaggaaagaccacccatttggtttcgtggctgtcccaacaaaaaatcccgatggcacgatgaacctcatgaactgggagtgcgccattccaggaaagaaagggactccgtgggaaggaggcttgtttaaactacggatgcttttcaaagatgattatccatcttcgccaccaaaatgtaaattcgaaccaccattatttcacccgaatgtgtacccttcggggacagtgtgcctgtccatcttagaggaggacaaggactggaggccagccatcacaatcaaacagatcctattaggaatacaggaacttctaaatgaaccaaatatccaagacccagctcaagcagaggcctacacgatttactgccaaaacagagtggagtacgagaaaagggtccgagcacaagccaagaagtttgcgccctcataagcagcgaccttgtggcatcgtcaaaaggaagggattggtttggcaagaacttgtttacaacatttttgcaaatctaaagttgctccatacaatgactagtcacctgggggggttgggcgggcgccatcttccattgccgccgcgggtgtgcggtctcga

SEQ ID NO: 197688 - DNA, 5245 bp, Homo sapiens
  Payload ID: 18977
  Gene Name: ubiquitin-conjugating enzyme E2K
  Uniprot ID: P61086
  ENST ID: ENST00000261427
  CDS Start-End: 285-887
acgcgagctcgtggctcgggcgtatgggggctccaacgggagcggctgcgccgcccggccgggtcaacgtcgtgcgcatgcgccgacccggcgccattttggtggccgggcgcggaggtgattccacactgaggcgagcgcggcggccggggtggtagtggcagtgttcgtgtgctcaggtctgaatcgccgagggaggaggcggtggaggaagaggtggcggcggtggcggtggtcgtagcggtggcggaggaggcgggtacgaatcagctgcgggcggagacatggccaacatcgcggtgcagcgaatcaagcgggagttcaaggaggtgctgaagagcgaggagacgagcaaaaatcaaattaaagtagatcttgtagatgagaattttacagaattaagaggagaaatagcaggacctccagacacaccatatgaaggaggaagataccaactagagataaaaataccagaaacatacccatttaatccccctaaggtccggtttatcactaaaatatggcatcctaatattagttccgtcacaggggctatttgtttggatatcctgaaagatcaatgggcagctgcaatgactctccgcacggtattattgtcattgcaagcactattggcagctgcagagccagatgatccacaggatgctgtagtagcaaatcagtacaaacaaaatcccgaaatgttcaaacagacagctcgactttgggcacatgtgtatgctggagcaccagtttctagtccagaatacaccaaaaaaatagaaaacctatgtgctatgggctttgataggaatgcagtaatagtggccttgtcttcaaaatcatgggatgtagagactgcaacagaattgcttctgagtaactgaggcatagagagctgctgatatagtcaagcttgcctcttcttgaggagcaccaacatctgttatttttaggattctgcatagatttcttttaaactggcattcttgcctaatgatgttatctaggcaccattggagactgaaaaaaaaaaatccctgctctgtaaataaagctaattaaacgtctgtgtaaatttaaaaaggggaaatactttaattttttttcttaatagtgtaaaaattccctgagctaagctaaaaccatggaagaaacatgctactttagtgtttagcagtgtaccaagactagcaagagtttgcttcaggattttgttgaataattaagataatattttgagtgtgtcagggccattcaaattgttggtgttgcatcacagctaccttaactgtttttaacatggatcctctgtgcctgtgaatttacttgcatgcttgtacttgacttcttaggatgggtagctgaaaagaccaccattttaagcatttgagaattcttaaatatgaaatttattcagaattgaagatggtgacctattcagagcctttttgtccttgtcaacagactgggacagtgtctgattcccccttcaccccccccacccccgccttgccacacacagctaatattctaatggtaaatttctctgtatcaggtggggaaatgtgctgaaggacagtatgtatcccttgcttcatttttaggtcgtaggtttggaatgtcttgtcccagttcttcaaacactcttaaatttttcttaagtaatgtaaaaatggaactgccaattttatttctcttgcaaaaatagtaaatacttgatgttacattattcccaggtttaatgaaagaacccaacttagtttttcagtgaatttgacacctattttttagtgatgaaatttttctttgagaactggcaaggatgcagtcagctgtttgcagtttttagcctgattttggggtctatagagattgctttattggatacttcaagtcattcttgcttgcacttcccctattgacacatgaaagctgtgttggtgttttattgtacatacttcagatgcacataggaatagaagtgtgttataaatctagctttctttatgatgtttctgataatacgagaattgaaaactttaccttctcttgtacatagtcagactatttgtattaaatttacatttcattctaagttcaaaagtttgaaaattattagttttgcaagatcacacactaatgtaaccattttatgaaggttgaagtggatttatgcaggcagttctatatatagaaatacaattctttttaaatttttaggaccaatacaaaataacaaaaatgtaatggaatcagactgaattaaagtaaggctgtatattgaaagtcatattataaaaggtttgctttctttaagtgttatttatcttaaattataatcgttaaatgtttggaagataatttttgaatcataacgtcagcataacttcatttgacttctcaataatcttgatactagaagcaataaaagaaccattattaaatatattgtaatgttaaagatgtgaaggttcttccaaaaatttgtaaggctttcctaattaacagtaaactcttatagctgatattattacatactaaacacaagttgctgttttttccccatatgtttgcttacgcatgtctttatacaatcacctctttttattgctgtagtttattttctaaagatgccaaaggaaacaagatttttctttatttattttaaatacctgaaacctcgtactttatattttgaagtaaggtgggattgtgtgaaaatgtggatggtttttctccagtgttggttagaactactttttttaagtggagggcaacttggtagtattagtagaatttgggtttaaaaatatcagacacatctacccagtttattttttgcctgtattatcagggtatatttaattgtcctgtggttaaacaaaggtgagagagctcagaggtttctaaaggtcaagcattttacatatatacatacatacatgctcttggaggcagctatatcctgctttgatttttatgcacatgagccctatagggttatatactcatctaactacacttcagcatccccagtgcccaagaaattggaaagtacaatatttggtttgagacattcttcataaaagattctttattataaaaatttacctcatttacatttaatgtgatgatcttttttttcctttctggtatatttcccactgtactgtttggtttttgttattctcttgtctgtgggtagatttagttacccaaacatagaaactaaagcaattgcttttttcctctggtcttaaatatgtttggacaaaaagacactaaaaggtcaggcctaggggaaaagtaccctggtggaaattatttttgtaattcttaatatttttgagttggctccgtttgtcagttttaaaagcctcaaaaattatgttaaaaaaaaaatccagtgaaatcccatttagggcaggccgatttgttagaagtcactgatgctccagtaggcttttgttataatcaggcctgtttcctgagtatgtgcctcttttaaaagaagaaataattagctgtatagtatttcagtactgatgaatgaatgaatgaatgaatggcagttagtggacccaaataagtattcagtggtatataaatatttgaggaactaggtactgaattaggtgctctgagttggcaccccgaaatgtttggaatcacgactatgatttacttaaacacgtaacacattcaaggatatataaatggagtctaagtattttgcttttgaagagaataatctatgaaatggaagacttgattttttttttcattttttagaagtaatacacatttatgattgttggcacataaaactatgcaaaataattctttttaagtatctgtaagaaagaattggcagtttaaacggattttgcttatttatgcactacagaatgcagcatactgtattactgttgaggctgcttaataagtttaccaatgtgaaaagcagatcttgggtataagtgtatgcctgatttgagcttttaaaactgtgcagtaggtgtatggtaatgttttacaatcctatgtagcaaaataggaaattatgaatttttgttgttattgttttaaagatttaagatggattggggtagggaacagctggagccaggtataccttctagtatgtagagggaaacaatgtttagataggaaaaaggaagccgtctgtttacagttaactttatttcatggacttctacaaaatgttgtattaatcactttttctagttcaaggaatttcaattccagggtacaaaccattgatttaaaaattacgtttccattctttttagtatcagtttaaagtaaatgcttaccatcagccagttgctgtcactgggaagaaggcaacttgaagtatttactgataaaatagcctttattcccaagtgtgacttttcttcagtgtctacatattatgtcacacgttctatttgcactgctgcaatatagatcaaagatcttgtggcataggggtaggggagtgttagtatctcccttgtcccatttgttctgttactgcttcattggactgatacaccctcatgaacttgcaatcacctaaatggaagtcttgaatgtgtcaccttttgcttggttatttcaaccatgctgctatatataatcaggtgtggcacagtttgtcagtttgattataggtgtgagtggatagaaatcattacactgtgctgttaacgatccttgtctgcttgctgttacctactttttacaggcatcataataaaagctagactatttctttggggggaaagagacttatttaatgtaatttaaaaaacttttccaatagaaaatgaaatattattgaaaataatatctattttttagctttcagcaattgatggtgctttgttgtggtgtctgctggaagtctactgccattatagggaaccttgcttgttagcttctctagatctctattctaaacaatctgttagtgatgataaattctgtaggagggtctattctgagccgttaacttcctgtaaggggaaaatgggtgggttaccagaaataccattgaagcagggtgggctgtggggtggaaggttggggtatttgtcttgagaattaaaaactacgaaacacttttgtacacaactgattttttaaaaaataaacacatttttaaagatgttgaatttttccccccttattgggaattcttaaaaataaatgcatgcatgttttcccctgaaaa

SEQ ID NO: 197689 - DNA, 2175 bp, Homo sapiens
  Payload ID: 18977
  Gene Name: ubiquitin-conjugating enzyme E2K
  Uniprot ID: P61086
  ENST ID: ENST00000445950
  CDS Start-End: 153-626
ggcgagcgcggcggccggggtggtagtggcagtgttcgtgtgctcaggtctgaatcgccgagggaggaggcggtggaggaagaggtggcggcggtggcggtggtcgtagcggtggcggaggaggcgggtacgaatcagctgcgggcggagacatggccaacatcgcggtgcagcgaatcaagcgggagttcaaggaggtgctgaagagcgaggagacgagcaaaaatcaaattaaagtagatcttgtagatgagaattttacagaattaagaggagaaatagcaggacctccagacacaccatatgaaggaggaagataccaactagagataaaaataccagaaacatacccatttaatccccctaaggtccggtttatcactaaaatatggcatcctaatattagttccgtcacaggggctatttgtttggatatcctgaaagatcaatgggcagctgcaatgactctccgcacggtattattgtcattgcaagcactattggcagctgcagagccagatgatccacaggatgctgtagtagcaaatcagaatgcagtaatagtggccttgtcttcaaaatcatgggatgtagagactgcaacagaattgcttctgagtaactgaggcatagagagctgctgatatagtcaagcttgcctcttcttgaggagcaccaacatctgttatttttaggattctgcatagatttcttttaaactggcattcttgcctaatgatgttatctaggcaccattggagactgaaaaaaaaaaatccctgctctgtaaataaagctaattaaacgtctgtgtaaatttaaaaaggggaaatactttaattttttttcttaatagtgtaaaaattccctgagctaagctaaaaccatggaagaaacatgctactttagtgtttagcagtgtaccaagactagcaagagtttgcttcaggattttgttgaataattaagataatattttgagtgtgtcagggccattcaaattgttggtgttgcatcacagctaccttaactgtttttaacatggatcctctgtgcctgtgaatttacttgcatgcttgtacttgacttcttaggatgggtagctgaaaagaccaccattttaagcatttgagaattcttaaatatgaaatttattcagaattgaagatggtgacctattcagagcctttttgtccttgtcaacagactgggacagtgtctgattcccccttcaccccccccacccccgccttgccacacacagctaatattctaatggtaaatttctctgtatcaggtggggaaatgtgctgaaggacagtatgtatcccttgcttcatttttaggtcgtaggtttggaatgtcttgtcccagttcttcaaacactcttaaatttttcttaagtaatgtaaaaatggaactgccaattttatttctcttgcaaaaatagtaaatacttgatgttacattattcccaggtttaatgaaagaacccaacttagtttttcagtgaatttgacacctattttttagtgatgaaatttttctttgagaactggcaaggatgcagtcagctgtttgcagtttttagcctgattttggggtctatagagattgctttattggatacttcaagtcattcttgcttgcacttcccctattgacacatgaaagctgtgttggtgttttattgtacatacttcagatgcacataggaatagaagtgtgttataaatctagctttctttatgatgtttctgataatacgagaattgaaaactttaccttctcttgtacatagtcagactatttgtattaaatttacatttcattctaagttcaaaagtttgaaaattattagttttgcaagatcacacactaatgtaaccattttatgaaggttgaagtggatttatgcaggcagttctatatatagaaatacaattctttttaaatttttaggaccaatacaaaataacaaaaatgtaatggaatcagactgaattaaagtaaggctgtatattgaaagtcatattataaaaggtttgctttctttaagtgttatttatcttaaattataatcgttaaatgtttggaagataatttttgaatcataacgtcagcataacttcatttgacttctcaataatcttgatactagaagcaataaaagaa

SEQ ID NO: 197690 - DNA, 891 bp, Homo sapiens
  Payload ID: 18977
  Gene Name: ubiquitin-conjugating enzyme E2K
  Uniprot ID: P61086
  ENST ID: ENST00000503368
  CDS Start-End: 166-615
gattccacactgaggcgagcgcggcggccggggtggtagtggcagtgttcgtgtgctcaggtctgaatcgccgagggaggaggcggtggaggaagaggtggcggcggtggcggtggtcgtagcggtggcggaggaggcgggtacgaatcagctgcgggcggagacatggccaacatcgcggtgcagcgaatcaagcgggagttcaaggaggtgctgaagagcgaggaggtccggtttatcactaaaatatggcatcctaatattagttccgtcacaggggctatttgtttggatatcctgaaagatcaatgggcagctgcaatgactctccgcacggtattattgtcattgcaagcactattggcagctgcagagccagatgatccacaggatgctgtagtagcaaatcagtacaaacaaaatcccgaaatgttcaaacagacagctcgactttgggcacatgtgtatgctggagcaccagtttctagtccagaatacaccaaaaaaatagaaaacctatgtgctatgggctttgataggaatgcagtaatagtggccttgtcttcaaaatcatgggatgtagagactgcaacagaattgcttctgagtaactgaggcatagagagctgctgatatagtcaagcttgcctcttcttgaggagcaccaacatctgttatttttaggattctgcatagatttcttttaaactggcattcttgcctaatgatgttatctaggcaccattggagactgaaaaaaaaaaatccctgctctgtaaataaagctaattaaacgtctgtgtaaatttaaaaaggggaaatactttaattttttttcttaatagtgtaaaaattccctgagctaagctaaaaccatggaagaaacatgct

SEQ ID NO: 197691 - DNA, 566 bp, Homo sapiens
  Payload ID: 18977
  Gene Name: ubiquitin-conjugating enzyme E2K
  ENST ID: ENST00000510719
  CDS Start-End: 1-135
atggccaacatcgcggtgcagcgaatcaagcgggagttcaaggaggtgctgaagagcgaggagggcagctgcaatgactctccgcacggtattattgtcattgcaagcactattggcagctgcagagccagatgatccacaggatgctgtagtagcaaatcagtacaaacaaaatcccgaaatgttcaaacagacagctcgactttgggcacatgtgtatgctggagcaccagtttctagtccagaatacaccaaaaaaatagaaaacctatgtgctatgggctttgataggaatgcagtaatagtggccttgtcttcaaaatcatgggatgtagagactgcaacagaattgcttctgagtaactgaggcatagagagctgctgatatagtcaagcttgcctcttcttgaggagcaccaacatctgttatttttaggattctgcatagatttcttttaaactggcattcttgcctaatgatgttatctaggcaccattggagactgaaaaaaaaaaatccctgctctgtaaataaagctaattaaacgtctgtgtaaatttaaaaa

SEQ ID NO: 197692 - DNA, 589 bp, Homo sapiens
  Payload ID: 18977
  Gene Name: ubiquitin-conjugating enzyme E2K
  ENST ID: ENST00000510934
  CDS Start-End: 220-589
aacgtcgtgcgcatgcgccgacccggcgccattttggtggccgggcgcggaggtgattccacactgaggcgagcgcggcggccggggtggtagtggcagtgttcgtgtgctcaggtctgaatcgccgagggaggaggcggtggaggaagaggtggcggcggtggcggtggtcgtagcggtggcggaggaggcgggtacgaatcagctgcgggcggagacatggccaacatcgcggtgcagcgaatcaagcgggagttcaaggaggtgctgaagagcgaggagacgagcaaaaatcaaattaaagtagatcttgtagatgagaattttacagaattaagaggagaaatagcaggacctccagacacaccatatgaaggaggaagataccaactagagataaaaataccagaaacatacccatttaatccccctaagtacaaacaaaatcccgaaatgttcaaacagacagctcgactttgggcacatgtgtatgctggagcaccagtttctagtccagaatacaccaaaaaaatagaaaacctatgtgctatgggctttgataggaatgcagtaatagtggccttgtctt

SEQ ID NO: 197693 - DNA, 3028 bp, Homo sapiens
  Payload ID: 18978
  Gene Name: ubiquitin-conjugating enzyme E2L 3
  Uniprot ID: P68036
  ENST ID: ENST00000342192
  CDS Start-End: 199-663
aaacgctgaggcccagtctgtgcggttcacttgcgttcctccacgcgccccccagcacagtgggaagcacacagtaggtgctccgctctgctcctgtgccccgccccgcggcccctcccccgctccaggaagtgcgggggctccagccgcccggccggccgcgatgcattctggggaaggagcagcaccaaatccaagatggcggccagcaggaggctgatgaaggagcttgaagaaatccgcaaatgtgggatgaaaaacttccgtaacatccaggttgatgaagctaatttattgacttggcaagggcttattgttcctgacaaccctccatatgataagggagccttcagaatcgaaatcaactttccagcagagtacccattcaaaccaccgaagatcacatttaaaacaaagatctatcacccaaacatcgacgaaaaggggcaggtctgtctgccagtaattagtgccgaaaactggaagccagcaaccaaaaccgaccaagtaatccagtccctcatagcactggtgaatgacccccagcctgagcacccgcttcgggctgacctagctgaagaatactctaaggaccgtaaaaaattctgtaagaatgctgaagagtttacaaagaaatatggggaaaagcgacctgtggactaaaatctgccacgattggttccagcaagtgtgagcagagaccccgtgcagtgcattcagacaccccgcaaagcaggactctgtggaaattgacacgtgccaccgcctggcgttcgcttgtggcagttactaactttctacagttttcttaatcaaaagtggtctaggtaacctgtaaagaaaggattaaaaatttaagatgttctagttctgctctctttgttttaaaaatcactgcttcaatctacttcaaaagaatggtgtttcttttcttgtccaattttatccaaaatcttcaagttacatttaacccataaggtttaaaaaaaaggaaaaaaaacggttgtggttccctttcttccctacccttgccactcccactttctggcaccgagtttatttttcacttacttacttccccagaccccgggctcgcctccacaaaggagaagagactgccctggcggtcctggtggcttttcttagcatgtgtggcactgttgcccagtgtgggagttggtttaaattctcctgactccagtttataacatccttttaaaaaatttaaaaacaaacagccacacccctcctccagtccttctcctcagttcttgtgtgaaactccagctgatgttaccacagtaacatcagttaattgggcaagccctgatgtcagtgtgtgtaactgacctctggcctggcctgcacagagaagccctataatcacaggtctgtggtggccccgaaatggggggcctgctagtcaggaggatgctgtgcacactgtgtgtgatgaatctcgccagaaaggctcctgaggtcccaggttggcacttctccctgcagccattgtagaagatctgctggtccttgcaggcaaagctacagccagaatgtccgtttgaaactcctagctcatctgtcaccgagcttcatccgaatgtgccacggagcttgctctccacttcctccgtgcagtggccctgccacagccctccctcggcacactttgaccctttgtaggattggaattagcaggactcggctatttaaagcaccagtctggggtcgcctgggcccctgctgaccccctcctccagagcagccagcccagcccgggaacaagacggacttcctctcccttcggactcacagcctttgcagagtcaagctccacttgaagctcactcagtaatatcctttcaatgtgttttatattgttttgactgcctttttttgtagaaataaaaattgaccttagaatttatcgtcagataaacttgtaaagatttgaatattaatgtcttttcaaggcaaatgggattgtccccgcactagtagagaatccatgtcgctctgacaccccaaggaagccgacgatccaaatgccgtgtgtcaccaaccccgcttctgccactggcggcttcccttcttggctcttgggggggactagatcctgtggagaagatgacttaaactttgctttttgttttaattttaattctataacttgagatctttccggggcctacaggcgtgtaagacagcttggtctggtctgtgcagaagtggggagtgatgggcaggttcggcagcctaacattgttcaggcgcatggcccctgcggtgtgtacacgaactcggcttcttttgtcctaggtacgccaagggcaggtttctggagactcccttgtgcccgggatggcaagggcaccgggctggcgtttccacatctgtcttcattagcagaaaagtgatgatggattttatttcactcacactccagtttgtaataaaatgccaaattctgtcagctatccaaacaagccaccatttgttcttgttgcttctctggatccagaaatgttgccattcttggaaactgtcccattgcttcgtatttctgccaacgtagctctgcctgcctgtcaacccctcactgcactctgctcatcacgggaggatacctgtgtgccggcagcccctcagggactctcagccctggcactggcaccccagggttggccccgtcagcagaggcttggctttcgagccagtgggtgtctctcctttgggcctgggcggcttgctcctgccagccatgccttcagggtaggctctgagcaagctggcgaacagccctggctgctccaaaaccaaaaagctgggtcctctggaggaggggcgagctgtggagcagccacccactgctgccccaagctcactcaggaattcacacccgcctggtttcttgaagtgtgctgggtccttccctctgctccctactccccaccacggcagagaataggctttctaagatgctgcgatcccgttctgctgcccgtaataaaaatgctctcagacactg

SEQ ID NO: 197694 - DNA, 3007 bp, Homo sapiens
  Payload ID: 18978
  Gene Name: ubiquitin-conjugating enzyme E2L 3
  Uniprot ID: P68036
  ENST ID: ENST00000458578
  CDS Start-End: 4-642
agtatgcaggtcgctgcagggacccgaggcgacacgcgcctgcaggaggtggcactcctgccgcagctcttcgatctgcttgtccttggccagcggcgcgctcgcctgctccgacaggtcccgagcgcgctggcgggcaaagacttggcacagctccaggccggcgcaactctcgccgggtataggcgcgctcacggcccggaggagcttgaagaaatccgcaaatgtgggatgaaaaacttccgtaacatccaggttgatgaagctaatttattgacttggcaagggcttattgttcctgacaaccctccatatgataagggagccttcagaatcgaaatcaactttccagcagagtacccattcaaaccaccgaagatcacatttaaaacaaagatctatcacccaaacatcgacgaaaaggggcaggtctgtctgccagtaattagtgccgaaaactggaagccagcaaccaaaaccgaccaagtaatccagtccctcatagcactggtgaatgacccccagcctgagcacccgcttcgggctgacctagctgaagaatactctaaggaccgtaaaaaattctgtaagaatgctgaagagtttacaaagaaatatggggaaaagcgacctgtggactaaaatctgccacgattggttccagcaagtgtgagcagagaccccgtgcagtgcattcagacaccccgcaaagcaggactctgtggaaattgacacgtgccaccgcctggcgttcgcttgtggcagttactaactttctacagttttcttaatcaaaagtggtctaggtaacctgtaaagaaaggattaaaaatttaagatgttctagttctgctctctttgttttaaaaatcactgcttcaatctacttcaaaagaatggtgtttcttttcttgtccaattttatccaaaatcttcaagttacatttaacccataaggtttaaaaaaaaggaaaaaaaacggttgtggttccctttcttccctacccttgccactcccactttctggcaccgagtttatttttcacttacttacttccccagaccccgggctcgcctccacaaaggagaagagactgccctggcggtcctggtggcttttcttagcatgtgtggcactgttgcccagtgtgggagttggtttaaattctcctgactccagtttataacatccttttaaaaaatttaaaaacaaacagccacacccctcctccagtccttctcctcagttcttgtgtgaaactccagctgatgttaccacagtaacatcagttaattgggcaagccctgatgtcagtgtgtgtaactgacctctggcctggcctgcacagagaagccctataatcacaggtctgtggtggccccgaaatggggggcctgctagtcaggaggatgctgtgcacactgtgtgtgatgaatctcgccagaaaggctcctgaggtcccaggttggcacttctccctgcagccattgtagaagatctgctggtccttgcaggcaaagctacagccagaatgtccgtttgaaactcctagctcatctgtcaccgagcttcatccgaatgtgccacggagcttgctctccacttcctccgtgcagtggccctgccacagccctccctcggcacactttgaccctttgtaggattggaattagcaggactcggctatttaaagcaccagtctggggtcgcctgggcccctgctgaccccctcctccagagcagccagcccagcccgggaacaagacggacttcctctcccttcggactcacagcctttgcagagtcaagctccacttgaagctcactcagtaatatcctttcaatgtgttttatattgttttgactgcctttttttgtagaaataaaaattgaccttagaatttatcgtcagataaacttgtaaagatttgaatattaatgtcttttcaaggcaaatgggattgtccccgcactagtagagaatccatgtcgctctgacaccccaaggaagccgacgatccaaatgccgtgtgtcaccaaccccgcttctgccactggcggcttcccttcttggctcttgggggggactagatcctgtggagaagatgacttaaactttgctttttgttttaattttaattctataacttgagatctttccggggcctacaggcgtgtaagacagcttggtctggtctgtgcagaagtggggagtgatgggcaggttcggcagcctaacattgttcaggcgcatggcccctgcggtgtgtacacgaactcggcttcttttgtcctaggtacgccaagggcaggtttctggagactcccttgtgcccgggatggcaagggcaccgggctggcgtttccacatctgtcttcattagcagaaaagtgatgatggattttatttcactcacactccagtttgtaataaaatgccaaattctgtcagctatccaaacaagccaccatttgttcttgttgcttctctggatccagaaatgttgccattcttggaaactgtcccattgcttcgtatttctgccaacgtagctctgcctgcctgtcaacccctcactgcactctgctcatcacgggaggatacctgtgtgccggcagcccctcagggactctcagccctggcactggcaccccagggttggccccgtcagcagaggcttggctttcgagccagtgggtgtctctcctttgggcctgggcggcttgctcctgccagccatgccttcagggtaggctctgagcaagctggcgaacagccctggctgctccaaaaccaaaaagctgggtcctctggaggaggggcgagctgtggagcagccacccactgctgccccaagctcactcaggaattcacacccgcctggtttcttgaagtgtgctgggtccttccctctgctccctactccccaccacggcagagaataggctttctaagatgctgcgatcccgttctgctgcccgtaataaaaatgctctcagacactg

SEQ ID NO: 197695 - DNA, 2932 bp, Homo sapiens
  Payload ID: 18978
  Gene Name: ubiquitin-conjugating enzyme E2L 3
  Uniprot ID: P68036
  ENST ID: ENST00000545681
  CDS Start-End: 199-567
aaacgctgaggcccagtctgtgcggttcacttgcgttcctccacgcgccccccagcacagtgggaagcacacagtaggtgctccgctctgctcctgtgccccgccccgcggcccctcccccgctccaggaagtgcgggggctccagccgcccggccggccgcgatgcattctggggaaggagcagcaccaaatccaagatggcggccagcaggaggctgatgaaggacaaccctccatatgataagggagccttcagaatcgaaatcaactttccagcagagtacccattcaaaccaccgaagatcacatttaaaacaaagatctatcacccaaacatcgacgaaaaggggcaggtctgtctgccagtaattagtgccgaaaactggaagccagcaaccaaaaccgaccaagtaatccagtccctcatagcactggtgaatgacccccagcctgagcacccgcttcgggctgacctagctgaagaatactctaaggaccgtaaaaaattctgtaagaatgctgaagagtttacaaagaaatatggggaaaagcgacctgtggactaaaatctgccacgattggttccagcaagtgtgagcagagaccccgtgcagtgcattcagacaccccgcaaagcaggactctgtggaaattgacacgtgccaccgcctggcgttcgcttgtggcagttactaactttctacagttttcttaatcaaaagtggtctaggtaacctgtaaagaaaggattaaaaatttaagatgttctagttctgctctctttgttttaaaaatcactgcttcaatctacttcaaaagaatggtgtttcttttcttgtccaattttatccaaaatcttcaagttacatttaacccataaggtttaaaaaaaaggaaaaaaaacggttgtggttccctttcttccctacccttgccactcccactttctggcaccgagtttatttttcacttacttacttccccagaccccgggctcgcctccacaaaggagaagagactgccctggcggtcctggtggcttttcttagcatgtgtggcactgttgcccagtgtgggagttggtttaaattctcctgactccagtttataacatccttttaaaaaatttaaaaacaaacagccacacccctcctccagtccttctcctcagttcttgtgtgaaactccagctgatgttaccacagtaacatcagttaattgggcaagccctgatgtcagtgtgtgtaactgacctctggcctggcctgcacagagaagccctataatcacaggtctgtggtggccccgaaatggggggcctgctagtcaggaggatgctgtgcacactgtgtgtgatgaatctcgccagaaaggctcctgaggtcccaggttggcacttctccctgcagccattgtagaagatctgctggtccttgcaggcaaagctacagccagaatgtccgtttgaaactcctagctcatctgtcaccgagcttcatccgaatgtgccacggagcttgctctccacttcctccgtgcagtggccctgccacagccctccctcggcacactttgaccctttgtaggattggaattagcaggactcggctatttaaagcaccagtctggggtcgcctgggcccctgctgaccccctcctccagagcagccagcccagcccgggaacaagacggacttcctctcccttcggactcacagcctttgcagagtcaagctccacttgaagctcactcagtaatatcctttcaatgtgttttatattgttttgactgcctttttttgtagaaataaaaattgaccttagaatttatcgtcagataaacttgtaaagatttgaatattaatgtcttttcaaggcaaatgggattgtccccgcactagtagagaatccatgtcgctctgacaccccaaggaagccgacgatccaaatgccgtgtgtcaccaaccccgcttctgccactggcggcttcccttcttggctcttgggggggactagatcctgtggagaagatgacttaaactttgctttttgttttaattttaattctataacttgagatctttccggggcctacaggcgtgtaagacagcttggtctggtctgtgcagaagtggggagtgatgggcaggttcggcagcctaacattgttcaggcgcatggcccctgcggtgtgtacacgaactcggcttcttttgtcctaggtacgccaagggcaggtttctggagactcccttgtgcccgggatggcaagggcaccgggctggcgtttccacatctgtcttcattagcagaaaagtgatgatggattttatttcactcacactccagtttgtaataaaatgccaaattctgtcagctatccaaacaagccaccatttgttcttgttgcttctctggatccagaaatgttgccattcttggaaactgtcccattgcttcgtatttctgccaacgtagctctgcctgcctgtcaacccctcactgcactctgctcatcacgggaggatacctgtgtgccggcagcccctcagggactctcagccctggcactggcaccccagggttggccccgtcagcagaggcttggctttcgagccagtgggtgtctctcctttgggcctgggcggcttgctcctgccagccatgccttcagggtaggctctgagcaagctggcgaacagccctggctgctccaaaaccaaaaagctgggtcctctggaggaggggcgagctgtggagcagccacccactgctgccccaagctcactcaggaattcacacccgcctggtttcttgaagtgtgctgggtccttccctctgctccctactccccaccacggcagagaataggctttctaagatgctgcgatcccgttctgctgcccgtaataaaaatgctctcagacactg

SEQ ID NO: 197696 - DNA, 1354 bp, Homo sapiens
  Payload ID: 18979
  Gene Name: ubiquitin-conjugating enzyme E2L 6
  Uniprot ID: O14933
  ENST ID: ENST00000287156
  CDS Start-End: 197-658
ttgtccggcgggtcgtccttcgacggcctcctggcctcgccggagcgggtgcggggaggcccacgcagcgacggctggaggaggggtgggcggggctgccgggggtggggtccccggggcggggcggggcgcgctgtgtcgcgggtcggagctcggtcctgctggaggccacgggtgccacacactcggtcccgacatgatggcgagcatgcgagtggtgaaggagctggaggatcttcagaagaagcctcccccatacctgcggaacctgtccagcgatgatgccaatgtcctggtgtggcacgctctcctcctacccgaccaacctccctaccacctgaaagccttcaacctgcgcatcagcttcccgccggagtatccgttcaagcctcccatgatcaaattcacaaccaagatctaccaccccaacgtggacgagaacggacagatttgcctgcccatcatcagcagtgagaactggaagccttgcaccaagacttgccaagtcctggaggccctcaatgtgctggtgaatagaccgaatatcagggagcccctgcggatggacctcgctgacctgctgacacagaatccggagctgttcagaaagaatgccgaagagttcaccctccgattcggagtggaccggccctcctaactcatgttctgaccctctgtgcactggatcctcggcatagcggacggacacacctcatggactgaggccagagccccctgtggcccattccccattcatttttcccttcttaggttgttagtcattagtttgtgtgtgtgtgtggtggagggaagggagctatgagtgtgtgtgttgtgtatggactcactcccaggttcacctggccacaggtgcacccttcccacaccctttacattccccagagccaagggagtttaagtttgcagttacaggccagttctccagctctccatcttagagagacaggtcaccttgcaggcctgcttgcaggaaatgaatccagcagccaactcgaatccccctagggctcaggcactgagggcctggggacagtggagcatatgggtgggagacagatggagggtaccctatttacaactgagtcagccaagccactgatgggaatatacagatttaggtgctaaaccatttattttccacggatgagtcacaatctgaagaatcaaacttccatcctgaaaatctatatgtttcaaaaccacttgccatcctgttagattgccagttcctgggaccaggcctcagactgtgaagtatatatcctccagcattcagtccagggggagccacggaaaccatgttcttgcttaagccattaaagtcagagatgaa

SEQ ID NO: 197697 - DNA, 1573 bp, Homo sapiens
  Payload ID: 18979
  Gene Name: ubiquitin-conjugating enzyme E2L 6
  Uniprot ID: O14933
  ENST ID: ENST00000340573
  CDS Start-End: 608-871
acaaaggatccccgactgccggggagcggtgctcggagggcacaggtctacgccatcccccacgcagtttcggagatggagcgctgggcccatggagggaaggcggcaggctcggcggctccggcagcttgctggggcaggggctcaaggcggcagtccgatagtggaggccgctgagaactgtcacggagctgcgtctgtacagcgagcatcccttatttattcagggcgagtgtgtatttggggcggcgtgcagggggctgacaaagaccggagagctcccggtgcggccgccggcggagcgaagactggaacccgtatgagcgccccccagcgcccctgagcgctcgccgccggtgcacggcgcaccccgcgggaggcagggatcagcaaagccgtgcgccccgaggcccgcccccgtctccgcacaaagaccgagctggaggatcttcagaagaagcctcccccatacctgcggaacctgtccagcgatgatgccaatgtcctggtgtggcacgctctcctcctacccgaccaacctccctaccacctgaaagccttcaacctgcgcatcagcttcccgccggagtatccgttcaagcctcccatgatcaaattcacaaccaagatctaccaccccaacgtggacgagaacggacagatttgcctgcccatcatcagcagtgagaactggaagccttgcaccaagacttgccaagtcctggaggccctcaatgtgctggtgaatagaccgaatatcagggagcccctgcggatggacctcgctgacctgctgacacagaatccggagctgttcagaaagaatgccgaagagttcaccctccgattcggagtggaccggccctcctaactcatgttctgaccctctgtgcactggatcctcggcatagcggacggacacacctcatggactgaggccagagccccctgtggcccattccccattcatttttcccttcttaggttgttagtcattagtttgtgtgtgtgtgtggtggagggaagggagctatgagtgtgtgtgttgtgtatggactcactcccaggttcacctggccacaggtgcacccttcccacaccctttacattccccagagccaagggagtttaagtttgcagttacaggccagttctccagctctccatcttagagagacaggtcaccttgcaggcctgcttgcaggaaatgaatccagcagccaactcgaatccccctagggctcaggcactgagggcctggggacagtggagcatatgggtgggagacagatggagggtaccctatttacaactgagtcagccaagccactgatgggaatatacagatttaggtgctaaaccatttattttccacggatgagtcacaatctgaagaatcaaacttccatcctgaaaatctatatgtttcaaaaccacttgccatcctgttagattgccagttcctgggaccaggcctcagactgtgaagtatatatcctccagcattcagtccagggggagccacggaaaccatgttcttgcttaagccattaaagtcagagatgaattctgg

SEQ ID NO: 197698 - DNA, 628 bp, Homo sapiens
  Payload ID: 18979
  Gene Name: ubiquitin-conjugating enzyme E2L 6
  ENST ID: ENST00000526659
  CDS Start-End: 247-628
ctgaaacttgtgataacaactgggtgcatctccagtgcaggaaaagtccttggcatcttggtgccaggcattctgctactgctggtggtgggttatgaacacagatgaccaggatgaagtccttgccttggaataagcccatagcccatcccataatttgatgcctgtattactagagtcctgagaaacacggaatgctgattagaatttgggacaaagttccctgagtattctctggaggaaaagatgcggaggtggacctggaaggcctcctggagtaggtggcttgcgttcgagctggaggatcttcagaagaagcctcccccatacctgcggaacctgtccagcgatgatgccaatgtcctggtgtggcacgctctcctcctacccgaccaacctccctaccacctgaaagccttcaacctgcgcatcagcttcccgccggagtatccgttcaagcctcccatgatcaaattcacaaccaagatctaccaccccaacgtggacgagaacggacagatttgcctgcccatcatcagcagtgagaactggaagccttgcaccaagacttgccaagtcctggaggccctcaatgtgctggtgaatagaccgaatatcagggagcccc

SEQ ID NO: 197699 - DNA, 668 bp, Homo sapiens
  Payload ID: 18979
  Gene Name: ubiquitin-conjugating enzyme E2L 6
  ENST ID: ENST00000527022
  CDS Start-End: 472-668
ggtttcaatttcgcttttcctgcctgaaacttgtgataacaactgggtgcatctccagtgcaggaaaagtccttggcatcttggtgccaggcattctgctactgctggtggtgggttatgaacacagatgaccaggatgaagtccttgccttggaataagcccatagcccatcccataatttgatgcctgtattactagagtcctgagaaacacggaatgctgattagaatttgggacaaagttccctgagtattctctggaggaaaagatgcggaggtggacctggaaggcctcctggagagctggaggatcttcagaagaagcctcccccatacctgcggaacctgtccagcgatgatgccaatgtcctggtgtggcacgctctcctcctacccgaccaacctccctaccacctgaaagccttcaacctgcgcatcagcttcccgccggagtatccgttcaagcctcccatgatcaaattcacaaccaagatctaccaccccaacgtggacgagaacggacagatttgcctgcccatcatcagcagtgagaactggaagccttgcaccaagacttgccaagtcctggaggccctcaatgtgctggtgaatagaccgaatatcagggagcccctgcggatggacctcgctgacctgctgacacagaa

SEQ ID NO: 197700 - DNA, 1508 bp, Homo sapiens
  Payload ID: 18980
  Gene Name: ubiquitin-conjugating enzyme E2M
  Uniprot ID: P61081
  ENST ID: ENST00000253023
  CDS Start-End: 580-1131
ccgggcgggaagagccaaagcgggcaggcggcggaaatatccgaagcggcggggcgcccgaggccgttgccgacctccgcgctaaagccgctgctgccgcggaagacgatcctccagtacccgcccgccgtcaccgcagctgccgtgtcctcctcccacccctagccgcaccccctcgcggagggatcagctgagcggccaaacggcacggtcgggggagccccgagtccgcagctgcagcggggcctgagaccagagttggcgagggcaaggaaggagcggccccgggcagtgggggcggggccgggcgggcccgagaacagccgaatttggccgagcgctgccgagcgagtccgaggcgctgggccaggccggagccggactacgggagccgaggcgggccgcgcggtgggcgcggagaggagcggagcggcgcggcaggccgggcgggtggcggcagcagcggaggaggccgcagctgcgggtccgaggagcggaggcgacgcgggcggcggcggggggccgggtggccggggtcccgggccccgcggcggcggcagcggcggcggcggcggcaggatgatcaagctgttctcgctgaagcagcagaagaaggaggaggagtcggcgggcggcaccaagggcagcagcaagaaggcgtcggcggcgcagctgcggatccagaaggacataaacgagctgaacctgcccaagacgtgtgatatcagcttctcagatccagacgacctcctcaacttcaagctggtcatctgtcctgatgagggcttctacaagagtgggaagtttgtgttcagttttaaggtgggccagggttacccgcatgatccccccaaggtgaagtgtgagacaatggtctatcaccccaacattgacctcgagggcaacgtctgcctcaacatcctcagagaggactggaagccagtccttacgataaactccataatttatggcctgcagtatctcttcttggagcccaaccccgaggacccactgaacaaggaggccgcagaggtcctgcagaacaaccggcggctgtttgagcagaacgtgcagcgctccatgcggggtggctacatcggctccacctactttgagcgctgcctgaaatagggttggcgcatacccacccccgccacggccacaagccctggcatcccctgcaaatatttattgggggccatgggtaggggtttggggggcggccggtgggggaatcccctgccttggccttgcctccccttcctgccacgtgcccctagttatttttttttttttaacaccatgtgattaaggtcggcgctgcctcccccgacccactcagcgatgggaaatgaattggcttgtctagcccccctgctgggtgcttgttcagcccccactctgggctgtggagtgggtgggcaacgggcctgggtagctgggcccaggcaacccacccctccacctctggaggtcccaccaggctattaaaggggaatgttactgca

SEQ ID NO: 197701 - DNA, 734 bp, Homo sapiens
  Payload ID: 18980
  Gene Name: ubiquitin-conjugating enzyme E2M
  ENST ID: ENST00000595957
  CDS Start-End: 526-734
gggaagagccaaagcgggcaggcggcggaaatatccgaagcggcggggcgcccgaggccgttgccgacctccgcgctaaagccgctgctgccgcggaagacgatcctccagtacccgcccgccgtcaccgcagctgccgtgtcctcctcccacccctagccgcaccccctcgcggagggatcagctgagcggccaaacggcacggtcgggggagccccgagtccgcagctgcagcggggcctgagaccagagttggcgaggcagaagaaggaggaggagtcggcgggcggcaccaagggcagcagcaagaaggcgtcggcggcgcagctgcggatccagaaggacataaacgagctgaacctgcccaagacgtgtgatatcagcttctcagatccagacgacctcctcaacttcaagctggtcatctgtcctgatgagggcttctacaagagtgggaagtttgtgttcagttttaaggtgggccagggttacccgcatgatccccccaaggtgaagtgtgagacaatggtctatcaccccaacattgacctcgagggcaacgtctgcctcaacatcctcagagaggactggaagccagtccttacgataaactccataatttatggcctgcagtatctcttcttggagcccaaccccgaggacccactgaacaaggaggccgcagaggtcctgcagaacaaccggcggctgtttgagcagaacgtgcagcgctc

SEQ ID NO: 197702 - DNA, 349 bp, Homo sapiens
  Payload ID: 18980
  Gene Name: ubiquitin-conjugating enzyme E2M
  ENST ID: ENST00000596985
  CDS Start-End: 1-345
ttcaagctggtcatctgtcctgatgagggcttctacaagagtgggaagtttgtgttcagttttaaggtgggccagggttacccgcatgatccccccaaggtgaagtgtgagacaatggtctatcaccccaacattgacctcgagggcaacgtctgcctcaacatcctcagagaggactggaagccagtccttacgataaactccataatttatggcctgcagtatctcttcttggtgagtaggaataggtggttgggtctggggagattggccttctgtccctctggcctgttgaccccccctacctgtactggccacaggagcccaaccccgaggacccactgaacaa

SEQ ID NO: 197703 - DNA, 5186 bp, Homo sapiens
  Payload ID: 18981
  Gene Name: ubiquitin-conjugating enzyme E2N
  Uniprot ID: P61088
  ENST ID: ENST00000318066
  CDS Start-End: 379-837
ggttaagagagacgcgcgcgcagtcgcgcgcgggtcgtgccgtaccaccgtcgcgggcaggctcggccacgagcgccagagccccgcgcctcccctcgcggcctgtcccaagtccctgccccgcaacagagcgtcacttccgccatccccggcagcggttggggcggggcgcacgggggagggggccaggtcggagggaagcccgcccgtgcccgagcccgcgcccgagcagggactacatttcccgaggggcctcggcggcggctgcggcgacgggcgcggcaacgtcccccggaagtggagcccgggacttccactcgtgcgtgaggcgagaggagccggagacgagaccagaggccgaactcgggttctgacaagatggccgggctgccccgcaggatcatcaaggaaacccagcgtttgctggcagaaccagttcctggcatcaaagccgaaccagatgagagcaacgcccgttattttcatgtggtcattgctggccctcaggattccccctttgagggagggacttttaaacttgaactattccttccagaagaatacccaatggcagcccctaaagtacgtttcatgaccaaaatttatcatcctaatgtagacaagttgggaagaatatgtttagatattttgaaagataagtggtccccagcactgcagatccgcacagttctgctatcgatccaggccttgttaagtgctcccaatccagatgatccattagcaaatgatgtagcggagcagtggaagaccaacgaagcccaagccatagaaacagctagagcatggactaggctatatgccatgaataatatttaaattgatacgatcatcaagtgtgcatcacttctcctgttctgccaagacttcctcctctttgtttgcatttaatggacacagtcttagaaacattacagaataaaaaagcccagacatcttcagtcctttggtgattaaatgcacattagcaaatctatgtcttgtcctgattcactgtcataaagcatgagcagaggctagaagtatcatctggattgttgtgaaacgtttaaaagcagtggcccctccctgcttttattcatttcccccatcctggtttaagtataaagcactgtgaatgaaggtagttgtcaggttagctgcaggggtgtgggtgtttttattttattttattttattttatttttgaggggggaggtagtttaattttatgggctcctttcccccttttttggtgatctaattgcattggttaaaagcagctaaccaggtctttagaatatgctctagccaagtctaactttatttagacgctgtagatggacaagcttgattgttggaaccaaaatgggaacattaaacaaacatcacagccctcactaataacattgctgtcaagtgtagattccccccttcaaaaaaagcttgtgaccattttgtatggcttgtctggaaacttctgtaaatcttatgttttagtaaaatattttttgttattctactttgcctttgtacagtttattttactgtgtttatttcattttcccaatttgacaatcgtattttaaaattgaaactgatggaacattctttcttggtcttcaccatctgacaaattgaatggcaagaggtggattttgccagtttcttttcactgatgcagatttgtgttaagatagtactgaatggagtatttataaactggccctgagcatgcataaagcatcagtatctgacctttttttaaccttctaggaatttgaaataaatgtgtttgtgttgtctgattagatgatcattggtgtcttgccacaatgtttaaaaattactgtacaggaaagtcacagcaaagatagcagttgtgactgacatgtaggactttcacagttgtgccacatttttgcctaaaatttgggttatgacatttttcttggttcttatctgaaaatttcatctgtaacctttcatgtgtgttaagaaacactgatctgatcatttgggatttgctgaggcatttgtgagtcttccttataaacctgatgagcagatctcaactatctagcttgtgtgtcatcagaaaggtttatccctttgagagtatcaagtcctcagttaatgattcttgctttcatccctccagtatttgctgtgggagctcgttttattctttaatttggaattcagtaatttttcttctttattgacgaattcctcccctcacaaaactgttctttcccacctctctccatatctaattcctgattcttgttatttttaagtcataaatgtagccagtcataaatacataaatgttaaccttcgggttgcaaccttgtctcttgcagtttaaggtaatggatattgtagcccatttgaattttcttcactcttattctcgtaattctggagtttcttcagattgtggtgtattttattgtgctcctatgtaagatgaagaattaactattaaaattacattttcaacatacaaaagcttttgatgactggtaactggtatccttccaaataaatgcattgcttggtaacaaatgttagcttaattcagaatgaaatagttaacaaccctaatattgtaaaatttgaaaactgatagcagctgtcatttataacaattcttgggctgtttaaagggtacatttgactatagctaaggaaattgaatctcactttaaaaatgaaccacacaaaacttcaagaaacgaaatagaaatcaacatttactgcccgtaatattgctcatggttatagctagtatcacatagtgatttacaaaccatgaaattccagatttaaatctgttgcactacaaaaatgtctaaatgatgtctgctaaatttgtgagttatagaagtacagaaataagtcattttcatttcaaatgcagtgaatttctaatttcatggtatcatatttttttcctttgcagttttggtaagactcccccattactttgctaagacttgctttctcaaccagtgggatgaaacgagtgccagtgtgttgactgagccttcttaggacttaaggggctctgggagaggccaaggcagcagttgaaaactgcagcttcacctggcctttgggcctgttttccctggcccacacagtgtggctggttaaaacattctgaatttgatgccaacatttttaaaaattgggagatttgcatgaaaatccagaattcgggtaacttttgaatgatctgaagatctggcaacagtagacctgacccacctttgtgcacgggacttaactgagaggatctgagtagcagacaccctaagagcatgtcattgtcttctcaccagttactctccagttggctagagtcccctccgagcacacctgctagtccttcccccttgtaagcctttgactttgtaatccctgggctaaaggaaacacattattcaacaaaagtgtttcatgtttgcccactagttgttggggatgattaggtggtgagtgaatggcatggggctttcctttggggaccatatactctaatggggaagggggacagacaaatagttgtaactctgtcatggaaaagagaagtaacttggacagacttttggattcaggccagatgaacatctccaggcagagggaacagcagcatctgcaaagtcctgggagagaagaaaagaatctgaacattaagtggcttcctgaaaatcgactgcccaggccgggcacagtggctcatgcctgtaatcccagcactttaggaggccaaggcaggaggatcacttgagtccaggagtttgtgaccagcctggctaacatagtgggacccagtctttatttaaaagaaaattgcccgttaagaggcttttctaaaatcttgaggtgttgataggagctttatgttttttgacttgattgttgtagtctacttcgctgcgatttgcttctgctctagttatccttcatcctctcaaaggctgtctagcaagatcttaggtctaaagtaaagtcatctcttggtatttgtcgggaactggttctaggacttcctttggatatccaaattcgcagatgctcaagtctctggaataaaatgatgttgtatatgcatacaatctacacaaatcctcccgcttatgttaatatttagattacttataatacctattataatgtaagtgctatgtaaatagttacactattgtttaaggaataatgacaaaaatatacatgttgactacagacacaatgttttttggaatattttgtctggttgtttgaatccacggaagtggaacccatggatatggagggccaactatatagaaccttactctagaccaagaatgtacttgtaaaacaatttcaaagaagcacttaaaaataagattaaatacaaaccaacagataaaagtcacaggtgctatggttgtttgatggagaatggggaaggaaatctgtcctaaaagacattataaacacagtgacctaagtggaactaaattggatcgaggaaatgataggaataggcctcatttttctgttgaatggttcaggaaccttttttttttttttttttttttttttttttggctgctctagccactttctagctctgtagtttaggctggagtgctgtggcatgatcttggctcactgcaggttctgcctcccgcgttcaagcgattctcctgcctcagcctcctgaggagctgggactacagacacctgccaccacacctggctaattttttgtatttttagtagagacggggtttcaccatgttgggccaggatggtctccatctcctgacctcgtgatctgcccgcctcggcctcccaaagtgctgggattacaggcgtgagccaccgtgcccagccctgccacatcttttttgttagttgcagtagcaatacaaccttatctagaaaagctggccaaaaaagaaaataccatgataatagggtacctaatttattgctttatttaagaaaaatgtaatatttcattcgaataagtacttttgggctgggatgatatttcatttagctacttggcatgccacccatcttagggaattatatgagggtttatactttaaataacataaaaagcaaaacatgctgaatgtaataatttgagagaagtgtaaataataaaaatctgtcatctacca

SEQ ID NO: 197704 - DNA, 676 bp, Homo sapiens
  Payload ID: 18981
  Gene Name: ubiquitin-conjugating enzyme E2N
  ENST ID: ENST00000549490
  CDS Start-End: 15-278
cgggttctgacaagatggccgggctgccccgcaggatcatcaaggaaacccagcgtttgctggcagaaccagttcctggcatcaaagccgaaccagatgagagcaacgcccgttattttcatgtggtcattgctggccctcaggattccccctttgagggagggacttttaaacttgaactattccttccagaagaatacccaatggcagcccctaaaataagtggtccccagcactgcagatccgcacagttctgctatcgatccaggccttgttaagtgctcccaatccagatgatccattagcaaatgatgtagcggagcagtggaagaccaacgaagcccaagccatagaaacagctagagcatggactaggctatatgccatgaataatatttaaattgatacgatcatcaagtgtgcatcacttctcctgttctgccaagacttcctcctctttgtttgcatttaatggacacagtcttagaaacattacagaataaaaaagcccagacatcttcagtcctttggtgattaaatgcacattagcaaatctatgtcttgtcctgattcactgtcataaagcatgagcagaggctagaagtatcatctggattgttgtgaaacgtttaaaagcagtggcccctccctgcttttattcatttcccccatcctg

SEQ ID NO: 197705 - DNA, 607 bp, Homo sapiens
  Payload ID: 18981
  Gene Name: ubiquitin-conjugating enzyme E2N
  ENST ID: ENST00000552442
  CDS Start-End: 52-369
ggcgagaggagccggagacgagaccagaggccgaactcgggttctgacaagatggccgggctgccccgcaggatcatcaaggaaacccagcgtttgctggcagaaccagttcctggcatcaaagccgaaccagatgagagcaacgcccgttattttcatgtggtcattgctggccctcaggattccccctttgagggagggacttttaaacttgaactattccttccagaagaatacccaatggcagcccctaaagtacgtttcatgaccaaaatttatcatcctaatgtagacaagttgggaagaatatgtttagatattttgaaagctagagcatggactaggctatatgccatgaataatatttaaattgatacgatcatcaagtgtgcatcacttctcctgttctgccaagacttcctcctctttgtttgcatttaatggacacagtcttagaaacattacagaataaaaaagcccagacatcttcagtcctttggtgattaaatgcacattagcaaatctatgtcttgtcctgattcactgtcataaagcatgagcagaggctagaagtatcatctggattgttgtgaaacgtttaaaagca

SEQ ID NO: 197706 - DNA, 3018 bp, Homo sapiens
  Payload ID: 18981
  Gene Name: ubiquitin-conjugating enzyme E2N
  ENST ID: ENST00000550657
  CDS Start-End: 60-518
gtgcgtgaggcgagaggagccggagacgagaccagaggccgaactcgggttctgacaagatggccgggctgccccgcaggatcatcaaggaaacccagcgtttgctggcagaaccagttcctggcatcaaagccgaaccagatgagagcaacgcccgttattttcatgtggtcattgctggccctcaggattccccctttgagggagggacttttaaacttgaactattccttccagaagaatacccaatggcagcccctaaagtacgtttcatgaccaaaatttatcatcctaatgtagacaagttgggaagaatatgtttagatattttgaaaggtaagtgttatctttatcagcatatgctattattaagctttctcctttttctcttaagcattccatgtttagaatgtaaacattatacaaagatcagagaggtctgtgggagggaagtgaagcagttctgggcctgtttttttcatgctttatcatactgggcctgttgccttcatagataagtggtccccagcactgcagatccgcacagttctgctatcgatccaggccttgttaagtgctcccaatccagatgatccattagcaaatgatgtagcggagcagtggaagaccaacgaagcccaagccatagaaacaggtatctaatattcattctccttcacaccacttccacttttacaaatttgtattaccacttaaacttttctaaagctcttggcaaggaaaagaaatagaaaaaagtataataagtgagatcctgcttatagtatgtaaatacgtcttaacaaaatggcttgctatgggaccccccaaatataaagacaacctgtaattgaaagatcttggagtctcttgtaactacacctggtttaacaaatactgagtgcataccatttatctagttatatgtaaagaatactggaaaacttgaactgtttttgtaacccatttgattaaagtattcagctgtttatggctacggaatttggagtcaagaagcttctgctacagattttaagaaaattagtggggagaattgtgtatctagaaatggacaacttgattcatcctcttgaattttctagaacttcttaattttattgtagtgttttggtaattggacatttacaaaatctttcagccctgatccaatttatagaaaaaggcgtgaatttaacagattacagcatgacatttccataattaatagtggttgtttgccatttatagtttggaaagtaacatattgaactaagtaaaataataatcgtatgtttgtttctgtctacagctagagcatggactaggctatatgccatgaataatatttaaattgatacgatcatcaagtgtgcatcacttctcctgttctgccaagacttcctcctctttgtttgcatttaatggacacagtcttagaaacattacagaataaaaaagcccagacatcttcagtcctttggtgattaaatgcacattagcaaatctatgtcttgtcctgattcactgtcataaagcatgagcagaggctagaagtatcatctggattgttgtgaaacgtttaaaagcagtggcccctccctgcttttattcatttcccccatcctggtttaagtataaagcactgtgaatgaaggtagttgtcaggttagctgcaggggtgtgggtgtttttattttattttattttattttatttttgaggggggaggtagtttaattttatgggctcctttcccccttttttggtgatctaattgcattggttaaaagcagctaaccaggtctttagaatatgctctagccaagtctaactttatttagacgctgtagatggacaagcttgattgttggaaccaaaatgggaacattaaacaaacatcacagccctcactaataacattgctgtcaagtgtagattccccccttcaaaaaaagcttgtgaccattttgtatggcttgtctggaaacttctgtaaatcttatgttttagtaaaatattttttgttattctactttgcctttgtacagtttattttactgtgtttatttcattttcccaatttgacaatcgtattttaaaattgaaactgatggaacattctttcttggtcttcaccatctgacaaattgaatggcaagaggtggattttgccagtttcttttcactgatgcagatttgtgttaagatagtactgaatggagtatttataaactggccctgagcatgcataaagcatcagtatctgacctttttttaaccttctaggaatttgaaataaatgtgtttgtgttgtctgattagatgatcattggtgtcttgccacaatgtttaaaaattactgtacaggaaagtcacagcaaagatagcagttgtgactgacatgtaggactttcacagttgtgccacatttttgcctaaaatttgggttatgacatttttcttggttcttatctgaaaatttcatctgtaacctttcatgtgtgttaagaaacactgatctgatcatttgggatttgctgaggcatttgtgagtcttccttataaacctgatgagcagatctcaactatctagcttgtgtgtcatcagaaaggtttatccctttgagagtatcaagtcctcagttaatgattcttgctttcatccctccagtatttgctgtgggagctcgttttattctttaatttggaattcagtaatttttcttctttattgacgaattcctcccctcacaaaactgttctttcccacctctctccatatctaattcctgattcttgttatttttaagtcataaatgtagccagtcataaatacataaatgttaaccttcgggttgcaaccttgtctcttgcagtttaaggtaatggatattgtagcccatttgaattttcttcactcttattctcgtaattctggagtttcttcagattgtggtgtattttattgtgctcctatgtaagatgaagaattaactattaaaattacattttcaacat

SEQ ID NO: 197707 - DNA, 960 bp, Homo sapiens
  Payload ID: 18981
  Gene Name: ubiquitin-conjugating enzyme E2N
  ENST ID: ENST00000549833
  CDS Start-End: 394-663
gctgcctgggtcccgggacgtgggggccccgcgccccgctgcccttgcttccgcgatctctctcttctgaatacgtttccgctcgtttatctctgcgaagtgattttactctgttcaactgctctgcttccatctgttcttgtcttgccttacctattatggagtcctcaggcattaaattttgttgtgattgctgcatttgaaaccagaagtaacctgaagaaaaagggtcgagaaacccagcgtttgctggcagaaccagttcctggcatcaaagccgaaccagatgagagcaacgcccgttattttcatgtggtcattgctggccctcaggattccccctttgagggagggacttttaaacttgaactattccttccagaagaatacccaatggcagcccctaaagtacgtttcatgaccaaaatttatcatcctaatgtagacaagttgggaagaatatgtttagatattttgaaagataagtggtccccagcactgcagatccgcacagttctgctatcgatccaggccttgttaagtgctcccaatccagatgatccattagcaaatgatgtagcggagcagtggaagaccaacgaagcccaagccatagaaacagctagagcatggactaggctatatgccatgaataatatttaaattgatacgatcatcaagtgtgcatcacttctcctgttctgccaagacttcctcctctttgtttgcatttaatggacacagtcttagaaacattacagaataaaaaagcccagacatcttcagtcctttggtgattaaatgcacattagcaaatctatgtcttgtcctgattcactgtcataaagcatgagcagaggctagaagtatcatctggattgttgtgaaacgtttaaaagcagtggcccctccctgcttttattcatttcccccatcctggtttaagtataaagcactgtg

SEQ ID NO: 197708 - DNA, 1185 bp, Homo sapiens
  Payload ID: 18982
  Gene Name: ubiquitin-conjugating enzyme E2N-like (gene/pseudogene)
  ENST ID: ENST00000618570
  CDS Start-End: 31-492
gatgagaccagaggccgaactcaggttctgatggccgagctgccccacaggatcatcaaggaaacccagcgtttgctggcagagccagttcctggcatcaaagcagaaccagatgaaagcaacgcccgttattttcatgtggtcattgctggggaatcaaaggattccccctttgagggagggacttttaaacgtgaactattacttgcagaagaatacccaatggcagcccctaaagtacgtttcatgaccaaaatttatcatccaaatgtagacaagttggaaagaataagttgagatattttgaaagataagtggtccccagccctgcagatccgcacagttctgctatcgatccaggccttgttaaatgctcccaatccagatgatccattagcaaatgatgtagtggagcagtggaagaccaacgaagcccaagccattgaaacagctagagcatggactaggctatatgccatgaatagtatttaaattgatccaatcattaagtgtgcatcacttctcctgttctgccaagacttcttcctttttgcttgcatttaatggacatagtcttagaaacattacagaataaaaaaacccagacatcttcagttatttggtgattaaatgtacattagcaaatctatgtcttgtcctgattcactgtcataaagcatgagcagaggctagacgtatcatccggattgttgtgaaacgtttaaaagcagtggtccctccctgcttttattcatttcccccatcctggtttaagtataaagcactgtgaatgaaggtagttgtcaggttagctgcaagggtgtgggtgtttttctttatttttttgaggggggtaagtagttttattttaattttatgggctcctttccccgcctttttggtgctctaattggattggttaaaagcagctaaccagttctttagaaatatgctctctatccaagtctaactttatttagacactgtagatggacaagcttgattgtttgaaccaaaatgggaacatttaacaagcatcactgccctcactaataacattgtgactttgctgtcaagtgtagagtccccccttcaaaataagcttgtgaccattttgtatggcttgtctggaaacttctgtaaatcttatgttttactaaaatattttttgttattgtaaaaaaa

SEQ ID NO: 197709 - DNA, 5436 bp, Homo sapiens
  Payload ID: 18983
  Gene Name: ubiquitin-conjugating enzyme E2O
  Uniprot ID: Q9C0C9
  ENST ID: ENST00000319380
  CDS Start-End: 66-3944
cgcctccccgcgcctcgttcgccgccgctgtcgccgccgccgcccgagactcgcgcagagcagttatggcggatcccgcagcccccacgcccgcagctcccgctccagcccaggccccggctccagccccggaggcagtcccggccccagccgcagcccccgtcccggcgccggcgcccgcctcggactcggcctccgggccgtcctcggactccggcccagaagccggctcgcagcgcctgctgttttctcacgacctggtgtcgggccgttaccgtggctccgtgcacttcgggctggtgcgcctcatccacggcgaggactcggactcggagggcgaggaggagggccgcgggagctcggggtgctccgaggccgggggcgcgggccacgaggagggccgggccagccccctgcgccgcggctacgtgcgcgtccagtggtacccggagggcgtcaagcagcatgtgaaggagaccaagctgaaactagaggaccgttctgtggtgccccgagatgtggtccggcacatgcgatccaccgacagtcagtgtggcacggtgatcgacgtcaacatcgactgtgccgtcaagctcatcggcaccaactgcatcatctatcccgtcaacagcaaggacctgcagcacatctggcccttcatgtatggggactacattgcctatgactgctggctggggaaggtctacgacttgaagaaccagatcatcctgaagctatccaacggcgccaggtgctccatgaacacggaagatggcgccaagctctacgacgtctgcccgcacgtcagcgactcgggtctcttcttcgatgattcctatggcttctacccaggccaggtgctcattggccctgccaagatcttctccagcgtccagtggctgtcaggtgtcaagcccgtgctcagcaccaagagcaagttccgagtggtggtggaagaggtgcaggttgtagagttgaaagttacatggattaccaagagtttctgtccagggggcacggacagcgtcagccccccaccctctgtcatcacccaggaaaacctaggcagggtgaagcgtctcggatgctttgaccatgctcagcggcagcttggggagcgctgtctgtatgtcttcccagccaaggtagagccagccaagattgcctgggaatgtccagaaaaaaactgcgcccagggggagggctctatggccaagaaggtgaagcgcctgttgaagaagcaggttgtgcggatcatgtcatgctccccagacacccagtgttcccgggaccattccatggaagacccagacaagaagggggaatccaaaaccaagagcgaagcggagtctgccagccctgaggagacgcccgatggctctgccagtccagtggagatgcaggacgagggtgcagaggagccccacgaggcaggagagcagctgcccccattcctgctaaaagaaggcagagatgacaggctgcactcggcagagcaggacgcagatgatgaggctgctgatgacacggacgacaccagttcggtgacctcctctgccagctccaccacttcctcccagagcggcagcggcacgagtcgcaaaaagagcatccccttgtccatcaagaacttaaagcgcaaacacaagaggaagaagaataaaatcactcgagacttcaagccaggggacagggtggcagtggaggtggtgaccacgatgacctcagccgacgtgatgtggcaggatggctccgtggaatgcaacatccgctccaacgacctcttccctgtgcaccacctggacaacaacgagttctgccctggagacttcgtggtagataagcgagtccagagctgtccagaccctgctgtctacggtgtggtacagtctggggaccacatcggccgtacctgcatggtgaagtggttcaagctgaggccgagtggggacgacgtggagctgattggagaagaggaagatgtgagtgtttacgacattgctgaccaccctgactttaggttccgtacaactgacatcgtcatccgcatcggcaatactgaggatggggctcctcacaaggaggatgagccatcggtgggccaggtggcccgtgtggacgtcagcagcaaggtggaggtggtgtgggctgacaactcaaagaccatcatcctgccccagcacttgtacaacatagagtctgagattgaggagtcagactacgattcggtagaaggcagcaccagcggggcatcctcggatgaatgggaagatgatagtgacagctgggagacggacaatgggctggtggaggacgagcaccccaagatagaggagccccccatcccacccctggagcagccggtggcccctgaggacaagggagtggtgatcagtgaagaggcagccacagctgccgtccagggggctgtggccatggctgcccccatggccgggctgatggagaaggctggcaaggacgggccacccaagagcttccgggagttgaaagaggccatcaagatcctggagagcctcaagaacatgactgtggagcagctgctgacgggctcgcccacctctccgactgtggagcctgagaagccaactcgggagaagaagtttctggatgacatcaagaagctacaggaaaacctcaagaagaccctggacaatgtggccattgtagaggaggagaagatggaagcagtgcccgacgtagagcgcaaggaggacaagcccgaggggcagtcacctgtgaaggctgagtggcccagcgaaaccccggtgctgtgccagcagtgtggcggcaagcctggcgtcaccttcaccagcgccaagggcgaggtcttctccgtactggagtttgcaccctcaaatcattcttttaagaaaattgagttccagcctccagaagccaagaagttcttcagcacagtgcggaaggagatggcgctgctggctacctcactgcctgagggcatcatggtcaagacttttgaagatagaatggacctcttctcagctctcatcaagggccccactcgaaccccctacgaggatggcctctacttgtttgacatccagctccccaacatctacccagccgtgcccccccacttctgctacctctcccaatgcagtggccgcctgaaccccaacctgtatgacaatgggaaggtgtgtgtcagcctcctgggcacctggattggaaaggggacagagaggtggacaagcaagtccagccttctccaggtgctcatctccatccaaggtctgatcctggtaaatgaaccatactacaacgaagccggcttcgacagtgaccgaggcctgcaggaaggctatgaaaacagtcgctgttacaatgagatggcgctgatccgcgtggtgcagtccatgacccagctggtgcggcggccccccgaggtctttgagcaggagatcaggcaacactttagcactggtggctggcggctggtgaaccgtatcgagtcctggctggaaacccatgccctgctggagaaggcccaggcactgcccaacggggtgcccaaggccagcagctcgccagagcccccagctgtagccgagctgtcagactccggccaacaagaacctgaggatggagggccagccccaggagaggcctcccagggctcagactcagagggcggtgcccagggcctggcctcagctagcagggaccacacagaccagacttcggagaccgcaccagacgcatcggtgccacccagtgtgaaaccaaagaagcggagaaagagctaccggagcttcttacctgagaagagtggctaccctgacatcggcttccccctcttcccactttccaagggtttcatcaagagcatccggggtgtcctgacgcagttccgggctgccctgctagaggcaggcatgccggagtgcacagaggacaagtagctgccaggcacagaggaaagagcatcaccgtgggagaggccagccgccgcctgctcactcccccccggaatcacccctcttcccatgcccctctgtccccactgcaaacccactgccctcttctccccaaggtgagtttgatgctgaagtgcaagaagtgtgttgagatgctgccgtttctattttgaagcgagctttcaacaggcgggtcccctgtggcaaagaaaatcggaaccctgttgccgattttccatttgtcaccccagcagaatgtccggcacttgctcccttgctgccccttctcaggtcagaggcgggtgttccagggcctgccgcggggctctctgggccggttccctgcagacccgcaggagagcacatgtgccttgcatgaagtgtgggttgcgccaacaattcccctggtccctttcaacctgtttagttcaactcaagcctccctgtgtcccagaccctcctgctgccaccaccacccaggtcctccctagtcctccagcgtcaacactatcccttgggagttgtagctgctgtcactgactcccggctatacatggcctgtcgaccacgttatagccctcaggcctgttgaacttgctctctaagagaggttgggaccaggctaggttccgggtgacgcccaggagaggtggtggccttcacacatgcacatggagttgaggaccagggagctgcagggaaagcaacagctataggtgccttgctcttctgtcggaggctgctgggggcaagagcagctgcacaaggccagggcaagtgctagggcccctcccccatcacatggtcacactgggacaggcgtgcagctcactgaactccaagcgagccagccctctcttggactagaaggcctactgtcagcccttcgcttacaaactgcaggctcaatccgaaggggacggccggcgggggctctcctagtgcccagagacaggcccagaggtttacaagttttctaagcttttgataatgtgaagctccaggccgagaggatgctgttgagcacattgcagctatgtaatttttggtgtatgtatgtaatatttaaggttggaaaaaaaactcaaaagcaaagatattaactcttattagaaaaaaagacaaaaaaaaagccaaagcatgatgcgtcttgtcagccttaagtgggctccacacctgtgctgtgctgtgaccgcccagccagcagagctgcgggaggatggagccggaccacacaccgtggcatttggaaccgagtcggtatcttgtttgagaaacacccggagtgactggtggggctgtgcttcccagtgcattgtacatgtggagatgtgaatgcctactgcttacgatatctgtataaagtgctgtgtgattaaacttttttttacttgcatttttttttttttttttttttgtgttggctcattagcaagacaaggtgacaccattaaacctccctctgccattcatctgg

SEQ ID NO: 197710 - DNA, 567 bp, Homo sapiens
  Payload ID: 18983
  Gene Name: ubiquitin-conjugating enzyme E2O
  ENST ID: ENST00000590658
  CDS Start-End: 1-567
tgaagaaccagatcatcctgaagctatccaacggcgccaggtgctccatgaacacggaagatggcgccaagctctacgacgtctgcccgcacgtcagcgactcgggtctcttcttcgatgattcctatggcttctacccaggccaggtgctcattggccctgccaagatcttctccagcgtccagtggctgtcaggtgtcaagcccgtgctcagcaccaagagcaagttccgagtggtggtggaagaggtgcaggttgtagagttgaaagttacatggattaccaagagtttctgtccagggggcacggacagcgtcagccccccaccctctgtcatcacccaggaaaacctaggcagggtgaagcgtctcggatgctttgaccatgctcagcggcagcttggggagcgctgtctgtatgtcttcccagccaaggtgaagcgcctgttgaagaagcaggttgtgcggatcatgtcatgctccccagacacccagtgttcccgggaccattccatggaagacccagacaagaagggggaatccaaaaccaagagcgaagcggagtctg

SEQ ID NO: 197711 - DNA, 3569 bp, Homo sapiens
  Payload ID: 18983
  Gene Name: ubiquitin-conjugating enzyme E2O
  ENST ID: ENST00000587127
  CDS Start-End: 1-2423
acacggacgacaccagttcggtgacctcctctgccagctccaccacttcctcccagagcggcagcggcacgagtcgcaaaaagagcatccccttgtccatcaagaacttaaagcgcaaacacaagaggaagaagaataaaatcactcgagacttcaagccaggggacagggtggcagtggaggtggtgaccacgatgacctcagccgacgtgatgtggcaggatggctccgtggaatgcaacatccgctccaacgacctcttccctgtgcaccacctggacaacaacgagttctgccctggagacttcgtggtagataagcgagtccagagctgtccagaccctgctgtctacggtgtggtacagtctggggaccacatcggccgtacctgcatggtgaagtggttcaagctgaggccgagtggggacgacgtggagctgattggagaagaggaagatgtgagtgtttacgacattgctgaccaccctgactttaggttccgtacaactgacatcgtcatccgcatcggcaatactgaggatggggctcctcacaaggaggatgagcagccatcggtgggccaggtggcccgtgtggacgtcagcagcaaggtggaggtggtgtgggctgacaactcaaagaccatcatcctgccccagcacttgtacaacatagagtctgagattgaggagtcagactacgattcggtagaaggcagcaccagcggggcatcctcggatgaatgggaagatgatagtgacagctgggagacggacaatgggctggtggaggacgagcaccccaagatagaggagccccccatcccacccctggagcagccggtggcccctgaggacaagggagtggtgatcagtgaagaggcagccacagctgccgtccagggggctgtggccatggctgcccccatggccgggctgatggagaaggctggcaaggacgggccacccaagagcttccgggagttgaaagaggccatcaagatcctggagagcctcaagaacatgactgtggagcagctgctgacgggctcgcccacctctccgactgtggagcctgagaagccaactcgggagaagaagtttctggatgacatcaagaagctacaggaaaacctcaagaagaccctggacaatgtggccattgtagaggaggagaagatggaagcagtgcccgacgtagagcgcaaggaggacaagcccgaggggcagtcacctgtgaaggctgagtggcccagcgaaaccccggtgctgtgccagcagtgtggcggcaagcctggcgtcaccttcaccagcgccaagggcgaggtcttctccgtactggagtttgcaccctcaaatcattcttttaagaaaattgagttccagcctccagaagccaagaagttcttcagcacagtgcggaaggagatggcgctgctggctacctcactgcctgagggcatcatggtcaagacttttgaagatagaatggacctcttctcagctctcatcaagggccccactcgaaccccctacgaggatggcctctacttgtttgacatccagctccccaacatctacccagccgtgcccccccacttctgctacctctcccaatgcagtggccgcctgaaccccaacctgtatgacaatgggaaggtgtgtgtcagcctcctgggcacctggattggaaaggggacagagaggtggacaagcaagtccagccttctccaggtgctcatctccatccaaggtctgatcctggtaaatgaaccatactacaacgaagccggcttcgacagtgaccgaggcctgcaggaaggctatgaaaacagtcgctgttacaatgagatggcgctgatccgcgtggtgcagtccatgacccagctggtgcggcggccccccgaggtctttgagcaggagatcaggcaacactttagcactggtggctggcggctggtgaaccgtatcgagtcctggctggaaacccatgccctgctggagaaggcccaggcactgcccaacggggtgcccaaggccagcagctcgccagagcccccagctgtagccgagctgtcagactccggccaacaagaacctgaggatggagggccagccccaggagaggcctcccagggctcagactcagagggcggtgcccagggcctggcctcagctagcagggaccacacagaccagacttcggagaccgcaccagacgcatcggtgccacccagtgtgaaaccaaagaagcggagaaagagctaccggagcttcttacctgagaagagtggctaccctgacatcggcttccccctcttcccactttccaagggtttcatcaagagcatccggggtgtcctgacgcagttccgggctgccctgctagaggcaggcatgccggagtgcacagaggacaagtagctgccaggcacagaggaaagagcatcaccgtgggagaggccagccgccgcctgctcactcccccccggaatcacccctcttcccatgcccctctgtccccactgcaaacccactgccctcttctccccaaggtgagtttgatgctgaagtgcaagaagtgtgttgagatgctgccgtttctattttgaagcgagctttcaacaggcgggtcccctgtggcaaagaaaatcggaaccctgttgccgattttccatttgtcaccccagcagaatgtccggcacttgctcccttgctgccccttctcaggtcagaggcgggtgttccagggcctgccgcggggctctctgggccggttccctgcagacccgcaggagagcacatgtgccttgcatgaagtgtgggttgcgccaacaattcccctggtccctttcaacctgtttagttcaactcaagcctccctgtgtcccagaccctcctgctgccaccaccacccaggtcctccctagtcctccagcgtcaacactatcccttgggagttgtagctgctgtcactgactcccggctatacatggcctgtcgaccacgttatagccctcaggcctgttgaacttgctctctaagagaggttgggaccaggctaggttccgggtgacgcccaggagaggtggtggccttcacacatgcacatggagttgaggaccagggagctgcagggaaagcaacagctataggtgccttgctcttctgtcggaggctgctgggggcaagagcagctgcacaaggccagggcaagtgctagggcccctcccccatcacatggtcacactgggacaggcgtgcagctcactgaactccaagcgagccagccctctcttggactagaaggcctactgtcagcccttcgcttacaaactgcaggctcaatccgaaggggacggccggcgggggctctcctagtgcccagagacaggcccagaggtttacaagttttctaagcttttgataatgtgaagctccaggccgagaggatgctgttgagcacattgcagctatgtaatttttggtgtatgtatgtaatatttaaggttggaaaaaaaactcaaaagcaaagatattaactcttattagaaaaaaagacaaaaaaaa

SEQ ID NO: 197712 - DNA, 3210 bp, Homo sapiens
  Payload ID: 18984
  Gene Name: ubiquitin-conjugating enzyme E2Q family member 1
  Uniprot ID: Q7Z7E8
  ENST ID: ENST00000292211
  CDS Start-End: 81-1349
gcggcggcggcggcggcggagcccggagcgcaggccggaggctcccggcccgccggccccggagcggagcggagcggaggatgcagcagccgcagccgcaggggcagcagcagccggggccggggcagcagctggggggccagggggcggcgccgggggccgggggcggcccaggggggggcccggggccggggccctgcctgaggcgagagctgaagctgctcgagtccatcttccaccgcggccacgagcgcttccgcattgccagcgcctgcctggacgagctgagctgcgagttcctgctggctggggccggaggggccggggcgggggccgcgcccggaccgcatctccccccacgggggtcggtgcctggggatcctgtccgcatccactgcaacatcacggagtcataccctgctgtgccccccatctggtcggtggagtctgatgaccctaacttggctgctgtcttggagaggctggtggacataaagaaagggaatactctgctattgcagcatctgaagaggatcatctccgacctgtgtaaactctataacctccctcagcatccagatgtggagatgctggatcaacccttgccagcagagcagtgcacacaggaagacgtgtcttcagaagatgaagatgaggagatgcctgaggacacagaagacttagatcactatgaaatgaaagaggaagagccagctgagggcaagaaatctgaagatgatggcattggaaaagaaaacttggccatcctagagaaaattaaaaagaaccagaggcaagattacttaaatggtgcagtgtctggctcggtgcaggccactgaccggctgatgaaggagctcagggatatataccgatcacagagtttcaaaggcggaaactatgcagtcgaactcgtgaatgacagtctgtatgattggaatgtcaaactcctcaaagttgaccaggacagcgctttgcacaacgatctccagatcctcaaagagaaagaaggagccgacttcattctacttaacttttcctttaaagataactttccctttgacccaccatttgtcagggttgtgtctccagtcctctctggagggtatgttctgggcggaggggccatctgcatggaacttctcaccaaacagggctggagcagtgcctactccatagagtcagtgatcatgcagatcagtgccacactggtgaaggggaaagcacgagtgcagtttggagccaacaaatctcaatacagtctgacaagagcacagcagtcctacaagtccttggtgcagatccacgaaaaaaacggctggtacacacccccaaaagaagacggctaaccctggagtatcacccttcctccctccccaggcaccactggaccaattacctttgaatgctgtatttggatctcacgctgcctctgtggttccctccctcatttttcctggacgtgatagctctgcctattgcaggacaatgatggctattctaaacgctaaggaaaaaaaacaaacacagaactgtttcaagtactcaagactgacttacagaccaaccaaccaccttgctggaacccttgctagcaggcattcttataaaagaaactttcgagcctccttatattgctggaaactcagctgtgctccagactagagcctccttacctatgctatggatttttaatttattttctcttatttcatgtacactgctttttttggttacagtgtatgatggatgtgtatgaaaaaaatgtatctttgggaaaacaattacagtttgttaatttgaagatgctggtcttgactcatctttatttttattcgcacatcccaccccatcccctgaactacttgggaggtggggaggggtacgagtccactgttgctttggtagagatgagaggccgcattttgctgctaaagcaagagaaacttggagctgaagcacacacctggtctgcccctagatttctcctcaaggcctctggagcaaccagcacttgcccccttggaatgcagagcctggcctgccaaactacaatgtggtaggctgaaacgatggtgttaattcttaggactacttttctagtcacagatgttttcaaatttctaagaaaaagaaaatgaggctcaagaggctgcttcgtagaattccttttgaatgaattgagtggggatggggacacagtctccaagtgtgtatgtggtcttttctgatctcagctgtgtggctgcaactcttcgctgttcattggttcctctcctggaaagtggcttctaaccagcactggatggtgatcattggtaagctttgctcacctccctctctcttgcttcatttggctttatcaaaaagaacagacctagctctgaatttgtttggcttgggaaattatggattctttcaagccactcccacaaggtgggtcctactagaaagggttagcattttaaggggggttgttctatacacctgtgtccttaccccaggctcaggaactgccagggagggaagatgaggtggggagtctgtactgagatggaactgtcagtgctgtgttgtatgtacttgctgttgtaaaagtttgggcatgactttgcatctagcgggtgctgcctgcatctctttgtctgtaagcttgctctgggactcagcctcttaggacctacgatgccagcagctctcattaacagtgaaatgacagaggccaaagatggccaagtgaagacccaagtctcagaaaacccagacttgggacaactgcctgggaactaggatgctagagcagttctgtaatgctttgagacacagcaattttcacattggccattctttcccctcccctaccccttttcttttgagggacttttaatgtttgctgctttaggtggatggagagtccaccagtcccactcaatgctgctctaactctacccacacccacctaattaggggtgctaataaaacatgctgaggttgagataaagacgggacataaggggaaaattcattccatagagctgaaatctggttttcaaggcctctgtggctttcttctgaacttaccaccagccctggctggaatgtagattgtgtttttagtaatgtgtactgtgagctgtcttctgtataatgtattttgtaatgtatttttctcatctaccaaaggatgaaacaaataaaattatttaaata

SEQ ID NO: 197713 - DNA, 3130 bp, Homo sapiens
  Payload ID: 18985
  Gene Name: ubiquitin-conjugating enzyme E2Q family member 2
  Uniprot ID: Q8WVN8
  ENST ID: ENST00000267938
  CDS Start-End: 383-1510
cgggcgcgcgcgctctggcctcgtgcacgcgctgaaaccggagcgcgcagggcgcgccagggtgagggggacgggggcggggtgggggcagccctttcccaggcggtagcgggggcggcgtcgctgttgcccttttaagccgcggggccgccgcctcctgccgctggagtcggttacaaaggaagcgccacccaggccgccacacgccgaggcttccgcgcccctcgccattttccagcagcgctcgacgaggcggagccgcgagagcgcggcccaggccggccccgcggggcggtcgcggccgtgacggcggctccgggcccggctccccttccgcgcccggctccccttccgcgcccctcccgccggagatgaggggaagatgtccgtgtcagggctcaaggccgagctgaagttcctggcgtccatcttcgacaagaaccacgagcgattccgcatcgtcagttggaagctggacgagctgcactgccagttcctggtgccgcagcagggcagcccgcactcgctgccgccgccactcacgctccactgcaacatcacggaatcctatccatcttcttcaccgatatggtttgtggattctgaagacccaaatctgacatcagttctggaacgtctagaagatactaagaacaacaatttgcttcgtcagcaattgaagtggttgatatgtgaactctgcagtttatataaccttcctaagcacctggatgttgagatgctagatcaaccactacccacgggtcagaatgggacaacagaagaagtgacttcagaagaagaggaagaagaagaagagatggctgaagatatagaagacttagatcactatgagatgaaggaagaagagcctattagtgggaaaaagtcagaggatgaaggaattgaaaaagaaaatttggcaatattagagaaaattaggaagactcaaaggcaagaccatttaaatggtgcagtgtctgggtcagtgcaagcttcagatagacttatgaaagagctcagggacatatacagatcacagagttataaaacagggatttattcagtggaactcataaatgacagtttatatgactggcatgttaaactgcagaaggttgaccctgatagtcctttgcacagtgatcttcagatcttaaaagaaaaagaaggcatagaatatattttgcttaacttctcttttaaggataactttccatttgatcctccatttgttcgagtggtgttacctgttctctcaggagggtatgtattgggtggaggagcattatgtatggaacttctcacaaaacagggctggagcagtgcctactcaatagaatcggtcatcatgcaaataaatgccaccttagtcaaaggcaaagccagagtgcagtttggagcaaataagaatcaatataatctagcaagagcccaacaatcctataattccattgtacagatacatgagaaaaatggctggtacacccctccaaaggaagatggctaaatgtgttgactgttgtatgtttggactaatgttgctttaaagaaaatctttctaacatgcagacaaaagctttgagtgcccctattacagcagtaccgaagatgttagttaatagatattttagtggataatctgtcatctgacatccagtataagttacagcctttgcattttgctcattttagatatcttggactgagcagtggggcctttactgtatttttcctgataaatacacatactggccactccttatctctttttcttgaaaagtgaactttttaaagcagccaagtcaacatcaggctactgaagttgaggctttagggtaactttcctatattgagcccatgggttacaaggatttgcaatatattgttccatttacagccaatacaggtttaatcgatgttcaatattggtttaggaaatttaaggccttctaaatcataatagctctttcatgtctaaaaccattttatgatattgccaaaatgtgataggaaacctactcattaaattgttaaactttttaatgactatgtgaagatatgaattgtttcctgaagataatactcttaattgagttgtattgtacttcttaggcaaagcagtgtaaaactgtatcaattaaggcttgtgagtagtgatttccactggggcatcagagtcttggctgggctgaatctgctgcttgttggttcagtgtttcttatgaacaagagccacagtacagagcttcaagttatttaaaatactaagtcatcttacgtttccattttattaacgggatgttgcaatcgtttgtaaactaataaacttataaagtgattggcacaaagactccttgagcaaaagctgtgcagttaagtacaaaaagatacttaatttggagactcttacagtaatttttgccatgtcaaaacaatggcttttacattgaaagattaatagaaactctacatatgttaatttttttatagaacctgactcaaatcaaggtactctccattttattgccttacctgaatcagtcctttttggttggtaatagatttttttatacacccacgtttgatttaaaagtaaattctagttcttaagcacttttaacaaatccagaagcacatttttctgcacaaacaagttacaaagttcaaaagtgtttcttgtgcattagctttgagattcagtttttaactttgtaaaccacatctgagagacttgtcatttctacattgtgtgtgtttaatttcttttgattccattttggttaagagagcagtaaatagattttctggtattcttgttcacttgattacatttgtataaagttctgattgccagttgctcagataacaagtgacaaggcagaattctttaaatcagtaaagttccttaagcctaaggctaaatcttgaatacattgttgaattctttaatatcctgatggcaagcagactgatagctgcacatttggcatgctttgtttaatggattttatttttaattgcagatttatttggcaatgtacagtaaattttgtaaacttgcatcaagtttatgaataaagaaccatttaaaaattttgtttgtgctgatcatggcaagcaaaaaaaa

SEQ ID NO: 197714 - DNA, 2158 bp, Homo sapiens
  Payload ID: 18985
  Gene Name: ubiquitin-conjugating enzyme E2Q family member 2
  ENST ID: ENST00000426727
  CDS Start-End: 1-601
cctggatgttgagatgctagatcaaccactacccacgggtcagaatgggacaacagaagaagtgacttcagaagaagaggaagaagaagaagagatggctgaagatatagaagacttagatcactatgagatgaaggaagaagagcctattagtgggaaaaagtcagaggatgaaggaattgaaaaagaaaatttggcaatattagagaaaattaggaagactcaaaggcaagaccatttaaatggtgcagtgtctgggtcagtgcaagcttcagatagacttatgaaagagctcagggacatatacagatcacagagttataaaacagggatttattcagtggaactcataaatgacagtttatatgactggcatgttaaactgcagaaggttgaccctgatagtcctttgcacagtgatcttcagatcttaaaagaaaaagaaggcatagaatatattttgcttaacttctcttttaaggataactttccatttgatcctccatttgttcgagtggtgttacctgttctctcaggagggctggtacacccctccaaaggaagatggctaaatgtgttgactgttgtatgtttggactaatgttgctttaaagaaaatctttctaacatgcagacaaaagctttgagtgcccctattacagcagtaccgaagatgttagttaatagatattttagtggataatctgtcatctgacatccagtataagttacagcctttgcattttgctcattttagatatcttggactgagcagtggggcctttactgtatttttcctgataaatacacatactggccactccttatctctttttcttgaaaagtgaactttttaaagcagccaagtcaacatcaggctactgaagttgaggctttagggtaactttcctatattgagcccatgggttacaaggatttgcaatatattgttccatttacagccaatacaggtttaatcgatgttcaatattggtttaggaaatttaaggccttctaaatcataatagctctttcatgtctaaaaccattttatgatattgccaaaatgtgataggaaacctactcattaaattgttaaactttttaatgactatgtgaagatatgaattgtttcctgaagataatactcttaattgagttgtattgtacttcttaggcaaagcagtgtaaaactgtatcaattaaggcttgtgagtagtgatttccactggggcatcagagtcttggctgggctgaatctgctgcttgttggttcagtgtttcttatgaacaagagccacagtacagagcttcaagttatttaaaatactaagtcatcttacgtttccattttattaacgggatgttgcaatcgtttgtaaactaataaacttataaagtgattggcacaaagactccttgagcaaaagctgtgcagttaagtacaaaaagatacttaatttggagactcttacagtaatttttgccatgtcaaaacaatggcttttacattgaaagattaatagaaactctacatatgttaatttttttatagaacctgactcaaatcaaggtactctccattttattgccttacctgaatcagtcctttttggttggtaatagatttttttatacacccacgtttgatttaaaagtaaattctagttcttaagcacttttaacaaatccagaagcacatttttctgcacaaacaagttacaaagttcaaaagtgtttcttgtgcattagctttgagattcagtttttaactttgtaaaccacatctgagagacttgtcatttctacattgtgtgtgtttaatttcttttgattccattttggttaagagagcagtaaatagattttctggtattcttgttcacttgattacatttgtataaagttctgattgccagttgctcagataacaagtgacaaggcagaattctttaaatcagtaaagttccttaagcctaaggctaaatcttgaatacattgttgaattctttaatatcctgatggcaagcagactgatagctgcacatttggcatgctttgtttaatggattttatttttaattgcagatttatttggcaatgtacagtaaattttgtaaacttgcatcaagtttatgaataaagaaccatttaaaaa

SEQ ID NO: 197715 - DNA, 478 bp, Homo sapiens
  Payload ID: 18985
  Gene Name: ubiquitin-conjugating enzyme E2Q family member 2
  ENST ID: ENST00000567921
  CDS Start-End: 1-276
aatgggacaacagaagaagtgacttcagaagaagaggaagaagaagaagagatggctgaagatatagaagacttagatcactatgagatgaaggaagaagagcctattagtgggaaaaagtcagaggatgaaggaattgaaaaagaaaatttggcaatattagagaaaattaggaagactcaaaggcaagaccatttaaatgataactttccatttgatcctccatttgttcgagtggtgttacctgttctctcaggaggaatcaatataatctagcaagagcccaacaatcctataattccattgtacagatacatgagaaaaatggctggtacacccctccaaaggaagatggctaaatgtgttgactgttgtatgtttggactaatgttgctttaaagaaaatctttctaacatgcagacaaaagctttgagtgcccctattacagcagtaccgaagatgttagttaatagatat

SEQ ID NO: 197716 - DNA, 1582 bp, Homo sapiens
  Payload ID: 18985
  Gene Name: ubiquitin-conjugating enzyme E2Q family member 2
  Uniprot ID: Q8WVN8
  ENST ID: ENST00000561851
  CDS Start-End: 311-1390
gcgtctttccggcttctcgccaggggctggcttgggggcttctggcccatctcggtccccgtctcctagccccgaggggggagtccgcggcggcccaagcccttgtggggtccatggccgccctcagccggcctgctcccgggaccggggcggggcggggcggggcggcgcagctccggctgttgtttgagcccaggccggcaaggggaacggcccttaagttttaacgcctcatttttcagtcggattttccttcttcccgcttgttcagccaattgtttttaagtttgcgtttaaggagaaactgacaatgagaatggactcgttgacggaggaaaagttggaatgcagactctggtgctgtttgagcgacccctctcccccgggcctggctgcgcgctgctgtgttctggaaaggagcatagtaccgtcgttgcggcaggaatcctatccatcttcttcaccgatatggtttgtggattctgaagacccaaatctgacatcagttctggaacgtctagaagatactaagaacaacaatttgcttcgtcagcaattgaagtggttgatatgtgaactctgcagtttatataaccttcctaagcacctggatgttgagatgctagatcaaccactacccacgggtcagaatgggacaacagaagaagtgacttcagaagaagaggaagaagaagaagagatggctgaagatatagaagacttagatcactatgagatgaaggaagaagagcctattagtgggaaaaagtcagaggatgaaggaattgaaaaagaaaatttggcaatattagagaaaattaggaagactcaaaggcaagaccatttaaatggtgcagtgtctgggtcagtgcaagcttcagatagacttatgaaagagctcagggacatatacagatcacagagttataaaacagggatttattcagtggaactcataaatgacagtttatatgactggcatgttaaactgcagaaggttgaccctgatagtcctttgcacagtgatcttcagatcttaaaagaaaaagaaggcatagaatatattttgcttaacttctcttttaaggataactttccatttgatcctccatttgttcgagtggtgttacctgttctctcaggagggtatgtattgggtggaggagcattatgtatggaacttctcacaaaacagggctggagcagtgcctactcaatagaatcggtcatcatgcaaataaatgccaccttagtcaaaggcaaagccagagtgcagtttggagcaaataagaatcaatataatctagcaagagcccaacaatcctataattccattgtacagatacatgagaaaaatggctggtacacccctccaaaggaagatggctaaatgtgttgactgttgtatgtttggactaatgttgctttaaagaaaatctttctaacatgcagacaaaagctttgagtgcccctattacagcagtaccgaagatgttagttaatagatattttagtggataatctgtcatctgacatccagtataagttacagcctttgcattttgctcattttagatatctt

SEQ ID NO: 197717 - DNA, 2969 bp, Homo sapiens
  Payload ID: 18985
  Gene Name: ubiquitin-conjugating enzyme E2Q family member 2
  Uniprot ID: Q8WVN8
  ENST ID: ENST00000569423
  CDS Start-End: 361-1383
gtgcacgcgctgaaaccggagcgcgcagggcgcgccagggtgagggggacgggggcggggtgggggcagccctttcccaggcggtagcgggggcggcgtcgctgttgcccttttaagccgcggggccgccgcctcctgccgctggagtcggttacaaaggaagcgccacccaggccgccacacgccgaggcttccgcgcccctcgccattttccagcagcgctcgacgaggcggagccgcgagagcgcggcccaggccggccccgcggggcggtcgcggccgtgacggcggctccgggcccggctccccttccgcgcccggctccccttccgcgcccctcccgccggagatgaggggaagatgtccgtgtcagggctcaaggccgagctgaagttcctggcgtccatcttcgacaagaaccacgagcgattccgcatcgtcagttggaagctggacgagctgcactgccagttcctggtgccgcagcagggcagcccgcactcgctgccgccgccactcacgctccactgcaacatcacggaatcctatccatcttcttcaccgatatggtttgtggattctgaagacccaaatctgacatcagttctggaacgtctagaagatactaagaacaacaatttgaatgggacaacagaagaagtgacttcagaagaagaggaagaagaagaagagatggctgaagatatagaagacttagatcactatgagatgaaggaagaagagcctattagtgggaaaaagtcagaggatgaaggaattgaaaaagaaaatttggcaatattagagaaaattaggaagactcaaaggcaagaccatttaaatggtgcagtgtctgggtcagtgcaagcttcagatagacttatgaaagagctcagggacatatacagatcacagagttataaaacagggatttattcagtggaactcataaatgacagtttatatgactggcatgttaaactgcagaaggttgaccctgatagtcctttgcacagtgatcttcagatcttaaaagaaaaagaaggcatagaatatattttgcttaacttctcttttaaggataactttccatttgatcctccatttgttcgagtggtgttacctgttctctcaggagggtatgtattgggtggaggagcattatgtatggaacttctcacaaaacagggctggagcagtgcctactcaatagaatcggtcatcatgcaaataaatgccaccttagtcaaaggcaaagccagagtgcagtttggagcaaataagaatcaatataatctagcaagagcccaacaatcctataattccattgtacagatacatgagaaaaatggctggtacacccctccaaaggaagatggctaaatgtgttgactgttgtatgtttggactaatgttgctttaaagaaaatctttctaacatgcagacaaaagctttgagtgcccctattacagcagtaccgaagatgttagttaatagatattttagtggataatctgtcatctgacatccagtataagttacagcctttgcattttgctcattttagatatcttggactgagcagtggggcctttactgtatttttcctgataaatacacatactggccactccttatctctttttcttgaaaagtgaactttttaaagcagccaagtcaacatcaggctactgaagttgaggctttagggtaactttcctatattgagcccatgggttacaaggatttgcaatatattgttccatttacagccaatacaggtttaatcgatgttcaatattggtttaggaaatttaaggccttctaaatcataatagctctttcatgtctaaaaccattttatgatattgccaaaatgtgataggaaacctactcattaaattgttaaactttttaatgactatgtgaagatatgaattgtttcctgaagataatactcttaattgagttgtattgtacttcttaggcaaagcagtgtaaaactgtatcaattaaggcttgtgagtagtgatttccactggggcatcagagtcttggctgggctgaatctgctgcttgttggttcagtgtttcttatgaacaagagccacagtacagagcttcaagttatttaaaatactaagtcatcttacgtttccattttattaacgggatgttgcaatcgtttgtaaactaataaacttataaagtgattggcacaaagactccttgagcaaaagctgtgcagttaagtacaaaaagatacttaatttggagactcttacagtaatttttgccatgtcaaaacaatggcttttacattgaaagattaatagaaactctacatatgttaatttttttatagaacctgactcaaatcaaggtactctccattttattgccttacctgaatcagtcctttttggttggtaatagatttttttatacacccacgtttgatttaaaagtaaattctagttcttaagcacttttaacaaatccagaagcacatttttctgcacaaacaagttacaaagttcaaaagtgtttcttgtgcattagctttgagattcagtttttaactttgtaaaccacatctgagagacttgtcatttctacattgtgtgtgtttaatttcttttgattccattttggttaagagagcagtaaatagattttctggtattcttgttcacttgattacatttgtataaagttctgattgccagttgctcagataacaagtgacaaggcagaattctttaaatcagtaaagttccttaagcctaaggctaaatcttgaatacattgttgaattctttaatatcctgatggcaagcagactgatagctgcacatttggcatgctttgtttaatggattttatttttaattgcagatttatttggcaatgtacagtaaattttgtaaacttgcatcaagtttatgaataaagaaccatttaaaaa

SEQ ID NO: 197718 - DNA, 575 bp, Homo sapiens
  Payload ID: 18985
  Gene Name: ubiquitin-conjugating enzyme E2Q family member 2
  ENST ID: ENST00000561723
  CDS Start-End: 100-456
cccgcggggcggtcgcggccgtgacggcggctccgggcccggctccccttccgcgcccggctccccttccgcgcccctcccgccggagatgaggggaagatgtccgtgtcagggctcaaggccgagctgaagttcctggcgtccatcttcgacaagaaccacgagcgattccgcatcgtcagttggaagctggacgagctgcactgccagttcctggtgccgcagcagggcagcccgcactcgctgccgccgccactcacgctccactgcaacatcacggaatcctatccatcttcttcaccgatatggtttgtggattctgaagacccaaatctgacatcagttctggaacgtctagaagatactaagaacaacaatttggataactttccatttgatcctccatttgttcgagtggtgttacctgttctctcaggaggaatcaatataatctagcaagagcccaacaatcctataattccattgtacagatacatgagaaaaatggctggtacacccctccaaaggaagatggctaaatgtgttgactgttgtatgtttggactaatgttgct

SEQ ID NO: 197719 - DNA, 499 bp, Homo sapiens
  Payload ID: 18986
  Gene Name: ubiquitin-conjugating enzyme E2Q family member 2-like
  Uniprot ID: H0YL09
  ENST ID: ENST00000558195
  CDS Start-End: 13-408
agaacggaccagatgggtccagcagtgctgggtcaaggccaggaggggcagccggaagcgcgcgcatgctctggactcctgcagccgccgaaacggccaatcgtgtttaaggagaaactaacaatgaaaacggactcgttgatggaggaaaagttggaatgcagcctctggtgctgtttgagcgatccctctatcccgggtcgctgctgtgttctggaaaggcgcattgtaccctggatgcagcaggaatcctattcatcttcttcaccgatatggtctgtggactctgatgagccaaatctgacatcagttctggaacgtctagaagatactaaggagaacagttcggtgaggaaagaaaccaagctattttctcttttcctcatgaacattatatttagaaattaaatgttaagtgataatattatataaaaacatgattaacaactgtaatcttagaggaattaaagtctgggtattttaagtcctccaaatctta

SEQ ID NO: 197720 - DNA, 4317 bp, Homo sapiens
  Payload ID: 18987
  Gene Name: ubiquitin-conjugating enzyme E2Q family-like 1
  Uniprot ID: A1L167
  ENST ID: ENST00000399816
  CDS Start-End: 272-757
gcagcagcagcagcaccccgggggcgcgggcgacgccagcccgggacccggcaagggaaagggcaagcgcgcggcggagctggccccgcgcgacaaggcgccggcggctgcggcggcggcggcggcggctgcggcgggggccgggggcccccgcgagagggcagcgggcgccagggcggggccgggcccggcggtggcggcggcggcgggcggcagcctggtccccgcggcgcgccagcaacactgcacgcaggtgcgcagccggcggctcatgaaggagctgcaggacatcgcgcgccttagcgaccgcttcatctccgtggagctggtggacgagagcctgttcgactggaacgtgaagctgcaccaggtggacaaggactcggtgctgtggcaggacatgaaggagaccaacaccgagttcatcctgctcaacctcaccttccccgacaacttccccttctcgccgcccttcatgcgggtgctcagcccgcgcctggagaacggctacgtgctggacggcggcgccatctgcatggagctgctcacgccgcgcggctggtccagcgcctacaccgtggaggccgtcatgcgccagttcgcagccagcctggtcaagggccagggacggatctgtagaaaagctggcaaatcaaaaaagtccttcagtcgcaaggaagctgaagctacctttaagagtttggtgaagacgcatgaaaaatatggttgggtcaccccgcccgtgtccgacggctgatgtctgccacgtgcagtagacgctcgagcgcctgtccacacacacaccagtaccctgacatctcctcaatgctgtgcatcctccacccgtttttactccagccagaactgcatcctgaatgcccaggagacgtttaagttatttatgaaaagatgtgtgtacagagaggaagagggagcaaatgccgttcggattatgtttcgattataaatgaatgatcacctcgaagtcactttagaacacatgttgagatggtgacatttcccagcctgcctgcccctctgcccaccccggtcacattgccctgagcttctttccatgacagcagctccgacgagccggcaggaaactcaatgcccctgctggctccatttccatgtaaatggcgccgttcatatttcacagggacgccgtgcatctccgccgtgcgtccccggcacgtgtttgctgtgctctgtatctctgtttttcttcctggaaggtcaacataacttgaaaatgtgtctttctgtggcccatggtccgctgtgatgacatttagacctcatttgtgctatgacctttggctcatgaaaacacaaatttaacattgccaggttctagtgatttaaaaccacaactgcccacttggtgaaaacgtgctctcgatgctgatttgtggtgtgctgctgtccacagataaaccagtgccattagatggaaggcagaggatactgcgaccacccctggcagacggtggcgtagacaccaggtgcgccctctggggctcagagcaacggatggtcagctgcgaacagtctcgtccgatgttaggaaatggtcctacggccgcgcctttgtgttcctgtcttctctccaccaccaaaagcaaaagatgatttcccattcactgcagtcatctgactcattttaatatctgtgctagtgacaatgaatgtcagaactgccaaaggataccaagtgatcatacgatgatttgcatgatcgggtctatttcacccaatagtcacttgtgtgtcccccgaaattgggatgggtgagcacccttgctgtggtgtaaacttcctgttatttaatctcccccacggtttcatttttctcttctgttaatacttagaactttctaagaaactccatgaaatgaggaaatactgtttctaataatatgaggaaagaagtaaaaatgttcattccaagtggcaagtcttattggacacattttaaataaaatcatgcatacctgatacactgcctcaaggatccagtcattgtgggctatccttccatttaaaatatttcagatattcttaaattttttaaatattgcaaatactacaacatgtaattccagagcagcgttctaagtcaggtaccagaaatgagtcttaggaacccatagtctttgcaaaaattcagtagattgaaatagtccccagaagcagccaaggagctgaagggatgattcgatcaagttcagatgttgccaattgtatcttactgctgtgaaggaggaaaagtcttccgggataatgtattcaattcttcaggcagttttgtctacttggggacctgcccattggttcaaggttttcagagatccaagaggccttgcctcaaagaacaaggattggcgcctttcagcagggctgcccattcaccaaacttattgttacttttgtttttctttaccactttcttatttgcccccaagtgcacacaggcagctctgccagaccaaaatgacagtgtattaagaatgcagggcctgctcagcttccctgtgagtcataatagtcgtgaaacttgatgacagtgaacttacgatgttcattcatccaaccctctatggtggcattctccatcctggaaacctgacatttggctgacggtctttggaccctggagctagtggtcatcatggaattacactgtggagatgaaagacctaggacagaaacatcttgctagggaaagcacctgagtttattcctttctaaatattttcctcttctaatgaaaactaaaagcagctttactttagggggaaaaatatatccaaaggcaggtcatttcagtagtgtttattagctgattgaaaaacaggttcacggtgctctctgagaactgcaccaaggggtgcagccaagagactggtctgaccccgggttgggctgggtggcagccggcgacagagcagagagacactcagctcagtgtcgctccttccatacactcagagtttgatttttcttgcatggcatttccattaggtttgttagaaacttatagaagaaatcaattctttagtgaacgaaataccatttttcactcaattggtaagaatttttcattttaaaagcagtaggaagtgatgtaaaactctaccattgcttggactgttaggagtgcggactccctttctggtagactcccttcgtaggcaagcacggtggtgcccagccatggaggcacccttaggacactgagcacaggcctggctgcctgtgccttggccacagcctccttccaccccactgaagtggacacctgcctctggagcccagggtgagaaggagaggcctgaagcctggggccacgttcccacacaagccaaggaacctattcctctttggacagacagcgagggaataatcagacagtgggtgcaaatgttcatgtcccgatagctccacacacccatgtatctgtgggaactcaaaccaagccagagcccacagagccaaacaaacagaaaatcacaaacccatctgtcctcttctcaatgcagaactccttcccgtccaataattttcctgaaccaatcacccttgttattgggtatcttctccactgctgggtaaggcctgcacatggtctgtctgtaactttctagaagactgagaactgcttatgccttagggagttctatgtgagcagcaaggttattccccctagttacacacacacgcacatgtgccaatactcctgcaaagacttgctgtttctaaaatccactactcagaaaaaccagggtgtcggcttaaagttttcagctccatctatcaaaatttgacctttttttaagagaaaaatatgtagatgagtgaaaaagacctaggattgaaagacaaaaagccatgtgtccatgtaaccctggccagtcactccacctgcctgagccttggtttcctcagctgtgagctcctaccaggtcagtgtgggaattggccaaaatgacgcagcagaagtgctttggagactaaagattgtcaacgaaatgtaagtgtcattttcgtagtattaggacgtttacattacagcaggctttaattagaacccacttagatatcgactcagaatgatcaattacagtggttaaaatacacatacctggtaatcatatacttgctttctgtccccagttcttacattaagtcaaccaactgacccaaaaatcaaccaataactaactggccatctctccactcactcagcattctcctcttaaatgcagggcatgcagaagattaaggtacagccccttccctggataggaactc

SEQ ID NO: 197721 - DNA, 4075 bp, Homo sapiens
  Payload ID: 18988
  Gene Name: ubiquitin-conjugating enzyme E2R 2
  Uniprot ID: Q712K3
  ENST ID: ENST00000263228
  CDS Start-End: 192-908
tcgtgtgtgaggaggaccccgggcgggcccacgggccgtgtggggcctggtctggcccgccgggtgtgtgaagaccggggcccggtgctgcccggccggagggcgagcggaggggaggggcctggtccggcccggccggtgcgtgaggactggggcccgggcccggcgccgccgccgccgccgccgccgcgatggcccagcagcagatgaccagctcgcagaaggccctgatgctcgagctgaaatccctgcaggaggaaccggtggagggcttccggatcaccctggtggacgagtccgacctctacaactgggaggtggccatcttcggaccccccaacaccctctacgaaggcggctacttcaaggcgcatattaaatttcctattgactacccctattcaccacctaccttcagattcttgaccaaaatgtggcaccccaacatttatgagaatggagatgtatgcatttcgattcttcatccgcctgtagatgacccacagagtggagaactgccttctgaaaggtggaatcctactcagaatgtgaggactatcctattaagtgtaatctcactgcttaatgagcccaacaccttctccccagccaatgtcgatgcttcagttatgttcaggaaatggagagacagtaaaggaaaagacaaagaatatgctgaaattattaggaaacaagtttcagccactaaggccgaagcagaaaaggatggagtgaaggtccccacaaccctggcggaatactgcatcaaaactaaagtgccttccaatgacaacagctcagatttgctttacgacgacttgtatgatgacgacattgatgatgaagatgaggaggaggaagatgccgactgttatgatgatgatgattctgggaatgaggagtcgtgacgtgctccttcagtgcccctgtactgccctgccatctcaggccaaagggaggggagcaagtggggacctggccatggcccctcagcaaaaacctattcacagcgggtggggaaacacacacagctcctgctgactccccttatggatctcagtttgctcctttttatggacctttaatggagagagagtaaccctccacagaatgtctgaattcttgcattctttacccttccatcactatattgattctttttttaaaaaatatgaacccaaactcccgcctcacttcgtctctacagaatgttcacagcaaaacacgtttggtctgtttttagattcttgaagaattcaatagtctttcaagatgtttaatgtgtttaaagctgggaacctgttgggagttcacaagtgctgcatatactgggtagcaaaagaaaatggaaaaaaacccacaaaacaaactttaaaaaaaaaaaaaaacaaatttgccaaggtttagctgctcatttacattagtgtgtgtgcattcgttcagccccatggtggtgaattctgtttctttcctttcctaaggctgggacatggtgggcatcagggactttgtgctaagcctgatgaaatgtgctccttcaatctccatgaaaccatcgtaacatggaggcctcagctgctctgaggagagaaatcagactttgttttttgaaatcgattgggatcgaaagcctgaaataaatattcatactttccatagaactgagcacttggttgctatttattttaaaggcagggttatttccccccagggagtggggcaagcggggaagttgggatgagtgcgtgtgggagcaaagagttaaaaatcactatgctaagtttggttgatgctactggggggaaaaagttgaaactactggtgaccactgttgggagaggaaacatctgttttatagatttagcatggccttcccatcaaaaatacactcgtaccatgacgttttgtttttgttttttaagtagccacttttaattactcagtattaatcctaggtgcatgtgttaagatttcggttttcatcgagctgcttatactgatagtgaaaaacttggatgtgtgtgagacgagttaccgccttcttcattggatgtgatctgaactttttttctcctttcaacatacttaggctgtggagtgcaagcagaattatgcatagaaattgtggcagggctgagggagttgactgcaggcagtttttaggccagataaggctagatcttcctgcaatgcacttgctgcagctttgattttccagatctcaatcgtgttgcttcaatcaatattgagatccagcagccttcaccatccaggagacttcagaacttgaaggtaatttttggttgttatgggggtgcaccagatcataggagggcattatttggaggaaaccgctataatgtaaaatcagatttcagaaggaaaatgcagcaaggactgactgtagtcctatttcagacccctgggcactagtgtcaactcctcctttggctcgtaactcagaaagaaccaaagggcagattagggacggggcaggagggatcctaggatggccagagtaggtgacgcttacttccttagctcctccttccattctgatctcagggttttcactcttcaaactcccaaacacatgacttcttcccagcagcccttcccggcctctaaagtttggtcccagcagcccttcccagcctctaaagtttggtctggtatgaaatgggactgtttaacaagcaaggctcttaggggacactgttgagcctggtcccagaatctgtgatctccacagggccagggttgctacttgcacccagaatctagtgattttagtcagatccatggaacagagcagcttcgtaatacattgtcaagttacctgattacaaactctcatagatgttggaactacctttttactccccatactttgtaagtaatgcttccagattaacctgcaaatcttgtggagccaaagcctctcacagtgctgatttacctcccccaaaatgcccccaaacccccatgcaagtttacagccagtagcttggtcttattctcttggagccctaaaattaagcctttcattcccctttgctaaagcatctcactcccagggcagccccagcaccctggcattgcgggaggtgctctgctgcacagctgttccatcaggccctattggcctctgttagacattgactcagggagccggagcgccaagtggaggttgtacctttcagccctttggggtgttaaaagtgtcaagggctgggtttgcctctgatgagtacaatcagttccagaagactgggtaagtctcttgctagcaggtggacattctggtattttagactgactgaacgaaacccagaggctggttccagagctctgtccctgagaacacatccctgtggaaaatacttgagtttgtaattttttttcccccttctgggagtggaggtctcaggctcaatccggaaccatgtacgtacagttttgcttattatttgatgtgacatgaactcaaaatcctgcatttttagattccttttagttctaattgaggcctcactagatgctcttcagttctgtgtattttgaggctgggtggagaagtatatgattctgctgttgattctttcagtcttccccccttctccttttatcaatcattccagagttattttctattagtcaaacttttttgtagaaccttctttcccttaccctggcaaattgcttctttacttgctggtttccttacgtttggggcacatgttgtaagaaactgattggaaggggaaatgtgcagctctccactggaaaggaactctccacccctcccatcctgataaaacaaacaaggtttacatttacaactaaaaggattcagatgcaattttcaactattctgaaaccagcaggacacacctgactttaatagttttagctgaaattgtagatgttttgcttcagtttaacttatgagaaaagattatctgacggattttgtgttgacttcccctttagtggtttattttgtctttttctgcccatctgtctactaataaaatgtgaaataaaatacctgtattgctacttccccatgaaa

SEQ ID NO: 197722 - DNA, 2548 bp, Homo sapiens
  Payload ID: 18989
  Gene Name: ubiquitin-conjugating enzyme E2S
  Uniprot ID: Q16763
  ENST ID: ENST00000264552
  CDS Start-End: 189-857
gccgggcaccggggcggcgggttggtctacgctgtgcgcggcggacgtcggaggcagcggggagcggagcggggccgccggggcctctccagggccgcagcggcagcagttgggccccccgccccggccggcggaccgaagaacgcaggaagggggccggggggacccgcccccggccggccgcagccatgaactccaacgtggagaacctacccccgcacatcatccgcctggtgtacaaggaggtgacgacactgaccgcagacccacccgatggcatcaaggtctttcccaacgaggaggacctcaccgacctccaggtcaccatcgagggccctgaggggaccccatatgctggaggtctgttccgcatgaaactcctgctggggaaggacttccctgcctccccacccaagggctacttcctgaccaagatcttccacccgaacgtgggcgccaatggcgagatctgcgtcaacgtgctcaagagggactggacggctgagctgggcatccgacacgtactgctgaccatcaagtgcctgctgatccaccctaaccccgagtctgcactcaacgaggaggcgggccgcctgctcttggagaactacgaggagtatgcggctcgggcccgtctgctcacagagatccacgggggcgccggcgggcccagcggcagggccgaagccggtcgggccctggccagtggcactgaagcttcctccaccgaccctggggccccagggggcccgggaggggctgagggtcccatggccaagaagcatgctggcgagcgcgataagaagctggcggccaagaaaaagacggacaagaagcgggcgctgcggcggctgtagtgggctctcttcctccttccaccgtgaccccaacctctcctgtcccctccctccaactctgtctctaagttatttaaattatggctggggtcggggagggtacagggggcactgggacctggatttgtttttctaaataaagttggaaaagcagcttctgtgtctcacagatgccccaggaccgctgcatggtgccatgtggctctgggagtttggctcccctgcacaggccctgggtccttgtaaagcctcatggactgcagcagtgggtccatctagctcaccagccttgctgtttgaggtttgggtccacctctttgttctgtggaggtagagcggtcacaacccctctttggagtcagatttccaatctaaaatggggcgaggacctggagctgctcctggtggcctgagcggcactgccctatacttctccctctagaataatggccacgttggtgtggcagtggtgttcctgctcaggacggccaggtgccagcagtctggcatgaggctcgcctcgtctgtctggttctggactgggccaaggttcggtccccttgaatcatctgatcctgctttgtgctaaagattggtttttcccttgtgggcagcaaagcctgttcccacatgtatttctgcacaacagatcacaaagccagcggcttaaaacaacacccacttcagactttgtgttggaagtctggacacggctgagctagtctctgctcagtgctttgcaggctaaaattgaggtattggttgttggtgttccttagtctgggtcctcttccatgctcatggttgttggctgatttcagtcctcgtagaactagggtcttagctccaagaagctgcccctccttgggccctggcaggtctgatttaagggcccattccctttgaggtgctcaccggattaggtcaggcccatccagatacttaagtgataatgactaaatcacaggggtaagatcccagcttagtcttagtttctgccctcaaggggaagggattaacctgggtgtgcacaccagggggtggggaaacttcccattctattaatgcgtttaggttatttagaccaatgtctcattaattttaaaaaaattaaaaataggccaggcgcaatggctcacgcctgtaatcccaactttaggaggtgaaaggatcacttgaggccaggagttaaagacgaacgtgggcaacacagtgagatcccatctctacaaaaagtaaaatacatttacaataaaaatctacaagttctgacccataggagagtggaaaactcaaaggctgcttttgtcctgaaagaatttgcctattctaataaaacagctgaggttgaaacggctcagcctctgaaaggggtctgacccttccttgagcccttgcctccagtgacaatctcccaagctaagggagaaaaggaaccaaaagtctgcactcctctctacctctagcagtgcagggagcgaaggaaagacaagggaagaaacccttcagattttcagatcaaattcacatcactggccatccaagaaatcttaagctctgcgtttatcgtcaaccatttctgcatgagggaagcaaacagtccttgctgaaggaaggtgcctgcatcctgggcctcggaacccactgaaataatttagcgaagtgcataataaaaataatatttgccctta

SEQ ID NO: 197723 - DNA, 496 bp, Homo sapiens
  Payload ID: 18989
  Gene Name: ubiquitin-conjugating enzyme E2S
  ENST ID: ENST00000589978
  CDS Start-End: 183-422
caccggggcggcgggttggtctacgctgtgcgcggcggacgtcggaggcagcggggagcggagcggggccgccggggcctctccagggccgcagcggcagcagttgggccccccgccccggccggcggaccgaagaacgcaggaagggggccggggggacccgcccccggccggccgcagccatgaactccaacgtggagaacctacccccgcacatcatccgcctggtgtacaaggaggtgacgacactgaccgcagacccacccgatggcatcaaggtctttcccaacgaggaggacctcaccgacctccaggtcaccatcgagggccctgggctacttcctgaccaagatcttccacccgaacgtgggcgccaatggcgagatctgcgtcaacgtgctcaagagggactggacggctgagctgggcatccgacacgtactgctgaccatcaagtgcctgctgatccaccctaaccccgagtctgcactcaacg

SEQ ID NO: 197724 - DNA, 743 bp, Homo sapiens
  Payload ID: 18989
  Gene Name: ubiquitin-conjugating enzyme E2S
  ENST ID: ENST00000587845
  CDS Start-End: 131-743
ggggagcggagcggggccgccggggcctctccagggccgcagcggcagcagttgggccccccgccccggccggcggaccgaagaacgcaggaagggggccggggggacccgcccccggccggccgcagccatgaactccaacgtggagaacctacccccgcacatcatccgcctggtgtacaaggaggtgacgacactgaccgcagacccacccgatggcatcaaggtctttcccaacgaggaggacctcaccgacctccaggtcaccatcgagggccctgaggggaccccatatgctggaggtctgttccgcatgaaactcctgctggggaaggacttccctgcctccccacccaagggctacttcctgaccaagatcttccacccgaacgtgggcgccaatggcgagatctgcgtcaacgtgctcaagagggactggacggctgagctgggcatccgacacgtactgctgctttcctggaaagacaaacagtgccagacccaggacacccaagtactgttgagaagtgcccaggagcaccttactatgcaacgagtgaccatcaagtgcctgctgatccaccctaaccccgagtctgcactcaacgaggaggcgggccgcctgctcttggagaactacgaggagtatgcggctcgggcccgtctgctcacagagatccacgggggcgccggcgggcccagcggcagggccgaagccggtcgggccctggccagtggcactg

SEQ ID NO: 197725 - DNA, 922 bp, Homo sapiens
  Payload ID: 18990
  Gene Name: ubiquitin-conjugating enzyme E2T
  Uniprot ID: Q9NPD8
  ENST ID: ENST00000367274
  CDS Start-End: 151-744
ggagccacgccaacagtcagaggtcgcgcaggcgctggtaccccgttggtccgcgcgttgctgcgttgtgaggggtgtcagctcagtgcatcccaggcagctcttagtgtggagcagtgaactgtgtgtggttccttctacttggggatcatgcagagagcttcacgtctgaagagagagctgcacatgttagccacagagccacccccaggcatcacatgttggcaagataaagaccaaatggatgacctgcgagctcaaatattaggtggagccaacacaccttatgagaaaggtgtttttaagctagaagttatcattcctgagaggtacccatttgaacctcctcagatccgatttctcactccaatttatcatccaaacattgattctgctggaaggatttgtctggatgttctcaaattgccaccaaaaggtgcttggagaccatccctcaacatcgcaactgtgttgacctctattcagctgctcatgtcagaacccaaccctgatgacccgctcatggctgacatatcctcagaatttaaatataataagccagccttcctcaagaatgccagacagtggacagagaagcatgcaagacagaaacaaaaggctgatgaggaagagatgcttgataatctaccagaggctggtgactccagagtacacaactcaacacagaaaaggaaggccagtcagctagtaggcatagaaaagaaatttcatcctgatgtttaggggacttgtcctggttcatcttagttaatgtgttctttgccaaggtgatctaagttgcctaccttgaatttttttttaaatatatttgatgacataatttttgtgtagtttatttatcttgtacatatgtattttgaaatcttttaaacctgaaaaataaatagtcatttaatgttga

SEQ ID NO: 197726 - DNA, 1136 bp, Homo sapiens
  Payload ID: 18991
  Gene Name: ubiquitin-conjugating enzyme E2U (putative)
  Uniprot ID: Q5VVX9
  ENST ID: ENST00000371076
  CDS Start-End: 245-925
ccgcagatgaggaagtgcccaagtcttccttcgggaagttctcgtttagaggagtcaggagaaaaagtcattgttatatcccaactttagaagccgcttatcttggtaccgttctgaggttctagaaagcaagtaacttatatcagtttactaagtgtgggaaagtgacccataacttcaaacatctgcctcagagtaaacctgaggcatttggggacaagtgtcagaccctccgctgcctatcatgcacggcagagcttacctcttgctgcacagagacttctgtgatctcaaggagaacaattataagggtatcactgctaagcctgtaagtgaagatatgatggaatgggaagttgaaattgaaggtctacagaattcagtttggcagggtttagtcttccaactgacaatacattttacatcggagtacaactatgctcctccagttgtgaaatttataacaattccgtttcatccaaatgtagacccacacactggtcagccctgtatagactttttggacaaccctgagaagtggaatacaaactatacattgagcagcatcttacttgccctacaggttatgctttctaatccagtgctagagaatccagtgaatttggaagcagccagaatactggttaaagatgaatctctgtacagaacaattctaagacttttcaacaggccattacaaatgaaagatgacagccaggagttacctaaagacccacgtaaatgtatcagaccaattaaaacaacctcatttagtgattactaccagacatggtccagaatagctacatcaaaagccacagaatactacagaactccattgctcaaagttccaaatttcattggacagtattacaaatggaagaaaatggatctacagcatcagaaagaatggaatttaaaatgaaaaatctttctttggaagcagcataggggaagagcatgagcttcagagtcaaacagatgttggagaaattcttaaccactctgaacttgtttttttatctgttaaatggagataaccttacctatcttgcaaagttgttttgcatttgacgcttattattttatatatatgatttcattcgagatataaataaaaattatataaaaatgtg

SEQ ID NO: 197727 - DNA, 1193 bp, Homo sapiens
  Payload ID: 18991
  Gene Name: ubiquitin-conjugating enzyme E2U (putative)
  ENST ID: ENST00000371077
  CDS Start-End: 425-1193
gatttgcttcctccggtgcgtggctgcggggttgcacctgtgaagcgaagacaacctgctaggaccctgataggcgtacacctctcactcccactcacgcgccgacgacatgggcttgtctccgttactcatccaagtttgtcttgagactgggctgtgagccggcactgcagtgaaacgccgcagatgaggaagtgcccaagtcttccttcgggaagttctcgtttagaggagtcaggagaaaaagtcattgttatatcccaactttagaagccgcttatcttggtaccgttctgaggttctagaaagcaagtaacttatatcagtttactaagtgtgggaaagtgacccataacttcaaacatctgcctcagagtaaacctgaggcatttggggacaagtgtcagaccctccgctgcctatcatgcacggcagagcttacctcttgctgcacagagacttctgtgatctcaaggagaacaattataagggtatcactgctaagcctgtaagtgaagatatgatggaatgggaagttgaaattgaaggtctacagaattcagtttggcagggtttagtcttccaactgacaatacattttacatcggagtacaactatgctcctccagttgtgaaatttataacaattccgtttcatccaaatgtagacccacacactggtcagccctgtatagactttttggacaaccctgagaagtggaatacaaactatacattgagcagcatcttacttgccctacaggttatgctttctaatccagtgctagagaatccagtgaatttggaagcagccagaatactggttaaagatgaatctctgtacagaacaattctaagacttttcaacaggccattacaaatgaaagatgacagccaggagttacctaaagacccacgtaaatgtatcagaccaattaaaacaacctcatttagtgattactaccagacatggtccagaatagctacatcaaaagccacagaatactacagaactccattgctcaaagttccaaatttcattggacagtattacaaatggaagaaaatggatctacagcatcagaaagaatggaatttaaagtattccgttatcaagtgttggcttgctagaaaaagaatgcctcatgaagtcactcactcaatggaagaaattaagctctgcccaactctaa

SEQ ID NO: 197728 - DNA, 444 bp, Homo sapiens
  Payload ID: 18991
  Gene Name: ubiquitin-conjugating enzyme E2U (putative)
  ENST ID: ENST00000608956
  CDS Start-End: 1-403
gatgacagccaggagttacctaaagacccacgtaaatgtatcagtgctcaaagttccaaatttcattggacagtattacaaatggaagaaaatggatctacagcatcagaaagaatggaatttaaagtattccgttatcaagtgttggcttgctagaaaaagaatgcctcatgaagtcactcactcaatggaagaaattaagctctgcccaactctaaatgaaatttttcttgagtcaccaactgcaataaatagcatcacagacatttatgaaacagaagaggaggggtggaagagtgacacttcattatatgaaaatgacacagatgagcccagggaagaggaagtggaagatctgatctcctggaccaatactctcaatacaaatacttcagaagattaagcagaacattatcagattcaaaaaataaacagcctccgcca

SEQ ID NO: 197729 - DNA, 775 bp, Homo sapiens
  Payload ID: 18991
  Gene Name: ubiquitin-conjugating enzyme E2U (putative)
  ENST ID: ENST00000608020
  CDS Start-End: 1-615
gttatgctttctaatccagtgctagagaatccagtgaatttggaagcagccagaatactggttaaagatgaatctctgtacagaacaattctaagacttttcaacaggccattacaaatgaaagatgacagccaggagttacctaaagacccacgtaaatgtatcagaccaattaaaacaacctcatttagtgattactaccagacatggtccagaatagctacatcaaaagccacagaatactacagaactccattgctcaaagttccaaatttcattggacagtattacaaatggaagaaaatggatctacagcatcagaaagaatggaatttaaagtattccgttatcaagtgttggcttgctagaaaaagaatgcctcatgaagtcactcactcaatggaagaaattaagctctgcccaactctaaatgaaatttttcttgagtcaccaactgcaataaatagcatcacagacatttatgaaacagaagaggaggggtggaagagtgacacttcattatatgaaaatgacacagatgagcccagggaagaggaagtggaagatctgatctcctggaccaatactctcaatacaaatacttcagaagattaagcagaacattatcagattcaaaaaataaacagcctccgccatagcccagcgttgtggagcaattttggaagactctcagaacttggatttcattttttttaagttgttctcacccactcactgcaagtacaaattagaaatataagtacaaatcagtaaa

SEQ ID NO: 197730 - DNA, 1550 bp, Homo sapiens
  Payload ID: 18991
  Gene Name: ubiquitin-conjugating enzyme E2U (putative)
  Uniprot ID: Q5VVX9
  ENST ID: ENST00000611228
  CDS Start-End: 425-1390
gatttgcttcctccggtgcgtggctgcggggttgcacctgtgaagcgaagacaacctgctaggaccctgataggcgtacacctctcactcccactcacgcgccgacgacatgggcttgtctccgttactcatccaagtttgtcttgagactgggctgtgagccggcactgcagtgaaacgccgcagatgaggaagtgcccaagtcttccttcgggaagttctcgtttagaggagtcaggagaaaaagtcattgttatatcccaactttagaagccgcttatcttggtaccgttctgaggttctagaaagcaagtaacttatatcagtttactaagtgtgggaaagtgacccataacttcaaacatctgcctcagagtaaacctgaggcatttggggacaagtgtcagaccctccgctgcctatcatgcacggcagagcttacctcttgctgcacagagacttctgtgatctcaaggagaacaattataagggtatcactgctaagcctgtaagtgaagatatgatggaatgggaagttgaaattgaaggtctacagaattcagtttggcagggtttagtcttccaactgacaatacattttacatcggagtacaactatgctcctccagttgtgaaatttataacaattccgtttcatccaaatgtagacccacacactggtcagccctgtatagactttttggacaaccctgagaagtggaatacaaactatacattgagcagcatcttacttgccctacaggttatgctttctaatccagtgctagagaatccagtgaatttggaagcagccagaatactggttaaagatgaatctctgtacagaacaattctaagacttttcaacaggccattacaaatgaaagatgacagccaggagttacctaaagacccacgtaaatgtatcagaccaattaaaacaacctcatttagtgattactaccagacatggtccagaatagctacatcaaaagccacagaatactacagaactccattgctcaaagttccaaatttcattggacagtattacaaatggaagaaaatggatctacagcatcagaaagaatggaatttaaagtattccgttatcaagtgttggcttgctagaaaaagaatgcctcatgaagtcactcactcaatggaagaaattaagctctgcccaactctaattcccaccacagatgaaatttttcttgagtcaccaactgcaataaatagcatcacagacatttatgaaacagaagaggaggggtggaagagtgacacttcattatatgaaaatgacacagatgagcccagggaagaggaagtggaagatctgatctcctggaccaatactctcaatacaaatacttcagaagattaagcagaacattatcagattcaaaaaataaacagcctccgccatagcccagcgttgtggagcaattttggaagactctcagaacttggatttcattttttttaagttgttctcacccactcactgcaagtacaaattagaaatataagtacaaatcagtaaa

SEQ ID NO: 197731 - DNA, 2315 bp, Homo sapiens
  Payload ID: 18992
  Gene Name: ubiquitin-conjugating enzyme E2W (putative)
  ENST ID: ENST00000419880
  CDS Start-End: 1-576
atgttgagcccccgcggcgtgacgcgagcacggcagctcctccccctgcgtctctggcctcgccggtcttggggggatggttccatcatggcgtcaatgcagaccacaggaaggagggtggaagtatggtttccaaaacgactacagaaagaactgttggctttgcaaaatgacccacctcctggaatgaccttaaatgagaagagtgttcaaaattcaattacacagtggattgtagacatggaaggtgcaccaggtaccttatatgaaggggaaaaatttcaacttctatttaaatttagtagtcgatatccttttgactctcctcaggtcatgtttactggtgaaaatattcctgttcatcctcatgtttatagcaatggtcatatctgtttatccattctaacagaagactggtccccagcgctctcagtccaatcagtttgtcttagcattattagcatgctttccagctgcaaggaaaagagacgaccaccggataattctttttatgtgcgaacatgtaacaagaatccaaagaaaacaaaatggtggtatcatgatgatacttgttgatgccactgttatcatcctcctagcagaagatagtcctactgagaaaatgagcactttgatcattcagtctttgaactttaacctttgactggaagtgacctataggcaatgaagactacttccttttactgcatttttactcgtgtgcattctgggcgcatgttgatcgctggttcagtccaggcaactgacatgcttttattagtcatacagtattaatgcaggtgtcaggaaatgtcaaatataattccattttttatttttatttttttaagcttttggaaaagctccaggtcctcatgtattgtgcaataacaatgacttccttggcggttttggtacgttcattgccggcaatgggcgttgtaacaggaaaagttttcattaactcctgccattcaatgattaatgcatgatagggcctatgaaatgaacttactggttatagtgggaatataaataaagtgagggatccaacattactttaaaagtcaccccaactgtttatatttggattctatgcactgtgatcctaaggttaacagcatgaattaacatgcgtctttaaaggactgtaatgaaagatcattgcatatttattgaattgtttatatctactgtcaagttgttttgacatggaagattttcaagtaacattggcagagaggtacagtatgttatccctatggtgaaaataaattaatttgttgtatatagttcctcaatctctgaagtaaaggtatgagtaatatagggtatgaatggtttaatcaaggctttattttggaagtaagaaaaatggcagtgatgattaaattgctgcagtccataatttgggcttgttatttgtacattaaagattttttccaagtaagttacactctgttaacttcctgctagccatcagcatgagccctactgcctaaacactatttcatttatttatgtttggaaaccccgtaaacatttttgtttgcaatcttgtttcttttgttataagtcaagtttgaatgttacaatacttttattgaaacttttgttaagttttttcttgtaaattttctttacttgtgagtatcatcttgtcctttaatcctgtaccctaaaataagaaatacatttttgacagaggcttaatgttttaacaaaagagtgtggacatttttattttaaaatttaggcaaaagtcactatcaaatggttgcttatttgtctcacacagccatatagtttttcctggagggttttgttttgttgttgttgaaaagactttgcttacagctagatgaaactttctatagaaaaaaaaaattgttgaaaggtccagttctcagtaccatgtgagttaatgatactacaactaagttctttttaaaaagtgattaatgtattttataaattaccttttcacatatgcaaaatctgtttctactacaatgttatttttactaatgccttattgttgcactctttttgaaatatcctgcagtgaatatatgaatcaatttgggcttaaaactgaaagccagttggctgaaaggtttgaaatacgtaccccagtaaaaccattcaatcaataattggtaaataatattttaaaattgtttttaatctgtatagatgacattttgtagctttgtacatgttgttaattaagggcatataattttacactcaaagtataattgctgaactcaggggtgggtagacttcaaaaatatgtctgctatagaaataac

SEQ ID NO: 197732 - DNA, 3903 bp, Homo sapiens
  Payload ID: 18992
  Gene Name: ubiquitin-conjugating enzyme E2W (putative)
  ENST ID: ENST00000422906
  CDS Start-End: 54-236
agctcctccccctgcgtctctggcctcgccggtcttggggggatggttccatcatggcgtcaatgcagaaacgactacagaaagaactgttggctttgcaaaatgacccacctcctggaatgaccttaaatgagaagagtgttcaaaattcaattacacagtcatgtttactggtgaaaatattcctgttcatcctcatgtttatagcaatggtcatatctgtttatccattctaacagaagactggtccccagcgctctcagtccaatcagtttgtcttagcattattagcatgctttccagctgcaaggaaaagagacgaccaccggataattctttttatgtgcgaacatgtaacaagaatccaaagaaaacaaaatggtggtatcatgatgatacttgttgatgccactgttatcatcctcctagcagaagatagtcctactgagaaaatgagcactttgatcattcagtctttgaactttaacctttgactggaagtgacctataggcaatgaagactacttccttttactgcatttttactcgtgtgcattctgggcgcatgttgatcgctggttcagtccaggcaactgacatgcttttattagtcatacagtattaatgcaggtgtcaggaaatgtcaaatataattccattttttatttttatttttttaagcttttggaaaagctccaggtcctcatgtattgtgcaataacaatgacttccttggcggttttggtacgttcattgccggcaatgggcgttgtaacaggaaaagttttcattaactcctgccattcaatgattaatgcatgatagggcctatgaaatgaacttactggttatagtgggaatataaataaagtgagggatccaacattactttaaaagtcaccccaactgtttatatttggattctatgcactgtgatcctaaggttaacagcatgaattaacatgcgtctttaaaggactgtaatgaaagatcattgcatatttattgaattgtttatatctactgtcaagttgttttgacatggaagattttcaagtaacattggcagagaggtacagtatgttatccctatggtgaaaataaattaatttgttgtatatagttcctcaatctctgaagtaaaggtatgagtaatatagggtatgaatggtttaatcaaggctttattttggaagtaagaaaaatggcagtgatgattaaattgctgcagtccataatttgggcttgttatttgtacattaaagattttttccaagtaagttacactctgttaacttcctgctagccatcagcatgagccctactgcctaaacactatttcatttatttatgtttggaaaccccgtaaacatttttgtttgcaatcttgtttcttttgttataagtcaagtttgaatgttacaatacttttattgaaacttttgttaagttttttcttgtaaattttctttacttgtgagtatcatcttgtcctttaatcctgtaccctaaaataagaaatacatttttgacagaggcttaatgttttaacaaaagagtgtggacatttttattttaaaatttaggcaaaagtcactatcaaatggttgcttatttgtctcacacagccatatagtttttcctggagggttttgttttgttgttgttgaaaagactttgcttacagctagatgaaactttctatagaaaaaaaaaattgttgaaaggtccagttctcagtaccatgtgagttaatgatactacaactaagttctttttaaaaagtgattaatgtattttataaattaccttttcacatatgcaaaatctgtttctactacaatgttatttttactaatgccttattgttgcactctttttgaaatatcctgcagtgaatatatgaatcaatttgggcttaaaactgaaagccagttggctgaaaggtttgaaatacgtaccccagtaaaaccattcaatcaataattggtaaataatattttaaaattgtttttaatctgtatagatgacattttgtagctttgtacatgttgttaattaagggcatataattttacactcaaagtataattgctgaactcaggggtgggtagacttcaaaaatatgtctgctatagaaataacttgaaaaaaaaaattaaaaccgtggccagccaccaaattgtggacactgtttatatactgctagttaacaattaccacttttaaaaaattataaccgtttttgttctatcttgactagataaattctcacaatgatctctgtcagttttattagttggcctgtttaaccaagacagaaagtctttgaattactcatagttttaaactgcttttaatatgaaaattgcagctgtaaattatgtattttcatattttgcgtaactgctctacactactgtttgacttgatcttcttctgggggttagggagaaatctgtctccatattgctggttctcttaccaaaatgcttttataaagaaatgaccggtgacatttattcaccaaaggaattaatatactgagtcaaagattaacaatgctatactatagagtaataggtcatatatagcctcaattgagttttttatgacaatattttaacatacctctctctctacatataaataccataaagtaaactaaaatgacacagaggaaagtagaggaaaatgaaataatttcggtacatcttatggtttaaagagtagaaaataagatgaaatatcctaaaatataggagcacagacatttaaaattcataatcaggctaacaacactctcttgaatttaggaatcattgaaaactccttgcacttagatttaatttatatgttagttacattattaaaagtcataaggcatttatctgagtcattgctctacagagagcaattaatggcttgtaataataaaaagaatatttctctgtaatgcattgttgaaagacaaccagaatatcaagaaaatgtatataggaatatgctacttgcctcctccctgcatttcctcgtggggcactatttgcgacataggcctacagaattagactttcatacttagaagataaggtacactcttcttcttttatttatttatttatttatttttaggccattcttctggtttgccaaattctattaagacagtgatacatttgcttccttatttatgcatgcttagatcatgaacatgatgcccttcttttttttttttttctttggtcaagtagggattaatgccataggtttagagagaaggattgttttcagtttttaagagaattttttaaaaatacattttatggttctcttaaggaattaatattcacttctgaaggacttacttgtaatatataatttatcattttagccagcagggaaataaatcatttttaatccccagaagaaagtgctggaaatagcttctatatagtcagcagttcacctggagaaagatcttaattccttgttgttttgactaggaatatcaatatttggtataaaataactagaatagtttattaccttttccctcatgaaattttaaatatatgcaaatatatatatcattagattcctgtggtggataataatttcttcagattctaaaacaggtgtctagtgactgcttaattgtttccaagttgcatcaaagatgaattggtaaataatggaaatgagtagtgatatgaaaatggttatgtaactacatattacttgtttctggtaatcaagtcttattttttaaaagcctattgtttttcagaattgagatatttaaaacttgttataacttcttcctaaaaatagaagagaagaggaggtactgtgtgttacaaaaatttttttaaataaagaattcagtgtcactagttctaa

SEQ ID NO: 197733 - DNA, 8426 bp, Homo sapiens
  Payload ID: 18992
  Gene Name: ubiquitin-conjugating enzyme E2W (putative)
  Uniprot ID: Q96B02
  ENST ID: ENST00000517608
  CDS Start-End: 2-544
gatgttgagcccccgcggcgtgacgcgagcacggcagctcctccccctgcgtctctggcctcgccggtcttggggggatggttccatcatggcgtcaatgcagaaacgactacagaaagaactgttggctttgcaaaatgacccacctcctggaatgaccttaaatgagaagagtgttcaaaattcaattacacagtggattgtagacatggaaggtgcaccaggtaccttatatgaaggggaaaaatttcaacttctatttaaatttagtagtcgatatccttttgactctcctcaggtcatgtttactggtgaaaatattcctgttcatcctcatgtttatagcaatggtcatatctgtttatccattctaacagaagactggtccccagcgctctcagtccaatcagtttgtcttagcattattagcatgctttccagctgcaaggaaaagagacgaccaccggataattctttttatgtgcgaacatgtaacaagaatccaaagaaaacaaaatggtggtatcatgatgatacttgttgatgccactgttatcatcctcctagcagaagatagtcctactgagaaaatgagcactttgatcattcagtctttgaactttaacctttgactggaagtgacctataggcaatgaagactacttccttttactgcatttttactcgtgtgcattctgggcgcatgttgatcgctggttcagtccaggcaactgacatgcttttattagtcatacagtattaatgcaggtgtcaggaaatgtcaaatataattccattttttatttttatttttttaagcttttggaaaagctccaggtcctcatgtattgtgcaataacaatgacttccttggcggttttggtacgttcattgccggcaatgggcgttgtaacaggaaaagttttcattaactcctgccattcaatgattaatgcatgatagggcctatgaaatgaacttactggttatagtgggaatataaataaagtgagggatccaacattactttaaaagtcaccccaactgtttatatttggattctatgcactgtgatcctaaggttaacagcatgaattaacatgcgtctttaaaggactgtaatgaaagatcattgcatatttattgaattgtttatatctactgtcaagttgttttgacatggaagattttcaagtaacattggcagagaggtacagtatgttatccctatggtgaaaataaattaatttgttgtatatagttcctcaatctctgaagtaaaggtatgagtaatatagggtatgaatggtttaatcaaggctttattttggaagtaagaaaaatggcagtgatgattaaattgctgcagtccataatttgggcttgttatttgtacattaaagattttttccaagtaagttacactctgttaacttcctgctagccatcagcatgagccctactgcctaaacactatttcatttatttatgtttggaaaccccgtaaacatttttgtttgcaatcttgtttcttttgttataagtcaagtttgaatgttacaatacttttattgaaacttttgttaagttttttcttgtaaattttctttacttgtgagtatcatcttgtcctttaatcctgtaccctaaaataagaaatacatttttgacagaggcttaatgttttaacaaaagagtgtggacatttttattttaaaatttaggcaaaagtcactatcaaatggttgcttatttgtctcacacagccatatagtttttcctggagggttttgttttgttgttgttgaaaagactttgcttacagctagatgaaactttctatagaaaaaaaaaattgttgaaaggtccagttctcagtaccatgtgagttaatgatactacaactaagttctttttaaaaagtgattaatgtattttataaattaccttttcacatatgcaaaatctgtttctactacaatgttatttttactaatgccttattgttgcactctttttgaaatatcctgcagtgaatatatgaatcaatttgggcttaaaactgaaagccagttggctgaaaggtttgaaatacgtaccccagtaaaaccattcaatcaataattggtaaataatattttaaaattgtttttaatctgtatagatgacattttgtagctttgtacatgttgttaattaagggcatataattttacactcaaagtataattgctgaactcaggggtgggtagacttcaaaaatatgtctgctatagaaataacttgaaaaaaaaaattaaaaccgtggccagccaccaaattgtggacactgtttatatactgctagttaacaattaccacttttaaaaaattataaccgtttttgttctatcttgactagataaattctcacaatgatctctgtcagttttattagttggcctgtttaaccaagacagaaagtctttgaattactcatagttttaaactgcttttaatatgaaaattgcagctgtaaattatgtattttcatattttgcgtaactgctctacactactgtttgacttgatcttcttctgggggttagggagaaatctgtctccatattgctggttctcttaccaaaatgcttttataaagaaatgaccggtgacatttattcaccaaaggaattaatatactgagtcaaagattaacaatgctatactatagagtaataggtcatatatagcctcaattgagttttttatgacaatattttaacatacctctctctctacatataaataccataaagtaaactaaaatgacacagaggaaagtagaggaaaatgaaataatttcggtacatcttatggtttaaagagtagaaaataagatgaaatatcctaaaatataggagcacagacatttaaaattcataatcaggctaacaacactctcttgaatttaggaatcattgaaaactccttgcacttagatttaatttatatgttagttacattattaaaagtcataaggcatttatctgagtcattgctctacagagagcaattaatggcttgtaataataaaaagaatatttctctgtaatgcattgttgaaagacaaccagaatatcaagaaaatgtatataggaatatgctacttgcctcctccctgcatttcctcgtggggcactatttgcgacataggcctacagaattagactttcatacttagaagataaggtacactcttcttcttttatttatttatttatttatttttaggccattcttctggtttgccaaattctattaagacagtgatacatttgcttccttatttatgcatgcttagatcatgaacatgatgcccttcttttttttttttttctttggtcaagtagggattaatgccataggtttagagagaaggattgttttcagtttttaagagaattttttaaaaatacattttatggttctcttaaggaattaatattcacttctgaaggacttacttgtaatatataatttatcattttagccagcagggaaataaatcatttttaatccccagaagaaagtgctggaaatagcttctatatagtcagcagttcacctggagaaagatcttaattccttgttgttttgactaggaatatcaatatttggtataaaataactagaatagtttattaccttttccctcatgaaattttaaatatatgcaaatatatatatcattagattcctgtggtggataataatttcttcagattctaaaacaggtgtctagtgactgcttaattgtttccaagttgcatcaaagatgaattggtaaataatggaaatgagtagtgatatgaaaatggttatgtaactacatattacttgtttctggtaatcaagtcttattttttaaaagcctattgtttttcagaattgagatatttaaaacttgttataacttcttcctaaaaatagaagagaagaggaggtactgtgtgttacaaaaatttttttaaataaagaattcagtgtcactagttctaagcctttatggttactgctgcttatatttcttgatctcactttcattaatttttttgtacatatcttagctgaatgcttaaaatttacaattatttgtaattgtgtatgtaaattgcttttcaaaaagaactgaagcttaaccatattcttcttttctgaggattcattatcagaatcagctactatactgttctgtgttatagtaatgccgttactgcctgtgcatgattgaggtctgtgaagaaggtgtcttttaatctgcaccaactggccccaatcctctttgtagtcctttttaaattgttttaaatctgtcctttatttttcttcctatttttctgcctcttcccactgatgtccaatgtgtcagtcttccgcagtttccttttctcacttctaatttattctctcttttttttttctgaggttagggattctacagaaggacgattattaaaattatgccatgaatttttgaaaaatttaaaatgctctcctacaaataaaatacatggagtttctgatactaatttcagtttgtcagtagatggctaaatttgttgaataattgactacttggtaaatgagctgttagctgtaattagttctttagtactaatattaaggaaattttgttattttcggatgaggactctcccaaagccaaattattgtccaagcaaattatttattttttccatttaaatttctaagtcattttgagatgtggaatgattatttttattatttatttatttatttatttttgagacggagtcttgctctgtcacccgggctttagtgcagtgcacgatcttggctcatttcaatctccacctcctgggtctaagcgattctcctgcctcagcctcttgagtagctgggattacaggcatgtgctgccacacctgactaatttttagtagagacaaggtttcaccgtgttggccaggctggtgttgaactcctgacttcaagtgatctgcccacctcagcctcccaaagtgctgcgattacaggcatgacccaccacacccagcctggaatcattttttaaaaataatttgtgggagacttgctttctcaacataaattgtgtgtgggttgttttttgttttttgagacggtcttcctctgttgcccaggctggagtgtgcagtggaacagtcattgcagccttgaccaccttggctcaagcaatcctcctgcctcccgggtagctgagtctacaggtgtgtgccaccatgcctggatggatagaatttttttttttttttttttttttttttttttttttaaagacacgaggtctcaccatgttgcccaggctgatcttgaattcctgggctcaagcattcctcctgcctcagcctcccaaaatgctgggattacaggtgcaagccaccatgcctcgtctgtttgccgatttaagacaggtttatgtacatcattatcattagaggcacatagaatctagacatgtacttgaaacttagctctctatcctgaaagttgaagttagggttctttgatcctggtgagatgttaattgtaattttaattttcatatgttaatattgtgacttgtattttgtgatgagtctctagaatgattaaatgactatttttttatgaaaaattttttgttaataaaatatctgagggtattttgagtatgtggaaggaatgcctgaatagaagctgatctatcttaacatacctcaagaactccagttttaatatggtgagtgaggagttgactgggaaaaggagagatccaattcttgttctagtccttggcacatacactctctgggttttgagaaaaggatggtcctacaacgattctaagttgttttctcattggtcctacaacaattctaagttgttttctcaaaggcaaaagcatgatttcaaaatgacatcacttgtcagattttctggtgtatggaaagatttaataatcctgcctcttttgaagcctgaaacttacaatttaaagcctgaaatctaccataaggaacttggtaaattgtgtcagataccatgaaaatgcatcttttcatagttaaccacagattgtttatgtaaaggcaaattggtggtcaggttcaaggtaaaatggattattgggttgattagtagccaaaaactaaatgcatgttcaggtcaaaatgaatttgtttgttttagttggtgccattttccttttattattcagaactacagagtgtgcattttattaataggaatgaaagctcatgcttgaggatttgaatagggtggatgtatatattttataaactcaagttgcaaaatatgtaaagtcactactttttaaatagaatataaatgttaaaacagacaaatctatgttatatattttttaatacatgtatcagacttgttagttgaatgcagattactttgctttatggaatttcataacttttaataataaagcagttgttattggattttttctgtagacttgaatactaaatgggatagataccagacctctttttggtttatgacgtaaaagtatttgtacagtagtttctcttcacaaaagactgaattttaaaggattatagaaacaggaacatgtccatttccaaaatgagtgcaacagaatgaagatagtcacttaaaccatctatttaacacatcacctttatgtaatatgtagctagttttagtgttttaataagtcccaactaaagactgagtgttttcagtgaagatggaaatggagacccaggcacttgcttagagttatcgtgagtccgatgttcctgaacttcaagttgtacaattaagggcatactctaagaacttctggatgctttctggagtatacaaacagatcaactaatgacttaaatgagtgactcttgaagctgcaagaagaggaaagaaataaccacaagaaggggctatctcagcatctgttattcctgacaggaggaattaaatatgctctgctggtaattctaagcttttctgcaggggatctgcttgccccaggagcaccttagtcctcattgaggcagccattctgccataaaaacgatcatgtctcaagctgttcctgccgtcctacacaactatgttagtagatggttagataaatatatgaaccatcttttgtactttgatgatgcccttttcctttattataatccttaatttctactttccatagtaggatttgacttttctccattagtttaagctaccctggataagtgactctgtttatgtcctccctatatttcttactcattttcacactaacataacacgtaacaaaattaaacataagctaaattgaagaagcaagtgagacagctaagagttttgtgtacttggacaacaaagctcaaagccactgtggttatctgtcctgttgggagcccctttcaaccatttttttagttgcctgtaagatttatttttaatgtttgcctgcataatgcaaaatacataagtgggaatccctacgccctttacagttaagtggattatggaaataataaggaaagtttatcaactaaggtaggaaatatcttctcatgtctgtatctggccttcagggacttaatgtgggtgaatatatgtcattagacaagatcctaatatagatggctgtatcctgcagatagccaattcaacattaaaattttatgtttccatacctcaatgaaaacatatttcttttatcctgttataatttaatgacattcccatccaacttaatcaagcaatgatactcagtagtcctctccttgcatttttcaagtcctgttgagtgtaactttaaaatgtctctgagatttctaccttctctccagtctccttaccattagggcctttcactacctggccttggtgtccctaggctgctcttcagctgtccacaaaccttgtttcataagcagtagcaatgcaagcttccactgccgtctgctaatgttcttccctcctagaatgttcatgatctgcgtttctacctgaaaggtctagttcaaaggtagctgaaaggttatcatccttgtcctttcttctctccctaccagtcatctatcctgaactttttaacagtagggacagtgttgcaattgtgtttgtgtccccagcacgtagcacacagtacctagtatacagtacctgtagcacataggcatttaataagtgtgtattgaattaacttggttatgcttgtatttttatcctagctttctcaaagaaacttaggtgctagctattttgaaacatatatccagaaccaccacctgagtaaaatgtataacaggaccctgctctttctatcccagagagtttgagaaaactacttttaaataaatcattaatcattcttc

SEQ ID NO: 197734 - DNA, 850 bp, Homo sapiens
  Payload ID: 18992
  Gene Name: ubiquitin-conjugating enzyme E2W (putative)
  ENST ID: ENST00000523278
  CDS Start-End: 1-467
agaaacgactacagaaagaactgttggctttgcaaaatgacccacctcctggaatgaccttaaatgagaagagtgttcaaaattcaattacacagtggattgtagacatggaaggtgcaccaggtaccttatatgaaggggaaaaatttcaacttctatttaaatttagtagtcgatatccttttgactctcctcaggtcatgtttactggtgaaaatattcctgttcatcctcatgtttatagcaatggtcatatctgtttatccattctaacagaagactggtccccagcgctctcagtccaatcagtttgtcttagcattattagcatgctttccagctgcaaggaaaagagacgaccaccggataattctttttatgtgcgaacatgtaacaagaatccaaagaaaacaaaatggtggtatcatgaactgaaatctgccttcatactatctattacggattgaatcatgtcctccaataagatgtgttgaagtcttaactcccagtacctcaaattgtgaccctatttggaaatagagtcattgcagatgtcattagttgaggtgaggttataccgaagtagaatgtggccttaatccaatataactggtgtcctaagaattggagaagagactcagacacatggggagaagaccatgcagtcatggggtgatgtatcaacaagccagcaaatgccagggattgctgggaacatcagaggctggaagaggcagggaaatgttcttccctagagctgtgggagagaacatgattctgctgacaccttgatcatggacttccagcctccagaactgtgagacaataaatgtctggtttcttttaagtc

SEQ ID NO: 197735 - DNA, 575 bp, Homo sapiens
  Payload ID: 18992
  Gene Name: ubiquitin-conjugating enzyme E2W (putative)
  ENST ID: ENST00000519255
  CDS Start-End: 39-221
gtctctggcctcgccggtcttggggggatggttccatcatggcgtcaatgcagaaacgactacagaaagaactgttggctttgcaaaatgacccacctcctggaatgaccttaaatgagaagagtgttcaaaattcaattacacagtcatgtttactggtgaaaatattcctgttcatcctcatgtttatagcaatggtcatatctgtttatccattctaacagaagactggtccccagcgctctcagtccaatcagtttgtcttagcattattagcatgctttccagctgcaaggaaaagagacgaccaccggataattctttttatgtgcgaacatgtaacaagaatccaaagaaaacaaaatggtggtatcatgaggcaacattttgccgtattgcctaggctggtcttgaactcctgggcccaagcagtccatccacctcagcctccccaaatgctggaattacaggcgtgagccactttgcattgccaagaaaattatgatacttgttgatgccactgttatcatcctcctagcagaagatagtcctactgagaaaatgagcactttgat

SEQ ID NO: 197736 - DNA, 747 bp, Homo sapiens
  Payload ID: 18992
  Gene Name: ubiquitin-conjugating enzyme E2W (putative)
  ENST ID: ENST00000519277
  CDS Start-End: 33-215
ggcctcgccggtcttggggggatggttccatcatggcgtcaatgcagaaacgactacagaaagaactgttggctttgcaaaatgacccacctcctggaatgaccttaaatgagaagagtgttcaaaattcaattacacagtcatgtttactggtgaaaatattcctgttcatcctcatgtttatagcaatggtcatatctgtttatccattctaacagaagactggtccccagcgctctcagtccaatcagtttgtcttagcattattagcatgctttccagctgcaaggaaaagagacgaccaccggataattctttttatgtgcgaacatgtaacaagaatccaaagaaaacaaaatggtggtatcatgccatcatggattcgtagtcccgcaagtccctgttgatctagctgttacagatcatttgtttcttcaaaacgagggtattcaaagatgatacttgttgatgccactgttatcatcctcctagcagaagatagtcctactgagaaaatgagcactttgatcattcagtctttgaactttaacctttgactggaagtgacctataggcaatgaagactacttccttttactgcatttttactcgtgtgcattctgggcgcatgttgatcgctggttcagtccaggcaactgacatgcttttattagtcatacagtattaatgcaggtgtcaggaaatgtcaaatataattccattttttatttttatttttttaagctt

SEQ ID NO: 197737 - DNA, 2201 bp, Homo sapiens
  Payload ID: 18992
  Gene Name: ubiquitin-conjugating enzyme E2W (putative)
  Uniprot ID: Q96B02
  ENST ID: ENST00000602593
  CDS Start-End: 4-459
atcatggcgtcaatgcagaaacgactacagaaagaactgttggctttgcaaaatgacccacctcctggaatgaccttaaatgagaagagtgttcaaaattcaattacacagtggattgtagacatggaaggtgcaccaggtaccttatatgaaggggaaaaatttcaacttctatttaaatttagtagtcgatatccttttgactctcctcaggtcatgtttactggtgaaaatattcctgttcatcctcatgtttatagcaatggtcatatctgtttatccattctaacagaagactggtccccagcgctctcagtccaatcagtttgtcttagcattattagcatgctttccagctgcaaggaaaagagacgaccaccggataattctttttatgtgcgaacatgtaacaagaatccaaagaaaacaaaatggtggtatcatgatgatacttgttgatgccactgttatcatcctcctagcagaagatagtcctactgagaaaatgagcactttgatcattcagtctttgaactttaacctttgactggaagtgacctataggcaatgaagactacttccttttactgcatttttactcgtgtgcattctgggcgcatgttgatcgctggttcagtccaggcaactgacatgcttttattagtcatacagtattaatgcaggtgtcaggaaatgtcaaatataattccattttttatttttatttttttaagcttttggaaaagctccaggtcctcatgtattgtgcaataacaatgacttccttggcggttttggtacgttcattgccggcaatgggcgttgtaacaggaaaagttttcattaactcctgccattcaatgattaatgcatgatagggcctatgaaatgaacttactggttatagtgggaatataaataaagtgagggatccaacattactttaaaagtcaccccaactgtttatatttggattctatgcactgtgatcctaaggttaacagcatgaattaacatgcgtctttaaaggactgtaatgaaagatcattgcatatttattgaattgtttatatctactgtcaagttgttttgacatggaagattttcaagtaacattggcagagaggtacagtatgttatccctatggtgaaaataaattaatttgttgtatatagttcctcaatctctgaagtaaaggtatgagtaatatagggtatgaatggtttaatcaaggctttattttggaagtaagaaaaatggcagtgatgattaaattgctgcagtccataatttgggcttgttatttgtacattaaagattttttccaagtaagttacactctgttaacttcctgctagccatcagcatgagccctactgcctaaacactatttcatttatttatgtttggaaaccccgtaaacatttttgtttgcaatcttgtttcttttgttataagtcaagtttgaatgttacaatacttttattgaaacttttgttaagttttttcttgtaaattttctttacttgtgagtatcatcttgtcctttaatcctgtaccctaaaataagaaatacatttttgacagaggcttaatgttttaacaaaagagtgtggacatttttattttaaaatttaggcaaaagtcactatcaaatggttgcttatttgtctcacacagccatatagtttttcctggagggttttgttttgttgttgttgaaaagactttgcttacagctagatgaaactttctatagaaaaaaaaaattgttgaaaggtccagttctcagtaccatgtgagttaatgatactacaactaagttctttttaaaaagtgattaatgtattttataaattaccttttcacatatgcaaaatctgtttctactacaatgttatttttactaatgccttattgttgcactctttttgaaatatcctgcagtgaatatatgaatcaatttgggcttaaaactgaaagccagttggctgaaaggtttgaaatacgtaccccagtaaaaccattcaatcaataattggtaaataatattttaaaattgtttttaatctgtatagatgacattttgtagctttgtacatgttgttaattaagggcatataattttacactcaaagtataattgctgaactcaggggtgggtagacttcaaaaatatgtctgctatagaaataacttg

SEQ ID NO: 197738 - DNA, 3122 bp, Homo sapiens
  Payload ID: 18993
  Gene Name: ubiquitin-conjugating enzyme E2Z
  Uniprot ID: Q9H832
  ENST ID: ENST00000360943
  CDS Start-End: 136-1200
agcaccgtctgggctgtggaagcggagggggtggggacactctggcccggttctcggtggtgcgggagcgggcgggagcagcggccgctctggtcggcggacgtgctgccgagtagtcccggaagcgaagcagcgatggcggagagtccgactgaggaggcggcaacggcgggcgccggggcggcgggccccggggcgagcagcgttgctggtgttgttggcgttagcggcagcggcggcgggttcgggccgcctttcctgccggatgtgtgggcggcggcggcggcagcgggcggggccgggggcccggggagcggcctggctccgctgcccgggctcccgccctcagccgctgcccacggggccgcgctgcttagccactgggaccccacgctcagctccgactgggacggcgagcgcaccgcgccgcagtgtctactccggatcaagcgggatatcatgtccatttataaggagcctcctccaggaatgttcgttgtacctgatactgttgacatgactaagattcatgcattgatcacaggcccatttgacactccttatgaagggggtttcttcctgttcgtgtttcggtgtccgcccgactatcccatccacccacctcgggtcaaactgatgacaacgggcaataacacagtgaggtttaaccccaacttctaccgcaatgggaaagtctgcttgagtattctaggtacatggactggacctgcctggagcccagcccagagcatctcctcagtgctcatctctatccagtccctgatgactgagaacccctatcacaatgagcccggctttgaacaggagagacatccaggagacagcaaaaactataatgaatgtatccggcacgagaccatcagagttgcagtctgtgacatgatggaaggaaagtgtccctgtcctgaacccctacgaggggtgatggagaagtcctttctggagtattacgacttctacgaggtggcctgcaaagatcgcctgcaccttcaaggccaaactatgcaggacccttttggagagaagcggggccactttgactaccagtccctcttgatgcgcctgggactgatacgtcagaaagtgctggagaggctccataatgagaatgcagaaatggactctgatagcagttcatctgggacagagacagaccttcatgggagcctgagggtttagaccctgctcccatctccccttcccccactcaagagtcccagcagaatcccttccccccaccccagggatggagaggcactgtgtatctccctccagactcgaagtcatcctgcaagatggcaagaaccaagcaagctccgatcccagggtgtgggagtgggggcctgttcccggtctgacctccttggcactggagcatctggggcttcgttcatccattcatcccgtatcaggggccaaggtacctttacaggagcacctagagcgagggcctttggcaaaaacaaaacaaccaacacacctctccacagggccagctccttagggataagtggaagatggaaattgcaattccaagagggagtgtgcccaaatgatttatggggatacctggaagggagcttggggtgggggctgtctgtgacacttaagcagtctgggtggttgtctatttgtctgtcttcagtcttgaagcagggcttcccaatgcccttttcctccctgccttccttcccccattatttcccacaggccagcataattttgtttttcctaatttatagtcactgttctagacagaccaaagagaaggaacagtggtggagtctaggctgctgatcagtaagctttacctagcacctgagcacctttctcccctcccctctttcctcacccttttctagatgtaagacagaaagtaaatgtgactgggacttaaccaaggtcttggtaaagcctgcatggcaccgtaagaagctgaaaatactgtttgttcccgcaatcactgatttgaaaagttcccaacacaggcagctgctgtgtatatgggattagagccactacatagaatagtctcttacagattttcataaatactagtcacaataagggtatttttcttgggggtggagtaagggggagactgatgctagtccttgttgtattttgttgggctgtccttgtgtattttcaccccagcctgtagtcctcctcacttcaaccccagggatttttggggagcaagggtagccaatggcagagggggttggggctgggactctggaggctcctccccttctttctcttccttccgcctcccccgtgcccccagctgctcttgtcactgtctctgatgggtatttgcctggctttgttgcttctctatctgtatttagctgcagtgatcctttagctggttggctcagaaaaaaaaaaatgtgctttaggtgccctgtaatcctgggcatcaagggaatccatccttcccctttttgatatgttctccccgtacttccagatttattgttatggctcccagtgggtattggcgattcttgtgatgcagggcctcagtcagtgtccagccatgcataagggagaggatagtgtgtacctgccctgccctctgctatgaaggtctctgccttgtggatcatgggactccccttggaggatctgtgcaaaggggggctgggcacaaaggagaatgtcctatttgggagggcaggaagcaaaggaactggacagggattggtgggcttggggaacggaagtttatcttggatacccttgaagaggctgggtctcttcacatgaagatcgaaaagggaccctgcttccaatttccctcttccattcctcgagctactccagggcttagaagaatgctcttggtctgtgggtccagtgttgtctgtcatccatttaagtgttcccactttcaagtgacaatcctctccttggccctgccatagggcagagcatgtctggcatagcagcctgacttttatgccctaatcttgagttgaggaaatatatgcacaggagtcaaagagatgtctttatatctgactgtatataaatgaagtttttttgttttttttgttttcctttttggtgcaataaagtttgttttggcagaa

SEQ ID NO: 197739 - DNA, 573 bp, Homo sapiens
  Payload ID: 18993
  Gene Name: ubiquitin-conjugating enzyme E2Z
  ENST ID: ENST00000508468
  CDS Start-End: 32-573
gctgccgagtagtcccggaagcgaagcagcgatggcggagagtccgactgaggaggcggcaacggcgggcgccggggcggcgggccccggggcgagcagcgttgctggtgttgttggcgttagcggcagcggcggcgggttcgggccgcctttcctgccggatgtgtgggcggcggcggcggcagcgggcggggccgggggcccggggagcggcctggctccgctgcccgggctcccgccctcagccgctgcccacggggccgcgctgcttagccactgggaccccacgctcagctccgactgggacggcgagcgcaccgcgccgcagtgtctactccggatcaagcgtacatggactggacctgcctggagcccagcccagagcatctcctcagtgctcatctctatccagtccctgatgactgagaacccctatcacaatgagcccggctttgaacaggagagacatccaggagacagcaaaaactataatgaatgtatccggcacgagaccatcagagttgcagtctgtgacatgatggaaggaaagtgtccctgtcctgaacccctacg

SEQ ID NO: 197740 - DNA, 766 bp, Homo sapiens
  Payload ID: 18993
  Gene Name: ubiquitin-conjugating enzyme E2Z
  ENST ID: ENST00000506498
  CDS Start-End: 1-388
agccgctgcccacggggccgcgctgcttagccactgggaccccacgctcagctccgactgggacggcgagcgcaccgcgccgcagtgtctactccggatcaagcgggatatcatgtccatttataaggagcctcctccaggaatgttcgttgtacctgatactgttgacatgactaagattcatgcattgatcacaggcccatttgacactccttatgaagggggtttcttcctgttcgtgtttcggtgtccgcccgactatcccatccacccacctcgggtcaaactgatgacaacgggcaataacacatacatggactggacctgcctggagcccagcccagagcatctcctcagtgctcatctctatccagtccctgatgactgagaacccctatcacaatgagcccggctttgaacaggagagacatccaggagacagcaaaaactataatgaatgtatccggcacgagaccatcagagttgcagtctgtgacatgatggaaggaaagtgtccctgtcctgaacccctacgaggggtgatggagaagtcctttctggagtattacgacttctacgaggtggcctgcaaagatcgcctgcaccttcaaggccaaactatgcaggacccttttggagagaagcggggccactttgactaccagtccctcttgatgcgcctgggactgatacgtcagaaagtgctggagaggctccataatgagaatgcagaaatggactctgatagcagttcatctgggacaga

SEQ ID NO: 197741 - DNA, 322 bp, Homo sapiens
  Payload ID: 18993
  Gene Name: ubiquitin-conjugating enzyme E2Z
  ENST ID: ENST00000514948
  CDS Start-End: 1-213
cggcacgagaccatcagagttgcagtctgtgacatgatggaaggaaagtgtccctgtcctgaacccctacgaggggtgatggagaagtcctttctggagtattacgacttctacgaggtggcctgcaaagatcgcctgcaccttcaaggccaaactatgcaggtaatacaacccctgctgctaattgcagaagccctacagctggccatgtaaaagccccccacaagcgtggcatcgacagctgtcatagaatgacacagctaagcctgggttcagtggctcatgcctgtaatcccagcactttgggaggccaaggcgggcg

SEQ ID NO: 197742 - DNA, 598 bp, Homo sapiens
  Payload ID: 18993
  Gene Name: ubiquitin-conjugating enzyme E2Z
  ENST ID: ENST00000504684
  CDS Start-End: 126-269
aagcaccactttctcaaaccctggcctcattgaggtgataacaactgtcctgctcaagggattccccctttccccctcttcctcactccttcccccacctcctcttggtgttatacagggatatcatgtccatttataaggagcctcctccaggaatgttcgttgtacctgatactgttgacatgactaagtacatggactggacctgcctggagcccagcccagagcatctcctcagtgctcatctctatccagtccctgatgactgagaacccctatcacaatgagcccggctttgaacaggagagacatccaggagacagcaaaaactataatgaatgtatccggcacgagaccatcagagttgcagtctgtgacatgatggaaggaaagtgtccctgtcctgaacccctacgaggggtgatggagaagtcctttctggagtattacgacttctacgaggtggcctgcaaagatcgcctgcaccttcaaggccaaactatgcaggacccttttggagagaagcggggccactttgactaccagtccctcttgatgcgcctgggactgatacgtcagaaagtgctggagaggctcc

SEQ ID NO: 197743 - DNA, 769 bp, Homo sapiens
  Payload ID: 18993
  Gene Name: ubiquitin-conjugating enzyme E2Z
  ENST ID: ENST00000511373
  CDS Start-End: 468-769
aataaaggtccactgtatagtttatagaattagttttttagtggagttgatgatgcctttccagttactaaaaaatcttcatttagcattcagtcgtagtacctgggaatcatggaggtggggagtgaatgaattgccatgtgggaggaagtgagagtaagtggaaagtggcttttccaggctgacatttgatgccattgggatctctgatttttttcctctctccctcccctccccctgaggaaacaatgcccttttgataataatttgctctctgcctgcctgacaagtactcagctgagatttctcagccaacaagacagtacaaacacttgcggtaccaagcaccactttctcaaaccctggcctcattgaggtgataacaactgtcctgctcaagggattccccctttccccctcttcctcactccttcccccacctcctcttggtgttatacagggatatcatgtccatttataaggagcctcctccaggaatgttcgttgtacctgatactgttgacatgactaagattcatgcattgatcacaggcccatttgacactccttatgaagggggtttcttcctgttcgtgtttcggtgtccgcccgactatcccatccacccacctcgggtcaaactgatgacaacgggcaataacacagtgaggtttaaccccaacttctaccgcaatgggaaagtctgcttgagtattctaggtacatggactggacctgcctggagcccagcccagagcatctcctcagt

SEQ ID NO: 197744 - DNA, 3138 bp, Homo sapiens
  Payload ID: 18994
  Gene Name: ubiquitin-fold modifier 1
  Uniprot ID: P61960
  ENST ID: ENST00000239878
  CDS Start-End: 40-297
cggagttgtcgtgtgttctggattcattccggcaccaccatgtcgaaggtttcctttaagatcacgctgacgtcggacccacggctgccgtacaaagtactcagtgttcctgaaagtacacctttcacagcagtcttaaagtttgcagcagaagaatttaaagttcctgctgcaacaagtgcaattattaccaatgatggaataggaataaatcctgcacagactgctggaaatgtttttctaaaacatggttcagaactgcggattattcctagagatcgtgttggaagttgttaatatctgctacttggaacatacgattgcctttcagaataaatattggtattttttgttgttgtaaaattgaaatcaggcatttaacatactatgaaaacaccaggagtcaatgattaatgaaaggtgactcatctgtccctttttgttgtccatactcttcctatgaagagggaatgcgtatgaattaaggctactactgtcacagaagatcatagtctttgatgctacctcacaacacaaacaggtagttcgttgggggcaaatgaattagccaactgttaactggaagcttttgataatttttttttttagaacaatttggaacattaaaatttactgaatcgtatatattcatctgagataaaaatataaaaagaattatggaccctggatggcaatttgcttgatagcatctgatttgcagactcataatttgatttttaattaaatatataggttgtgatgaagtgaatagacatatcagtgaacagttaactatattaaatttttatcatttactttttttaagattcagacctcagttatataaatttcagtttaatatcaaccaaaaaattaaaattttaatctaacccttatgtgtataaattggtgtcccataccagcttttaatggtggacctatagaatccagtacttttaatggtgggaatttacagtagaagcatcctttgctgagttatacattcctttatcaatctcttttgatacaacatttaaaacaagtagcttcaagaaaccactggtgttttgaggatagtatttctaaatagcattcaggaacagagtattattgcacagatctgaagatcaaaaaaaagctcaaggaaatacagatcggaagtgctgatgagttatatttattgaaaacccaacttttaaggaagtgctaagatcagtcacccatgtgaataagaagccaggaaaggaaagatggggaagcccagatcaccaggcttctattaaggaggaaagcaacagaggaaacagtgaaggggaacagaagggggtagcaaagtgttacagaaaagcggactggatagacaaaactgcagaaggtgtatgttggggagaactgaaagggaaaacaaaatacttgacatagtcttaagtagaagaaggcagttagagaaaacaaagtatctactggccttgtcaacatacagacttcaaaataccccttatgagaatccaaagaatgatgtgtgtaagggaagattttatttgcccttccggaagaaatcagtatctatgcaaatcttgaaagacgaaatcaaagcccattaatgattcagaatcagtgcttgacctcctgtattctgaatggtgaactctggaagcagggattgtgtctggctctttttagagctggaaatgtagtggctttcattaaatacttgctgtaaagtctttctaagaccaattattatcttagcatgtttcagtatcttctctatcataggccctaagttcattgggggaaaaaaaataagaagattcaacagaatcagcatttgaagtgtaccattggtagttgtttatgaaattaccagatattcataaatgtgacaaatgaacagcaggattatgaattatcaaaggaaaaagtatttgctgaggtgaaaaaatctgatgtttgaggaagtttttatttttatttatttgttttgtttttttttttttgaggcagactctctgtcgccaggcttctcctgcctcagcctcacgagtagctgggactacaggcatgcaccaccacgcccagctaatttttgtatttttagcagagacagggaggaagtttttatttttataaacaaaatctgatgttcagaggccccgtttcttacaataaatgttgagtcttagttaagcaggaatttatgaacacccatttcctgactttttgctttaatttagatttttctccatcctgtttctagcacaaaaatttgcctgctgtgttacaaaaataaatttatgttgtcctgtgccataaagtgatatatttaatatttttattctttggttttgaacattgtaagttcctaaaaacattttattaaacaagtagacattttgttattaaaaaaatgtgatctgtaatttctttgtgcagaatgatttgaagtattgtattcagtttacatgcgttattggtttataattaatatctaatgaaaatacatgttgttatattgtaaaccatattgtctgttcttattattagagctcttaatcagcacaccttttgagtcagtatataatacatgtagtaaagaaaaaaagggcaaagatgattaatgaccataagtcagagaaattagtttatagtcatctgccacagacatagtagtgatgtttcgtccaacaacagaccgcatatatgaccgtggtcccatattactatatttttactgtgctttatctatgtttggatacacaagtacttaccatcattttacagttgtttacagtattaggtacagtaacatgctctacaggtttgtagcctaggagcaataggccataccaaatagcctaagtttgtagtaggtgacatcaactaggtttgtacaagtacattctgatgttcacatagtgacaaaattgcctaaggaagcatttctcagaatttgttcctgtgattcagtgatacataacagtacttgcaaatgcctgtccattttacagacggaaaaaaaaaaaaaaaaagttgagaagaaaatggggttattgtaactggctaggttggtaggttccaaacctgggtgataacagagtcgcctaggaaattaaaaatacagatttttggaaacca

SEQ ID NO: 197745 - DNA, 846 bp, Homo sapiens
  Payload ID: 18994
  Gene Name: ubiquitin-fold modifier 1
  Uniprot ID: P61960
  ENST ID: ENST00000379649
  CDS Start-End: 188-499
agcacactagaggaagtcgtgctacccccgcggagttgtcgtgtgttctggattcattccggcaccaccatgtcgaaggtttcctttaagatcacgctgacgtcggacccacggctgccgtacaaagtgtgagtagctcggccgagatgggccttttggggccggacaagacggggctgggttggggatgatccgagcttttccaacaactaccccacgcagtcttcatctcttcacttcatctactttcctggctcgcgcccttccaggagcctttcccaccggagcctgcgaggagagactcagtgttcctgaaagtacacctttcacagcagtcttaaagtttgcagcagaagaatttaaagttcctgctgcaacaagtgcaattattaccaatgatggaataggaataaatcctgcacagactgctggaaatgtttttctaaaacatggttcagaactgcggattattcctagagatcgtgttggaagttgttaatatctgctacttggaacatacgattgcctttcagaataaatattggtattttttgttgttgtaaaattgaaatcaggcatttaacatactatgaaaacaccaggagtcaatgattaatgaaaggtgactcatctgtccctttttgttgtccatactcttcctatgaagagggaatgcgtatgaattaaggctactactgtcacagaagatcatagtctttgatgctacctcacaacacaaacaggtagttcgttgggggcaaatgaattagccaactgttaactggaagcttttgataatttttttttttagaacaatttggaacattaaaatttactgaatcgtat

SEQ ID NO: 197746 - DNA, 639 bp, Homo sapiens
  Payload ID: 18994
  Gene Name: ubiquitin-fold modifier 1
  ENST ID: ENST00000437952
  CDS Start-End: 1-244
caggtcgaaggtttcctttaagatcacgctgacgtcggacccacggctgccgtacaaagtactcagtgttcctgaaagtacacctttcacagcagtcttaaagtttgcagcagaagaatttaaagttcctgctgcaacaagtgcaattattaccaatgatggaataggaataaatcctgcacagactgctggtgagtatttgaaaactcatagaggagtgggtggggttatatatgtcaattgacactgaatagttaagctattctaattacacttgacagtattttaacataatggagctgttttttagggattatataccagtctttacctgtgtgtctgagtaataagttgtttcattgtgtatattgattgtagatgtttttggctacaagtaacagaaaacctaatagtggcttaagcattaagagtatttattatatataacaaaaagtctgtagataagattgctttctaattggagtattttttgacctacctcttaaggtagttgtgagatagtgactgtaaagtgcttcatagcttggattatttatagaaagcattcattaagtgctattattttttttaaatatagtcatttacatttcaaggggctgagtctacattcagatcttc

SEQ ID NO: 197747 - DNA, 1114 bp, Homo sapiens
  Payload ID: 18995
  Gene Name: ubiquitin-fold modifier conjugating enzyme 1
  Uniprot ID: Q9Y3C8
  ENST ID: ENST00000368003
  CDS Start-End: 247-750
accctttgtgccttatgcggtgattttaatgataggtgtcatatataggacggagtaatctgtttacattctgttcttctcgatgcactcacaagcgggtaactaggtgacaagaaaacaaagatcttattcaaaagaggtcttacagcaacccaacgtctcatcttcccatagtaaagatgacggcgccttgaggtaagctacaggcaacaccacttccgcgtttctcttgcgccctggtccaagatggcggatgaagccacgcgacgtgttgtgtctgagatcccggtgctgaagactaacgccggaccccgagatcgtgagttgtgggtgcagcgactgaaggaggaatatcagtcccttatccggtatgtggagaacaacaagaatgctgacaacgattggttccgactggagtccaacaaggaaggaactcggtggtttggaaaatgctggtatatccatgacctcctgaaatatgagtttgacatcgagtttgacattcctatcacatatcctactactgccccagaaattgcagttcctgagctggatggaaagacagcaaagatgtacaggggtggcaaaatatgcctgacggatcatttcaaacctttgtgggccaggaatgtgcccaaatttggactagctcatctcatggctctggggctgggtccatggctggcagtggaaatccctgatctgattcagaagggcgtcatccaacacaaagagaaatgcaaccaatgaagaatcaagccactgaggcagggcagagggacctttgataggctacgatactattttcctgtgcatcacacttaactcatctaactgcttccccggacaccctccacctctagttgttactaagtagctgcagtaggcattgctggggaagaaacaaacacacaccaaacagtactgctacttagtttctaaggctgcacagggaagggaaagactgggctttggacaatctagaggtaatttatatccgcccccaggtggagcaacatgcgattctggaggcacgggggtaactgaaagtgagtacatatagtctttctggtttctggagataacccatcaataaaagctgcttcctctggta

SEQ ID NO: 197748 - DNA, 4384 bp, Homo sapiens
  Payload ID: 18996
  Gene Name: ubiquitin-like 3
  Uniprot ID: O95164
  ENST ID: ENST00000380680
  CDS Start-End: 1147-1500
ggagggaggacgaggacgggggcggcggctgctgcgagggggggcccgtgctctccccgtttcccttagtcgcactcaggcagccgccgccgccgccgctgccgccatgttggtttgagaggcgatgacaggaggcggccgcggcgtgtgggactgaaaagtgaaggaggaggaggagaaacaaagctctgagaggaaaccattcccgggctgaggagaaggaggacccggcctcttccggggaccagccgaagtcggcgtcgcccggagctcgcgaggccggggaggggaggggaagggaaggcggagaccggggaggcggcggcggggaaggcggaggcagaagaggagtggcgaggagccggagacgatgcgccccgaccccagctgctgtccggaggcgcccgcggcctgagcccagaggggctgtggagtgtcccggccggccccgagcacccccgcgctgtcggtcccccgctccggtctttcgctttggcttccaactagttaaatgcccttgagcgcgggtttccgcggcccggctcttcgcccccgcggcgcgagttgagccgtttccccgcgctgtccgcgcgggcgctccgacagcggctctgcagggtccgcggccagcgtccggccaccgctcggccgccactcaaggctcacgcgtcgatgtgtagctacatagttatctgtgtacatccacgctggggcatttttctcctgcttaatgaggacttgactcgggagcaagtgtgaatcattgccggggctgggaaaggaggaaggcgcatttaaccccctcccacccctctccatgtccgtgtgtcactcggctcggtccacctggcgcggccggtcctggggctgctgctgctgttgacgacgacgacgacgacgggggctgcctctgctgtcccgggagtttcctcctgctccggccacacagctcctggggattgttcctcttcgaaccagaacctcggcctgaccggcactttggctccaaaataactttatttttgggggagaaagcacatcacgaaccagtcaaaatcgtggtttatttctgtaacgtgaagacttctgctcttttttctttgtttgtttttttcgtaaacatctgggtgtatatcaaacggcaagatgtccagtaatgtcccggcggatatgataaatttgcgcctcattttggtaagcggaaaaacaaaagagttcctgttttctcctaacgattctgcttctgacattgcaaagcatgtatatgacaattggccaatggactgggaagaagagcaggtcagcagtccaaatattctacgacttatttatcaaggacgatttctacatggaaatgtcacattaggagcattaaaacttccttttggcaaaacaacagtgatgcatttggtggccagagagacattaccagagccaaactctcaaggtcagaggaatcgtgagaagactggagagagtaattgttgtgtaatcctgtaaacactgtctgcctagtgtgatgtgatatagtctttgtctttcatgctgctgggacagaaaagacccgacattgcttcagaaaccgttcagaacagtctgcctgtaaacacatggaactgaattaccacatgaacactgtcatcttttctcatgaaagtaaaaagaaccaagaacatttttcactctgattttttatttcttgtattttttgttgagctgttttaacacatattggtttttgaatgcagtcaatctccaggggaaaagttaacaagttatctttcgtagcagaaaccattttgctgccacaaaattttcatcatcagaactaataaatcaagtgttccaaatacaatttgcattaaaaagattggcattattttcctcatcagcagaatttataacagtgtgtggtatctagaaatacttatatatacaattccacactggaagacactcagcaattaatgaagttaattactgggccaacttgagaggaaaaaatggaaaagaaactaaaatgttgggtgaattctaccaaagtcagccgtggtggctgcactggcacagaatactaaactgagtgtgactattttcactgcaacaaatgaaaaaacaaaatgtgcctgtttaaagcactcagtagagggctgatgaaactaattttttttcctttaagacatgcactcttgagtcctacagtaactgagtgtttgtttagacagcacaagaaggggtgagagtgcgtctcctagccttaatgtgggagggtagtttcagtcactcatcggctttcattattgtgcagaaatattagaaaacctcattgatcaattttatgtatttgaatatcagcaaattgaaattttccataattatcattaatttgtaaccacatccagtgtcatgcttactccttagagttcagatgaattcttaaaattaaaaaaaaactccatagtactaattttgtttctttatatagtttgcgtttgatattagtgcttgcaattgtattaaagtcaaaagctgatttttatggcatacacaagaatgccactttttcttttatttcataccaataatttaaagattgatatgctaaaaacaatttgcacagcactaaagcatgagctactttcatctaaacctgtaaaaatatgaaagatttttatattttttcactgggaagaaattcttcctggatgaaattacaaatatgtgtagaatatatttaataaaagacttataaaatacctaactacaggacttaaaatatagattggcgcgtagtatacagaacaatattccatataaataagtttagcctttataaaaatgaagttgcaggctgacattacattctgtactaagtgtcaacagcccttacaaacattaaatgtaaatggtttcaaatggtcagcgttgtttaaatgtaatcatgttattttattcattgttaatgctttgatgaaaaggctttatatgcagtagatctacgaaaatattgttcatactgatcagaattaaatttgtatagagcagagttttaaaatgaatgtaaatagcactaaacgttttctttctgcaacctgtacttacagattcttcctgtaaactaaataaaaaaaaaatgatagtgcattttggtggtaattttaaaggtcttgattaggtcaataattgtttaagcaccgtctcattcatgttttctactttcatttcttaagcttttaaaattcatttaattaatattctgttgttgttttggggagtattcccaatgtatctttgatatttaacctggttaatttgtggacagtcacaacaatggatagaattatgtagtctccgttatcactaaaatgttatcttcaagagatgttaaatatttatatgctttgttgactagctgaaatgtgaattctgttagtgttgactaaagaatctggtagttgcttaattgggcaattaaacaatttatggctctattttgtaaaacaaactactggtaattatttttaatacctattttcattctgattactctttttttaagttaaagactatcagttaattaagattgagtttttatgatggttaaaaataattctctattggtttttcaatatatttttctgtgtgttctcagattatatatttccctcaatttagagtttgctaagtgaaataaactggttcactagtagagaaagaattacgtcgcttaatacctaatatcatagttgtacaatatgaaaaaaaagaataaaaagtagcagtaaaattatatactgaaaacaccaaaaatttagatgccttaatagtatatacgtgaaatactcagctgtccctttaaaaataattccttggactgcctggtggttaaaatacgattcctcatatccaaggctacttttgaagatccctctgccaaaaatatagctcacttatctaaaggtgagagctgcatagatccagtaatgtacataaagcctgaatgatgagcctatgtccctgcctaacgctggtgtctcactcatctcttttacctaaattgtcctgaactttgttaagtgttctggacaaggccaagcttttctttattaaaacctcagcatgtctccctgatctgaactatttgctttctcttcaagataagttgtattttaccatggaaaaatacagtatctaacattaccattcacgttaaatgaagtttcctcataacatttatctttagttttatgaagtcatcgtgaccaatgttacagtaatttctgttagctgattgtggtaaacaatgtttaatgtgaaaagaaattaaaactttcttcatctgttgtagaatatttctcttctttaaaatggcttctattcataa

SEQ ID NO: 197749 - DNA, 711 bp, Homo sapiens
  Payload ID: 18997
  Gene Name: ubiquitin-like 4A
  ENST ID: ENST00000369653
  CDS Start-End: 32-574
gccggcccgagtggacgccgtcgcgaccgccatgcagctgacggtgaaggcgctgcagggccgcgagtgcagcctgcaggtgccagaggacgagctggtgtccacgctgaagcagctggtctccgagaagctgaacgtcccagtgcgccagcagcggctgctgttcaagggcaaggccctggcagatgggaaacgactctcggattatagcatcgggcccaactccaagctcaacctagtggtcaaacccctggagaaggtgctactagaagaaggcgaggcccagaggctggccgactccccacccccgcaggtctggcagctgatctccaaagtcttggcccgccacttcagtgcggcagatgccagcagggtcctggaacagctacagagggattacgagaggtccctgagtcgcctgacgctggacgacatcgaacgttgggctcatcatcatcatagctggcatgtacctggctctggccaggtgctaggcactcctcacagcttgacctgggtttgcttccacaccctcagaagaggagagccggcacagcagaggcaccggcgatgaagtggcacagccccagtcggaatccagcggcttctgaaagtgccttggtgtgagaaggaggaaggggccgcttggagagctgggctctcgcatgtcatgtttagcccactgagaatataccctcaggtgactccctc

SEQ ID NO: 197750 - DNA, 2382 bp, Homo sapiens
  Payload ID: 18997
  Gene Name: ubiquitin-like 4A
  Uniprot ID: P11441
  ENST ID: ENST00000369660
  CDS Start-End: 87-560
ggttccagcgcgcgcccggggcggcggcgcgcggcggggggtggttggggtgcgcgccggcccgagtggacgccgtcgcgaccgccatgcagctgacggtgaaggcgctgcagggccgcgagtgcagcctgcaggtgccagaggacgagctggtgtccacgctgaagcagctggtctccgagaagctgaacgtcccagtgcgccagcagcggctgctgttcaagggcaaggccctggcagatgggaaacgactctcggattatagcatcgggcccaactccaagctcaacctagtggtcaaacccctggagaaggtgctactagaagaaggcgaggcccagaggctggccgactccccacccccgcaggtctggcagctgatctccaaagtcttggcccgccacttcagtgcggcagatgccagcagggtcctggaacagctacagagggattacgagaggtccctgagtcgcctgacgctggacgacatcgaacggttggccagccgcttcctgcaccctgaagtgactgagacaatggagaagggcttctccaaatagaattctcggagcatggggaggtgcccaacgccaggctaccgctgcatgtcgcactaagtgtgttctcctgttgcagttgggctcatcatcatcatagctggcatgtacctggctctggccaggtgctaggcactcctcacagcttgacctgggtttgcttccacaccctcagaagaggagagccggcacagcagaggcaccggcgatgaagtggcacagccccagtcggaatccagcggcttctgaaagtgccttggtgtgagaaggaggaaggggccgcttggagagctgggctctcgcatgtcatgtttagcccactgagaatataccctcaggtgactccctcccgatcctgaaagggaaagcagctgtcacctgacttctggcgggtccaacatagccctcagcttacctctgcaggaggccaagtgacagccagccctggaaccccccgacccccgcagctgctgcagccagtgtgccagtgtgcgttcgacaaatggaaaagcagattggggccagggagtcagcaaggcaccccagctctgtgatgtgactttgggcgagtctcagtgccacttggtccccagccatggactctatacagtgagggccactcaccgacctgagtcagtgtcctctgtctcacagggcccctctcccttctgttcagtaaacaaactgaagccaaaaatgaagccgtggccaagtgtgacccagagatggggtgtcctggcccttagtgacacagctcctctctggggcaccctatctgcttgtctcgtccaggaagcgttagggctgatgggtgactcagcaaggcagtgtcagagctgggactgggcgtaggcctttgtcctcatccccagcactggcctccctgtggaagatgaacatatcccagccacctgtgtacaggggctcactttgtgtgctccttgttgcctgagaagaaaccttggggtgccagggtgggggcagaagcatggactgggttccggttcatcctcctccaccctgccgtgtgtgtgggcacaagaggacatctaaccacctgctccttggaggaggcccccaggggtggtagaggctggaaggaagccacatcaggaggacgccactccggcccttcacccttgccaagtgagctgctcacagtgtggtcagggctgcgcgtgctggaggccctcctgcctgggccttgtggggcaaatattgggtccccaggctggaaagatggacagaggcccaatgggtgaaggctttgaagagcacacagaagcccctggccccccacgagagctggagagccatgtatatggcttcaaagccacctacggcagggacacactcgtgagcatgtgtggcctgcagttcaggtgatacatttaccagtgttcttgtttgtgtggtgccaggaaattgattttggaaaaagtgaaataacattaaaggtgaatgtgaggcttctacttttatccaaaaggagctatattagctaggctgtttctgatatccaatcattggtttaacaataaaggcaatttgtttaatcagttaacggaaatttcttggcttatgaaagtgaaaagtccagtggtattggcattggcagcaggtgagcaatttcacccagtgtcttctgcctccctctgcgttggtatctgctacatcccaggccaccacctccgaggatgaaaagatggctgcctgcagcttccacggaatccctccctcactgccagagcagcatcttctctgtgtaccacctctgctgtctcagatgcccccagcaaataaacactcttctcgttggtcagaa

SEQ ID NO: 197751 - DNA, 1652 bp, Homo sapiens
  Payload ID: 18997
  Gene Name: ubiquitin-like 4A
  ENST ID: ENST00000421431
  CDS Start-End: 29-130
ggcccgagtggacgccgtcgcgaccgccatgcagctgacggtgaaggcgctgcagggccgcgagtgcagcctgcagatgggaaacgactctcggattatagcatcgggcccaactccaagctcaacctagtggtcaaacccctggagaaggtgctactagaagaaggcgaggcccagaggctggccgactccccacccccgcaggtctggcagctgatctccaaagtcttggcccgccacttcagtgcggcagatgccagcagggtcctggaacagctacagagggattacgagaggtccctgagtcgcctgacgctggacgacatcgaacggttggccagccgcttcctgcaccctgaagtgactgagacaatggagaagggcttctccaaatagaattctcggagcatggggaggtgcccaacgccaggctaccgctgcatgtcgcactaagtgtgttctcctgttgcagttgggctcatcatcatcatagctggcatgtacctggctctggccaggtgctaggcactcctcacagcttgacctgggtttgcttccacaccctcagaagaggagagccggcacagcagaggcaccggcgatgaagtggcacagccccagtcggaatccagcggcttctgaaagtgccttggtgtgagaaggaggaaggggccgcttggagagctgggctctcgcatgtcatgtttagcccactgagaatataccctcaggtgactccctcccgatcctgaaagggaaagcagctgtcacctgacttctggcgggtccaacatagccctcagcttacctctgcaggaggccaagtgacagccagccctggaaccccccgacccccgcagctgctgcagccagtgtgccagtgtgcgttcgacaaatggaaaagcagattggggccagggagtcagcaaggcaccccagctctgtgatgtgactttgggcgagtctcagtgccacttggtccccagccatggactctatacagtgagggccactcaccgacctgagtcagtgtcctctgtctcacagggcccctctcccttctgttcagtaaacaaactgaagccaaaaatgaagccgtggccaagtgtgacccagagatggggtgtcctggcccttagtgacacagctcctctctggggcaccctatctgcttgtctcgtccaggaagcgttagggctgatgggtgactcagcaaggcagtgtcagagctgggactgggcgtaggcctttgtcctcatccccagcactggcctccctgtggaagatgaacatatcccagccacctgtgtacaggggctcactttgtgtgctccttgttgcctgagaagaaaccttggggtgccagggtgggggcagaagcatggactgggttccggttcatcctcctccaccctgccgtgtgtgtgggcacaagaggacatctaaccacctgctccttggaggaggcccccaggggtggtagaggctggaaggaagccacatcaggaggacgccactccggcccttcacccttgccaagtgagctgctcacagtgtggtcagggctgcgcgtgctggaggccctcctgcctgggccttgtggggcaaatattgggtccccaggctggaaagatggacagaggcccaatggg

SEQ ID NO: 197752 - DNA, 743 bp, Homo sapiens
  Payload ID: 18997
  Gene Name: ubiquitin-like 4A
  ENST ID: ENST00000417913
  CDS Start-End: 3-314
ccatgcagctgacggtgaaggcgctgcagggccgcgagtgcagcctgcaggtgccagaggacgagctggtgtccacgctgaagcagctggtctccgagaagctgaacgtcccagtgcgccagcagcggctgctgttcaagggcaaggccctggcagccggatgccgcagcgctccgctcccgccgcccgaggcggcctcgcgccccgggccacccccacggcggtggaggaggaggaacccatcgatctgtctttggcagatgggaaacgactctcggattatagcatcgggcccaactccaagctcaacctagtggtcaaacccctggagaaggtgctactagaagaaggcgaggcccagaggctggccgactccccacccccgcaggtctggcagctgatctccaaagtcttggcccgccacttcagtgcggcagatgccagcagggtcctggaacagctacagagggattacgagaggtccctgagtcgcctgacgctggacgacatcgaacggttggccagccgcttcctgcaccctgaagtgactgagacaatggagaagggcttctccaaatagaattctcggagcatggggaggtgcccaacgccaggctaccgctgcatgtcgcactaagtgtgttctcctgttgcagttgggctcatcatcatcatagctggcatgtacctggctctggccaggtgctaggcactcctcacagcttgacctgggtttgcttcca

SEQ ID NO: 197753 - DNA, 102 bp, Homo sapiens
  Payload ID: 18997
  Gene Name: ubiquitin-like 4A
  ENST ID: ENST00000630530
  CDS Start-End: 1-102
atgcagctgacggtgaaggcgctgcagggccgcgagtgcagcctgcagatgggaaacgactctcggattatagcatcgggcccaactccaagctcaacctag

SEQ ID NO: 197754 - DNA, 1478 bp, Homo sapiens
  Payload ID: 18998
  Gene Name: ubiquitin-like 4B
  Uniprot ID: Q8N7F7
  ENST ID: ENST00000334179
  CDS Start-End: 68-592
ccgcaggaccccctaatcttcagggcagctcccagagcatggatccctcctgattccactcagcccgatgttcctcacagtcaagctgctcctgggccagagatgcagtctgaaggtgtcagggcaagagagtgtagccacgctgaagagactggtgtccaggcggctgaaggtgcctgaggagcagcagcacctgcttttccgtggccagctcctggaggatgacaagcacctctctgactactgcattgggcccaatgcctctatcaatgtcatcatgcagcccttggagaagatggcgctaaaggaggcccaccagccgcagacccagcccctgtggcaccagctgggactggtcctagctaaacactttgaaccacaggatgccaaggccgtgctgcagctgctaaggcaggagcacgaggagcgcctgcagaagataagcctggagcacctggagcagctggcccagtacctcctggcagaggagcctcacgtggagccagctggagagagggagcttgaggcgaaggcacggcctcagagctcctgtgacatggaggagaaggaggaggcagcagctgatcagtaaacgggccatcctacccatttgcatgctaaaattctcccggcctcatccttacgtgttccctggtgacttttcctactacttcctgctgatgtggatgcgtccacacccctttttgaaccttccaagcagctggagggtttttggatccctgtcccctcttgggcctgaggtcctccctctgaaatgcagagtgaaccaaccctcatcaccatgcttcccctagaagggttctgatcaccggagggcagccccaaaggccacagtcccctcctgtgctggcagctttgcccacacatacccagcagctccccaggctgaaagcagccctggcccagggtctccatggttctaggcagaccctctttctccttcgggacagaaagacaatgtgagttcattttcctccatcctcagaccgtgacatctcccctaggctccccagcagccaagaggagaggaatgtcaggtagctgccccttgccttctgggtgaggctgcccctgctgttctcctgcttgtgcttccagcttaagggacaggcacagcagaggtgagagtgggaggagggcacgtaccgggtgccagccctggagccctcagggagacagacacagaccaagaatagcaggaaactgagcctcaggcagaaaaaaagttcagcaaagtcatacactccctgtggccagcgtgaacagagccatgccccaccctcccagactgatcagtcagtaggtatcacagctcacattacctgcccagcgctgcccaaggctccctggaaggaaaaatggtatctgtcaatgaggatccttgccctcacagagcacgcagcctagatgcagagagctgctatacatgtgaaaagtaaagtggtgacatgaaacta

SEQ ID NO: 197755 - DNA, 513 bp, Homo sapiens
  Payload ID: 18999
  Gene Name: ubiquitin-like 5
  Uniprot ID: Q9BZL1
  ENST ID: ENST00000358666
  CDS Start-End: 185-406
aacttccgcttccggttcctagcgttaactgcgaccggggttcagcgctcgggtgaggagctggtggcgtcggcaggttcgaggcgattcgaggtgagggggtcaagcggagaggctcggagtcggagaaagctgtcgcgacccagccacccagggtctggggtcggtgggagctccagctaggatgatcgaggttgtttgcaacgaccgtctggggaagaaggtccgcgttaaatgcaacacggatgataccatcggggaccttaagaagctgattgcagcccaaactggtacccgttggaacaagattgtcctgaagaagtggtacacgatttttaaggaccacgtgtctctgggggactatgaaatccacgatgggatgaacctggagctttattatcaatagatgagaatcctcatcttcctgccccgctttcctctcccatcctcatcccccacactgggatagatgcttgtttgtaaaaactcaccttaataaagacttagatgttg

SEQ ID NO: 197756 - DNA, 390 bp, Homo sapiens
  Payload ID: 18999
  Gene Name: ubiquitin-like 5
  Uniprot ID: Q9BZL1
  ENST ID: ENST00000590068
  CDS Start-End: 62-283
cttccgcttccggttcctagcgttaactgcgaccggggttcagcgctcggctccagctaggatgatcgaggttgtttgcaacgaccgtctggggaagaaggtccgcgttaaatgcaacacggatgataccatcggggaccttaagaagctgattgcagcccaaactggtacccgttggaacaagattgtcctgaagaagtggtacacgatttttaaggaccacgtgtctctgggggactatgaaatccacgatgggatgaacctggagctttattatcaatagatgagaatcctcatcttcctgccccgctttcctctcccatcctcatcccccacactgggatagatgcttgtttgtaaaaactcaccttaataaagacttagatgttg

SEQ ID NO: 197757 - DNA, 320 bp, Homo sapiens
  Payload ID: 18999
  Gene Name: ubiquitin-like 5
  ENST ID: ENST00000593087
  CDS Start-End: 82-192
gttaactgcgaccggggttcagcgctcgggtgaggagctggtggcgtcggcaggttcgaggcgattcgagctccagctaggatgatcgaggttgtttgcaacgaccgtctggggaagaaggtccgcgttaaatgtacacgatttttaaggaccacgtgtctctgggggactatgaaatccacgatgggatgaacctggagctttattatcaatagatgagaatcctcatcttcctgccccgctttcctctcccatcctcatcccccacactgggatagatgcttgtttgtaaaaactcaccttaataaagacttagatgt

SEQ ID NO: 197758 - DNA, 432 bp, Homo sapiens
  Payload ID: 18999
  Gene Name: ubiquitin-like 5
  Uniprot ID: Q9BZL1
  ENST ID: ENST00000586895
  CDS Start-End: 105-326
aacttccgcttccggttcctagcgttaactgcgaccggggttcagcgctcgggtgaggagctggtggcgtcggcaggttcgaggcgattcgagctccagctaggatgatcgaggttgtttgcaacgaccgtctggggaagaaggtccgcgttaaatgcaacacggatgataccatcggggaccttaagaagctgattgcagcccaaactggtacccgttggaacaagattgtcctgaagaagtggtacacgatttttaaggaccacgtgtctctgggggactatgaaatccacgatgggatgaacctggagctttattatcaatagatgagaatcctcatcttcctgccccgctttcctctcccatcctcatcccccacactgggatagatgcttgtttgtaaaaactcaccttaataaagacttagatgtt

SEQ ID NO: 197759 - DNA, 1360 bp, Homo sapiens
  Payload ID: 19000
  Gene Name: ubiquitin-like 7
  Uniprot ID: Q96S82
  ENST ID: ENST00000361351
  CDS Start-End: 105-1247
tccggtttccggcgagagggccagagtgagtgtttacaccggcggcagtgcggccgggttccttccgcgggacggggagaaagagagagcgcgaaagagagaggatgtctctctcagactggcacctggcggtgaagctggctgaccagccacttactccaaagtctattcttcggttgccagagacagaactgggagaatactcgctagggggctatagtatttcatttctgaagcagcttattgctggcaaactccaggagtctgttccagaccctgagctgattgatctgatctactgtggtcggaagctaaaagatgaccagacacttgacttctatggcattcaacctgggtccactgtccatgttctgcgaaagtcctggcctgaacctgatcagaaaccggaacctgtggacaaagtggctgccatgagagagttccgggtgttgcacactgccctgcacagcagctcctcttacagggaggcggtctttaagatgctcagcaataaggagtctctggatcagatcattgtggccaccccaggcctcagcagtgaccctattgctcttggggttctccaggacaaggacctcttctctgtcttcgctgatcccaatatgcttgatacgttggtgcctgctcacccagccctcgtcaatgccattgtcctggttctgcactccgtagcaggcagtgccccaatgcctgggactgactcctcttcccggagcatgccctccagctcataccgggatatgccaggtggcttcctgtttgaagggctctcagatgatgaggatgactttcacccaaacaccaggtccacaccctctagcagtactcccagctcccgcccagcctccctggggtacagtggagctgctgggccccggcccatcacccagagtgagctggccaccgccttggccctggccagcactccggagagcagctctcacacaccgactcctggcacccagggtcattcctcagggacctcaccaatgtcctctggtgtccagtcagggacgcccatcaccaatgatctcttcagccaagccctacagcatgcccttcaggcctctgggcagcccagccttcagagccagtggcagccccagctgcagcagctacgtgacatgggcatccaggacgatgagctgagcctgcgggccctgcaggccaccggtggggacatccaagcagccctggagctcatctttgctggaggagccccatgaactccctgcttcccctgaacccccagcaagttgcagaggctactgcccttgggaggcactcatgaaggtgcctccatctctcccttccccaatatacctgatggtcaactctc

SEQ ID NO: 197760 - DNA, 1427 bp, Homo sapiens
  Payload ID: 19000
  Gene Name: ubiquitin-like 7
  Uniprot ID: Q96S82
  ENST ID: ENST00000395081
  CDS Start-End: 172-1314
gtttccggcgagagggccagagtgagtgtttacaccggcggcagtgcggccgggttccttccgcgggacgggtgagggcgctggggccctgggcagcgcgggctcgatgtgtgtcagccaagtagctggtcccactggagcgggagaaagagagagcgcgaaagagagaggatgtctctctcagactggcacctggcggtgaagctggctgaccagccacttactccaaagtctattcttcggttgccagagacagaactgggagaatactcgctagggggctatagtatttcatttctgaagcagcttattgctggcaaactccaggagtctgttccagaccctgagctgattgatctgatctactgtggtcggaagctaaaagatgaccagacacttgacttctatggcattcaacctgggtccactgtccatgttctgcgaaagtcctggcctgaacctgatcagaaaccggaacctgtggacaaagtggctgccatgagagagttccgggtgttgcacactgccctgcacagcagctcctcttacagggaggcggtctttaagatgctcagcaataaggagtctctggatcagatcattgtggccaccccaggcctcagcagtgaccctattgctcttggggttctccaggacaaggacctcttctctgtcttcgctgatcccaatatgcttgatacgttggtgcctgctcacccagccctcgtcaatgccattgtcctggttctgcactccgtagcaggcagtgccccaatgcctgggactgactcctcttcccggagcatgccctccagctcataccgggatatgccaggtggcttcctgtttgaagggctctcagatgatgaggatgactttcacccaaacaccaggtccacaccctctagcagtactcccagctcccgcccagcctccctggggtacagtggagctgctgggccccggcccatcacccagagtgagctggccaccgccttggccctggccagcactccggagagcagctctcacacaccgactcctggcacccagggtcattcctcagggacctcaccaatgtcctctggtgtccagtcagggacgcccatcaccaatgatctcttcagccaagccctacagcatgcccttcaggcctctgggcagcccagccttcagagccagtggcagccccagctgcagcagctacgtgacatgggcatccaggacgatgagctgagcctgcgggccctgcaggccaccggtggggacatccaagcagccctggagctcatctttgctggaggagccccatgaactccctgcttcccctgaacccccagcaagttgcagaggctactgcccttgggaggcactcatgaaggtgcctccatctctcccttccccaatatacctgatggtcaactctc

SEQ ID NO: 197761 - DNA, 1477 bp, Homo sapiens
  Payload ID: 19000
  Gene Name: ubiquitin-like 7
  Uniprot ID: Q96S82
  ENST ID: ENST00000564488
  CDS Start-End: 223-1365
ccgcgggacgggtgagggcgctggggccctgggcagcgcgggctcgatgtgtgtcagccaagtagctggtcccactggagcgaggtctctttggaagcaataatgatgactataacaagaacttatcttgctttgcaagattcttccgccgtcagagtttctgatttattttctggggttccatgtatgccagggagaaagagagagcgcgaaagagagaggatgtctctctcagactggcacctggcggtgaagctggctgaccagccacttactccaaagtctattcttcggttgccagagacagaactgggagaatactcgctagggggctatagtatttcatttctgaagcagcttattgctggcaaactccaggagtctgttccagaccctgagctgattgatctgatctactgtggtcggaagctaaaagatgaccagacacttgacttctatggcattcaacctgggtccactgtccatgttctgcgaaagtcctggcctgaacctgatcagaaaccggaacctgtggacaaagtggctgccatgagagagttccgggtgttgcacactgccctgcacagcagctcctcttacagggaggcggtctttaagatgctcagcaataaggagtctctggatcagatcattgtggccaccccaggcctcagcagtgaccctattgctcttggggttctccaggacaaggacctcttctctgtcttcgctgatcccaatatgcttgatacgttggtgcctgctcacccagccctcgtcaatgccattgtcctggttctgcactccgtagcaggcagtgccccaatgcctgggactgactcctcttcccggagcatgccctccagctcataccgggatatgccaggtggcttcctgtttgaagggctctcagatgatgaggatgactttcacccaaacaccaggtccacaccctctagcagtactcccagctcccgcccagcctccctggggtacagtggagctgctgggccccggcccatcacccagagtgagctggccaccgccttggccctggccagcactccggagagcagctctcacacaccgactcctggcacccagggtcattcctcagggacctcaccaatgtcctctggtgtccagtcagggacgcccatcaccaatgatctcttcagccaagccctacagcatgcccttcaggcctctgggcagcccagccttcagagccagtggcagccccagctgcagcagctacgtgacatgggcatccaggacgatgagctgagcctgcgggccctgcaggccaccggtggggacatccaagcagccctggagctcatctttgctggaggagccccatgaactccctgcttcccctgaacccccagcaagttgcagaggctactgcccttgggaggcactcatgaaggtgcctccatctctcccttccccaatatacctgatggtcaactct

SEQ ID NO: 197762 - DNA, 458 bp, Homo sapiens
  Payload ID: 19000
  Gene Name: ubiquitin-like 7
  ENST ID: ENST00000565494
  CDS Start-End: 1-345
ccagcctccctggggtacagtggagctgctgggccccggcccatcacccagagtgagctggccaccgccttggccctggccagcactccggagagcagctctcacacaccgactcctggcacccagtcagggacgcccatcaccaatgatctcttcagccaagccctacagcatgcccttcaggcctctgggcagcccagccttcagagccagtggcagccccagctgcagcagctacgtgacatgggcatccaggacgatgagctgagcctgcgggccctgcaggccaccggtggggacatccaagcagccctggagctcatctttgctggaggagccccatgaactccctgcttcccctgaacccccagcaagttgcagaggctactgcccttgggaggcactcatgaaggtgcctccatctctcccttccccaatatacctgatggtcaactctc

SEQ ID NO: 197763 - DNA, 661 bp, Homo sapiens
  Payload ID: 19000
  Gene Name: ubiquitin-like 7
  ENST ID: ENST00000566365
  CDS Start-End: 1-548
aacctgtggacaaagtggctgccatgagagagttccgggtgttgcacactgccctgcacagcagctcctcttacagggaggcggtctttaagatgctcagcaataaggagtctctggatcagatcattgtggccaccccaggcctcagcagtgaccctattgctcttggggttctccaggacaaggacctcttctctgtcttcgctgatcccaatatgcttgatacgttggtgcctgctcacccagccctcgtcaatgccattgtcctggttctgcactccgtagcaggcagtgccccaatgcctgggactgactcctcttcccggagcatgccctccagctcataccgggatatgccaggtggcttcctgtttgaagggctctcagatgatgaggatgactttcacccaagccagtggcagccccagctgcagcagctacgtgacatgggcatccaggacgatgagctgagcctgcgggccctgcaggccaccggtggggacatccaagcagccctggagctcatctttgctggaggagccccatgaactccctgcttcccctgaacccccagcaagttgcagaggctactgcccttgggaggcactcatgaaggtgcctccatctctcccttccccaatatacctgatggtcaactctc

SEQ ID NO: 197764 - DNA, 1720 bp, Homo sapiens
  Payload ID: 19000
  Gene Name: ubiquitin-like 7
  Uniprot ID: Q96S82
  ENST ID: ENST00000567435
  CDS Start-End: 465-1607
ggcgctggggccctgggcagcgcgggctcgatgtgtgtcagccaagtagctggtcccactggagcggtgaggtcgccaccggatagtgttcctgccccattactagcgatctgtgaccttgggccagtgattttactgagtcttgcttccctcatctttaaaatgtggctaatgcctgccttagggaaccgttgtgaggattaagtgagacatggtatataaaacgacctccttctggcataaacttgaggtggaagataccttgaggatgcttgaaggtctgctaggcagcttcacagccttttctttcctcttctctatcagaggtctctttggaagcaataatgatgactataacaagaacttatcttgctttgcaagattcttccgccgtcagagtttctgatttattttctggggttccatgtatgccagggagaaagagagagcgcgaaagagagaggatgtctctctcagactggcacctggcggtgaagctggctgaccagccacttactccaaagtctattcttcggttgccagagacagaactgggagaatactcgctagggggctatagtatttcatttctgaagcagcttattgctggcaaactccaggagtctgttccagaccctgagctgattgatctgatctactgtggtcggaagctaaaagatgaccagacacttgacttctatggcattcaacctgggtccactgtccatgttctgcgaaagtcctggcctgaacctgatcagaaaccggaacctgtggacaaagtggctgccatgagagagttccgggtgttgcacactgccctgcacagcagctcctcttacagggaggcggtctttaagatgctcagcaataaggagtctctggatcagatcattgtggccaccccaggcctcagcagtgaccctattgctcttggggttctccaggacaaggacctcttctctgtcttcgctgatcccaatatgcttgatacgttggtgcctgctcacccagccctcgtcaatgccattgtcctggttctgcactccgtagcaggcagtgccccaatgcctgggactgactcctcttcccggagcatgccctccagctcataccgggatatgccaggtggcttcctgtttgaagggctctcagatgatgaggatgactttcacccaaacaccaggtccacaccctctagcagtactcccagctcccgcccagcctccctggggtacagtggagctgctgggccccggcccatcacccagagtgagctggccaccgccttggccctggccagcactccggagagcagctctcacacaccgactcctggcacccagggtcattcctcagggacctcaccaatgtcctctggtgtccagtcagggacgcccatcaccaatgatctcttcagccaagccctacagcatgcccttcaggcctctgggcagcccagccttcagagccagtggcagccccagctgcagcagctacgtgacatgggcatccaggacgatgagctgagcctgcgggccctgcaggccaccggtggggacatccaagcagccctggagctcatctttgctggaggagccccatgaactccctgcttcccctgaacccccagcaagttgcagaggctactgcccttgggaggcactcatgaaggtgcctccatctctcccttccccaatatacctgatggtcaactctc

SEQ ID NO: 197765 - DNA, 1414 bp, Homo sapiens
  Payload ID: 19000
  Gene Name: ubiquitin-like 7
  Uniprot ID: Q96S82
  ENST ID: ENST00000565335
  CDS Start-End: 159-1301
gtttacaccggcggcagtgcggccgggttccttccgcgggacggggatgaagaaactgaggcctagagagctgtccatcacagtatgagtagagagagaaccccagattctagttctggcctcctgatgggagaaagagagagcgcgaaagagagaggatgtctctctcagactggcacctggcggtgaagctggctgaccagccacttactccaaagtctattcttcggttgccagagacagaactgggagaatactcgctagggggctatagtatttcatttctgaagcagcttattgctggcaaactccaggagtctgttccagaccctgagctgattgatctgatctactgtggtcggaagctaaaagatgaccagacacttgacttctatggcattcaacctgggtccactgtccatgttctgcgaaagtcctggcctgaacctgatcagaaaccggaacctgtggacaaagtggctgccatgagagagttccgggtgttgcacactgccctgcacagcagctcctcttacagggaggcggtctttaagatgctcagcaataaggagtctctggatcagatcattgtggccaccccaggcctcagcagtgaccctattgctcttggggttctccaggacaaggacctcttctctgtcttcgctgatcccaatatgcttgatacgttggtgcctgctcacccagccctcgtcaatgccattgtcctggttctgcactccgtagcaggcagtgccccaatgcctgggactgactcctcttcccggagcatgccctccagctcataccgggatatgccaggtggcttcctgtttgaagggctctcagatgatgaggatgactttcacccaaacaccaggtccacaccctctagcagtactcccagctcccgcccagcctccctggggtacagtggagctgctgggccccggcccatcacccagagtgagctggccaccgccttggccctggccagcactccggagagcagctctcacacaccgactcctggcacccagggtcattcctcagggacctcaccaatgtcctctggtgtccagtcagggacgcccatcaccaatgatctcttcagccaagccctacagcatgcccttcaggcctctgggcagcccagccttcagagccagtggcagccccagctgcagcagctacgtgacatgggcatccaggacgatgagctgagcctgcgggccctgcaggccaccggtggggacatccaagcagccctggagctcatctttgctggaggagccccatgaactccctgcttcccctgaacccccagcaagttgcagaggctactgcccttgggaggcactcatgaaggtgcctccatctctcccttccccaatatacctgatggtcaactctc

SEQ ID NO: 197766 - DNA, 792 bp, Homo sapiens
  Payload ID: 19000
  Gene Name: ubiquitin-like 7
  ENST ID: ENST00000565130
  CDS Start-End: 119-792
gttccttccgcgggacgggtgagggcgctggggccctgggcagcgcgggctcgatgtgtgtcagccaagtagctggtcccactggagcgggagaaagagagagcgcgaaagagagaggatgtctctctcagactggcacctggcggtgaagctggctgaccagccacttactccaaagtctattcttcggttgccagagacagaactgggagaatactcgctagggggctatagtatttcatttctgaagcagcttattgctggcaaactccaggagtctgttccagaccctgagctgattgatctgatctactgtggtcggaagctaaaagatgaccagacacttgacttctatggcattcaacctgggtccactgtccatgttctgcgaaagtcctggcctgaacctgatcagaaaccgggggttctccaggacaaggacctcttctctgtcttcgctgatcccaatatgcttgatacgttggtgcctgctcacccagccctcgtcaatgccattgtcctggttctgcactccgtagcaggcagtgccccaatgcctgggactgactcctcttcccggagcatgccctccagctcataccgggatatgccaggtggcttcctgtttgaagggctctcagatgatgaggatgactttcacccaaacaccaggtccacaccctctagcagtactcccagctcccgcccagcctccctggggtacagtggagctgctgggccccggcccatcacccagagtgagctggccaccgccttggccctggccagcac

SEQ ID NO: 197767 - DNA, 621 bp, Homo sapiens
  Payload ID: 19000
  Gene Name: ubiquitin-like 7
  ENST ID: ENST00000563081
  CDS Start-End: 135-621
gcggcagtgcggccgggttccttccgcgggacgggtgagggcgctggggccctgggcagcgcgggctcgatgtgtgtcagccaagtagctggtcccactggagcgggagaaagagagagcgcgaaagagagaggatgtctctctcagactggcacctggcggtgaagctggctgaccagccacttactccaaagtctattcttcggttgccagagacagaactgggagaatactcgctagggggctatagtatttcatttctgaagcagcttattgctggcaaactccaggagtctgttccagaccctgagctgattgatctgatctactgtggtcggaagctaaaagatgaccagacacttgacttctatggcattcaacctgggtccactgtccatgttctgcgaaagtcctggcctgaacctgatcagaaaccggaacctgtggacaaagtggctgccatgagagagttccgggtgttgcacactgccctgcacagcagctcctcttacagggaggcggggttctccaggacaaggacctcttctctgtcttcgctgatcccaatatgcttgatacgttggtgcctgctcacccagccctcgtcaatgccattgtcct

SEQ ID NO: 197768 - DNA, 2392 bp, Homo sapiens
  Payload ID: 19001
  Gene Name: ubiquitin-like domain containing CTD phosphatase 1
  Uniprot ID: Q8WVY7
  ENST ID: ENST00000296786
  CDS Start-End: 327-1283
agagcggccacccagggatcggcgctatctgcacagcggttacagtctcggaaaggcctggcttcttcgtggctttgtggagatcccttacagcggccatttgattagcacccgaagagattcaaaggaagcagttgttccgtccccaacatatttccgtttcaaaccacccacttccggtttttcagccggttccggtcccgcccttcacttccggtcgctttcggtctctcagcggccggtttctgcgtccgctgccgcaggttccaccgcgctccaggtatttttttttctgaaggaaagctgcttcctcatatgtttcaagaatggctctccctatcattgtaaaatggggtggacaggagtattcagtgaccacactttcagaagatgatactgtgctcgatctcaaacagtttctcaagacccttacaggagttcttccagaacgccaaaagttacttggactcaaagttaaaggcaaacctgcagaaaatgatgttaagcttggagctctcaaactgaaaccaaatactaaaatcatgatgatgggaactcgtgaggagagcttggaagatgtcttaggtccaccccctgacaatgatgatgttgttaatgactttgatattgaagatgaagtagttgaagtagaaaatagggaagaaaacctactgaaaatttctcgcagagtgaaagagtacaaagtggaaattttgaatcctcccagggaagggaaaaagcttttggtgctagatgttgattatacattatttgaccacaggtcttgtgcagagactggggtagaattaatgcggccatatcttcatgaatttctaacatctgcctatgaagattatgacattgttatttggtctgcaacaaatatgaagtggattgaagctaaaatgaaagagctgggagtgagcacaaatgcaaattataagattactttcatgttggatagtgctgctatgataacagtacatactccaaggagaggattaatagacgtaaagcctcttggtgttatatggggaaagttttcggagttttacagcaagaaaaacaccattatgtttgatgacatagggagaaattttctaatgaacccacagaatggactaaagataaggccttttatgaaagcgcacctaaatcgtgataaagacaaagaacttttaaaattaactcagtacctcaaggagatagcaaaattagatgactttttggatctaaatcacaaatattgggaaagatatctctcaaagaagcaaggacagtagttacaagttatactggcagttattgaagatacttaagatccaagaacttcttgcttttatgctagaaatcattatgatagtgctggacactgaagcaaataccatactgcttatacttggtcttccagttttttgtaaatttaattttatattttttgaagatgatagcaatatgctaaaaaatgcttgtcccctatatgaatattctgttacgcttgaaaaatattttctccagcgttggttactgaccaccccaccctcccaccacacacacacacacacacacacacacacacacacacacacacacacaaagtggagaaaaatgtatactcaacaatgtcattttgtgactttggaaacaagttatgttttgtgtttttgtctcattgtgttattgtctgactaaatctaaaaccaaacccatgttgaaactagtacttttccctttaaaaacaaaccaaaaaaaaaaacaaaaaaaaactttttaattaaagaacctagtttgctatgcttaaaattaccaagaattttttatttctttgtcatagacacaatttctcttctgtatgccactagttacatttctaaattctgagcggtctcagttaggcctgtatgtgtgtacatgtccaagtaaagctggaaaatgtcagtcttgacacagctgtgtcttagtatgagaaacagaagactgaagaataaaaactaaggaacaagaatgagtctctttttggtggctaagtagaatcttcctaaaaccattgtcataaaagcagttaaaggcaataaatttttaaaagggacatatcactgattcattcctaaaaagcatgaacaaaaagtttttgttctgttccagctatatcttgtctaagtgctaacactgtttcagtgaaaatatctagccataagattaaaaaaatatattatttgcaatgcttaagcctgcagatacgtaatgtgaccactgttttgtgttgacaatattgctttatacagttcttgtatttgaaaggaattgatccttttaaagaaacatggtgtatattgttcttacaggactaatttcagtggtgtaaataataaatatcttttcttaaaacatt

SEQ ID NO: 197769 - DNA, 3559 bp, Homo sapiens
  Payload ID: 19002
  Gene Name: ubiquitin-like modifier activating enzyme 1
  Uniprot ID: P22314
  ENST ID: ENST00000335972
  CDS Start-End: 184-3360
ggctcggctgtaaggaggtggcagggacaaccacaaccacaacggccgggggaggagaaggcggcagcggcgattctaggcggcccaggcggcggggaggaggagaaggaggagggtggcggccgggcttggcttcggctccttgaggagttggcggcggcgcgacccggggaaccggcattgatgtccagctcgccgctgtccaagaaacgtcgcgtgtccgggcctgatccaaagccgggttctaactgctcccctgcccagtccgtgttgtccgaagtgccctcggtgccaaccaacggaatggccaagaacggcagtgaagcagacatagacgagggcctttactcccggcagctgtatgtgttgggccatgaggcaatgaagcggctccagacatccagtgtcctggtatcaggcctgcggggcctgggcgtggagatcgctaagaacatcatccttggtggggtcaaggctgttaccctacatgaccagggcactgcccagtgggctgatctttcctcccagttctacctgcgggaggaggacatcggtaaaaaccgggccgaggtatcacagccccgcctcgctgagctcaacagctatgtgcctgtcactgcctacactggacccctcgttgaggacttccttagtggtttccaggtggtggtgctcaccaacacccccctggaggaccagctgcgagtgggtgagttctgtcacaaccgtggcatcaagctggtggtggcagacacgcggggcctgtttgggcagctcttctgtgactttggagaggaaatgatcctcacagattccaatggggagcagccactcagtgctatggtttctatggttaccaaggacaaccccggtgtggttacctgcctggatgaggcccgacacgggtttgagagcggggactttgtctccttttcagaagtacagggcatggttgaactcaacggaaatcagcccatggagatcaaagtcctgggtccttatacctttagcatctgtgacacctccaacttctccgactacatccgtggaggcatcgtcagtcaggtcaaagtacctaagaagattagctttaaatccttggtggcctcactggcagaacctgactttgtggtgacggacttcgccaagttttctcgccctgcccagctgcacattggcttccaggccctgcaccagttctgtgctcagcatggccggccacctcggccccgcaatgaggaggatgcagcagaactggtagccttagcacaggctgtgaatgctcgagccctgccagcagtgcagcaaaataacctggacgaggacctcatccggaagctggcatatgtggctgctggggatctggcacccataaacgccttcattgggggcctggctgcccaggaagtcatgaaggcctgctccgggaagttcatgcccatcatgcagtggctatactttgatgcccttgagtgtctccctgaggacaaagaggtcctcacagaggacaagtgcctccagcgccagaaccgttatgacgggcaagtggctgtgtttggctcagacctgcaagagaagctgggcaagcagaagtatttcctggtgggtgcgggggccattggctgtgagctgctcaagaactttgccatgattgggctgggctgcggggagggtggagaaatcatcgttacagacatggacaccattgagaagtcaaatctgaatcgacagtttcttttccggccctgggatgtcacgaagttaaagtctgacacggctgctgcagctgtgcgccaaatgaatccacatatccgggtgacaagccaccagaaccgtgtgggtcctgacacggagcgcatctatgatgacgattttttccaaaacctagatggcgtggccaatgccctggacaacgtggatgcccgcatgtacatggaccgccgctgtgtctactaccggaagccactgctggagtcaggcacactgggcaccaaaggcaatgtgcaggtggtgatccccttcctgacagagtcgtacagttccagccaggacccacctgagaagtccatccccatctgtaccctgaagaacttccctaatgccatcgagcacaccctgcagtgggctcgggatgagtttgaaggcctcttcaagcagccagcagaaaatgtcaaccagtacctcacagaccccaagtttgtggagcgaacactgcggctggcaggcactcagcccttggaggtgctggaggctgtgcagcgcagcctggtgctgcagcgaccacagacctgggctgactgcgtgacctgggcctgccaccactggcacacccagtactcgaacaacatccggcagctgctgcacaacttccctcctgaccagctcacaagctcaggagcgccgttctggtctgggcccaaacgctgtccacacccgctcacctttgatgtcaacaatcccctgcatctggactatgtgatggctgctgccaacctgtttgcccagacctacgggctgacaggctctcaggaccgagctgctgtggccacattcctgcagtctgtgcaggtccccgaattcacccccaagtctggcgtcaagatccatgtttctgaccaggagctgcagagcgccaatgcctctgttgatgacagtcgtctagaggagctcaaagccactctgcccagcccagacaagctccctggattcaagatgtaccccattgactttgagaaggatgatgacagcaactttcatatggatttcatcgtggctgcatccaacctccgggcagaaaactatgacattccttctgcagaccggcacaagagcaagctgattgcagggaagatcatcccagccattgccacgaccacagcagccgtggttggccttgtgtgtctggagctgtacaaggttgtgcaggggcaccgacagcttgactcctacaagaatggtttcctcaacttggccctgcctttctttggtttctctgaaccccttgccgcaccacgtcaccagtactataaccaagagtggacattgtgggatcgctttgaggtacaagggctgcagcctaatggtgaggagatgaccctcaaacagttcctcgactattttaagacagagcacaaattagagatcaccatgctgtcccagggcgtgtccatgctctattccttcttcatgccagctgccaagctcaaggaacggttggatcagccgatgacagagattgtgagccgtgtgtcgaagcgaaagctgggccgccacgtgcgggcgctggtgcttgagctgtgctgtaacgacgagagcggcgaggatgtcgaggttccctatgtccgatacaccatccgctgaccccgtctgctcctctaggctggccccttgtccacccctctccacaccccttccagcccagggttcccatttggcttctggcagtggcccaactagccaagtctggtgttccctcatcatccccctacctgaacccctcttgccactgccttctaccttgtttgaaacctgaatcctaataaagaattaataactccca

SEQ ID NO: 197770 - DNA, 2497 bp, Homo sapiens
  Payload ID: 19002
  Gene Name: ubiquitin-like modifier activating enzyme 1
  ENST ID: ENST00000377269
  CDS Start-End: 780-2300
ctaattgaagtttttattttttatggaggcataacatatctagaataaggtacacagatttttttttttttttttttgaggtggagttttgctcatgttgcccaggttggagtgcagtggcgcagtctcggctcactgcagcctccgcctcccaggttcaagcgattctcctgcctcagccttccaaagtgctgggaatacaggcgtgagccacctcgcctggcactcagatcttaatacatttttaggctgggcatggcggctgacacctataatctcagcactcaggaggccaaggagtgaggtttgtttgagcccaggagttcaagaccagcctaggcaacatagcaagaccctgtctctacaacaaatcttaaaaattagccgggtgtggtggcatgtgcctgctgtcccagctattcgggaggctgaggtgggaggatcgtttcaacctgggaggtcaaggctgctgtgagccgtgattgcatcgctgcactccagctcgggtgacagtgtgagactttgtctcaaacaacaaaacaaaacagttttccacatacacagcactattgtaaccactgcccaaatcaacttcattgatttttctttttttgagacagtcttcctctgtcacccaggctggagtgcaatggcatgatctcggctcactgcaacctccgcctcccgggttcaagagatttcctgcctcagcctcctgagtagctgggattacaggcatctgccaccacgcccagctactttttgtatttttagtagagatggggtttcaccatgttggtcaggctggtctcgaacccttgacctcaggtgatccatctgccttagcctcccaaagtgctgggattacaggtgtgagctactgtgcctggcctggtttttcaattgaggtgggggaatggggaaggctagagggcttccccacttccagagtagctgtgcgccttgtacttgctttattcactgatggtccttctaataatgcctgcggaaacccattttgtcaactgtggccacatgtaatctgtttgctctgtctgcagtgggctcgggatgagtttgaaggcctcttcaagcagccagcagaaaatgtcaaccagtacctcacagaccccaagtttgtggagcgaacactgcggctggcaggcactcagcccttggaggtgctggaggctgtgcagcgcagcctggtgctgcagcgaccacagacctgggctgactgcgtgacctgggcctgccaccactggcacacccagtactcgaacaacatccggcagctgctgcacaacttccctcctgaccagctcacaagctcaggagcgccgttctggtctgggcccaaacgctgtccacacccgctcacctttgatgtcaacaatcccctgcatctggactatgtgatggctgctgccaacctgtttgcccagacctacgggctgacaggctctcaggaccgagctgctgtggccacattcctgcagtctgtgcaggtccccgaattcacccccaagtctggcgtcaagatccatgtttctgaccaggagctgcagagcgccaatgcctctgttgatgacagtcgtctagaggagctcaaagccactctgcccagcccagacaagctccctggattcaagatgtaccccattgactttgagaaggatgatgacagcaactttcatatggatttcatcgtggctgcatccaacctccgggcagaaaactatgacattccttctgcagaccggcacaagagcaagctgattgcagggaagatcatcccagccattgccacgaccacagcagccgtggttggccttgtgtgtctggagctgtacaaggttgtgcaggggcaccgacagcttgactcctacaagaatggtttcctcaacttggccctgcctttctttggtttctctgaaccccttgccgcaccacgtcaccagtactataaccaagagtggacattgtgggatcgctttgaggtacaagggctgcagcctaatggtgaggagatgaccctcaaacagttcctcgactattttaagacagagcacaaattagagatcaccatgctgtcccagggcgtgtccatgctctattccttcttcatgccagctgccaagctcaaggaacggttggatcagccgatgacagagattgtgagccgtgtgtcgaagcgaaagctgggccgccacgtgcgggcgctggtgcttgagctgtgctgtaacgacgagagcggcgaggatgtcgaggttccctatgtccgatacaccatccgctgaccccgtctgctcctctaggctggccccttgtccacccctctccacaccccttccagcccagggttcccatttggcttctggcagtggcccaactagccaagtctggtgttccctcatcatccccctacctgaacccctcttgccactgccttctaccttgtttgaaacctgaatcctaataaagaattaataactcc

SEQ ID NO: 197771 - DNA, 3466 bp, Homo sapiens
  Payload ID: 19002
  Gene Name: ubiquitin-like modifier activating enzyme 1
  Uniprot ID: P22314
  ENST ID: ENST00000377351
  CDS Start-End: 91-3267
cttgtacgacagaggtggtttgctcttccgttgccccgtggcttcagctcatctttggcaggaaggcgaggcttccgcccggcacaggggatgtccagctcgccgctgtccaagaaacgtcgcgtgtccgggcctgatccaaagccgggttctaactgctcccctgcccagtccgtgttgtccgaagtgccctcggtgccaaccaacggaatggccaagaacggcagtgaagcagacatagacgagggcctttactcccggcagctgtatgtgttgggccatgaggcaatgaagcggctccagacatccagtgtcctggtatcaggcctgcggggcctgggcgtggagatcgctaagaacatcatccttggtggggtcaaggctgttaccctacatgaccagggcactgcccagtgggctgatctttcctcccagttctacctgcgggaggaggacatcggtaaaaaccgggccgaggtatcacagccccgcctcgctgagctcaacagctatgtgcctgtcactgcctacactggacccctcgttgaggacttccttagtggtttccaggtggtggtgctcaccaacacccccctggaggaccagctgcgagtgggtgagttctgtcacaaccgtggcatcaagctggtggtggcagacacgcggggcctgtttgggcagctcttctgtgactttggagaggaaatgatcctcacagattccaatggggagcagccactcagtgctatggtttctatggttaccaaggacaaccccggtgtggttacctgcctggatgaggcccgacacgggtttgagagcggggactttgtctccttttcagaagtacagggcatggttgaactcaacggaaatcagcccatggagatcaaagtcctgggtccttatacctttagcatctgtgacacctccaacttctccgactacatccgtggaggcatcgtcagtcaggtcaaagtacctaagaagattagctttaaatccttggtggcctcactggcagaacctgactttgtggtgacggacttcgccaagttttctcgccctgcccagctgcacattggcttccaggccctgcaccagttctgtgctcagcatggccggccacctcggccccgcaatgaggaggatgcagcagaactggtagccttagcacaggctgtgaatgctcgagccctgccagcagtgcagcaaaataacctggacgaggacctcatccggaagctggcatatgtggctgctggggatctggcacccataaacgccttcattgggggcctggctgcccaggaagtcatgaaggcctgctccgggaagttcatgcccatcatgcagtggctatactttgatgcccttgagtgtctccctgaggacaaagaggtcctcacagaggacaagtgcctccagcgccagaaccgttatgacgggcaagtggctgtgtttggctcagacctgcaagagaagctgggcaagcagaagtatttcctggtgggtgcgggggccattggctgtgagctgctcaagaactttgccatgattgggctgggctgcggggagggtggagaaatcatcgttacagacatggacaccattgagaagtcaaatctgaatcgacagtttcttttccggccctgggatgtcacgaagttaaagtctgacacggctgctgcagctgtgcgccaaatgaatccacatatccgggtgacaagccaccagaaccgtgtgggtcctgacacggagcgcatctatgatgacgattttttccaaaacctagatggcgtggccaatgccctggacaacgtggatgcccgcatgtacatggaccgccgctgtgtctactaccggaagccactgctggagtcaggcacactgggcaccaaaggcaatgtgcaggtggtgatccccttcctgacagagtcgtacagttccagccaggacccacctgagaagtccatccccatctgtaccctgaagaacttccctaatgccatcgagcacaccctgcagtgggctcgggatgagtttgaaggcctcttcaagcagccagcagaaaatgtcaaccagtacctcacagaccccaagtttgtggagcgaacactgcggctggcaggcactcagcccttggaggtgctggaggctgtgcagcgcagcctggtgctgcagcgaccacagacctgggctgactgcgtgacctgggcctgccaccactggcacacccagtactcgaacaacatccggcagctgctgcacaacttccctcctgaccagctcacaagctcaggagcgccgttctggtctgggcccaaacgctgtccacacccgctcacctttgatgtcaacaatcccctgcatctggactatgtgatggctgctgccaacctgtttgcccagacctacgggctgacaggctctcaggaccgagctgctgtggccacattcctgcagtctgtgcaggtccccgaattcacccccaagtctggcgtcaagatccatgtttctgaccaggagctgcagagcgccaatgcctctgttgatgacagtcgtctagaggagctcaaagccactctgcccagcccagacaagctccctggattcaagatgtaccccattgactttgagaaggatgatgacagcaactttcatatggatttcatcgtggctgcatccaacctccgggcagaaaactatgacattccttctgcagaccggcacaagagcaagctgattgcagggaagatcatcccagccattgccacgaccacagcagccgtggttggccttgtgtgtctggagctgtacaaggttgtgcaggggcaccgacagcttgactcctacaagaatggtttcctcaacttggccctgcctttctttggtttctctgaaccccttgccgcaccacgtcaccagtactataaccaagagtggacattgtgggatcgctttgaggtacaagggctgcagcctaatggtgaggagatgaccctcaaacagttcctcgactattttaagacagagcacaaattagagatcaccatgctgtcccagggcgtgtccatgctctattccttcttcatgccagctgccaagctcaaggaacggttggatcagccgatgacagagattgtgagccgtgtgtcgaagcgaaagctgggccgccacgtgcgggcgctggtgcttgagctgtgctgtaacgacgagagcggcgaggatgtcgaggttccctatgtccgatacaccatccgctgaccccgtctgctcctctaggctggccccttgtccacccctctccacaccccttccagcccagggttcccatttggcttctggcagtggcccaactagccaagtctggtgttccctcatcatccccctacctgaacccctcttgccactgccttctaccttgtttgaaacctgaatcctaataaagaattaataactccca

SEQ ID NO: 197772 - DNA, 1054 bp, Homo sapiens
  Payload ID: 19002
  Gene Name: ubiquitin-like modifier activating enzyme 1
  ENST ID: ENST00000442035
  CDS Start-End: 202-1054
atcttgtgtcggcggctcggctgtaaggaggtggcagggacaaccacaaccacaacggccgggggaggagaaggcggcagcggcgattctaggcggcccaggcggcggggaggaggagaaggaggagggtggcggccgggcttggcttcggctccttgaggagttggcggcggcgcgacccggggaaccggcattggttctatgctctgtgttatttatcatctcgataaccccgtggggaagatgtccagctcgccgctgtccaagaaacgtcgcgtgtccgggcctgatccaaagccgggttctaactgctcccctgcccagtccgtgttgtccgaagtgccctcggtgccaaccaacggaatggccaagaacggcagtgaagcagacatagacgagggcctttactcccggcagctgtatgtgttgggccatgaggcaatgaagcggctccagacatccagtgtcctggtatcaggcctgcggggcctgggcgtggagatcgctaagaacatcatccttggtggggtcaaggctgttaccctacatgaccagggcactgcccagtgggctgatctttcctcccagttctacctgcgggaggaggacatcggtaaaaaccgggccgaggtatcacagccccgcctcgctgagctcaacagctatgtgcctgtcactgcctacactggacccctcgttgaggacttccttagtggtttccaggtggtggtgctcaccaacacccccctggaggaccagctgcgagtgggtgagttctgtcacaaccgtggcatcaagctggtggtggcagacacgcggggcctgtttgggcagctcttctgtgactttggagaggaaatgatcctcacagattccaatggggagcagccactcagtgctatggtttctatggttaccaaggacaaccccggtgtggttacctgcctggatgaggcccgacacgggtttgagagcggggactttgtctccttttcagaagtacagggcatggttgaactcaacggaaatcagcccatggagatcaaagtcctgg

SEQ ID NO: 197773 - DNA, 671 bp, Homo sapiens
  Payload ID: 19002
  Gene Name: ubiquitin-like modifier activating enzyme 1
  ENST ID: ENST00000427561
  CDS Start-End: 151-671
aggactgcgagactggacacgtcgggggcccagatgtttctagggagaggagcctcccagctcaggctagggaagggacaccggagcccagctcttcctgagctgacgaggcgccacccggcctttattcattattcataataaggttctatgctctgtgttatttatcatctcgataaccccgtggggaagatgtccagctcgccgctgtccaagaaacgtcgcgtgtccgggcctgatccaaagccgggttctaactgctcccctgcccagtccgtgttgtccgaagtgccctcggtgccaaccaacggaatggccaagaacggcagtgaagcagacatagacgagggcctttactcccggcagctgtatgtgttgggccatgaggcaatgaagcggctccagacatccagtgtcctggtatcaggcctgcggggcctgggcgtggagatcgctaagaacatcatccttggtggggtcaaggctgttaccctacatgaccagggcactgcccagtgggctgatctttcctcccagttctacctgcgggaggaggacatcggtaaaaaccgggccgaggtatcacagccccgcctcgctgagctcaacagctatgtgcctgtcactgcctacactggacccctcgttgaggacttccttagtggtttcca

SEQ ID NO: 197774 - DNA, 1706 bp, Homo sapiens
  Payload ID: 19002
  Gene Name: ubiquitin-like modifier activating enzyme 1
  ENST ID: ENST00000451702
  CDS Start-End: 1005-1706
tgggccctgagcccaggggcatttggcaaacagtcccccaccagctgcatgcctctgggcgagtgaatggggttctctaagcctttcttttcccatttgtgatttgggcatagggttatctgggtcatggggattgttaagattagacaaagccctttcctctttgattgacacacagtatgctcttggtagatagtagggagctcttgtcattgtggttggtgctagtgacaagtgccaagatggaatcttaggtacattgggatacttagtgtcataaaagtctcagtgtgggaggacttgtgtgaacagaagactcagtgcctagaggagcacttggggtgaggggaagtgacgctgggtcctcccatctccagcatgtggacccagtcacccccaccaccagatttcacttccacagcaggctttattgttctgtctctgggacctagcaggtgaccctgggcaagttacttctcatttgtccggcaaggacactaaactctgccttgctgggtcagggtcatggaggggatgaaacgtgataacacgaggaagcagcctgggcttcagagtcagcagatcctggtctggtcccagctcagtgtgtgggaaccttggtcaccgaacgtccctgagtgaatttttttccatcactttaaagttgggggtattattgatagcagtccaaaccccacaggagtaccctgaggacagagtgagacgaggtttagagaagtgcttactatggcatctggcacaaggaggactcctgatcaatctaatactcatttatcattgtggttaacctgtttaagggactccgcatgcagatgaggcttgggatgtgtttgttttctatctttttgcaacctcttttattggtctgtgtcggttttcccctcccaaagctgggggcagggttgggctttataaaacttgagcccctctggggactgggttctcagcaagttaccgctcctgccatcatgccaccctgatggatgtccaagcctcacttccctcctgcactccccgctcccgccgccatccctgggattaagggagaggagaatggctgcttgttactgcctacctactctgtgccaggttctatgctctgtgttatttatcatctcgataaccccgtggggaagatgtccagctcgccgctgtccaagaaacgtcgcgtgtccgggcctgatccaaagccgggttctaactgctcccctgcccagtccgtgttgtccgaagtgccctcggtgccaaccaacggaatggccaagaacggcagtgaagcagacatagacgagggcctttactcccggcagctgtatgtgttgggccatgaggcaatgaagcggctccagacatccagtgtcctggtatcaggcctgcggggcctgggcgtggagatcgctaagaacatcatccttggtggggtcaaggctgttaccctacatgaccagggcactgcccagtgggctgatctttcctcccagttctacctgcgggaggaggacatcggtaaaaaccgggccgaggtatcacagccccgcctcgctgagctcaacagctatgtgcctgtcactgcctacactggacccctcgttgaggacttccttagtggtttccaggtggtggtgctcaccaacacccccctggaggaccagctgcgagtgggtgagttctgtcacaaccgtggc

SEQ ID NO: 197775 - DNA, 809 bp, Homo sapiens
  Payload ID: 19002
  Gene Name: ubiquitin-like modifier activating enzyme 1
  ENST ID: ENST00000457753
  CDS Start-End: 225-809
tcggcggctcggctgtaaggaggtggcagggacaaccacaaccacaacggccgggggaggagaaggcggcagcggcgattctaggcggcccaggcggcggggaggaggagaaggaggagggtggcggccgggcttggcttcggctccttgaggagttggcggcggcgcgacccggggaaccggcattgcaagttaccgctcctgccatcatgccaccctgatggatgtccaagcctcacttccctcctgcactccccgctcccgccgccatccctgggattaagggagaggagaatggctgcttgttactgcctacctactctgtgccaggttctatgctctgtgttatttatcatctcgataaccccgtggggaagatgtccagctcgccgctgtccaagaaacgtcgcgtgtccgggcctgatccaaagccgggttctaactgctcccctgcccagtccgtgttgtccgaagtgccctcggtgccaaccaacggaatggccaagaacggcagtgaagcagacatagacgagggcctttactcccggcagctgtatgtgttgggccatgaggcaatgaagcggctccagacatccagtgtcctggtatcaggcctgcggggcctgggcgtggagatcgctaagaacatcatccttggtggggtcaaggctgttaccctacatgaccagggcactgcccagtgggctgatctttcctcccagttctacctgcgggaggaggacatcggtaaaaaccgggccgaggtatcacagccccgcctcgctgagctcaacagctatgtgcctgtc

SEQ ID NO: 197776 - DNA, 1148 bp, Homo sapiens
  Payload ID: 19002
  Gene Name: ubiquitin-like modifier activating enzyme 1
  ENST ID: ENST00000412206
  CDS Start-End: 337-1148
ggtcctccccgcgcctggaggctcaggactgcgagactggacacgtcgggggcccagatgtttctagggagaggagcctcccagctcaggctagggaagggacaccggagcccagctcttcctgagctgacgaggcgccacccggcctttattcattattcataataaggtggggctgtggtaggcggcagtttttttgcctctttcgcacctggtccgctgaaggttctcggcttgtgaattattcacgaggggcggatcagcgtgccgaagggacgtgctgaaggggcgttctgaagtctgccgcgcaaacgagttcattgatgattcgcaaaaatgtccagctcgccgctgtccaagaaacgtcgcgtgtccgggcctgatccaaagccgggttctaactgctcccctgcccagtccgtgttgtccgaagtgccctcggtgccaaccaacggaatggccaagaacggcagtgaagcagacatagacgagggcctttactcccggcagctgtatgtgttgggccatgaggcaatgaagcggctccagacatccagtgtcctggtatcaggcctgcggggcctgggcgtggagatcgctaagaacatcatccttggtggggtcaaggctgttaccctacatgaccagggcactgcccagtgggctgatctttcctcccagttctacctgcgggaggaggacatcggtaaaaaccgggccgaggtatcacagccccgcctcgctgagctcaacagctatgtgcctgtcactgcctacactggacccctcgttgaggacttccttagtggtttccaggtggtggtgctcaccaacacccccctggaggaccagctgcgagtgggtgagttctgtcacaaccgtggcatcaagctggtggtggcagacacgcggggcctgtttgggcagctcttctgtgactttggagaggaaatgatcctcacagattccaatggggagcagccactcagtgctatggtttctatggttaccaaggacaaccccggtgtggttacctgcctggatgaggcccgacacgggtttgagagcggggactttgtctccttttcagaagtacagggcatggttgaactcaacggaaatcagcccatggagatcaaagtcctggg

SEQ ID NO: 197777 - DNA, 4023 bp, Homo sapiens
  Payload ID: 19003
  Gene Name: ubiquitin-like modifier activating enzyme 2
  Uniprot ID: Q9UBT2
  ENST ID: ENST00000246548
  CDS Start-End: 71-1993
ccccacccgcttccggccgcggctcggttctcccgcctccgcctccgccgcggctcgtggttgtcccgccatggcactgtcgcgggggctgccccgggagctggctgaggcggtggccgggggccgggtgctggtggtgggggcgggcggcatcggctgcgagctcctcaagaatctcgtgctcaccggtttctcccacatcgacctgattgatctggatactattgatgtaagcaacctcaacagacagtttttgtttcaaaagaaacatgttggaagatcaaaggcacaggttgccaaggaaagtgtactgcagttttacccgaaagctaatatcgttgcctaccatgacagcatcatgaaccctgactataatgtggaatttttccgacagtttatactggttatgaatgctttagataacagagctgcccgaaaccatgttaatagaatgtgcctggcagctgatgttcctcttattgaaagtggaacagctgggtatcttggacaagtaactactatcaaaaagggtgtgaccgagtgttatgagtgtcatcctaagccgacccagagaacctttcctggctgtacaattcgtaacacaccttcagaacctatacattgcatcgtttgggcaaagtacttgttcaaccagttgtttggggaagaagatgctgatcaagaagtatctcctgacagagctgaccctgaagctgcctgggaaccaacggaagccgaagccagagctagagcatctaatgaagatggtgacattaaacgtatttctactaaggaatgggctaaatcaactggatatgatccagttaaactttttaccaagctttttaaagatgacatcaggtatctgttgacaatggacaaactatggcggaaaaggaaacctccagttccgttggactgggctgaagtacaaagtcaaggagaagaaacgaatgcatcagatcaacagaatgaaccccagttaggcctgaaagaccagcaggttctagatgtaaagagctatgcacgtcttttttcaaagagcatcgagactttgagagttcatttagcagaaaagggggatggagctgagctcatatgggataaggatgacccatctgcaatggattttgtcacctctgctgcaaacctcaggatgcatattttcagtatgaatatgaagagtagatttgatatcaaatcaatggcagggaacattattcctgctattgctactactaatgcagtaattgctgggttgatagtattggaaggattgaagattttatcaggaaaaatagaccagtgcagaacaatttttttgaataaacaaccaaacccaagaaagaagcttcttgtgccttgtgcactggatcctcccaaccccaattgttatgtatgtgccagcaagccagaggtgactgtgcggctgaatgtccataaagtgactgttctcaccttacaagacaagatagtgaaagaaaaatttgctatggtagcaccagatgtccaaattgaagatgggaaaggaacaatcctaatatcttccgaagagggagagacggaagctaataatcacaagaagttgtcagaatttggaattagaaatggcagccggcttcaagcagatgacttcctccaggactatactttattgatcaacatccttcatagtgaagacctaggaaaggacgttgaatttgaagttgttggtgatgccccggaaaaagtggggcccaaacaagctgaagatgctgccaaaagcataaccaatggcagtgatgatggagctcagccctccacctccacagctcaagagcaagatgacgttctcatagttgattcagatgaagaagattcttcaaataatgccgacgtcagtgaagaagagagaagccgcaagaggaaattagatgagaaagagaatctcagtgcaaagaggtcacgtatagaacagaaggaagagcttgatgatgtcatagcattagattgaacagaaatgcctctaaacagaaccctcttactatttagtttatctgggcagaaccagattgttatgtcctttgttccaaagggaaaaaattgacagcagtgacttgaaaatgattctgctccctttgaaagcattcattttgctagaactgttagacacattgcagtatgctgtattgaaagtaggaatatagttttaaaaaccctttgaacaaagtgtgtgcataaccagtcatgagataaaacaacacaatgcatgttgcctttttaatgtaaatacccgtaggtatcattaatagtttcaaaatattgtggtttagtaaagttgatacctggttataaatattatgcctttatttttggctagaagaagaattatttttagcctagatctaaccattttcatactcttaactgattgaaacagattcaaagaagtatcgagtgctatgcattgaaacttgtttttaaatgttagatggcactatgtatattaatgtaaaacaatgttaatttactcaagttttcagtttgtaccgcctggtatgtctgtgtaagaagccaatttttgtgtattgttacagtttcaggttatttatattcgatgttttgtaaaactcaaataacgactatacttatggaccaaataaatggcatctgcattcttgttacacatgcctgcacagttcctgtttctgctgccttatatctactgcaggaatgtcaaattcttttcattaaaaaaagaactcggtcgggcacggtggctcatgcctgtaatcccagcactttggaaggctgaggcaggtggatcacctgaggtcagtagttcaagaccaacctggtcaacatggtgaaaccccatctctactaaaaaaaaaaaaaaaaattagccgggcctggtggcaggcacctgtaattccagctactcaggaggctaaggcagcagaattgcttgaacccgggaggcagaggttgcagtgagccaagattgtgctattgctactccagccagggcgatgagtgaaactccatctcaaaaaaggttcagaagatctccactgtttgccaaagacgagtactttcttttctttattcttggagacttcacatgtaggaagagtactttctaaaataaagctcttcctgcgtgtggtggtggtgcacatctgtgttccagctactcaggaggctgaggcaggaggatggctggagcccagaagttcaaggccagcctgggtaacatagcaagaccctgtctctaaaaaataagtaaataaaataaagcttttaatggcagtgggttttttgttcgtttttgagatgaagcctcacactgtcatctggcctggagtgcagtggcgcgatcctggctcactgcagcctccgccttccaggtgcaagcgattctcctgtctcagcctcccctgtagctgggattacaggcgccctccaccacgctcagctaattttttgtatttttagtagagatggggtttcactatgttggccaggctggtctggaactcctgacctcgtgatccacctgcctcagcctcccaaagtgctgggattacaggcgtgagccactgcgcctggcctaatggcagtgtttttaaaatttggattgtcagcagttggcctttgttgagaaaatgtgtgactttgcccaagcccagtaacttggagccttgaatttgagatgctggaaagggagtccttcctcctttctgcagtgtttgtctgggttgtcccctagtttaccaaagtccattttgaatgtaccatccccagcccaactccagcctacagatagtgccagaccgccagtaggtggagtagcactgtcttcctggtcccggacctcagagggctttgcctgttagggtactcttatcactcagagatgggccttgagttttcagagaacagaaagccattaagctgtttcccctattgtattcatgtgccctttgtgtttctggcaataatttattttatatttcaactaaattttaaatttctaattca

SEQ ID NO: 197778 - DNA, 2802 bp, Homo sapiens
  Payload ID: 19003
  Gene Name: ubiquitin-like modifier activating enzyme 2
  Uniprot ID: Q9UBT2
  ENST ID: ENST00000439527
  CDS Start-End: 499-2133
aaaacaaattcccggctgttaggagatgcgggagaggattgagtccctcgcggatgttgtgactttaattttgaggtccctgtcgtaactccgaagtaacgacgcggggcggaggatggcaatgatagcgaccaacgcgtcccgagcgctggtcacgagcgggtttacacacggaacgcgcaccatcttcataccacccgaggagtgcaaacgctatttccaccctgctttatttttaacagatgaggaaagggagacgcaatggggttgagtaacttaccctgggtcacggagcgagtggcagggctcccgcaggctgcgtgactgtcattgctctcacagtagacgattgatctggatactattgatgtaagcaacctcaacagacagtttttgtttcaaaagaaacatgttggaagatcaaaggcacaggttgccaaggaaagtgtactgcagttttacccgaaagctaatatcgttgcctaccatgacagcatcatgaaccctgactataatgtggaatttttccgacagtttatactggttatgaatgctttagataacagagctgcccgaaaccatgttaatagaatgtgcctggcagctgatgttcctcttattgaaagtggaacagctgggtatcttggacaagtaactactatcaaaaagggtgtgaccgagtgttatgagtgtcatcctaagccgacccagagaacctttcctggctgtacaattcgtaacacaccttcagaacctatacattgcatcgtttgggcaaagtacttgttcaaccagttgtttggggaagaagatgctgatcaagaagtatctcctgacagagctgaccctgaagctgcctgggaaccaacggaagccgaagccagagctagagcatctaatgaagatggtgacattaaacgtatttctactaaggaatgggctaaatcaactggatatgatccagttaaactttttaccaagctttttaaagatgacatcaggtatctgttgacaatggacaaactatggcggaaaaggaaacctccagttccgttggactgggctgaagtacaaagtcaaggagaagaaacgaatgcatcagatcaacagaatgaaccccagttaggcctgaaagaccagcaggttctagatgtaaagagctatgcacgtcttttttcaaagagcatcgagactttgagagttcatttagcagaaaagggggatggagctgagctcatatgggataaggatgacccatctgcaatggattttgtcacctctgctgcaaacctcaggatgcatattttcagtatgaatatgaagagtagatttgatatcaaatcaatggcagggaacattattcctgctattgctactactaatgcagtaattgctgggttgatagtattggaaggattgaagattttatcaggaaaaatagaccagtgcagaacaatttttttgaataaacaaccaaacccaagaaagaagcttcttgtgccttgtgcactggatcctcccaaccccaattgttatgtatgtgccagcaagccagaggtgactgtgcggctgaatgtccataaagtgactgttctcaccttacaagacaagatagtgaaagaaaaatttgctatggtagcaccagatgtccaaattgaagatgggaaaggaacaatcctaatatcttccgaagagggagagacggaagctaataatcacaagaagttgtcagaatttggaattagaaatggcagccggcttcaagcagatgacttcctccaggactatactttattgatcaacatccttcatagtgaagacctaggaaaggacgttgaatttgaagttgttggtgatgccccggaaaaagtggggcccaaacaagctgaagatgctgccaaaagcataaccaatggcagtgatgatggagctcagccctccacctccacagctcaagagcaagatgacgttctcatagttgattcagatgaagaagattcttcaaataatgccgacgtcagtgaagaagagagaagccgcaagaggaaattagatgagaaagagaatctcagtgcaaagaggtcacgtatagaacagaaggaagagcttgatgatgtcatagcattagattgaacagaaatgcctctaaacagaaccctcttactatttagtttatctgggcagaaccagattgttatgtcctttgttccaaagggaaaaaattgacagcagtgacttgaaaatgattctgctccctttgaaagcattcattttgctagaactgttagacacattgcagtatgctgtattgaaagtaggaatatagttttaaaaaccctttgaacaaagtgtgtgcataaccagtcatgagataaaacaacacaatgcatgttgcctttttaatgtaaatacccgtaggtatcattaatagtttcaaaatattgtggtttagtaaagttgatacctggttataaatattatgcctttatttttggctagaagaagaattatttttagcctagatctaaccattttcatactcttaactgattgaaacagattcaaagaagtatcgagtgctatgcattgaaacttgtttttaaatgttagatggcactatgtatattaatgtaaaacaatgttaatttactcaagttttcagtttgtaccgcctggtatgtctgtgtaagaagccaatttttgtgtattgttacagtttcaggttatttatattcgatgttttgtaaaactcaaataacgactatacttatggaccaaataaatggcatctgcattcttgtt

SEQ ID NO: 197779 - DNA, 847 bp, Homo sapiens
  Payload ID: 19003
  Gene Name: ubiquitin-like modifier activating enzyme 2
  ENST ID: ENST00000590048
  CDS Start-End: 61-847
ttccggccgcggctcggttctcccgcctccgcctccgccgcggctcgtggttgtcccgccatggcactgtcgcgggggctgccccgggagctggctgaggcggtggccgggggccgggtgctggtggtgggggcgggcggcatcggctgcgagctcctcaagaatctcgtgctcaccggtttctcccacatcgacctggttgccaaggaaagtgtactgcagttttacccgaaagctaatatcgttgcctaccatgacagcatcatgaaccctgactataatgtggaatttttccgacagtttatactggttatgaatgctttagataacagagctgcccgaaaccatgttaatagaatgtgcctggcagctgatgttcctcttattgaaagtggaacagctgggtatcttggacaagtaactactatcaaaaagggtgtgaccgagtgttatgagtgtcatcctaagccgacccagagaacctttcctggctgtacaattcgtaacacaccttcagaacctatacattgcatcgtttgggcaaagtacttgttcaaccagttgtttggggaagaagatgctgatcaagaagtatctcctgacagagctgaccctgaagctgcctgggaaccaacggaagccgaagccagagctagagcatctaatgaagatggtgacattaaacgtatttctactaaggaatgggctaaatcaactggatatgatccagttaaactttttaccaagctttttaaagatgacatcaggtatctgttgacaatggacaaactatggcggaaaaggaaacctccagttccgttggactgggctgaagtacaaagtcaag

SEQ ID NO: 197780 - DNA, 1458 bp, Homo sapiens
  Payload ID: 19003
  Gene Name: ubiquitin-like modifier activating enzyme 2
  ENST ID: ENST00000586313
  CDS Start-End: 75-299
cttcccccacccgcttccggccgcggctcggttctcccgcctccgcctccgccgcggctcgtggttgtcccgccatggcactgtcgcgggggctgccccgggagctggctgaggcggtggccgggggccgggtgctggtggtgggggcgggcggcatcggctgcgagctcctcaagaatctcgtgctcaccggtttctcccacatcgacctgctgcccgaaaccatgttaatagaatgtgcctggcagctgatgttcctcttattgaaagtggaacagctgggtatcttggacaagtaactactatcaaaaagggtgtgaccgagtgttatgagtgtcatcctaagccgacccagagaacctttcctggctgtacaattcgtaacacaccttcagaacctatacattgcatcgtttgggcaaagtacttgttcaaccagttgtttggggaagaagatgctgatcaagaagtatctcctgacagagctgaccctgaagctgcctgggaaccaacggaagccgaagccagagctagagcatctaatgaagatggtgacattaaacgtatttctactaaggaatgggctaaatcaactggatatgatccagttaaactttttaccaagctttttaaagatgacatcaggtatctgttgacaatggacaaactatggcggaaaaggaaacctccagttccgttggactgggctgaagtacaaagtcaaggagaagaaacgaatgcatcagatcaacagaatgaaccccagttaggcctgaaagaccagcaggttctagatgtaaagagctatgcacgtcttttttcaaagagcatcgagactttgagagttcatttagcagaaaagggggatggagctgagctcatatgggataaggatgacccatctgcaatggattttgtcacctctgctgcaaacctcaggatgcatattttcagtatgaatatgaagagtagatttgatatcaaatcaatggcagggaacattattcctgctattgctactactaatgcagtaattgctgggttgatagtattggaaggattgaagattttatcaggaaaaatagaccagtgcagaacaatttttttgaataaacaaccaaacccaagaaagaagcttcttgtgccttgtgcactggatcctcccaaccccaattgttatgtatgtgccagcaagccagaggtgactgtgcggctgaatgtccataaagtgactgttctcaccttacaagacaagatagtgaaagaaaaatttgctatggtagcaccagatgtccaaattgaagatgggaaaggaacaatcctaatatcttccgaagagggagagacggaagctaataatcacaagaagttgtcagaatttggaattagaaatggcagccggcttcaagcagatgacttcctccaggactatactttattgatcaacatccttcatag

SEQ ID NO: 197781 - DNA, 646 bp, Homo sapiens
  Payload ID: 19003
  Gene Name: ubiquitin-like modifier activating enzyme 2
  ENST ID: ENST00000591016
  CDS Start-End: 1-646
ggtatctgttgacaatggacaaactatggcggaaaaggaaacctccagttccgttggactgggctgaagtacaaagtcaaggagaagaaacgaatgcatcagatcaacagaatgaaccccagttaggcctgaaagaccagcaggttctagatgtaaagagctatgcacgtcttttttcaaagagcatcgagactttgagagttcatttagcagaaaagggggatggagctgagctcatatgggataaggatgacccatctgcaatggattttgtcacctctgctgcaaacctcaggatgcatattttcagtatgaatatgaagagtagatttgatatcaaatcaatggcagggaacattattcctgctattgctactactaatgcagtaattgctgggttgatagtattggaaggattgaagattttatcaggaaaaatagaccagtgcagaacaatagtgaaagaaaaatttgctatggtagcaccagatgtccaaattgaagatgggaaaggaacaatcctaatatcttccgaagagggagagacggaagctaataatcacaagaagttgtcagaatttggaattagaaatggcagccggcttcaagcagatgacttcctccaggactatactttattgatcaa

SEQ ID NO: 197782 - DNA, 754 bp, Homo sapiens
  Payload ID: 19003
  Gene Name: ubiquitin-like modifier activating enzyme 2
  ENST ID: ENST00000607361
  CDS Start-End: 82-246
ggccgcccttcccccacccgcttccggccgcggctcggttctcccgcctccgcctccgccgcggctcgtggttgtcccgccatggcactgtcgcgggggctgccccgggagctggctgaggcggtggccgggggccgggtgctggtggtgggggcgggcggcatcggctgcgagctcctcaagaatctcgtgctcaccggtttctcccacatcgacctgccaccagggtctcactattttgcttaggctggtcttgaaggtctgggctcaagcgattctctcactttgtcctcccaaagtgttgggattacagattgatctggatactattgatgtaagcaacctcaacagacagtttttgtttcaaaagaaacatgttggaagatcaaaggcacaggttgccaaggaaagtgtactgcagttttacccgaaagctaatatcgttgcctaccatgacagcatcatgaaccctgactataatgtggaatttttccgacagtttatactggttatgaatgctttagataacagagctgcccgaaaccatgttaatagaatgtgcctggcagctgatgttcctcttattgaaagtggaacagctgggtatcttggacaagtaactactatcaaaaagggtgtgaccgagtgttatgagtgtcatcctaagccgacccagagaacctttcctggctgtacaattcgtaacacaccttcagaacctatacattgcatcgtttgggcaaagtacttgttc

SEQ ID NO: 197783 - DNA, 910 bp, Homo sapiens
  Payload ID: 19003
  Gene Name: ubiquitin-like modifier activating enzyme 2
  ENST ID: ENST00000592791
  CDS Start-End: 233-733
ggcgtataaaattacagcacgtttccgatttctgcctgttatttctcctccaaagatttttttgaataaacaaccaaacccaagaaagaagcttcttgtgccttgtgcactggatcctcccaaccccaattgttatgtatgtgccagcaagccagaggtgactgtgcggctgaatgtccataaagtgactgttctcaccttacaagacaagatagtgaaagaaaaatttgctatggtagcaccagatgtccaaattgaagatgggaaaggaacaatcctaatatcttccgaagagggagagacggaagctaataatcacaagaagttgtcagaatttggaattagaaatggcagccggcttcaagcagatgacttcctccaggactatactttattgatcaacatccttcatagtgaagacctaggaaaggacgttgaatttgaagttgttggtgatgccccggaaaaagtggggcccaaacaagctgaagatgctgccaaaagcataaccaatggcagtgatgatggagctcagccctccacctccacagctcaagagcaagatgacgttctcatagttgattcagatgaagaagattcttcaaataatgccgacgtcagtgaagaagagagaagccgcaagaggaaattagatgagaaagagaatctcagtgcaaagaggtcacgtatagaacagaaggaagagcttgatgatgtcatagcattagattgaacagaaatgcctctaaacagaaccctcttactatttagtttatctgggcagaaccagattgttatgtcctttgttccaaagggaaaaaattgacagcagtgacttgaaaatgattctgctccctttgaaagcattcattttgctagaactgttagacacattgcagtatgctgtatt

SEQ ID NO: 197784 - DNA, 2112 bp, Homo sapiens
  Payload ID: 19004
  Gene Name: ubiquitin-like modifier activating enzyme 3
  Uniprot ID: Q8TBC4
  ENST ID: ENST00000349511
  CDS Start-End: 56-1405
cccgctcctccccgccctgccgcgcgtgggcacctgggaagaggcggagaacaatatggcggatggcgaggagccaatggctgttgatggtgggtgtggggacactggagactgggaaggtcgctggaaccatgtaaagaagttcctcgagcgatctggacccttcacacaccctgatttcgaaccgagcactgaatctctccagttcttgttagatacatgtaaagttctagtcattggagctggcggcttaggatgtgagctcctgaaaaatctggccttgtctggttttagacagattcatgttatagatatggacactatagatgtttccaatctaaataggcagtttttatttaggcctaaagatattggaagacctaaggctgaagttgctgcagaatttctaaatgacagagttcctaattgcaatgtagttccacatttcaacaagattcaagattttaacgacactttctatcgacaatttcatattattgtatgtggactggactctatcatcgccagaagatggataaatggcatgctgatatctcttctaaattatgaagatggtgtcttagatccaagctccattgtccctttgatagatggggggacagaaggttttaaaggaaatgcccgggtgattctgcctggaatgactgcttgtatcgaatgcacgctggaactttatccaccacaggttaattttcccatgtgcaccattgcatctatgcccaggctaccagaacactgtattgagtatgtaaggatgttgcagtggcctaaggagcagccttttggagaaggggttccattagatggagatgatcctgaacatatacaatggattttccaaaaatccctagagagagcatcacaatataatattaggggtgttacgtataggctcactcaaggggtagtaaaaagaatcattcctgcagtagcttccacaaatgcagtcattgcagctgtgtgtgccactgaggtttttaaaatagccacaagtgcatacattcccttgaataattacttggtgtttaatgatgtagatgggctgtatacatacacatttgaagcagaaagaaaggaaaactgcccagcttgtagccagcttcctcaaaatattcagttttctccatcagctaaactacaggaggttttggattatctaaccaatagtgcttctctgcaaatgaaatctccagccatcacagccaccctagagggaaaaaatagaacactttacttacagtcggtaacctctattgaagaacgaacaaggccaaatctctccaaaacattgaaagaattggggcttgttgatggacaagaactggcggttgctgatgtcaccaccccacagactgtactattcaaacttcattttacttcttaaggaaaatctccacataatagaaaactcatggaaataatatactttgtggatgctaagaagttgaatcgatgtcatttttagcaatagtgttgccacgatttgtctttttttatataatgaaccactcttttttaactttgtaaccttcccttgaagacagaattttggtgttggtgcttgtaagcattttcattaataatatgagaaatgatacctggagagagagattatgagcaaatgtattgcttcttttagaggaggaagcatacaacctcttttgtgtgaattttgttattatggtcaaagaatgcattcctaagttttcatttgagtacccaaatacacaaaaggtgtccctttaaggaaaataaagaattaagttttaaataacattacattttacaatctgacatctggagtatattgaacataggctatttcttgatataacactcatttaattgtggccatccaaatgaatattattgcagaatttatcttgttcataatgatttgtaaatggtgttatagctgaatacctgtgcatgaaaatgggcaatattttcatctgtttacttgtagtgccatagaggccaatatgcacaatattaactaatgccaagacatggctgtttaaaaaatttaatgttcaaacagttatcactgatgcttttgcactatttattaataaaatcatatattgtgta

SEQ ID NO: 197785 - DNA, 2154 bp, Homo sapiens
  Payload ID: 19004
  Gene Name: ubiquitin-like modifier activating enzyme 3
  Uniprot ID: Q8TBC4
  ENST ID: ENST00000361055
  CDS Start-End: 56-1447
cccgctcctccccgccctgccgcgcgtgggcacctgggaagaggcggagaacaatatggcggatggcgaggagccggagaagaaaagaaggagaatagaggagctgctggctgagaaaatggctgttgatggtgggtgtggggacactggagactgggaaggtcgctggaaccatgtaaagaagttcctcgagcgatctggacccttcacacaccctgatttcgaaccgagcactgaatctctccagttcttgttagatacatgtaaagttctagtcattggagctggcggcttaggatgtgagctcctgaaaaatctggccttgtctggttttagacagattcatgttatagatatggacactatagatgtttccaatctaaataggcagtttttatttaggcctaaagatattggaagacctaaggctgaagttgctgcagaatttctaaatgacagagttcctaattgcaatgtagttccacatttcaacaagattcaagattttaacgacactttctatcgacaatttcatattattgtatgtggactggactctatcatcgccagaagatggataaatggcatgctgatatctcttctaaattatgaagatggtgtcttagatccaagctccattgtccctttgatagatggggggacagaaggttttaaaggaaatgcccgggtgattctgcctggaatgactgcttgtatcgaatgcacgctggaactttatccaccacaggttaattttcccatgtgcaccattgcatctatgcccaggctaccagaacactgtattgagtatgtaaggatgttgcagtggcctaaggagcagccttttggagaaggggttccattagatggagatgatcctgaacatatacaatggattttccaaaaatccctagagagagcatcacaatataatattaggggtgttacgtataggctcactcaaggggtagtaaaaagaatcattcctgcagtagcttccacaaatgcagtcattgcagctgtgtgtgccactgaggtttttaaaatagccacaagtgcatacattcccttgaataattacttggtgtttaatgatgtagatgggctgtatacatacacatttgaagcagaaagaaaggaaaactgcccagcttgtagccagcttcctcaaaatattcagttttctccatcagctaaactacaggaggttttggattatctaaccaatagtgcttctctgcaaatgaaatctccagccatcacagccaccctagagggaaaaaatagaacactttacttacagtcggtaacctctattgaagaacgaacaaggccaaatctctccaaaacattgaaagaattggggcttgttgatggacaagaactggcggttgctgatgtcaccaccccacagactgtactattcaaacttcattttacttcttaaggaaaatctccacataatagaaaactcatggaaataatatactttgtggatgctaagaagttgaatcgatgtcatttttagcaatagtgttgccacgatttgtctttttttatataatgaaccactcttttttaactttgtaaccttcccttgaagacagaattttggtgttggtgcttgtaagcattttcattaataatatgagaaatgatacctggagagagagattatgagcaaatgtattgcttcttttagaggaggaagcatacaacctcttttgtgtgaattttgttattatggtcaaagaatgcattcctaagttttcatttgagtacccaaatacacaaaaggtgtccctttaaggaaaataaagaattaagttttaaataacattacattttacaatctgacatctggagtatattgaacataggctatttcttgatataacactcatttaattgtggccatccaaatgaatattattgcagaatttatcttgttcataatgatttgtaaatggtgttatagctgaatacctgtgcatgaaaatgggcaatattttcatctgtttacttgtagtgccatagaggccaatatgcacaatattaactaatgccaagacatggctgtttaaaaaatttaatgttcaaacagttatcactgatgcttttgcactatttattaataaaatcatatattgtgta

SEQ ID NO: 197786 - DNA, 2004 bp, Homo sapiens
  Payload ID: 19004
  Gene Name: ubiquitin-like modifier activating enzyme 3
  ENST ID: ENST00000415609
  CDS Start-End: 29-1297
gggcacctgggaagaggcggagaacaatatggcggatggcgaggagccaatggctgttgatggtgggtgtggggacactggagactgggaaggtcgctggaaccatgtaaagaagttcctcgagcgatctggacccttcacacaccctgatttcgaaccgagcactgaagccttgtctggttttagacagattcatgttatagatatggacactatagatgtttccaatctaaataggcagtttttatttaggcctaaagatattggaagacctaaggctgaagttgctgcagaatttctaaatgacagagttcctaattgcaatgtagttccacatttcaacaagattcaagattttaacgacactttctatcgacaatttcatattattgtatgtggactggactctatcatcgccagaagatggataaatggcatgctgatatctcttctaaattatgaagatggtgtcttagatccaagctccattgtccctttgatagatggggggacagaaggttttaaaggaaatgcccgggtgattctgcctggaatgactgcttgtatcgaatgcacgctggaactttatccaccacaggttaattttcccatgtgcaccattgcatctatgcccaggctaccagaacactgtattgagtatgtaaggatgttgcagtggcctaaggagcagccttttggagaaggggttccattagatggagatgatcctgaacatatacaatggattttccaaaaatccctagagagagcatcacaatataatattaggggtgttacgtataggctcactcaaggggtagtaaaaagaatcattcctgcagtagcttccacaaatgcagtcattgcagctgtgtgtgccactgaggtttttaaaatagccacaagtgcatacattcccttgaataattacttggtgtttaatgatgtagatgggctgtatacatacacatttgaagcagaaagaaaggaaaactgcccagcttgtagccagcttcctcaaaatattcagttttctccatcagctaaactacaggaggttttggattatctaaccaatagtgcttctctgcaaatgaaatctccagccatcacagccaccctagagggaaaaaatagaacactttacttacagtcggtaacctctattgaagaacgaacaaggccaaatctctccaaaacattgaaagaattggggcttgttgatggacaagaactggcggttgctgatgtcaccaccccacagactgtactattcaaacttcattttacttcttaaggaaaatctccacataatagaaaactcatggaaataatatactttgtggatgctaagaagttgaatcgatgtcatttttagcaatagtgttgccacgatttgtctttttttatataatgaaccactcttttttaactttgtaaccttcccttgaagacagaattttggtgttggtgcttgtaagcattttcattaataatatgagaaatgatacctggagagagagattatgagcaaatgtattgcttcttttagaggaggaagcatacaacctcttttgtgtgaattttgttattatggtcaaagaatgcattcctaagttttcatttgagtacccaaatacacaaaaggtgtccctttaaggaaaataaagaattaagttttaaataacattacattttacaatctgacatctggagtatattgaacataggctatttcttgatataacactcatttaattgtggccatccaaatgaatattattgcagaatttatcttgttcataatgatttgtaaatggtgttatagctgaatacctgtgcatgaaaatgggcaatattttcatctgtttacttgtagtgccatagaggccaatatgcacaatattaactaatgccaagacatggctgtttaaaaaatttaatgttcaaacagttatcactgatgcttttgcactatttattaataaaatcatatattgtgta

SEQ ID NO: 197787 - DNA, 1224 bp, Homo sapiens
  Payload ID: 19004
  Gene Name: ubiquitin-like modifier activating enzyme 3
  ENST ID: ENST00000461934
  CDS Start-End: 25-219
acctgggaagaggcggagaacaatatggcggatggcgaggagccaatggctgttgatggtgggtgtggggacactggagactgggaaggtcgctggaaccatgtaaagaagttcctcgagcgatctggacccttcacacaccctgatttcgaaccgagcactgaaaatttcatattattgtatgtggactggactctatcatcgccagaagatggataaatggcatgctgatatctcttctaaattatgaagatggtgtcttagatccaagctccattgtccctttgatagatggggggacagaaggttttaaaggaaatgcccgggtgattctgcctggaatgactgcttgtatcgaatgcacgctggaactttatccaccacaggttaattttcccatgtgcaccattgcatctatgcccaggctaccagaacactgtattgagtatgtaaggatgttgcagtggcctaaggagcagccttttggagaaggggttccattagatggagatgatcctgaacatatacaatggattttccaaaaatccctagagagagcatcacaatataatattaggggtgttacgtataggctcactcaaggggtagtaaaaagaatcattcctgcagtagcttccacaaatgcagtcattgcagctgtgtgtgccactgaggtttttaaaatagccacaagtgcatacattcccttgaataattacttggtgtttaatgatgtagatgggctgtatacatacacatttgaagcagaaagaaaggaaaactgcccagcttgtagccagcttcctcaaaatattcagttttctccatcagctaaactacaggaggttttggattatctaaccaatagtgcttctctgcaaatgaaatctccagccatcacagccaccctagagggaaaaaatagaacactttacttacagtcggtaacctctattgaagaacgaacaaggccaaatctctccaaaacattgaaagaattggggcttgttgatggacaagaactggcggttgctgatgtcaccaccccacagactgtactattcaaacttcattttacttcttaaggaaaatctccacataatagaaaactcatggaaataatatactttgtggatgctaagaagttgaatcgatgtcatttttagcaatagtgttgccacgatttgtctttttttatataatgaaccactcttttttaacttt

SEQ ID NO: 197788 - DNA, 1388 bp, Homo sapiens
  Payload ID: 19004
  Gene Name: ubiquitin-like modifier activating enzyme 3
  ENST ID: ENST00000465627
  CDS Start-End: 25-414
acctgggaagaggcggagaacaatatggcggatggcgaggagccaatggctgttgatggtgggtgtggggacactggagactgggaaggtcgctggaaccatgtaaagaagttcctcgagcgatctggacccttcacacaccctgatttcgaaccgagcactgaatctctccagttcttgttagatacatgtaaagttctagtcattggagctggcggcttaggatgtgagctcctgaaaaatctggccttgtctggttttagacagattcatgttatagatatggacactatagatgtttccaatctaaataggcagtttttatttagaatttcatattattgtatgtggactggactctatcatcgccagaagatggataaatggcatgctgatatctcttctaaattatgaagatggtgtcttagatccaagctccattgtccctttgatagatggggggacagaaggttttaaaggaaatgcccgggtgattctgcctggaatgactgcttgtatcgaatgcacgctggaactttatccaccacaggttaattttcccatgtgcaccattgcatctatgcccaggctaccagaacactgtattgagtatgtaaggatgttgcagtggcctaaggagcagccttttggagaaggggttccattagatggagatgatcctgaacatatacaatggattttccaaaaatccctagagagagcatcacaatataatattaggggtgttacgtataggctcactcaaggggtagtaaaaagaatcattcctgcagtagcttccacaaatgcagtcattgcagctgtgtgtgccactgaggtttttaaaatagccacaagtgcatacattcccttgaataattacttggtgtttaatgatgtagatgggctgtatacatacacatttgaagcagaaagaaaggaaaactgcccagcttgtagccagcttcctcaaaatattcagttttctccatcagctaaactacaggaggttttggattatctaaccaatagtgcttctctgcaaatgaaatctccagccatcacagccaccctagagggaaaaaatagaacactttacttacagtcggtaacctctattgaagaacgaacaaggccaaatctctccaaaacattgaaagaattggggcttgttgatggacaagaactggcggttgctgatgtcaccaccccacagactgtactattcaaacttcattttacttcttaaggaaaatctccacataatagaaaactcatggaaataatatactttgtggatgctaagaagttgaatcgatgtcatttttagcaatagtgttgccacgatttgtctttttttatataatgaaccactcttttttaacttt

SEQ ID NO: 197789 - DNA, 123 bp, Homo sapiens
  Payload ID: 19004
  Gene Name: ubiquitin-like modifier activating enzyme 3
  ENST ID: ENST00000631029
  CDS Start-End: 1-123
ctgatagtgtctatcttaaggctggaatgcaatggtgtgatcttggctcatggtaacctctgcctcccaggatcaagtgattctcctgcctcagcctcccaagtagctgggatgacaggcgcc

SEQ ID NO: 197790 - DNA, 390 bp, Homo sapiens
  Payload ID: 19004
  Gene Name: ubiquitin-like modifier activating enzyme 3
  ENST ID: ENST00000630585
  CDS Start-End: 1-390
atggcggatggcgaggagccaatggctgttgatggtgggtgtggggacactggagactgggaaggtcgctggaaccatgtaaagaagttcctcgagcgatctggacccttcacacaccctgatttcgaaccgagcactgaatctctccagttcttgttagatacatgtaaagttctagtcattggagctggcggcttaggatgtgagctcctgaaaaatctggccttgtctggttttagacagattcatgttatagatatggacactatagatgtttccaatctaaataggcagtttttatttagaatttcatattattgtatgtggactggactctatcatcgccagaagatggataaatggcatgctgatatctcttctaaattatga

SEQ ID NO: 197791 - DNA, 2850 bp, Homo sapiens
  Payload ID: 19005
  Gene Name: ubiquitin-like modifier activating enzyme 5
  Uniprot ID: Q9GZZ9
  ENST ID: ENST00000264991
  CDS Start-End: 233-1279
gaggtgataagatagcatctgctgtggccaggcatccctgacacctgacaagaaagtaaagccaaaagtcagctgaagataatggccatggagatgtctgtggagagccgtaaaagccaatcatggctgagatgcctgcagaatctctgcccatgagaactctgaggcctcctttcctttggctgtggtaagccctctgggaaaagagcagctacccaccaccagccgcttgatggcattgaaacgaatgggaattgtaagcgactatgagaaaatccgtacctttgccgtagcaatagtaggtgttggtggagtaggtagtgtgactgctgaaatgctgacaagatgtggcattggtaagttgctactctttgattatgacaaggtggaactagccaatatgaatagacttttcttccaacctcatcaagcaggattaagtaaagttcaagcagcagaacatactctgaggaacattaatcctgatgttctttttgaagtacacaactataatataaccacagtggaaaactttcaacatttcatggatagaataagtaatggtgggttagaagaaggaaaacctgttgatctagttcttagctgtgtggacaattttgaagctcgaatgacaataaatacagcttgtaatgaacttggacaaacatggatggaatctggggtcagtgaaaatgcagtttcagggcatatacagcttataattcctggagaatctgcttgttttgcgtgtgctccaccacttgtagttgctgcaaatattgatgaaaagactctgaaacgagaaggtgtttgtgcagccagtcttcctaccactatgggtgtggttgctgggatcttagtacaaaacgtgttaaagtttctgttaaattttggtactgttagtttttaccttggatacaatgcaatgcaggatttttttcctactatgtccatgaagccaaatcctcagtgtgatgacagaaattgcaggaagcagcaggaggaatataagaaaaaggtagcagcactgcctaaacaagaggttatacaagaagaggaagagataatccatgaagataatgaatggggtattgagctggtatctgaggtttcagaagaggaactgaaaaatttttcaggtccagttccagacttacctgaaggaattacagtggcatacacaattccaaaaaagcaagaagattctgtcactgagttaacagtggaagattctggtgaaagcttggaagacctcatggccaaaatgaagaatatgtagataatggactgggatatattgtatttctcatgttaaagcctcttcccttgaaattaaaaaaaaattttaactgataaaacttagggcaacattaattaatgtatattcttacctgaattgttatactttttgaaaatcctgtgacttgcctgtttctccccgctccaacgaaatcattaactctcctaaaatgtgtttcattctagtaagaaaacctcaaaggatattgtaggatataaatcttacttgaaaacatagctgttgaaatgttttggccttttggagtgggggaaggacaaatctgatcctgtaatctttttctttccagtaatcccttgtgtctgttgcatgaggacatggacaataaagtagtatatgatcctcagatacagggagaaggacaaggcatacagcttattgattagagctggcaagcatctgctcattatgtttggaattgctttctataagaaaattgcccactactactaacttgatcaacaatgaattcaaaatagttaacctatgaaataacatcctctcaaatgtttgctgatgaagtacaagttgaaatgtagttattggaaaagtctgtaacctgtggatcatatatattcaaagtgagacaaaggcaaataaaaagcagctattttcatgaatagacaaagttgatttcaggaagtataaattatattctgcaccgaacaaggaacagaaattattgcatctgtggaacatatatctggagttactatactttactgaagagcaaggcataaatttagactaaaatccatccagattacactcattctttaggctactcctggatacttcatttaaatttgattttcgaggtagtgagatgtcggcaaggtttgtcctgtatattaggaataaaggaaaagttctaaactgcctctgcaatgacttgtagtcagtggaagagtatcactttcccctgatcatgaccactaaactgtaaattgatataaattagttttctctcgagttacacccaagtaatgaagacttaagagaaccttggttgaaataaatttccaatagtttggagactcataaataccatgcaggtgtaaccactgccaataggctgtttctatgcttatttcctattttgatttttactttgaagataggaatatctaaattatatctctagggagaaaatgttgtaaaaaattaaaagtacatccctgattgtaaaataaagttcaaaaaactgatttcagaaagtctcaactaccaaatgttttcaatatattagttttgagatgctaggattatactgtgattcttatgtttatagtaaagtctggaaagcagaaggatagtttttttagcctggaaacttatttatgttgccttggtgagtcttctatcattttttaaaaatttagcttattgaactgtaaaatagcttttctagtatgagagatgttttgaatttaaaaaatgaaatgcagtttttcaaaaataaatttcctttggaaattcttgcatatcaatttagtaaggttttataaaattttacaatttgataaagtatc

SEQ ID NO: 197792 - DNA, 3705 bp, Homo sapiens
  Payload ID: 19005
  Gene Name: ubiquitin-like modifier activating enzyme 5
  Uniprot ID: Q9GZZ9
  ENST ID: ENST00000356232
  CDS Start-End: 1073-2287
atgcctgtagggtgcgtccactgactgcaggaaaagcaatcagggtgggagaaacttaggaaaccacccagggccaaaggaaggaaaactcaatgtacaaatttttttccgctggaggcaaaggctgacatccatacctgtactgggcaatggtcagcgtagcctcacgttcggccccaaagccagacaagtgctggtttaggtaggcctccagggacttgctgtcgaacttgtgctggggcagcacttcggccaaatcggactcgccagtagcacctggcttcatgatcacccccgcaggccacagcaacgcggcatccacaggtctcgagtgccgaagtccttcaggattggggcaacgtcccctctagagcatgggccgaggccggggtggggtctggctccagccaaccgcacacagcctacgcgccgttgctgagcaacgcttgcccgctgaatcccgaggttttagctctagtcaagtgccaaaagagcccaatgtgtgttcgggtttcaattctccagtcagcgtcagagttggaggcctcaattttaaagaaggcaaagccatggtcatcgttgcgggtaaggaacaacgcagaagcctcttccacccccaaatttaatgcaacagcaggcggaagacctgcagggtcccgttcagaaaaagggccgtcagactgtcgagcctaagaataaaaagaccctgtttctcttagatacccggttagcaaggcaacatcgctggcctcctgccctggacacttatcaccccggtgctgctgcggccgggtttagccggcccagcgaggaaggaagccgaaagagccaggtttttgatgagggggagcgatgtctgcgacgcaccggaagcggctccgaggaaggcctgtgggagtctcggagacgtgtctgtctgtgaggcgctgggtgcacgtccccagggctctgggctaggaaggcagcggcgaggtgcctccccacgtacccctcgcgggcccagccgagcaacgtggggcgaaggcggcggcgaaggcccgggctgggagcgttggcggccggagtcccagccatggcggagtctgtggagcgcctgcagcagcgggtccaggagctggagcgggaacttgcccaggagaggagtctgcaggtcccgaggagcggcgacggagggggcggccgggtccgcatcgagaagatgagctcagaggtggtggattcgaatccctacagccgcttgatggcattgaaacgaatgggaattgtaagcgactatgagaaaatccgtacctttgccgtagcaatagtaggtgttggtggagtaggtagtgtgactgctgaaatgctgacaagatgtggcattggtaagttgctactctttgattatgacaaggtggaactagccaatatgaatagacttttcttccaacctcatcaagcaggattaagtaaagttcaagcagcagaacatactctgaggaacattaatcctgatgttctttttgaagtacacaactataatataaccacagtggaaaactttcaacatttcatggatagaataagtaatggtgggttagaagaaggaaaacctgttgatctagttcttagctgtgtggacaattttgaagctcgaatgacaataaatacagcttgtaatgaacttggacaaacatggatggaatctggggtcagtgaaaatgcagtttcagggcatatacagcttataattcctggagaatctgcttgttttgcgtgtgctccaccacttgtagttgctgcaaatattgatgaaaagactctgaaacgagaaggtgtttgtgcagccagtcttcctaccactatgggtgtggttgctgggatcttagtacaaaacgtgttaaagtttctgttaaattttggtactgttagtttttaccttggatacaatgcaatgcaggatttttttcctactatgtccatgaagccaaatcctcagtgtgatgacagaaattgcaggaagcagcaggaggaatataagaaaaaggtagcagcactgcctaaacaagaggttatacaagaagaggaagagataatccatgaagataatgaatggggtattgagctggtatctgaggtttcagaagaggaactgaaaaatttttcaggtccagttccagacttacctgaaggaattacagtggcatacacaattccaaaaaagcaagaagattctgtcactgagttaacagtggaagattctggtgaaagcttggaagacctcatggccaaaatgaagaatatgtagataatggactgggatatattgtatttctcatgttaaagcctcttcccttgaaattaaaaaaaaattttaactgataaaacttagggcaacattaattaatgtatattcttacctgaattgttatactttttgaaaatcctgtgacttgcctgtttctccccgctccaacgaaatcattaactctcctaaaatgtgtttcattctagtaagaaaacctcaaaggatattgtaggatataaatcttacttgaaaacatagctgttgaaatgttttggccttttggagtgggggaaggacaaatctgatcctgtaatctttttctttccagtaatcccttgtgtctgttgcatgaggacatggacaataaagtagtatatgatcctcagatacagggagaaggacaaggcatacagcttattgattagagctggcaagcatctgctcattatgtttggaattgctttctataagaaaattgcccactactactaacttgatcaacaatgaattcaaaatagttaacctatgaaataacatcctctcaaatgtttgctgatgaagtacaagttgaaatgtagttattggaaaagtctgtaacctgtggatcatatatattcaaagtgagacaaaggcaaataaaaagcagctattttcatgaatagacaaagttgatttcaggaagtataaattatattctgcaccgaacaaggaacagaaattattgcatctgtggaacatatatctggagttactatactttactgaagagcaaggcataaatttagactaaaatccatccagattacactcattctttaggctactcctggatacttcatttaaatttgattttcgaggtagtgagatgtcggcaaggtttgtcctgtatattaggaataaaggaaaagttctaaactgcctctgcaatgacttgtagtcagtggaagagtatcactttcccctgatcatgaccactaaactgtaaattgatataaattagttttctctcgagttacacccaagtaatgaagacttaagagaaccttggttgaaataaatttccaatagtttggagactcataaataccatgcaggtgtaaccactgccaataggctgtttctatgcttatttcctattttgatttttactttgaagataggaatatctaaattatatctctagggagaaaatgttgtaaaaaattaaaagtacatccctgattgtaaaataaagttcaaaaaactgatttcagaaagtctcaactaccaaatgttttcaatatattagttttgagatgctaggattatactgtgattcttatgtttatagtaaagtctggaaagcagaaggatagtttttttagcctggaaacttatttatgttgccttggtgagtcttctatcattttttaaaaatt

SEQ ID NO: 197793 - DNA, 2058 bp, Homo sapiens
  Payload ID: 19005
  Gene Name: ubiquitin-like modifier activating enzyme 5
  ENST ID: ENST00000493720
  CDS Start-End: 593-1726
aagtgccaaaagagcccaatgtgtgttcgggtttcaattctccagtcagcgtcagagttggaggcctcaattttaaagaaggcaaagccatggtcatcgttgcgggtaaggaacaacgcagaagcctcttccacccccaaatttaatgcaacagcaggcggaagacctgcagggtcccgttcagaaaaagggccgtcagactgtcgagcctaagaataaaaagaccctgtttctcttagatacccggttagcaaggcaacatcgctggcctcctgccctggacacttatcaccccggtgctgctgcggccgggtttagccggcccagcgaggaaggaagccgaaagagccaggtttttgatgagggggagcgatgtctgcgacgcaccggaagcggctccgaggaaggcctgtgggagtctcggagacgtgtctgtctgtgaggcgctgggtgcacgtccccagggctctgggctaggaaggcagcggcgaggtgcctccccacgtacccctcgcgggcccagccgagcaacgtggggcgaaggcggcggcgaaggcccgggctgggagcgttggcggccggagtcccagccatggcggagtctgtggagcgcctgcagcagcgggtccaggagctggagcgggaacttgcccaggagaggagtctgcaggtcccgaggagcggcgacggagggggcggccgggtccgcatcgagaagatgagctcagaggtggtggattcgaatccctacagccgcttgatggcattgaaacgaatgggaattgtaagcgactatgagaaaatccgtacctttgccgtagcaatagtaggtgttggtggagtaggtagtgtgactgctgaaatgctgacaagatgtggcattggtaagttgctactctttgattatgacaaggtggaactagccaatatgaatagacttttcttccaacctcatcaagcaggattaagtaaagttcaagcagcagaacatactctgaggaacattaatcctgatgttctttttgaagtacacaactataatataaccacagtggaaaactttcaacatttcatggatagaataagtaatggtgggttagaagaaggaaaacctgttgatctagttcttagctgtgtggacaattttgaagctcgaatgacaataaatacagcttgtaatgaacttggacaaacatggatggaatctggggtcagtgaaaatgcagtttcagggcatatacagcttataattcctggagaatctgcttgttttgcgtgtgctccaccacttgtagttgctgcaaatattgatgaaaagactctgaaacgagaaggtgtttgtgcagccagtcttcctaccactatgggtgtggttgctgggatcttagtacaaaacgtgttaaagtttctgttaaattttggtactgttagtttttaccttggatacaatgcaatgcaggatttttttcctactatgtccatgaagccaaatcctcagtgtgatgacagaaattgcaggaagcagcaggaggaatataagaaaaaggtagcagcactgcctaaacaagaggttatacaagaagaggaagagataatccatgaagataatgaatggggtattgagctggtatctgaggtttcagaagaggaactgaaaaatttttcaggtccagttccagacttacctgaaggaattacagtggcatacacaattccaaaaaagtaatcccttgtgtctgttgcatgaggacatggacaataaagtagtatatgatcctcagatacagggagaaggacaaggcatacagcttattgattagagctggcaagcatctgctcattatgtttggaattgctttctataagaaaattgcccactactactaacttgatcaacaatgaattcaaaatagttaacctatgaaataacatcctctcaaatgtttgctgatgaagtacaagttgaaatgtagttattggaaaagtctgtaacctgtggatcatatatattcaaagtgagacaaaggcaaataaaaagcagctattttcatgaataga

SEQ ID NO: 197794 - DNA, 417 bp, Homo sapiens
  Payload ID: 19005
  Gene Name: ubiquitin-like modifier activating enzyme 5
  ENST ID: ENST00000489361
  CDS Start-End: 92-417
attttctgtgatgatgtatgtctatttgtattactaatacctaaaagactgtaagctttaaaacatatttttctttgttttaagccgcttgatggcattgaaacgaatgggaattgtaagcgactatgagaaaatccgtacctttgccgtagcaatagtaggtgttggtggagtaggtagtgtgactgctgaaatgctgacaagatgtggcattggtaagttgctactctttgattatgacaaggtggaactagccaatatgaatagacttttcttccaacctcatcaagcaggattaagtaaagttcaagcagcagaacatactctgaggaacattaatcctgatgttctttttgaagtacacaactataatataaccacagtggaaaactttcaacatttcatggatagaataag

SEQ ID NO: 197795 - DNA, 662 bp, Homo sapiens
  Payload ID: 19005
  Gene Name: ubiquitin-like modifier activating enzyme 5
  ENST ID: ENST00000468022
  CDS Start-End: 424-662
ggggagcgatgtctgcgacgcaccggaagcggctccgaggaaggcctgtgggagtctcggagacgtgtctgtctgtgaggcgctgggtgcacgtccccagggctctgggctaggaaggcagcggcgaggtgcctccccacgtacccctcgcgggcccagccgagcaacgagaggagtctgcaggtcccgaggagcggcgacggagggggcggccgggtccgcatcgagaagatgagctcagaggtggtggattcgaatccctacagtgagtcagccatatggtgctgctcctgtgcctgctgaggacgtgtgtccagtttcctatcacccttgcctcttaattagtccgcctcgctgtgtataagactgatagtaagaactttcagaagatgagatcaaatattaaacctgctaagccgcttgatggcattgaaacgaatgggaattgtaagcgactatgagaaaatccgtacctttgccgtagcaatagtaggtgttggtggagtaggtagtgtgactgctgaaatgctgacaagatgtggcattggtaagttgctactctttgattatgacaaggtggaactagccaatatgaatagacttttcttccaacctcatcaagcaggattaagtaaagttcaagcagcagaacatactctgag

SEQ ID NO: 197796 - DNA, 2997 bp, Homo sapiens
  Payload ID: 19005
  Gene Name: ubiquitin-like modifier activating enzyme 5
  Uniprot ID: Q9GZZ9
  ENST ID: ENST00000494238
  CDS Start-End: 695-1741
agtctcggagacgtgtctgtctgtgaggcgctgggtgcacgtccccagggctctgggctaggaaggcagcggcgaggtgcctccccacgtacccctcgcgggcccagccgagcaacgtggggcgaaggcggcggcgaaggcccgggctgggagcgttggcggccggagtcccagccatggcggagtctgtggagcgcctgcagcagcgggtccaggagctggagcgggaacttgcccaggagaggagtctgcaggtcccgaggagcggcgacggagggggcggccgggtccgcatcgagaagatgagctcagaggtggtggattcgaatccctacaggtaacctgcgtcgccggtcggaggcaggcgcgggggacgaggtcaggctccgtgaggtcagaagtgaggcgcttcccacgtcccgctcatggggacgcccgccacccttttcttggtctgcgaatcctgttcccaaatgggcaaggccacatcttagtactgatcggaagatattctttctcttttttaaaaacctccagtgagtcagccatatggtgctgctcctgtgcctgctgaggacgtgtgtccagtttcctatcacccttgcctcttaattagtccgcctcgctgtgtataagactgatagtaagaactttcagaagatgagatcaaatattaaacctgctaagccgcttgatggcattgaaacgaatgggaattgtaagcgactatgagaaaatccgtacctttgccgtagcaatagtaggtgttggtggagtaggtagtgtgactgctgaaatgctgacaagatgtggcattggtaagttgctactctttgattatgacaaggtggaactagccaatatgaatagacttttcttccaacctcatcaagcaggattaagtaaagttcaagcagcagaacatactctgaggaacattaatcctgatgttctttttgaagtacacaactataatataaccacagtggaaaactttcaacatttcatggatagaataagtaatggtgggttagaagaaggaaaacctgttgatctagttcttagctgtgtggacaattttgaagctcgaatgacaataaatacagcttgtaatgaacttggacaaacatggatggaatctggggtcagtgaaaatgcagtttcagggcatatacagcttataattcctggagaatctgcttgttttgcgtgtgctccaccacttgtagttgctgcaaatattgatgaaaagactctgaaacgagaaggtgtttgtgcagccagtcttcctaccactatgggtgtggttgctgggatcttagtacaaaacgtgttaaagtttctgttaaattttggtactgttagtttttaccttggatacaatgcaatgcaggatttttttcctactatgtccatgaagccaaatcctcagtgtgatgacagaaattgcaggaagcagcaggaggaatataagaaaaaggtagcagcactgcctaaacaagaggttatacaagaagaggaagagataatccatgaagataatgaatggggtattgagctggtatctgaggtttcagaagaggaactgaaaaatttttcaggtccagttccagacttacctgaaggaattacagtggcatacacaattccaaaaaagcaagaagattctgtcactgagttaacagtggaagattctggtgaaagcttggaagacctcatggccaaaatgaagaatatgtagataatggactgggatatattgtatttctcatgttaaagcctcttcccttgaaattaaaaaaaaattttaactgataaaacttagggcaacattaattaatgtatattcttacctgaattgttatactttttgaaaatcctgtgacttgcctgtttctccccgctccaacgaaatcattaactctcctaaaatgtgtttcattctagtaagaaaacctcaaaggatattgtaggatataaatcttacttgaaaacatagctgttgaaatgttttggccttttggagtgggggaaggacaaatctgatcctgtaatctttttctttccagtaatcccttgtgtctgttgcatgaggacatggacaataaagtagtatatgatcctcagatacagggagaaggacaaggcatacagcttattgattagagctggcaagcatctgctcattatgtttggaattgctttctataagaaaattgcccactactactaacttgatcaacaatgaattcaaaatagttaacctatgaaataacatcctctcaaatgtttgctgatgaagtacaagttgaaatgtagttattggaaaagtctgtaacctgtggatcatatatattcaaagtgagacaaaggcaaataaaaagcagctattttcatgaatagacaaagttgatttcaggaagtataaattatattctgcaccgaacaaggaacagaaattattgcatctgtggaacatatatctggagttactatactttactgaagagcaaggcataaatttagactaaaatccatccagattacactcattctttaggctactcctggatacttcatttaaatttgattttcgaggtagtgagatgtcggcaaggtttgtcctgtatattaggaataaaggaaaagttctaaactgcctctgcaatgacttgtagtcagtggaagagtatcactttcccctgatcatgaccactaaactgtaaattgatataaattagttttctctcgagttacacccaagtaatgaagacttaagagaaccttggttgaaataaatttccaatagtttggagactcataaataccatgcaggtgtaaccactgccaataggctgtttctatgcttatttcctattttgatttttactttgaagataggaatatctaaattatatctctagggagaaaatgttgtaaaaaattaaaagtacatccctgattgtaaaataaagttcaaaaaactgatttcagaaa

SEQ ID NO: 197797 - DNA, 657 bp, Homo sapiens
  Payload ID: 19005
  Gene Name: ubiquitin-like modifier activating enzyme 5
  ENST ID: ENST00000464068
  CDS Start-End: 326-657
aggtaacctgcgtcgccggtcggaggcaggcgcgggggacgaggtcaggctccgtgaggtcagaagtgaggcgcttcccacgtcccgctcatggggacgcccgccacccttttcttggtctgcgaatcctgttcccaaatgggcaaggccacatcttagtactgatcggaagatattctttctcttttttaaaaacctccagtgagtcagccatatggtgctgctcctgtgcctgctgaggacgtgtgtccagtttcctatcacccttgcctcttaattagtccgcctcgctgtgtataagactgatagtaagaactttcagaagatgagatcaaatattaaacctgctaagttgctactctttgattatgacaaggtggaactagccaatatgaatagacttttcttccaacctcatcaagcaggattaagtaaagttcaagcagcagaacatactctgaggaacattaatcctgatgttctttttgaagtacacaactataatataaccacagtggaaaactttcaacatttcatggatagaataagtaatggtgggttagaagaaggaaaacctgttgatctagttcttagctgtgtggacaattttgaagctcgaatgacaataaatacagcttgtaatgaacttggacaaac

SEQ ID NO: 197798 - DNA, 1513 bp, Homo sapiens
  Payload ID: 19005
  Gene Name: ubiquitin-like modifier activating enzyme 5
  ENST ID: ENST00000473651
  CDS Start-End: 179-1222
ggagtctcggagacgtgtctgtctgtgaggcgctgggtgcacgtccccagggctctgggctaggaaggcagcggcgaggtgcctccccacgtacccctcgcgggcccagccgagcaacgtggggcgaaggcggcggcgaaggcccgggctgggagcgttggcggccggagtcccagccatggcggagtctgtggagcgcctgcagcagcgggtccaggagctggagcgggaacttgcccaggagaggagtctgcaggtcccgaggagcggcgacggagggggcggccgggtccgcatcgagaagatgagctcagaggtggtggattcgaatccctacagccgcttgatggcattgaaacgaatgggaattgtaagcgactatgagaaaatccgtacctttgccgtagcaatagtaggtgttggtggagtaggtagtgtgactgctgaaatgctgacaagatgtggcattggtaagttgctactctttgattatgacaaggtggaactagccaatatgaatagacttttcttccaacctcatcaagcaggattaagtaaagttcaagcagcagaacatactctgaggaacattaatcctgatgttctttttgaagtacacaactataatataaccacagtggaaaactttcaacatttcatggatagaataagtaatggtgggttagaagaaggaaaacctgttgatctagttcttagctgtgtggacaattttgaagctcgaatgacaataaatacagcttgtaatgaacttggacaaacatggatggaatctggggtcagtgaaaatgcagtttcagggcatatacagcttataattcctggagaatctgcttgttttgcgtgtgctccaccacttgtagttgctgcaaatattgatgaaaagactctgaaacgagaaggtgtttgtgcagccagtcttcctaccactatgggtgtggttgctgggatcttagtacaaaacgtgttaaagtttctgttaaattttggtactgttagtttttaccttggatacaatgcaatgcaggatttttttcctactatgtccatgaagccaaatcctcagtgtgatgacagaaattgcaggaagcagcaggaggaatataagaaaaaggtagcagcactgcctaaacaagaggttatacaagaagaggaagagataatccatgaagataatgaatgggcaagaagattctgtcactgagttaacagtggaagattctggtgaaagcttggaagacctcatggccaaaatgaagaatatgtagataatggactgggatatattgtatttctcatgttaaagcctcttcccttgaaattaaaaaaaaattttaactgataaaacttagggcaacattaattaatgtatattcttacctgaattgttatactttttgaaaatcctgtgacttgcctgtttctccccgctccaacgaaatcattaactctcctaaaatgtgtttcattctagtaagaaaacctcaaaggatat

SEQ ID NO: 197799 - DNA, 576 bp, Homo sapiens
  Payload ID: 19005
  Gene Name: ubiquitin-like modifier activating enzyme 5
  ENST ID: ENST00000505777
  CDS Start-End: 143-337
gtgcacgtccccagggctctgggctaggaaggcagcggcgaggtgcctccccacgtacccctcgcgggcccagccgagcaacgtggggcgaaggcggcggcgaaggcccgggctgggagcgttggcggccggagtcccagccatggcggagtctgtggagcgcctgcagcagcgggtccaggagctggagcgggaacttgcccaggagaggagtctgcaggtcccgaggagcggcgacggagggggcggccgggtccgcatcgagaagatgagctcagaggtggtggattcgaatccctacagttgctactctttgattatgacaaggtggaactagccaatatgaatagacttttcttccaacctcatcaagcaggattaagtaaagttcaagcagcagaacatactctgaggaacattaatcctgatgttctttttgaagtacacaactataatataaccacagtggaaaactttcaacatttcatggatagaataagtaatggtgggttagaagaaggaaaacctgttgatctagttcttagctgtgtggacaattttgaagctcgaatgaca

SEQ ID NO: 197800 - DNA, 9564 bp, Homo sapiens
  Payload ID: 19006
  Gene Name: ubiquitin-like modifier activating enzyme 6
  Uniprot ID: A0AVT1
  ENST ID: ENST00000322244
  CDS Start-End: 61-3219
ccccccacggtcccgccccttcctaccttccagtagccggcggcggtgtctcaggcggcaatggaaggatccgagcctgtggccgcccatcagggggaagaggcgtcctgttcttcctgggggactggcagcacaaataaaaatttgcccattatgtcaacagcatctgtggaaatcgatgatgcattgtatagtcgacagaggtacgttcttggagacacagcaatgcagaagatggccaagtcccatgttttcttaagtgggatgggtggtcttggtttggaaattgcaaagaatcttgttcttgcagggattaaggcagttacaattcatgatacagaaaaatgccaagcatgggatctaggaaccaacttctttctcagtgaagatgatgttgttaataagagaaacagggctgaagctgtacttaaacatattgcagaactaaatccatacgttcatgtcacatcatcttctgttcctttcaatgagaccacagatctctcctttttagataaataccagtgtgtagtattgactgagatgaaacttccattgcagaagaagatcaatgacttttgccgttctcagtgccctccaattaagtttatcagtgcagatgtacatggaatttggtcaaggttattttgtgatttcggtgatgaatttgaagttttagatacaacaggagaagaaccaaaagaaattttcatttcaaacataacgcaagcaaatcctggcattgttacttgccttgaaaatcatcctcacaaactggagacaggacaattcctaacatttcgagaaattaatggaatgacaggtttaaatggatctatacaacaaataacggtgatatcgccattttcttttagtattggtgacaccacagaactggaaccatatttacatggaggcatagctgtccaagttaagactcctaaaacagttttttttgaatcactggagaggcagttaaaacatccaaagtgccttattgtggattttagcaaccctgaggcacctttagagattcacacagctatgcttgccttggaccagtttcaggagaaatacagtcgcaagccaaatgttggatgccaacaagattcagaagaactgttgaaactagcaacatctataagtgaaaccttggaagagaagcctgatgtaaatgctgacattgtgcattggctctcttggactgcccaaggctttttatctccacttgctgcagcagtaggaggtgttgccagccaagaagtattgaaagctgtaacaggaaaattttctcctttgtgccagtggttatatcttgaagcagcagatattgttgaatcactaggcaaacctgaatgtgaagaatttctcccacgaggagatagatatgatgccttaagagcttgcattggagacactttgtgtcagaaactgcaaaatttaaacatcttcttagtagggtgtggagccataggctgtgaaatgttgaaaaattttgctttacttggtgttggcacaagcaaagagaaaggaatgattacagttacagatcctgacttgatagagaaatccaacttaaatagacagttcctatttcgtcctcatcacatacagaaacctaaaagctacactgctgctgatgctactctgaaaataaattctcaaataaagatagatgcacacctgaacaaagtatgtccaaccactgagaccatttacaatgatgagttctatactaaacaagatgtaattattacagcattagataatgtggaagccaggagatacgtagacagtcgttgcttagcaaatctaaggcctcttttagattctggaacaatgggcactaagggacacactgaagttattgtaccgcatttgactgagtcttacaatagtcatcgggatcccccagaagaggaaataccattttgtactctaaaatcctttccagctgctattgaacataccatacagtgggcaagagataagtttgaaagttccttttcccacaaaccttcattgtttaacaaattttggcaaacctattcatctgcagaagaagtcttacagaagatacagagtggacacagtttagaaggctgttttcaagttataaagttacttagcagaagacctagaaattggtcccagtgtgtagaattagcaagattaaagtttgaaaaatattttaaccataaggctcttcagcttcttcactgtttccctctggacatacgattaaaagatggcagtttattttggcagtcaccaaagaggccaccctctccaataaaatttgatttaaatgagcctttgcacctcagtttccttcagaatgctgcaaaactatatgctacagtatattgtattccatttgcagaagaggacttatcagcagatgccctcttgaatattctttcagaagtaaagattcaggaattcaagccttccaataaggttgttcaaacagatgaaactgcaaggaaaccagaccatgttcctattagcagtgaagatgagaggaatgcaattttccaactagaaaaggctattttatctaatgaagccaccaaaagtgaccttcagatggcagtgctttcatttgaaaaagatgatgatcataatggacacatagatttcatcacagctgcatcaaatcttcgtgccaaaatgtacagcattgaaccagctgaccgtttcaaaacaaagcgcatagctggtaaaattatacctgctatagcaacaaccactgctacagtttctggcttggttgccttggagatgatcaaagtaactggtggctatccatttgaagcttacaaaaattgttttcttaacttagccattccaattgtagtatttacagagacaactgaagtaaggaaaactaaaatcagaaatggaatatcatttacaatttgggatcgatggaccgtacatggaaaagaagatttcaccctcttggatttcataaatgcagtcaaagagaagtatggaattgagccaacaatggtggtacagggagtcaaaatgctttatgttcctgtaatgcctggtcatgcaaaaagattgaagttaacaatgcataaacttgtaaaacctactactgaaaagaaatatgtggatcttactgtgtcatttgctccagacattgatggagatgaagatttgccgggacctccagtaagatactacttcagtcatgacactgattaatacaagttgtcttaacgttactccaggaccacttgattttggaaagagtgcacttaattcagaagctaaagaaaatcagttcataatactatggatttctctttcattaagccttaattttaagggaaacatcagtaagaaactgcactgaagaattataaaacattttggggcatagcatacacttgtctaacggttcacacgtggctatgatcacaagcaactttgaactggaatgctatttacaaaagttttgtgtattaatctgtgtattaatctctctggataaaaagaaggaaaaaatatgtatgaccagaacagatatggatgaagaaattgaaagcaacgaatgcaactattcaaaaagtttaattttatgaatttcttttttgtttagtcttgaagactgattttctatgcaaatagtgtttggcatcctgcacctctgatatgatttggctttgagaatttaataccactgggaagaagtatggtagtggtggatgaagggtggatattttaaattgtgcagttacagtttactgtcctattacctctgctcgtttaaccagtttgttatatcactgtgtccccaaaatcaggatttttgttgatagcatcagtgttgtaggagcaataggtcagatgagacatattaacttagactaaacgtgaacagtattatatggactctcacaacgctcttagagaatccgtgaatgtgaacagacaaatgtggctaaccatttgattcttcagtatgccttctaatgtggctattttatttatgtgagactctaaacctgattgtcctaatatataaaactaaaagattttgtaaagggagtgtctttagaaatagatgaaatgtagaatgttaaaaattattgctagggtagtcttttttttttccagaaacctaattagggtattaaattttgtgttttttttgttttttttttttaaacagaagcatgttatttcattcccattcccagaaagggagttaatgaagataaaaatttattttttaaggtctttattgagagaaactttgttttctgatatgaactattgcagatgtttttataaatactttcattaaaatgatgtaaacagtagtacccaacactgtaaactcagtgaaaatagtaaatgattcttttattactaagactgtcatgcattctgaagcagttggcttttttttaaccataggaagtaatttccctctagctcctttccttctactctcctgctcagaccattagtaggtactttgttaaataaaaaactagattaacatcaatattactccaatttggtatcttttacactatgtattatacctactttctttttatttcatttacaaatagtttaaattactttatcaaccagctgtattgtttccctcttgtaaaagtaccatcaagtggggaaaatgtatgtggaagtggagagtgaatttgtatgactaaaggataatctgtacatggggaagtgggcaaaagtggataggatgaatttaaagaaaatgactacctttggaaaaaagaaattaaattttgttcacatatcctaccctttcccattgtgcatatcccaagtgtcatatttaaaactaaggttacttaaaacagaatccaggaatatcaaggctctgtggcttggaattttagaggataggactaataaaaggacttttgcaaagaaggcttttttccacgttcactttgttttgtgttctttgaaagtaactgatacttttcgggtagttaattcagcagtccataaatatgatccagtaacttgcttatattttattgaagtctcgacagctcttcagaagtaaatttagaacgatgctgtcagttcatatttatagatattagtgttttagcagataaaacaaaatcaacaaaaattaagttcattttgtgattaaacctgcaaccatttttccattactttttttctatagttaatggttattgccatgatttcttctgtttggttctactaagctagaaagccagggtgaagttaatgataattcccattattttatttctgtaccatgagattgctgttgatgactgaaataccaggtgcaaaaattaatgatttgatttttgtacagtttcaatgagtattttttacttattaaaaataaattaagaaatgtaagaatatctttgtaaatcatgtttcataagttgactccagagattctgattttgctgtttattttgtgagtaatgttgctttggtgtttcctgattttcaagtttgcaatcatggagatacagcagttattaggtgtggaaggacattacctcaaatgtcctcagatggctccaggaaattcttttaaaacagttggagagaaatagtcgtgaccatgtaaaacctagaggatctggtaaatcccatactactggttagggatttgtaaagtccatttctttttagagttcaaagcagttctgttacttgtccataagttcctcataaattgtcccaaaggtaggacatggaaataaatgtatatctttattttttaatctactatgtcacactctggtgatattcatggaacattaaaaaagcaactatgtttattttataattagtaaaatgaagatagaaaattgttcttttgaaatttttagggaaaaaaaaaatctcgtgacctaaatctttccactataatgaatattcattgtgattgcaaatatctaattttatataatcactgtgtatggatttagcgattttacttttcatagattcaaaaacatataatctgaatgctttctctgaaaaaaaaaaaatcagagttgagctcttgaggatcagagttaagtatccattgataatatgtgttcattttgctctatgtcataactttgtttttttattgagaaatatatatttttcaaaaacacatatatattcaaaaatacataaaatataaatatgcagttcaaggaataattttaaagcaactatataactagcactcagcttagtagaatatattgacagcagttcagaaattacacatgtagttccttcccagtcacaaccagctccctgccacgtaccctttggtaattaccactatcctaccttgtatgataattgtctctttgtttttatagtgttaccacctatgtgtgtaaacttaaacaatacagtttgcttgtttttgagttttatttaaaatcatacattcttttgtagctgcatttgttcaagatgggattgattcatgttggttgtagctgtactttattcttcattatgtctgtgtaatttacttttctgttaatatgccacaatttatttactgtagacaattgggatgtttttagtttcaggcaattacagtttcacaatgaacatcattttatgtaactcctagtacaaagagtatatatttaggagtagaattttttggtcatagggtattcatatcttaaattttattagatgattacaaatttttttctaagcattagtatgttggttggttttgtgttgctataaaggaatatccaagactcggtaattcataaagaaaaaaggtttatttggctcatggttcagcaggttgtacaaacattgcaccagcatccctgcaatcatggcagaaggcaaaggaggaactggcgtatcacatggctagaggagcaagagagaaatagaggaagtcccagatcatttttaagaatcagatctcacattaactcatggagcaagaactcgtcatctcaacgagggcaccaagccatttatgagggatccagatatccatccccataacccgaacacctcccaccagccctcacctccaacactggggatcacatttcaacatgatatttgcaggggacaaatatccaaaccatatttctccatatcttggtcagtgctggtgttaacagtttttgtttttaattttgccaatctggtggatgtgcaattgtatctcattgaagtgtcactctgcatttctctattacctgtgaagttgagtattttttcataagtttattggccaatttgactttctgtttttgtaaagtatcttgtcaggactgccacacgtttttgttgtgttgctaatctttttcctcattgattcataaaggatctttataaatcttattctttgttggctgtatagttgccaatatcttctcccaatttgtggcttgcctttccctcccttatgatgttctttgataaaaacaatttattaatggttaagtactaggaagtatgagtgttttaaaattagagcgtgagttgttttaaaaaaccattccctaccctggagtcatgaagatagtcttatatatcgtcttcttaaagctttagttttgcctttcatatttaaatttttttcatgaggaattaatttggtgtatgctaggagatgcctcactaccgtttattgaaaaatctgggttttattcctcctttctatagtgccaccaaagtcatgtattatacccgtatgtgaatacagatttcatcaacatctgttgatgaaaagagtcaaactctgtaaatattttcagagattattctgagccaaatatgagtgaccatggcctgtgacccagccctcaggaggtccagagaacatgtgccccaggtggtcagagtacatcttggttttatatagaaggcatgagacatcaaatacgtttaagaaatgcattggtttggttcagaaaggcaggacaactcaaagcgggggcttccagggtataggttaatttaaaacattttctggttgacaattggtcgagtttatctgaagacctgggatcaataggaaggaaatattcaggttaaataagagattgtggagaacaagttttattgtgcagaggaaactctcagcagacttcaaagagagcaggttgtaaagtgtttcttattggacctaaaaggatgcctgggtcttagttgattatctcctggatttggaaaggaaggaaggacaaaaaaaaaatgggtaaaggggaaaggggattctttatagaatgtagatttttcccacaagggatggctttgcagggccatttcaagatatggcagagaaacatatttcggggtaaaatattttgattttctttcttgttatgccagagtcagattggaaagttaagtcacaatatacagggttaaataaaacccatctgatgagaatttatggtttgtagagcatgactccccagactccttagacaggaatttgggcaagataacaaaatatcagagcttagtccttacatctctttctaaacattttttcccttttttctatccctgtgctagtataccatcatcatcatcattgtagctgatatattcttgatatctggccaaacaaatcctcccaacttattgttcttttagagtatcttggttattctcagccccttgtattttcagttctcatatttctaattgaaagcatgtaaatttgtcactcctgcagtttctaattgtcttgctgaaattttcaatttcttatctgcttcaaaatgaaaagcataattattttctagtctgtctaataattccagaatcaaaacccgcctgtgggtctgtttttattttgtttgttctagtcttcattcttactgtcttgtctccttgtgtgcctggttacctttaattatttaccaatattgtttgaaaaaactagaaataacttgatgctcagaatgatatttttatcctccacagagttttttgcttctggcaggtacctgcattagtaatttaggattattttgatccagtttcagatactgaaattttccaggtcacctaggtgactgaaagctgagccacagactgtggtaatgctcttctgttcatccttatttctagggttcaaccattcagggtttcaaagcatggtttggagttaccaggcccttacctcttcactgaccctggactctttttgaatctttagccccttagctctatctactcaacttcccagtggccttttgcaatctataaatactcctaacacagtggtcccaaatgaatggttcatttttctgaatttctatcttttctcagatattattggcatggtaattattcaccaacttatcagctccctgctgccttcctacatctttgaaaagtatattttatccagcttttctaaatgttttcaagtgagaatgttaatccaaattacttagcccacattatttcctgttgattatgtgtaaaatacagttggtttatttgtattgtttttgtacctggaaacaataaactctgtagtgattctctaaa

SEQ ID NO: 197801 - DNA, 1664 bp, Homo sapiens
  Payload ID: 19006
  Gene Name: ubiquitin-like modifier activating enzyme 6
  Uniprot ID: A0AVT1
  ENST ID: ENST00000420827
  CDS Start-End: 35-1204
cttccagtagccggcggcggtgtctcaggcggcaatggaaggatccgagcctgtggccgcccatcagggggaagaggcgtcctgttcttcctgggggactggcagcacaaataaaaatttgcccattatgtcaacagcatctgtggaaatcgatgatgcattgtatagtcgacagaggtacgttcttggagacacagcaatgcagaagatggccaagtcccatgttttcttaagtgggatgggtggtcttggtttggaaattgcaaagaatcttgttcttgcagggattaaggcagttacaattcatgatacagaaaaatgccaagcatgggatctaggaaccaacttctttctcagtgaagatgatgttgttaataagagaaacagggctgaagctgtacttaaacatattgcagaactaaatccatacgttcatgtcacatcatcttctgttcctttcaatgagaccacagatctctcctttttagataaataccagtgtgtagtattgactgagatgaaacttccattgcagaagaagatcaatgacttttgccgttctcagtgccctccaattaagtttatcagtgcagatgtacatggaatttggtcaaggttattttgtgatttcggtgatgaatttgaagttttagatacaacaggagaagaaccaaaagaaattttcatttcaaacataacgcaagcaaatcctggcattgttacttgccttgaaaatcatcctcacaaactggagacaggacaattcctaacatttcgagaaattaatggaatgacaggtttaaatggatctatacaacaaataacggtgatatcgccattttcttttagtattggtgacaccacagaactggaaccatatttacatggaggcatagctgtccaagttaagactcctaaaacagttttttttgaatcactggagaggcagttaaaacatccaaagtgccttattgtggattttagcaaccctgaggcacctttagagattcacacagctatgcttgccttggaccagtttcaggagaaatacagtcgcaagccaaatgttggatgccaacaagattcagaagaactgttgaaactagcaacatctataagtgaaaccttggaagagaaggtgactattgaaatttatggctgtccgaatatttgtttgttaatacataagtgttctgtatattagtattctcttatccttcacatccagctttgctactctgtggcattagacaacttttttcagtttgttctgttttaatttataaatctataaaatagagttaacctaccttcatagggttattgtgaacattaaataatttaattttgtaaagtacttagaaatgccatgtgacatatagtaattaatatttgctgctatttttttaactgttactattattctttattattctgttatgatttacttgatttgttaacttaaacttatatatgttagctttcttatataagtcacctgttttatatattatacattcatatctctttatcacatttcgtacatcagatttagatttaaacatttcacctagaaaatggtttttttgtgtgtgttatgatgccagtgcctgcttgtcaacagttttatttgagcagctataaacatggtgatgtttgtgcaa

SEQ ID NO: 197802 - DNA, 812 bp, Homo sapiens
  Payload ID: 19006
  Gene Name: ubiquitin-like modifier activating enzyme 6
  ENST ID: ENST00000505673
  CDS Start-End: 1-812
ggtgtggagccataggctgtgaaatgttgaaaaattttgctttacttggtgttggcacaagcaaagagaaaggaatgattacagttacagatcctgacttgatagagaaatccaacttaaatagacagttcctatttcgtcctcatcacatacagaaacctaaaagctacactgctgctgatgctactctgaaaataaattctcaaataaagatagatgcacacctgaacaaagtatgtccaaccactgagaccatttacaatgatgagttctatactaaacaagatgtaattattacagcattagataatgtggaagccaggagatacgtagacagtcgttgcttagcaaatctaaggcctcttttagattctggaacaatgggcactaagggacacactgaagttattgtaccgcatttgactgagtcttacaatagtcatcgggatcccccagaagaggaaataccattttgtactctaaaatcctttccagctgctattgaacataccatacagtgggcaagagataagtttgaaagttccttttcccacaaaccttcattgtttaacaaattttggcaaacctattcatctgcagaagaagtcttacaggctcttcagcttcttcactgtttccctctggacatacgattaaaagatggcagtttattttggcagtcaccaaagaggccaccctctccaataaaatttgatttaaatgagcctttgcacctcagtttccttcagaatgctgcaaaactatatgctacagtatattgtattccatttgcagaagaggtaagatattct

SEQ ID NO: 197803 - DNA, 623 bp, Homo sapiens
  Payload ID: 19006
  Gene Name: ubiquitin-like modifier activating enzyme 6
  ENST ID: ENST00000514261
  CDS Start-End: 1-267
aaagatgatgatcataatggacacatagatttcatcacagctgcatcaaatcttcgtgccaaaatgtacagcattgaaccagctgaccgtttcaaaacaaagcgcatagctggtaaaattatacctgctatagcaacaaccactgctacagtttctggcttgaaatggaatatcatttacaatttgggatcgatggaccgtacatggaaaagaagatttcaccctcttggatttcataaatgcagtcaaagagaagtatggaattgagccaacaatggtggtacagggagtcaaaatgctttatgttcctgtaatgcctggtcatgcaaaaagattgaagttaacaatgcataaacttgtaaaacctactactgaaaagaaatatgtggatcttactgtgtcatttgctccagacattgatggagatgaagatttgccgggacctccagtaagatactacttcagtcatgacactgattaatacaagttgtcttaacgttactccaggaccacttgattttggaaagagtgcacttaattcagaagctaaagaaaatcagttcataatactatggatttctctttcattaagccttaattttaagggaaacatcagtaagaaa

SEQ ID NO: 197804 - DNA, 3299 bp, Homo sapiens
  Payload ID: 19007
  Gene Name: ubiquitin-like modifier activating enzyme 7
  Uniprot ID: P41226
  ENST ID: ENST00000333486
  CDS Start-End: 160-3198
ccaggaagagagctgtgaccagcagcgtcccttattcgcttggccttggttcctgtttgcactggctacagcagggcactggcccctactgtcaccgccacctacacaaagaccctatctctgagcgctgcagcctactgttcagccccaggtttgaggatggatgccctggacgcttcgaagctactggatgaggagctgtattcaagacagctgtatgtgctgggctcacctgccatgcagaggattcagggagccagggtcctggtgtcaggcctgcagggcctgggggccgaggtggccaagaacttggttctgatgggtgtgggcagcctcactctgcatgatccccaccccacctgctggtccgacctggctgcccagtttctcctctcagagcaggacttggaaaggagcagagccgaggcctctcaagagctcttggctcagctcaacagagctgtccaggtcgtcgtgcacacgggtgacatcactgaggacctgctgttggacttccaggtggtggtgctgactgctgcaaagctggaggagcagctgaaggtgggcaccttgtgtcataagcatggagtttgctttctggcggctgacacccggggcctcgtggggcagttgttctgtgactttggtgaggacttcactgtgcaggaccccacagaggcagaacccctgacagctgccatccagcacatctcccagggctcccctggcattctcactctgaggaaaggggccaatacccactacttccgtgatggagacttggtgactttctcgggaattgagggaatggttgagctcaacgactgtgatccccggtctatccacgtgcgggaggatgggtccctggagattggagacacaacaactttctctcggtacttgcgtggtggggctatcactgaagtcaagagacccaagactgtgagacataagtccctggacacagccctgctccagccccatgtggtggcccagagctcccaggaagttcaccatgcccactgcctgcatcaggccttctgtgcactgcacaagttccagcacctccatggccggccaccccagccctgggatcctgttgatgcagagactgtggtgggcctggcccgggacctggaaccactgaagcggacagaggaagagccactggaagagccactggatgaggccctagtgcggacagtcgccctaagcagtgcaggtgtcttgagccctatggtggccatgctgggtgcagtagctgcccaggaagtgctgaaggcaatctccaggaagttcatgcctctggaccagtggctttactttgatgccctcgattgtcttccggaagatggggagctccttcccagtcctgaggactgtgccctgagaggcagccgctatgatgggcaaattgcagtgtttggggctggttttcaggagaaactgagacgccagcactacctcctggtgggcgctggtgccattggttgtgagctgctcaaagtctttgccctagtgggactgggggccgggaacagcgggggcttgactgttgttgacatggaccacatagagcgctccaatctcagccgtcagttcctcttcaggtcccaggacgttggtagacccaaggcagaggtggctgcagcagctgcccggggcctgaacccagacttacaggtgatcccgctcacctacccactggatcccaccacagagcacatctatggggataactttttctcccgtgtggatggtgtggctgctgccctggacagtttccaggcccggcgctatgtggctgctcgttgcacccactatctgaagccactgctggaggcaggcacatcgggcacctggggcagtgctacagtattcatgccacatgtgactgaggcctacagagcccctgcctcagctgcagcttctgaggatgccccctaccctgtctgtaccgtgcggtacttccctagcacagccgagcacaccctgcagtgggcccggcatgagtttgaagaactcttccgactgtctgcagagaccatcaaccaccaccaacaggcacacacttccctggcagacatggatgagccacagacactcaccttactgaagccagtgcttggggtcctgagagtgcgtccacagaactggcaagactgtgtggcgtgggctcttggccactggaaactctgctttcattatggcatcaaacagctgctgaggcacttcccacctaataaagtgcttgaggatggaactcccttctggtcaggtcccaaacagtgtccccagcccttggagtttgacaccaaccaagacacacacctcctctacgtactggcagctgccaacctgtatgcccagatgcatgggctgcctggctcacaggactggactgcactcagggagctgctgaagctgctgccacagcctgacccccaacagatggcccccatctttgctagtaatctagagctggcttcggcttctgctgagtttggccctgagcagcagaaggaactgaacaaagccctggaagtctggagtgtgggccctcccctgaagcctctgatgtttgagaaggatgatgacagcaacttccatgtggactttgtggtagcggcagctagcctgagatgtcagaactacgggattccaccggtcaaccgtgcccagagcaagcgaattgtgggccagattatcccagccattgccaccactacagcagctgtggcaggcctgttgggcctggagctgtataaggtggtgagtgggccacggcctcgtagtgcctttcgccacagctacctacatctggctgaaaactacctcatccgctatatgccttttgccccagccatccagacgttccatcacctgaagtggacctcttgggaccgtctgaaggtaccagctgggcagcctgagaggaccctggagtcgctgctggctcatcttcaggagcagcacgggttgagggtgaggatcctgctgcacggctcagccctgctctatgcggccggatggtcacctgaaaagcaggcccagcacctgcccctcagggtgacagaactggttcagcagctgacaggccaggcacctgctcctgggcagcgggtgttggtgctagagctgagctgtgagggtgacgacgaggacactgccttcccacctctgcactatgagctgtgacaaggcagccaccctgtcacctagctcaatggagccccggatcccaagccctgcattgtaagcccacagtaggcactcaataaatgcttgttaaaggaagg

SEQ ID NO: 197805 - DNA, 3965 bp, Homo sapiens
  Payload ID: 19008
  Gene Name: ubiquitin-like with PHD and ring finger domains 1
  ENST ID: ENST00000620565
  CDS Start-End: 45-2618
gcgcccgcccccggcacggcctcctgcggccccgcaactcccaaatgccgagttttcgcgggaaaaaaatcagagcagctggcagcgcggcgggcagcgtttgccgagcgggcgctccgggtcgcacgcaagtccgcgcggggtccgggccacgcacgcggtttcatcgccatccccagccgggccacgcgcgcaggcagacaagctgttcgcggcgaccggagagcgccgacaccatgtggatccaggttcggaccatggacgggaggcagacccacacggtggactcgctgtccaggctgaccaaggtggaggagctgaggcggaagatccaggagctgttccacgtggagccaggcctgcagaggctgttctacaggggcaaacagatggaggacggccataccctcttcgactacgaggtccgcctgaatgacaccatccagctcctggtccgccagagcctcgtgctcccccacagcaccaaggagcgggactccgagctctccgacaccgactccggctgctgcctgggccagagtgagtcagacaagtcctccacccacggtgaggcggccgccgagactgacagcaggccagccgatgaggacatgtgggatgagacggaattggggctgtacaaggtcaatgagtacgtcgatgctcgggacacgaacatgggggcgtggtttgaggcgcaggtggtcagggtgacgcggaaggccccctcccgggacgagccctgcagctccacgtccaggccggcgctggaggaggacgtcatttaccacgtgaaatacgacgactacccggagaacggcgtggtccagatgaactccagggacgtccgagcgcgcgcccgcaccatcatcaagtggcaggacctggaggtgggccaggtggtcatgctcaactacaaccccgacaaccccaaggagcggggcttctggtacgacgcggagatctccaggaagcgcgagaccaggacggcgcgggaactctacgccaacgtggtgctgggggatgattctctgaacgactgtcggatcatcttcgtggacgaagtcttcaagattgagcggccgggtgaagggagccccatggttgacaaccccatgagacggaagagcgggccgtcctgcaagcactgcaaggacgacgtgaacagactctgccgggtctgcgcctgccacctgtgcgggggccggcaggaccccgacaagcagctcatgtgcgatgagtgcgacatggccttccacatctactgcctggacccgcccctcagcagtgttcccagcgaggacgagtggtactgccctgagtgccggaatgatgccagcgaggtggtactggcgggagagcggctgagagagagcaagaagaaggcgaagatggcctcggccacatcgtcctcacagcgggactggggcaagggcatggcctgtgtgggccgcaccaaggaatgtaccatcgtcccgtccaaccactacggacccatcccggggatccccgtgggcaccatgtggcggttccgagtccaggtcagcgagtcgggtgtccatcggccccacgtggctggcatacacggccggagcaacgacggagcgtactccctagtcctggcggggggctatgaggatgatgtggaccatgggaattttttcacatacacgggtagtggtggtcgagatctttccggcaacaagaggaccgcggaacagtcttgtgatcagaaactcaccaacaccaacagggcgctggctctcaactgctttgctcccatcaatgaccaagaaggggccgaggccaaggactggcggtcggggaagccggtcagggtggtgcgcaatgtcaagggtggcaagaatagcaagtacgcccccgctgagggcaaccgctacgatggcatctacaaggttgtgaaatactggcccgagaaggggaagtccgggtttctcgtgtggcgctaccttctgcggagggacgatgatgagcctggcccttggacgaaggaggggaaggaccggatcaagaagctggggctgaccatgcagtatccagaaggctacctggaagccctggccaaccgagagcgagagaaggagaacagcaagagggaggaggaggagcagcaggaggggggcttcgcgtcccccaggacgggcaagggcaagtggaagcggaagtcggcaggaggtggcccgagcagggccgggtccccgcgccggacatccaagaaaaccaaggtggagccctacagtctcacggcccagcagagcagcctcatcagagaggacaagagcaacgccaagctgtggaatgaggtcctggcgtcactcaaggaccggccggcgagcggcagcccgttccagttgttcctgagtaaagtggaggagacgttccagtgtatctgctgtcaggagctggtgttccggcccatcacgaccgtgtgccagcacaacgtgtgcaaggactgcctggacagatcctttcgggcacaggtgttcagctgccctgcctgccgctacgacctgggccgcagctatgccatgcaggtgaaccagcctctgcagaccgtcctcaaccagctcttccccggctacggcaatggccggtgatctccaagcacttctcgacaggcgttttgctgaaaacgtgtcggagggctcgttcatcggcactgattttgttcttagtgggcttaacttaaacaggtagtgtttcctccgttccctaaaaaggtttgtcttcctttttttttttatttttatttttcaaatctatacattttcaggaatttatgtattctggctaaaagttggacttctcagtattgtgtttagttctttgaaaacataaaagcctgcaatttctcgacaaaacaacacaagattttttaaagatggaatcagaaactacgtggtgtggaggctgttgatgtttctggtgtcaagttctcagaagttgctgccaccaactctttaagaaggcgacaggatcagtccttctctcgggttctggcccccaaggtcagagcaagcatcttcctgacagcattttgtcatctaaagtccagtgacatggttccccgtggtggcccgtggcagcccgtggcatggcgtggctcagctgtctgttgaagttgttgcaaggaaaagaggaaacatctcgggcctagttcaaacctttgcctcaaagccatcccccaccagactgcttagcgtctgagatccgcgtgaaaagtcctctgcccacgagagcagggagttggggccacgcagaaatggcctcaaggggactctgctccacgtggggccaggcgtgtgactgacgctgtccgacgaaggcggccacggacggacgccagcacacgaagtcacgtgcaagtgcctttgattcgttccttctttctaaagacgacagtctttgttgttagcactgaattattgaaaatgtcaaccagattctagaaactgcggtcatccagttcttcctgacaccggatgggtgcttgggaaccgtttgagccttatagatcatttacattcaatttttttaactcagcaagtgagaacttacaagagggtttttttaaaatttttttttctcttaatgaacacattttctaaatgaattttttttgtagttactgtatatgtaccaagaaagatataacgttagggtttggttgtttttgtttttgtattttttttcttttgaaagggtttgttaatttttctaattttaccaaagtttgcagcctatacctcaataaaacagggatattttaaatcacatacctgcagacaaactggagcaatgttatttttaaagggtttttttcacctccttattcttagattattaatgtattagggaagaatgagacaattttgtgtaggctttttctaaagtccagtactttgtccagattttagattctcagaataaatgtttttcacaga

SEQ ID NO: 197806 - DNA, 2661 bp, Homo sapiens
  Payload ID: 19008
  Gene Name: ubiquitin-like with PHD and ring finger domains 1
  Uniprot ID: Q96T88
  ENST ID: ENST00000616255
  CDS Start-End: 131-2512
gaggggtcccggggtccgcggatctcgggtggggtttttccctctcagtggcacttggttgagttcccccgggacttctgaagttccggcccgcgctggacttctgggattccctcttcccgccgacaccatgtggatccaggttcggaccatggacgggaggcagacccacacggtggactcgctgtccaggctgaccaaggtggaggagctgaggcggaagatccaggagctgttccacgtggagccaggcctgcagaggctgttctacaggggcaaacagatggaggacggccataccctcttcgactacgaggtccgcctgaatgacaccatccagctcctggtccgccagagcctcgtgctcccccacagcaccaaggagcgggactccgagctctccgacaccgactccggctgctgcctgggccagagtgagtcagacaagtcctccacccacggtgaggcggccgccgagactgacagcaggccagccgatgaggacatgtgggatgagacggaattggggctgtacaaggtcaatgagtacgtcgatgctcgggacacgaacatgggggcgtggtttgaggcgcaggtggtcagggtgacgcggaaggccccctcccgggacgagccctgcagctccacgtccaggccggcgctggaggaggacgtcatttaccacgtgaaatacgacgactacccggagaacggcgtggtccagatgaactccagggacgtccgagcgcgcgcccgcaccatcatcaagtggcaggacctggaggtgggccaggtggtcatgctcaactacaaccccgacaaccccaaggagcggggcttctggtacgacgcggagatctccaggaagcgcgagaccaggacggcgcgggaactctacgccaacgtggtgctgggggatgattctctgaacgactgtcggatcatcttcgtggacgaagtcttcaagattgagcggccgggtgaagggagccccatggttgacaaccccatgagacggaagagcgggccgtcctgcaagcactgcaaggacgacgtgaacagactctgccgggtctgcgcctgccacctgtgcgggggccggcaggaccccgacaagcagctcatgtgcgatgagtgcgacatggccttccacatctactgcctggacccgcccctcagcagtgttcccagcgaggacgagtggtactgccctgagtgccggaatgatgccagcgaggtggtactggcgggagagcggctgagagagagcaagaagaaggcgaagatggcctcggccacatcgtcctcacagcgggactggggcaagggcatggcctgtgtgggccgcaccaaggaatgtaccatcgtcccgtccaaccactacggacccatcccggggatccccgtgggcaccatgtggcggttccgagtccaggtcagcgagtcgggtgtccatcggccccacgtggctggcatacacggccggagcaacgacggagcgtactccctagtcctggcggggggctatgaggatgatgtggaccatgggaattttttcacatacacgggtagtggtggtcgagatctttccggcaacaagaggaccgcggaacagtcttgtgatcagaaactcaccaacaccaacagggcgctggctctcaactgctttgctcccatcaatgaccaagaaggggccgaggccaaggactggcggtcggggaagccggtcagggtggtgcgcaatgtcaagggtggcaagaatagcaagtacgcccccgctgagggcaaccgctacgatggcatctacaaggttgtgaaatactggcccgagaaggggaagtccgggtttctcgtgtggcgctaccttctgcggagggacgatgatgagcctggcccttggacgaaggaggggaaggaccggatcaagaagctggggctgaccatgcagtatccagaaggctacctggaagccctggccaaccgagagcgagagaaggagaacagcaagagggaggaggaggagcagcaggaggggggcttcgcgtcccccaggacgggcaagggcaagtggaagcggaagtcggcaggaggtggcccgagcagggccgggtccccgcgccggacatccaagaaaaccaaggtggagccctacagtctcacggcccagcagagcagcctcatcagagaggacaagagcaacgccaagctgtggaatgaggtcctggcgtcactcaaggaccggccggcgagcggcagcccgttccagttgttcctgagtaaagtggaggagacgttccagtgtatctgctgtcaggagctggtgttccggcccatcacgaccgtgtgccagcacaacgtgtgcaaggactgcctggacagatcctttcgggcacaggtgttcagctgccctgcctgccgctacgacctgggccgcagctatgccatgcaggtgaaccagcctctgcagaccgtcctcaaccagctcttccccggctacggcaatggccggtgatctccaagcacttctcgacaggcgttttgctgaaaacgtgtcggagggctcgttcatcggcactgattttgttcttagtgggcttaacttaaacaggtagtgtttcctccgttccctaaaaaggtttgtcttcctttttttttttattt

SEQ ID NO: 197807 - DNA, 2651 bp, Homo sapiens
  Payload ID: 19008
  Gene Name: ubiquitin-like with PHD and ring finger domains 1
  Uniprot ID: Q96T88
  ENST ID: ENST00000615884
  CDS Start-End: 112-2493
gggctcgctggcgcgacccgcgcgggccagtgggagtgcgggagggacgccgagggtccagggtttggaggggcgcgagctgccgggggttggaggtcgagcgccgacaccatgtggatccaggttcggaccatggacgggaggcagacccacacggtggactcgctgtccaggctgaccaaggtggaggagctgaggcggaagatccaggagctgttccacgtggagccaggcctgcagaggctgttctacaggggcaaacagatggaggacggccataccctcttcgactacgaggtccgcctgaatgacaccatccagctcctggtccgccagagcctcgtgctcccccacagcaccaaggagcgggactccgagctctccgacaccgactccggctgctgcctgggccagagtgagtcagacaagtcctccacccacggtgaggcggccgccgagactgacagcaggccagccgatgaggacatgtgggatgagacggaattggggctgtacaaggtcaatgagtacgtcgatgctcgggacacgaacatgggggcgtggtttgaggcgcaggtggtcagggtgacgcggaaggccccctcccgggacgagccctgcagctccacgtccaggccggcgctggaggaggacgtcatttaccacgtgaaatacgacgactacccggagaacggcgtggtccagatgaactccagggacgtccgagcgcgcgcccgcaccatcatcaagtggcaggacctggaggtgggccaggtggtcatgctcaactacaaccccgacaaccccaaggagcggggcttctggtacgacgcggagatctccaggaagcgcgagaccaggacggcgcgggaactctacgccaacgtggtgctgggggatgattctctgaacgactgtcggatcatcttcgtggacgaagtcttcaagattgagcggccgggtgaagggagccccatggttgacaaccccatgagacggaagagcgggccgtcctgcaagcactgcaaggacgacgtgaacagactctgccgggtctgcgcctgccacctgtgcgggggccggcaggaccccgacaagcagctcatgtgcgatgagtgcgacatggccttccacatctactgcctggacccgcccctcagcagtgttcccagcgaggacgagtggtactgccctgagtgccggaatgatgccagcgaggtggtactggcgggagagcggctgagagagagcaagaagaaggcgaagatggcctcggccacatcgtcctcacagcgggactggggcaagggcatggcctgtgtgggccgcaccaaggaatgtaccatcgtcccgtccaaccactacggacccatcccggggatccccgtgggcaccatgtggcggttccgagtccaggtcagcgagtcgggtgtccatcggccccacgtggctggcatacacggccggagcaacgacggagcgtactccctagtcctggcggggggctatgaggatgatgtggaccatgggaattttttcacatacacgggtagtggtggtcgagatctttccggcaacaagaggaccgcggaacagtcttgtgatcagaaactcaccaacaccaacagggcgctggctctcaactgctttgctcccatcaatgaccaagaaggggccgaggccaaggactggcggtcggggaagccggtcagggtggtgcgcaatgtcaagggtggcaagaatagcaagtacgcccccgctgagggcaaccgctacgatggcatctacaaggttgtgaaatactggcccgagaaggggaagtccgggtttctcgtgtggcgctaccttctgcggagggacgatgatgagcctggcccttggacgaaggaggggaaggaccggatcaagaagctggggctgaccatgcagtatccagaaggctacctggaagccctggccaaccgagagcgagagaaggagaacagcaagagggaggaggaggagcagcaggaggggggcttcgcgtcccccaggacgggcaagggcaagtggaagcggaagtcggcaggaggtggcccgagcagggccgggtccccgcgccggacatccaagaaaaccaaggtggagccctacagtctcacggcccagcagagcagcctcatcagagaggacaagagcaacgccaagctgtggaatgaggtcctggcgtcactcaaggaccggccggcgagcggcagcccgttccagttgttcctgagtaaagtggaggagacgttccagtgtatctgctgtcaggagctggtgttccggcccatcacgaccgtgtgccagcacaacgtgtgcaaggactgcctggacagatcctttcgggcacaggtgttcagctgccctgcctgccgctacgacctgggccgcagctatgccatgcaggtgaaccagcctctgcagaccgtcctcaaccagctcttccccggctacggcaatggccggtgatctccaagcacttctcgacaggcgttttgctgaaaacgtgtcggagggctcgttcatcggcactgattttgttcttagtgggcttaacttaaacaggtagtgtttcctccgttccctaaaaaggtttgtcttcctttttttttttatttttatttttc

SEQ ID NO: 197808 - DNA, 3230 bp, Homo sapiens
  Payload ID: 19008
  Gene Name: ubiquitin-like with PHD and ring finger domains 1
  ENST ID: ENST00000622802
  CDS Start-End: 481-2901
tgggcaccgaggggtcccggggtccgcggatctcgggtggggtttttccctctcagtggcacttggttgagttcccccgggacttctgaagttccggcccgcgctggacttctgggattccctcttccgtaaataggaatccgaggaatgaatgaatcaatgaatgaatgaataaacgaaccaactcggccacttggcccgggcctcctttctcctctggtcgtggggaaggagggatgggttggaccttctgcttttctttcaattccctcttttcattctccttcctcctcaatcttcaacacttggctagtcgttaatgccttaagtgcttaatttgttgtgtctggtcctggccagggtctggctgtacaggaggactggaagggcatcctgggagtttcctggtgtccacaggccggacaaaagcaaccccgactccttagagcatggcatggctcagaggtgctggtaaaactgatgggggtttttgctgtccctcccctcagcgccgacaccatgtggatccaggttcggaccatggacgggaggcagacccacacggtggactcgctgtccaggctgaccaaggtggaggagctgaggcggaagatccaggagctgttccacgtggagccaggcctgcagaggctgttctacaggggcaaacagatggaggacggccataccctcttcgactacgaggtccgcctgaatgacaccatccagctcctggtccgccagagcctcgtgctcccccacagcaccaaggagcgggactccgagctctccgacaccgactccggctgctgcctgggccagagtgagtcagacaagtcctccacccacggtgaggcggccgccgagactgacagcaggccagccgatgaggacatgtgggatgagacggaattggggctgtacaaggtcaatgagtacgtcgatgctcgggacacgaacatgggggcgtggtttgaggcgcaggtggtcagggtgacgcggaaggccccctcccgggacgagccctgcagctccacgtccaggccggcgctggaggaggacgtcatttaccacgtgaaatacgacgactacccggagaacggcgtggtccagatgaactccagggacgtccgagcgcgcgcccgcaccatcatcaagtggcaggacctggaggtgggccaggtggtcatgctcaactacaaccccgacaaccccaaggagcggggcttctggtacgacgcggagatctccaggaagcgcgagaccaggacggcgcgggaactctacgccaacgtggtgctgggggatgattctctgaacgactgtcggatcatcttcgtggacgaagtcttcaagattgagcggccgggtgaagggagccccatggttgacaaccccatgagacggaagagcgggccgtcctgcaagcactgcaaggacgacgtgaacagactctgccgggtctgcgcctgccacctgtgcgggggccggcaggaccccgacaagcagctcatgtgcgatgagtgcgacatggccttccacatctactgcctggacccgcccctcagcagtgttcccagcgaggacgagtggtactgccctgagtgccggaatgatgccagcgaggtggtactggcgggagagcggctgagagagagcaagaagaaggcgaagatggcctcggccacatcgtcctcacagcgggactggggcaagggcatggcctgtgtgggccgcaccaaggaatgtaccatcgtcccgtccaaccactacggacccatcccggggatccccgtgggcaccatgtggcggttccgagtccaggtcagcgagtcgggtgtccatcggccccacgtggctggcatacacggccggagcaacgacggagcgtactccctagtcctggcggggggctatgaggatgatgtggaccatgggaattttttcacatacacgggtagtggtggtcgagatctttccggcaacaagaggaccgcggaacagtcttgtgatcagaaactcaccaacaccaacagggcgctggctctcaactgctttgctcccatcaatgaccaagaaggggccgaggccaaggactggcggtcggggaagccggtcagggtggtgcgcaatgtcaagggtggcaagaatagcaagtacgcccccgctgagggcaaccgctacgatggcatctacaaggttgtgaaatactggcccgagaaggggaagtccgggtttctcgtgtggcgctaccttctgcggagggacgatgatgagcctggcccttggacgaaggaggggaaggaccggatcaagaagctggggctgaccatgcagtatccagaaggctacctggaagccctggccaaccgagagcgagagaaggagaacagcaagagggaggaggaggagcagcaggaggggggcttcgcgtcccccaggacgggcaagggcaagtggaagcggaagtcggcaggaggtggcccgagcagggccgggtccccgcgccggacatccaagaaaaccaaggtggagccctacagtctcacggcccagcagagcagcctcatcagagaggacaagagcaacgccaagctgtggaatgaggtcctggcgtcactcaaggaccggccggcgagcggcagcccgttccagttgttcctgagtaaagtggaggagacgttccagtgtatctgctgtcaggagctggtgttccggcccatcacgaccgtgtgccagcacaacgtgtgcaaggactgcctggacagatcctttcgggcacaggtgttcagctgccctgcctgccgctacgacctgggccgcagctatgccatgcaggtgaaccagcctctgcagaccgtcctcaaccagctcttccccggctacggcaatggccggtgatctccaagcacttctcgacaggcgttttgctgaaaacgtgtcggagggctcgttcatcggcactgattttgttcttagtgggcttaacttaaacaggtagtgtttcctccgttccctaaaaaggtttgtcttcctttttttttttatttttatttttcaaatctatacattttcaggaatttatgtattctggctaaaagttggacttctcagtattgtgtttagttctttgaaaacataaaagcctgcaatttctcgacaaaacaacacaagattttttaaagatggaatcagaaactacgtggtgtggaggctgttgatgtttctgg

SEQ ID NO: 197809 - DNA, 1859 bp, Homo sapiens
  Payload ID: 19008
  Gene Name: ubiquitin-like with PHD and ring finger domains 1
  ENST ID: ENST00000613817
  CDS Start-End: 1-1491
atcagagcagctggcagcgcggcgggcagcgtttgccgagcgggcgctccgggtcgcacgcaagtccgcgcggggtccgggccacgcacgcggtttcatcgccatccccagccgggccacgcgcgcaggcagacaagctgttcgcggcgaccggagagcagtgttcccagcgaggacgagtggtactgccctgagtgccggaatgatgccagcgaggtggtactggcgggagagcggctgagagagagcaagaagaaggcgaagatggcctcggccacatcgtcctcacagcgggactggggcaagggcatggcctgtgtgggccgcaccaaggaatgtaccatcgtcccgtccaaccactacggacccatcccggggatccccgtgggcaccatgtggcggttccgagtccaggtcagcgagtcgggtgtccatcggccccacgtggctggcatacacggccggagcaacgacggagcgtactccctagtcctggcggggggctatgaggatgatgtggaccatgggaattttttcacatacacgggtagtggtggtcgagatctttccggcaacaagaggaccgcggaacagtcttgtgatcagaaactcaccaacaccaacagggcgctggctctcaactgctttgctcccatcaatgaccaagaaggggccgaggccaaggactggcggtcggggaagccggtcagggtggtgcgcaatgtcaagggtggcaagaatagcaagtacgcccccgctgagggcaaccgctacgatggcatctacaaggttgtgaaatactggcccgagaaggggaagtccgggtttctcgtgtggcgctaccttctgcggagggacgatgatgagcctggcccttggacgaaggaggggaaggaccggatcaagaagctggggctgaccatgcagtatccagaaggctacctggaagccctggccaaccgagagcgagagaaggagaacagcaagagggaggaggaggagcagcaggaggggggcttcgcgtcccccaggacgggcaagggcaagtggaagcggaagtcggcaggaggtggcccgagcagggccgggtccccgcgccggacatccaagaaaaccaaggtggagccctacagtctcacggcccagcagagcagcctcatcagagaggacaagagcaacgccaagctgtggaatgaggtcctggcgtcactcaaggaccggccggcgagcggcagcccgttccagttgttcctgagtaaagtggaggagacgttccagtgtatctgctgtcaggagctggtgttccggcccatcacgaccgtgtgccagcacaacgtgtgcaaggactgcctggacagatcctttcgggcacaggtgttcagctgccctgcctgccgctacgacctgggccgcagctatgccatgcaggtgaaccagcctctgcagaccgtcctcaaccagctcttccccggctacggcaatggccggtgatctccaagcacttctcgacaggcgttttgctgaaaacgtgtcggagggctcgttcatcggcactgattttgttcttagtgggcttaacttaaacaggtagtgtttcctccgttccctaaaaaggtttgtcttcctttttttttttatttttatttttcaaatctatacattttcaggaatttatgtattctggctaaaagttggacttctcagtattgtgtttagttctttgaaaacataaaagcctgcaatttctcgacaaaacaacacaagattttttaaagatggaatcagaaactacgtggtgtggaggctgttgatgtttctggtgtcaagttctcagaagttgctgccaccaactctttaag

SEQ ID NO: 197810 - DNA, 4309 bp, Homo sapiens
  Payload ID: 19008
  Gene Name: ubiquitin-like with PHD and ring finger domains 1
  Uniprot ID: Q96T88
  ENST ID: ENST00000612630
  CDS Start-End: 577-2958
gcaggggtgccatcttggctcactgcaacctccgcctcatgggttcaagcaattctcctgcctcagcctcctgagtagctgggaccacgggtgcatgccagcatgcccagctaattttttggtagagacagagtttcactgtgttggccaggatggtctcgatctcctgacctcgtgatccacccacctcagcctcccaaagtgctgggattgcaggcgtgagccactgcacctgggctttttctttttttgagacaaagtctcattctgtcacccaggctggagtgtagtggcgcgatctcggctcactgccacatctgcctcccgggttcaagcaattctcctgcttcagcctcctgagtagctggaattacaggcatgcaccatcaccatgctttgctaatttttttttggtatttttatttattttatttttattttttgtgatggtctcactctgtcagccagactggagtgcaatggtgtgatctcggctcactgcaacctctgcctcctgggttccagcgattctcccacctcagccccccaagtacctgagattacagcgccgacaccatgtggatccaggttcggaccatggacgggaggcagacccacacggtggactcgctgtccaggctgaccaaggtggaggagctgaggcggaagatccaggagctgttccacgtggagccaggcctgcagaggctgttctacaggggcaaacagatggaggacggccataccctcttcgactacgaggtccgcctgaatgacaccatccagctcctggtccgccagagcctcgtgctcccccacagcaccaaggagcgggactccgagctctccgacaccgactccggctgctgcctgggccagagtgagtcagacaagtcctccacccacggtgaggcggccgccgagactgacagcaggccagccgatgaggacatgtgggatgagacggaattggggctgtacaaggtcaatgagtacgtcgatgctcgggacacgaacatgggggcgtggtttgaggcgcaggtggtcagggtgacgcggaaggccccctcccgggacgagccctgcagctccacgtccaggccggcgctggaggaggacgtcatttaccacgtgaaatacgacgactacccggagaacggcgtggtccagatgaactccagggacgtccgagcgcgcgcccgcaccatcatcaagtggcaggacctggaggtgggccaggtggtcatgctcaactacaaccccgacaaccccaaggagcggggcttctggtacgacgcggagatctccaggaagcgcgagaccaggacggcgcgggaactctacgccaacgtggtgctgggggatgattctctgaacgactgtcggatcatcttcgtggacgaagtcttcaagattgagcggccgggtgaagggagccccatggttgacaaccccatgagacggaagagcgggccgtcctgcaagcactgcaaggacgacgtgaacagactctgccgggtctgcgcctgccacctgtgcgggggccggcaggaccccgacaagcagctcatgtgcgatgagtgcgacatggccttccacatctactgcctggacccgcccctcagcagtgttcccagcgaggacgagtggtactgccctgagtgccggaatgatgccagcgaggtggtactggcgggagagcggctgagagagagcaagaagaaggcgaagatggcctcggccacatcgtcctcacagcgggactggggcaagggcatggcctgtgtgggccgcaccaaggaatgtaccatcgtcccgtccaaccactacggacccatcccggggatccccgtgggcaccatgtggcggttccgagtccaggtcagcgagtcgggtgtccatcggccccacgtggctggcatacacggccggagcaacgacggagcgtactccctagtcctggcggggggctatgaggatgatgtggaccatgggaattttttcacatacacgggtagtggtggtcgagatctttccggcaacaagaggaccgcggaacagtcttgtgatcagaaactcaccaacaccaacagggcgctggctctcaactgctttgctcccatcaatgaccaagaaggggccgaggccaaggactggcggtcggggaagccggtcagggtggtgcgcaatgtcaagggtggcaagaatagcaagtacgcccccgctgagggcaaccgctacgatggcatctacaaggttgtgaaatactggcccgagaaggggaagtccgggtttctcgtgtggcgctaccttctgcggagggacgatgatgagcctggcccttggacgaaggaggggaaggaccggatcaagaagctggggctgaccatgcagtatccagaaggctacctggaagccctggccaaccgagagcgagagaaggagaacagcaagagggaggaggaggagcagcaggaggggggcttcgcgtcccccaggacgggcaagggcaagtggaagcggaagtcggcaggaggtggcccgagcagggccgggtccccgcgccggacatccaagaaaaccaaggtggagccctacagtctcacggcccagcagagcagcctcatcagagaggacaagagcaacgccaagctgtggaatgaggtcctggcgtcactcaaggaccggccggcgagcggcagcccgttccagttgttcctgagtaaagtggaggagacgttccagtgtatctgctgtcaggagctggtgttccggcccatcacgaccgtgtgccagcacaacgtgtgcaaggactgcctggacagatcctttcgggcacaggtgttcagctgccctgcctgccgctacgacctgggccgcagctatgccatgcaggtgaaccagcctctgcagaccgtcctcaaccagctcttccccggctacggcaatggccggtgatctccaagcacttctcgacaggcgttttgctgaaaacgtgtcggagggctcgttcatcggcactgattttgttcttagtgggcttaacttaaacaggtagtgtttcctccgttccctaaaaaggtttgtcttcctttttttttttatttttatttttcaaatctatacattttcaggaatttatgtattctggctaaaagttggacttctcagtattgtgtttagttctttgaaaacataaaagcctgcaatttctcgacaaaacaacacaagattttttaaagatggaatcagaaactacgtggtgtggaggctgttgatgtttctggtgtcaagttctcagaagttgctgccaccaactctttaagaaggcgacaggatcagtccttctctcgggttctggcccccaaggtcagagcaagcatcttcctgacagcattttgtcatctaaagtccagtgacatggttccccgtggtggcccgtggcagcccgtggcatggcgtggctcagctgtctgttgaagttgttgcaaggaaaagaggaaacatctcgggcctagttcaaacctttgcctcaaagccatcccccaccagactgcttagcgtctgagatccgcgtgaaaagtcctctgcccacgagagcagggagttggggccacgcagaaatggcctcaaggggactctgctccacgtggggccaggcgtgtgactgacgctgtccgacgaaggcggccacggacggacgccagcacacgaagtcacgtgcaagtgcctttgattcgttccttctttctaaagacgacagtctttgttgttagcactgaattattgaaaatgtcaaccagattctagaaactgcggtcatccagttcttcctgacaccggatgggtgcttgggaaccgtttgagccttatagatcatttacattcaatttttttaactcagcaagtgagaacttacaagagggtttttttaaaatttttttttctcttaatgaacacattttctaaatgaattttttttgtagttactgtatatgtaccaagaaagatataacgttagggtttggttgtttttgtttttgtattttttttcttttgaaagggtttgttaatttttctaattttaccaaagtttgcagcctatacctcaataaaacagggatattttaaatcacatacctgcagacaaactggagcaatgttatttttaaagggtttttttcacctccttattcttagattattaatgtattagggaagaatgagacaattttgtgtaggctttttctaaagtccagtactttgtccagattttagattctcagaataaatgtttttcacagataga

SEQ ID NO: 197811 - DNA, 3898 bp, Homo sapiens
  Payload ID: 19008
  Gene Name: ubiquitin-like with PHD and ring finger domains 1
  Uniprot ID: Q96T88
  ENST ID: ENST00000624301
  CDS Start-End: 169-2550
atcagagcagctggcagcgcggcgggcagcgtttgccgagcgggcgctccgggtcgcacgcaagtccgcgcggggtccgggccacgcacgcggtttcatcgccatccccagccgggccacgcgcgcaggcagacaagctgttcgcggcgaccggagagcgccgacaccatgtggatccaggttcggaccatggacgggaggcagacccacacggtggactcgctgtccaggctgaccaaggtggaggagctgaggcggaagatccaggagctgttccacgtggagccaggcctgcagaggctgttctacaggggcaaacagatggaggacggccataccctcttcgactacgaggtccgcctgaatgacaccatccagctcctggtccgccagagcctcgtgctcccccacagcaccaaggagcgggactccgagctctccgacaccgactccggctgctgcctgggccagagtgagtcagacaagtcctccacccacggtgaggcggccgccgagactgacagcaggccagccgatgaggacatgtgggatgagacggaattggggctgtacaaggtcaatgagtacgtcgatgctcgggacacgaacatgggggcgtggtttgaggcgcaggtggtcagggtgacgcggaaggccccctcccgggacgagccctgcagctccacgtccaggccggcgctggaggaggacgtcatttaccacgtgaaatacgacgactacccggagaacggcgtggtccagatgaactccagggacgtccgagcgcgcgcccgcaccatcatcaagtggcaggacctggaggtgggccaggtggtcatgctcaactacaaccccgacaaccccaaggagcggggcttctggtacgacgcggagatctccaggaagcgcgagaccaggacggcgcgggaactctacgccaacgtggtgctgggggatgattctctgaacgactgtcggatcatcttcgtggacgaagtcttcaagattgagcggccgggtgaagggagccccatggttgacaaccccatgagacggaagagcgggccgtcctgcaagcactgcaaggacgacgtgaacagactctgccgggtctgcgcctgccacctgtgcgggggccggcaggaccccgacaagcagctcatgtgcgatgagtgcgacatggccttccacatctactgcctggacccgcccctcagcagtgttcccagcgaggacgagtggtactgccctgagtgccggaatgatgccagcgaggtggtactggcgggagagcggctgagagagagcaagaagaaggcgaagatggcctcggccacatcgtcctcacagcgggactggggcaagggcatggcctgtgtgggccgcaccaaggaatgtaccatcgtcccgtccaaccactacggacccatcccggggatccccgtgggcaccatgtggcggttccgagtccaggtcagcgagtcgggtgtccatcggccccacgtggctggcatacacggccggagcaacgacggagcgtactccctagtcctggcggggggctatgaggatgatgtggaccatgggaattttttcacatacacgggtagtggtggtcgagatctttccggcaacaagaggaccgcggaacagtcttgtgatcagaaactcaccaacaccaacagggcgctggctctcaactgctttgctcccatcaatgaccaagaaggggccgaggccaaggactggcggtcggggaagccggtcagggtggtgcgcaatgtcaagggtggcaagaatagcaagtacgcccccgctgagggcaaccgctacgatggcatctacaaggttgtgaaatactggcccgagaaggggaagtccgggtttctcgtgtggcgctaccttctgcggagggacgatgatgagcctggcccttggacgaaggaggggaaggaccggatcaagaagctggggctgaccatgcagtatccagaaggctacctggaagccctggccaaccgagagcgagagaaggagaacagcaagagggaggaggaggagcagcaggaggggggcttcgcgtcccccaggacgggcaagggcaagtggaagcggaagtcggcaggaggtggcccgagcagggccgggtccccgcgccggacatccaagaaaaccaaggtggagccctacagtctcacggcccagcagagcagcctcatcagagaggacaagagcaacgccaagctgtggaatgaggtcctggcgtcactcaaggaccggccggcgagcggcagcccgttccagttgttcctgagtaaagtggaggagacgttccagtgtatctgctgtcaggagctggtgttccggcccatcacgaccgtgtgccagcacaacgtgtgcaaggactgcctggacagatcctttcgggcacaggtgttcagctgccctgcctgccgctacgacctgggccgcagctatgccatgcaggtgaaccagcctctgcagaccgtcctcaaccagctcttccccggctacggcaatggccggtgatctccaagcacttctcgacaggcgttttgctgaaaacgtgtcggagggctcgttcatcggcactgattttgttcttagtgggcttaacttaaacaggtagtgtttcctccgttccctaaaaaggtttgtcttcctttttttttttatttttatttttcaaatctatacattttcaggaatttatgtattctggctaaaagttggacttctcagtattgtgtttagttctttgaaaacataaaagcctgcaatttctcgacaaaacaacacaagattttttaaagatggaatcagaaactacgtggtgtggaggctgttgatgtttctggtgtcaagttctcagaagttgctgccaccaactctttaagaaggcgacaggatcagtccttctctcgggttctggcccccaaggtcagagcaagcatcttcctgacagcattttgtcatctaaagtccagtgacatggttccccgtggtggcccgtggcagcccgtggcatggcgtggctcagctgtctgttgaagttgttgcaaggaaaagaggaaacatctcgggcctagttcaaacctttgcctcaaagccatcccccaccagactgcttagcgtctgagatccgcgtgaaaagtcctctgcccacgagagcagggagttggggccacgcagaaatggcctcaaggggactctgctccacgtggggccaggcgtgtgactgacgctgtccgacgaaggcggccacggacggacgccagcacacgaagtcacgtgcaagtgcctttgattcgttccttctttctaaagacgacagtctttgttgttagcactgaattattgaaaatgtcaaccagattctagaaactgcggtcatccagttcttcctgacaccggatgggtgcttgggaaccgtttgagccttatagatcatttacattcaatttttttaactcagcaagtgagaacttacaagagggtttttttaaaatttttttttctcttaatgaacacattttctaaatgaattttttttgtagttactgtatatgtaccaagaaagatataacgttagggtttggttgtttttgtttttgtattttttttcttttgaaagggtttgttaatttttctaattttaccaaagtttgcagcctatacctcaataaaacagggatattttaaatcacatacctgcagacaaactggagcaatgttatttttaaagggtttttttcacctccttattcttagattattaatgtattagggaagaatgagacaattttgtgtaggctttttctaaagtccagtactttgtccagattttagattctcagaataaatgtttttcacagat

SEQ ID NO: 197812 - DNA, 3452 bp, Homo sapiens
  Payload ID: 19009
  Gene Name: ubiquitin-like with PHD and ring finger domains 2, E3 ubiquitin protein ligase
  Uniprot ID: Q96PU4
  ENST ID: ENST00000276893
  CDS Start-End: 169-2577
agagtcgtcgccgcctgtcgggcccggcgtccggtcggtccggtgggcgcgctcgcccgcctgccgctgagggcccgagccgcagggaaagcggcgcgggccgggcggggcgcggcgcccagagctcagggggagacaaaggggaccggttcctctctaggcgccaagatgtggatacaggttcgcaccattgatggctccaagacgtgcaccattgaggacgtgtctcgcaaagccacgattgaggagctgcgcgagcgggtgtgggcgctgttcgacgtgcggcccgaatgccagcgcctcttctaccggggcaagcagttggaaaatggatataccttatttgattatgatgttggactgaatgatataattcagctgctagttcgcccagaccctgatcatcttcctggcacatctacacagattgaggctaaaccctgttctaatagtccacctaaagtaaagaaagctccgagggtaggaccttccaatcagccatctacatcagctcgtgcccgtcttattgatcctggctttggaatatataaggtaaatgaattggtggatgccagagatgtcggccttggtgcttggtttgaagcacacatacatagtgttactagagcttctgatggacagtcacgtggcaaaactccactgaagaatggcagttcttgtaaaaggactaatggaaatataaagcataaatccaaagagaacacaaataaattggacagtgtaccctctacgtctaattcagactgtgttgctgctgatgaagacgttatttaccatatccagtatgatgaatacccagaaagcggtactctagaaatgaatgtcaaggatcttagaccacgagctagaaccattttgaaatggaatgaactaaatgttggtgatgtggtaatggttaattataatgtagaaagtcctggacaaagaggattctggtttgatgcagaaattaccacattgaagacaatctcaaggaccaaaaaagaacttcgtgtgaaaattttcctggggggttctgaaggaacattaaatgactgcaagataatatctgtagatgaaatcttcaagattgagagacctggagcccatcccctttcatttgcagatggaaagtttttaaggcgaaatgaccctgaatgtgacctgtgtggtggagacccagaaaagaaatgtcattcttgctcctgtcgtgtatgtggtgggaaacatgaacccaacatgcagcttctgtgtgatgaatgtaatgtggcttatcatatttactgtctgaatccacctttggataaagtcccagaagaggaatactggtattgtccttcttgtaaaactgattccagtgaagttgtaaaggctggtgaaagactcaagatgagtaaaaagaaagcaaagatgccgtcagctagtactgaaagccgaagagactggggcaggggaatggcttgtgttggtcgtacgagagaatgtactattgtcccttctaatcattatggacccattcctggtattcctgttggatcaacttggagatttagagttcaggtgagcgaagcaggtgttcacagaccccatgttggtggaattcatggtcgaagtaatgatggggcttattctcttgtactggctggtggatttgcggatgaagtcgaccgaggtgatgagttcacatacactggaagcggtggtaaaaatcttgctggtaacaaaagaattggtgcaccttcagctgatcaaacattaacaaacatgaacagggcattggccctaaactgtgatgctccattggatgataaaattggagcagagtctcggaattggagagctggtaagccagtcagagtgatacgcagttttaaagggaggaagatcagcaaatatgctcctgaagaaggcaacagatatgatggcatttataaggtggtgaaatactggccagagatttcatcaagccatggattcttggtttggcgctatcttttaagaagagatgatgttgaacctgctccttggacctctgaaggaatagaacggtcaaggagattatgtctacgtttacagtatccagcaggttacccttcagataaagaagggaagaagcctaaaggacagtcaaagaagcagcccagtggaaccacaaaaaggccaatttcagatgatgactgtccaagtgcctccaaagtgtacaaagcatcagattcagcagaagcaattgaggcttttcaactaactcctcaacagcaacatctcatcagagaagattgtcaaaaccagaagctgtgggatgaagtgctttcacatcttgtggaaggaccaaattttctgaaaaaattggaacaatcttttatgtgcgtttgctgtcaggagctagtttaccagcctgtgacaactgagtgcttccacaatgtctgtaaagattgcctacagcgctcctttaaggcacaggttttctcctgccctgcttgccggcatgatcttggccagaattacatcatgattcccaatgagattctgcagactctacttgaccttttcttccctggctacagcaaaggacgatgatctgcctgctttcactgtgttgttcatggtggctttttggacaataaagaatctaaaatgggtggggagggtggaagaaatggtggactgtatctctcacgttctgaagcagctaatcctctttcccacatagccatcatcttgtgtgtgtagtaagaggcccatttctcaactgtcttttaaatatctaaaggtagttcctgtaacaactagttttaatgagtaaaaagtcaaagcctcagctctagttgatatccaagttatgatttattttgcaactacctcaggacagaaaagatttatggggattttaaaaatcattgaataactagttaaatgaaattttagctacacactgcctcccaaatattagttgtgcctggttcttgtaatttgattttacagaaaaggaaatgacacttgagatccttggaatgaacacagcttctaaagtgtgcatatacttttttaacgtctcttcttccattacaatgtgtgttttgcaaggacaggttcattttttttagcccactttgtgaactccattgtgcttttttctggtgttttatgcaagttgactactaatgactaatgagaacaataatgaatgcattgttgctgcattagtgtaatgtggtgtggttttgcacttaaaagaggtattcatatgctctagttgtaaatgttcatgaaaatccacttctctactagtcgaactgcttttagtgtctcaccagtggttttacatctgcagagttttgagggctgtgctgacctttgagaggatttgaaattgcttcatattgtgatcctaaattttatattcactatattccctaaagtataccttaataaatattttatgatcagaaaaa

SEQ ID NO: 197813 - DNA, 802 bp, Homo sapiens
  Payload ID: 19009
  Gene Name: ubiquitin-like with PHD and ring finger domains 2, E3 ubiquitin protein ligase
  ENST ID: ENST00000381373
  CDS Start-End: 74-484
gcgggccgggcggggcgcggcgcccagagctcagggggagacaaaggggaccggttcctctctaggcgccaagatgtggatacaggttcgcaccattgatggctccaagacgtgcaccattgaggacgtgtctcgcaaagccacgattgaggagctgcgcgagcgggtgtgggcgctgttcgacgtgcggcccgaatgccagcgcctcttctaccggggcaagcagttggaaaatggatataccttatttgattatgatgttggactgaatgatataattcagctgctagttcgcccagaccctgatcatcttcctggcacatctacacagattgaggctaaaccctgttctaatagtccacctaaagtaaagaaagctccgagggtaggaccttccaatcagccatctacatcagctcgtgcccgtcttattgatcctggctttggaatatataagggtctggctctgtcacccaggctgtagtgcagtgacgtgaacacggctcgctgtagccttgacctgctggggtcaagtgatcttcctgctcggcctcccaaagtgctgggatacaggcgtgagccaccatgcccggctaacttagatctttgatatcttgattagttctttctttacatatttaatattttgctttatttctggtagctttgtttttgatgcaattattatatatggttatcttctaaaatagtaatctgtttgctgatatagagaaatgaaattgatttatttggcttttgtaaccagcaaccttttcaaatctaataaattgtgtagaaataa

SEQ ID NO: 197814 - DNA, 474 bp, Homo sapiens
  Payload ID: 19009
  Gene Name: ubiquitin-like with PHD and ring finger domains 2, E3 ubiquitin protein ligase
  ENST ID: ENST00000450508
  CDS Start-End: 138-474
ctgttctaatagtccacctaaagtaaagaaagctccgagggtaggaccttccaatcagccatctacatcagctcgtgcccgtcttattgatcctggctttggaatatataagatacccagaaagcggtactctagaaatgaatgtcaaggatcttagaccacgagctagaaccattttgaaatggaatgaactaaatgttggtgatgtggtaatggttaattataatgtagaaagtcctggacaaagaggattctggtttgatgcagaaattaccacattgaagacaatctcaaggaccaaaaaagaacttcgtgtgaaaattttcctggggggttctgaaggaacattaaatgactgcaagataatatctgtagatgaaatcttcaagattgagagacctggagcccatcccctttcatttgcagatggaaagtttttaaggcgaaatgaccctgaatgtgacctgtgtggtg

SEQ ID NO: 197815 - DNA, 3723 bp, Homo sapiens
  Payload ID: 19009
  Gene Name: ubiquitin-like with PHD and ring finger domains 2, E3 ubiquitin protein ligase
  Uniprot ID: Q96PU4
  ENST ID: ENST00000468435
  CDS Start-End: 341-1852
gcgagatccggcttggcgccgtgacctccatgtgggagctccagctctataagtaaacactctgcgcggcgcagacatggcctcttcctatctttgaggcggtgtctgcggcagcgcctcagagtggttccggtcgtctctcctcaagtcggctagtcgggcgcgcgcgctgagagtcgtcgccgcctgtcgggcccggcgtccggtcggtccggtgggcgcgctcgcccgcctgccgctgagggcccgagccgcagggaaagcggcgcgggccgggcggggcgcggcgcccagagctcagggggagacaaaggggaccggttcctctctaggcgccaagatgtggatacaggttcgcaccattgatggctccaagacgtgcaccattgaggacgtgtctcgcaaagccacgattgaggagctgcgcgagcgggtgtgggcgctgttcgacgtgcggcccgaatgccagcgcctcttctaccggggcaagcagttggaaaatggatataccttatttgattatgatgttggactgaatgatataattcagctgctagttcgcccagaccctgatcatcttcctggcacatctacacagattgaggctaaaccctgttctaatagtccacctaaagtaaagaaagctccgagggtaggaccttccaatcagccatctacatcagctcgtgcccgtcttattgatcctggctttggaatatataaggtaaatgaattggtggatgccagagatgtcggccttggtgcttggtttgaagcacacatacatagtgttactagagcttctgatggacagtcacgtggcaaaactccactgaagaatggcagttcttgtaaaaggactaatggaaatataaagcataaatccaaagagaacacaaataaattggacagtgtaccctctacgtctaattcagactgtgttgctgctgatgaagacgttatttaccatatccagtatgatgaatacccagaaagcggtactctagaaatgaatgtcaaggatcttagaccacgagctagaaccattttgaaatggaatgaactaaatgttggtgatgtggtaatggttaattataatgtagaaagtcctggacaaagaggattctggtttgatgcagaaattaccacattgaagacaatctcaaggaccaaaaaagaacttcgtgtgaaaattttcctggggggttctgaaggaacattaaatgactgcaagataatatctgtagatgaaatcttcaagattgagagacctggagcccatcccctttcatttgcagatggaaagtttttaaggcgaaatgaccctgaatgtgacctgtgtggtggagacccagaaaagaaatgtcattcttgctcctgtcgtgtatgtggtgggaaacatgaacccaacatgcagcttctgtgtgatgaatgtaatgtggcttatcatatttactgtctgaatccacctttggataaagtcccagaagaggaatactggtattgtccttcttgtaaaactgattccagtgaagttgtaaaggctggtgaaagactcaagatgagtaaaaagaaagcaaagatgccgtcagctagtactgaaagccgaagagactggggcaggggaatggcttgtgttggtcgtacgagagaatgtactattgtcccttctaatcattatggacccattcctggtattcctgttggatcaacttggagatttagagttcaggtgagcgaagcaggtgttcacagaccccatgttggtggaattcatggtcgaagtaatgatggggcttattctcttgtactggctggtggatttgcggatgaagtcttgacagagttatgaatatgaatattgtggagtctgtccagataccgggtggaagactggttttgatcagtttaagaagtattctaaactgttctagatgaccgaggtgatgagttcacatacactggaagcggtggtaaaaatcttgctggtaacaaaagaattggtgcaccttcagctgatcaaacattaacaaacatgaacagggcattggccctaaactgtgatgctccattggatgataaaattggagcagagtctcggaattggagagctggtaagccagtcagagtgatacgcagttttaaagggaggaagatcagcaaatatgctcctgaagaaggcaacagatatgatggcatttataaggtggtgaaatactggccagagatttcatcaagccatggattcttggtttggcgctatcttttaagaagagatgatgttgaacctgctccttggacctctgaaggaatagaacggtcaaggagattatgtctacgtttacagtatccagcaggttacccttcagataaagaagggaagaagcctaaaggacagtcaaagaagcagcccagtggaaccacaaaaaggccaatttcagatgatgactgtccaagtgcctccaaagtgtacaaagcatcagattcagcagaagcaattgaggcttttcaactaactcctcaacagcaacatctcatcagagaagattgtcaaaaccagaagctgtgggatgaagtgctttcacatcttgtggaaggaccaaattttctgaaaaaattggaacaatcttttatgtgcgtttgctgtcaggagctagtttaccagcctgtgacaactgagtgcttccacaatgtctgtaaagattgcctacagcgctcctttaaggcacaggttttctcctgccctgcttgccggcatgatcttggccagaattacatcatgattcccaatgagattctgcagactctacttgaccttttcttccctggctacagcaaaggacgatgatctgcctgctttcactgtgttgttcatggtggctttttggacaataaagaatctaaaatgggtggggagggtggaagaaatggtggactgtatctctcacgttctgaagcagctaatcctctttcccacatagccatcatcttgtgtgtgtagtaagaggcccatttctcaactgtcttttaaatatctaaaggtagttcctgtaacaactagttttaatgagtaaaaagtcaaagcctcagctctagttgatatccaagttatgatttattttgcaactacctcaggacagaaaagatttatggggattttaaaaatcattgaataactagttaaatgaaattttagctacacactgcctcccaaatattagttgtgcctggttcttgtaatttgattttacagaaaaggaaatgacacttgagatccttggaatgaacacagcttctaaagtgtgcatatacttttttaacgtctcttcttccattacaatgtgtgttttgcaaggacaggttcattttttttagcccactttgtgaactccattgtgcttttttctggtgttttatgcaagttgactactaatgactaatgagaacaataatgaatgcattgttgctgcattagtgtaatgtggtgtggttttgcacttaaaagaggtattcatatgctctagttgtaaatgttcatgaaaatccacttctctactagtcgaactgcttttagtgtctcaccagtggttttacatctgcagagttttgagggctgtgctgacctttgagaggatttgaaattgcttcatattgtgatcctaaattttatattcactatattccctaaagtataccttaataaatattttatgatcagaaaaa

SEQ ID NO: 197816 - DNA, 6529 bp, Homo sapiens
  Payload ID: 19010
  Gene Name: ubiquitously transcribed tetratricopeptide repeat containing, Y-linked
  Uniprot ID: O14607
  ENST ID: ENST00000331397
  CDS Start-End: 1009-5052
tttgctcatcgtttgttgtttagataatatcatgaactgataaatgcagttgccacgttgattccctagggcctggcttaccgactgaggtcataagatattatgccttctctttagacttggtcagtggagaggaaatgggcaaagaaccagcctatggaggtgacaaggccttagggccaaaagtcttgagggtgaaggtttagggcctgcgcagcttccctgccatgccccgcaaggtctcgcattcgcaaggcttgtgacagtgggagcctcattacggactctcctaaagtccatggtgtcctcttttcgcatttgcgccccgtgggtgatgcccgatgccgcccttcccatcgctctcttccccttcaagcgtatcgcaactgcaaaaacacccagcacagacactccattttctatcttaatgcatttaactagcacaacctacaggttgttccatcccagagactacccttttctccatagacgtgaccatcaaccaaccagcggtcagaatcagtcagcctctgtcatgttcctaggtccttggcgaactggctgggcggggtcccagcagcctaggagtacagtggagcaatgcctgacgtaagtcaacaaagatcacgtgagacgaatcagtcgcctagattggctacaactaagtggttgggagcggggaggtcgcggcggctgcgtggggttcgcccgtgacacaattacaactttgtgctggtgctggcaaagtttgtgattttaagaaattctgctgtgctctccagcactgcgagcttctgccttccctgtagtttcccagatgtgatccaggtagccgagttccgctgcccgtgcttcggtagcttaagtctttgcctcagcttttttccttgcagccgctgaggaggcgataaaattggcgtcacagtctcaagcagcgattgaaggcgtcttttcaactactcgattaaggttgggtatcgtcgtgggacttggaaatttgttgtttccatgaaatcctgcgcagtgtcgctcactaccgccgctgttgccttcggtgatgaggcaaagaaaatggcggaaggaaaagcgagccgcgagagtgaagaggagtctgttagcctgacagtcgaggaaagggaggcgcttggtggcatggacagccgtctcttcgggttcgtgaggcttcatgaagatggcgccagaacgaagaccctactaggcaaggctgttcgctgctacgaatctttaatcttaaaagctgaaggaaaagtggagtctgacttcttttgccaattaggtcacttcaacctcttgttggaagattattcaaaagcattatctgcatatcagagatattacagtttacaggctgactactggaagaatgctgcgtttttatatggccttggtttggtctacttctactacaatgcatttcattgggcaattaaagcatttcaagatgtcctttatgttgaccccagcttttgtcgagccaaggaaattcatttacgacttgggctcatgttcaaagtgaacacagactacaagtctagtttaaagcattttcagttagccttgattgactgtaatccatgtactttgtccaatgctgaaattcaatttcatattgcccatttgtatgaaacccagaggaagtatcattctgcaaaggaggcatatgaacaacttttgcagacagaaaaccttcctgcacaagtaaaagcaactgtattgcaacagttaggttggatgcatcataatatggatctagtaggagacaaagccacaaaggaaagctatgctattcagtatctccaaaagtctttggaggcagatcctaattctggccaatcgtggtattttcttggaaggtgttattcaagtattgggaaagttcaggatgcctttatatcttacaggcaatctattgataaatcagaagcaagtgcagatacatggtgttcaataggtgtgttgtatcagcagcaaaatcagcctatggatgctttacaggcatatatttgtgctgtacaattggaccatgggcatgccgcagcctggatggacctaggtactctctatgaatcctgcaatcaacctcaagatgccattaaatgctacctaaatgcagctagaagcaaacgttgtagtaatacctctacgcttgctgcaagaattaaatttctacagaatggttctgataactggaatggtggccagagtctttcacatcatccagtacagcaagtttattcgttgtgtttgacaccacagaaattacagcacttggaacaactgcgagcaaatagagataatttaaatccagcacagaagcatcagctggaacagttagaaagtcagtttgtcttaatgcagcaaatgagacacaaagaagttgctcaggtacgaactactggaattcataacggggccataactgattcatcactgcctacaaactctgtctctaatcgacaaccacatggtgctctgaccagagtatctagcgtctctcagcctggagttcgccctgcttgtgttgaaaaacttttgtccagtggagctttttctgcaggctgtattccttgtggcacatcaaaaattctaggaagtacagacactatcttgctaggcagtaattgtatagcaggaagtgaaagtaatggaaatgtgccttacctgcagcaaaatacacacactctacctcataatcatacagacctgaacagcagcacagaagagccatggagaaaacagctatctaactccgctcaggggcttcataaaagtcagagttcatgtttgtcaggacctaatgaagaacaacctctgttttccactgggtcagcccagtatcaccaggcaactagcactggtattaagaaggcgaatgaacatctcactctgcctagtaattcagtaccacagggggatgctgacagtcacctctcctgtcatactgctacctcaggtggacaacaaggcattatgtttaccaaagagagcaagccttcaaaaaatagatccttggtgcctgaaacaagcaggcatactggagacacatctaatggctgtgctgatgtcaagggactttctaatcatgttcatcagttgatagcagatgctgtttccagtcctaaccatggagattcaccaaatttattaattgcagacaatcctcagctctctgctttgttgattggaaaagccaatggcaatgtgggtactggaacctgtgacaaagtgaataatattcacccagctgttcatacaaagactgatcattctgttgcctcttcaccctcttcagccatttccacagcaacaccttctcctaaatccactgagcagagaagcataaacagtgttaccagccttaacagtcctcacagtggattacacacagtcaatggagaggggctggggaagtcacagagctctacaaaagtagacctgcctttagctagccacagatctacttctcagatcttaccatcaatgtcagtgtctatatgccccagttcaacagaagttctgaaagcatgcaggaatccaggtaaaaatggcttgtctaatagctgcattttgttagataaatgtccacctccaagaccaccaacttcaccatacccacccttgccaaaggacaagttgaatccacccacacctagtatttacttggaaaataaacgtgatgctttctttcctccattacatcaattttgtacaaatccaaaaaaccctgttacagtaatacgtggccttgctggagctcttaaattagatcttggacttttctctaccaaaactttggtagaagctaacaatgaacatatggtagaagtgaggacacagttgctgcaaccagcagatgaaaactgggatcccactggaacaaagaaaatctggcgttgtgaaagcaatagatctcatactacaattgccaaatacgcacaataccaggcttcctccttccaggaatcattgagagaagaaaatgagaaaagaacacaacacaaagatcattcagataacgaatccacatcttcagagaattctggaaggagaaggaaaggaccttttaaaaccataaaatttgggaccaacattgacctctctgataacaaaaagtggaagttgcagttacatgaactgactaaacttcctgcttttgcgcgtgtggtgtcagcaggaaatcttctaacccatgttgggcataccattctgggcatgaatacagtacaactgtatatgaaagttccagggagtcggacaccaggtcaccaagaaaataacaacttctgctctgttaacataaatattggtccaggagattgtgaatggtttgttgtacctgaagattattggggtgttctgaatgacttctgtgaaaaaaataatttgaattttttaatgagttcttggtggcccaaccttgaagatctttatgaagcaaatgtccctgtgtatagatttattcagcgacctggagatttggtctggataaatgcaggcactgtgcattgggttcaagctgttggctggtgcaataacattgcctggaatgttggtccacttacagcctgccagtataaattggcagtggaacggtatgaatggaacaaattgaaaagtgtgaagtcaccagtacccatggtgcatctttcctggaatatggcacgaaatatcaaagtctcagatccaaagctttttgaaatgattaagtattgtcttttgaaaattctgaagcaatatcagacattgagagaagctcttgttgcagcaggaaaagaggttatatggcatgggcggacaaatgatgaaccagctcattactgtagcatttgtgaggtggaggtttttaatctgctttttgtcactaatgaaagcaatactcaaaaaacctacatagtacattgccatgattgtgcacgaaaaacaagcaaaagtttggaaaattttgtggtgctcgaacagtacaaaatggaggacctaatccaagtttatgatcaatttacactagctctttcattatcatcctcatcttgatatagttccatgaatattaaatgagattatttctgctcttcaggaaatttctgcaccactggttttgtagctgtttcataaaactgttgactaaaagctatgtctatgcaaccttccaagaatagtatgtcaagcaactggacacagtgctgcctctgcttcaggacttaacatgctgatccagctgtacttcagaaaaataatattaatcatatgttttgtgtacgtatgacaaactgtcaaagtgacacagaatactgatttgaagatagccttttttatgtttctctatttctgggctgatgaattaatattcatttgtattttaaccctgcagaattttccttagttaaaaacactttcctagctggtcatttcttcataagatagcaaatttaaatctctcctcgatcagcttttaaaaaatgtgtactattatctgaggaagttttttactgctttatgtttttgtgtgttttgaggccatgatgattacatttgtggttccaaaataatttttttaaatattaatagcccatatacaaagataatggattgcacatagacaaagaaataaacttcagatttgtgatttttgtttctaaacttgatacagatttacactatttataaatacgtatttattgcctgaaaatatttgtgaatggaatgttgtttttttccagacgtaactgccattaaatactaaggagttctgtagttttaaacactactcctattacattttatatgtgtagataaaactgcttagtattatacagaaatttttattaaaattgttaaatgtttaaagggtttcccaatgtttgagtttaaaaaagactttctgaaaaaatccactttttgttcattttcaaacctaatgattatatgtattttatatgtgtgtgtatgtgtacacacatgtataatatatacagaaacctcgatatataattgtatagattttaaaagttttattttttacatctatggtagtttttgaggtgcctattataaagtattacggaagtttgctgtttttaaagtaaatgtcttttagtgtgatttattaagttgtagtcaccatagtgatagcccataaataattgctggaaaattgtattttataacagtagaaaacatatagtcagtgaagtaaatattttaaaggaaacattatatagatttgataaatgttgtttataattaagagtttcttatggaaaagagattcagaatgataacctcttttagagaacaaataagtgacttatttttttaaagctagatgactttgaaatgctatactgtcctgcttgtacaacatggtttggggtgaaggggaggaaagtattaaaaaatctatatcgctagtaaattgtaataagttctattaaaacttgtatttcatatgaaaaatttgctaatttaatattaactcatttgataataatacttgtcttttctacctctc

SEQ ID NO: 197817 - DNA, 4325 bp, Homo sapiens
  Payload ID: 19010
  Gene Name: ubiquitously transcribed tetratricopeptide repeat containing, Y-linked
  Uniprot ID: O14607
  ENST ID: ENST00000329134
  CDS Start-End: 1006-4245
gctcatcgtttgttgtttagataatatcatgaactgataaatgcagttgccacgttgattccctagggcctggcttaccgactgaggtcataagatattatgccttctctttagacttggtcagtggagaggaaatgggcaaagaaccagcctatggaggtgacaaggccttagggccaaaagtcttgagggtgaaggtttagggcctgcgcagcttccctgccatgccccgcaaggtctcgcattcgcaaggcttgtgacagtgggagcctcattacggactctcctaaagtccatggtgtcctcttttcgcatttgcgccccgtgggtgatgcccgatgccgcccttcccatcgctctcttccccttcaagcgtatcgcaactgcaaaaacacccagcacagacactccattttctatcttaatgcatttaactagcacaacctacaggttgttccatcccagagactacccttttctccatagacgtgaccatcaaccaaccagcggtcagaatcagtcagcctctgtcatgttcctaggtccttggcgaactggctgggcggggtcccagcagcctaggagtacagtggagcaatgcctgacgtaagtcaacaaagatcacgtgagacgaatcagtcgcctagattggctacaactaagtggttgggagcggggaggtcgcggcggctgcgtggggttcgcccgtgacacaattacaactttgtgctggtgctggcaaagtttgtgattttaagaaattctgctgtgctctccagcactgcgagcttctgccttccctgtagtttcccagatgtgatccaggtagccgagttccgctgcccgtgcttcggtagcttaagtctttgcctcagcttttttccttgcagccgctgaggaggcgataaaattggcgtcacagtctcaagcagcgattgaaggcgtcttttcaactactcgattaaggttgggtatcgtcgtgggacttggaaatttgttgtttccatgaaatcctgcgcagtgtcgctcactaccgccgctgttgccttcggtgatgaggcaaagaaaatggcggaaggaaaagcgagccgcgagagtgaagaggagtctgttagcctgacagtcgaggaaagggaggcgcttggtggcatggacagccgtctcttcgggttcgtgaggcttcatgaagatggcgccagaacgaagaccctactaggcaaggctgttcgctgctacgaatctttaatcttaaaagctgaaggaaaagtggagtctgacttcttttgccaattaggtcacttcaacctcttgttggaagattattcaaaagcattatctgcatatcagagatattacagtttacaggctgactactggaagaatgctgcgtttttatatggccttggtttggtctacttctactacaatgcatttcattgggcaattaaagcatttcaagatgtcctttatgttgaccccagcttttgtcgagccaaggaaattcatttacgacttgggctcatgttcaaagtgaacacagactacaagtctagtttaaagcattttcagttagccttgattgactgtaatccatgtactttgtccaatgctgaaattcaatttcatattgcccatttgtatgaaacccagaggaagtatcattctgcaaaggaggcatatgaacaacttttgcagacagaaaaccttcctgcacaagtaaaagcaactgtattgcaacagttaggttggatgcatcataatatggatctagtaggagacaaagccacaaaggaaagctatgctattcagtatctccaaaagtctttggaggcagatcctaattctggccaatcgtggtattttcttggaaggtgttattcaagtattgggaaagttcaggatgcctttatatcttacaggcaatctattgataaatcagaagcaagtgcagatacatggtgttcaataggtgtgttgtatcagcagcaaaatcagcctatggatgctttacaggcatatatttgtgctgtacaattggaccatgggcatgccgcagcctggatggacctaggtactctctatgaatcctgcaatcaacctcaagatgccattaaatgctacctaaatgcagctagaagcaaacgttgtagtaatacctctacgcttgctgcaagaattaaatttctacagaatggttctgataactggaatggtggccagagtctttcacatcatccagtacagcaagtttattcgttgtgtttgacaccacagaaattacagcacttggaacaactgcgagcaaatagagataatttaaatccagcacagaagcatcagctggaacagttagaaagtcagtttgtcttaatgcagcaaatgagacacaaagaagttgctcaggtacgaactactggaattcataacggggccataactgattcatcactgcctacaaactctgtctctaatcgacaaccacatggtgctctgaccagagtatctagcgtctctcagcctggagttcgccctgcttgtgttgaaaaacttttgtccagtggagctttttctgcaggctgtattccttgtggcacatcaaaaattctaggaagtacagacactatcttgctaggcagtaattgtatagcaggaagtgaaagtaatggaaatgtgccttacctgcagcaaaatacacacactctacctcataatcatacagacctgaacagcagcacagaagagccatggagaaaacagctatctaactccgctcaggggcttcataaaagtcagagttcatgtttgtcaggacctaatgaagaacaacctctgttttccactgggtcagcccagtatcaccaggcaactagcactggtattaagaaggcgaatgaacatctcactctgcctagtaattcagtaccacagggggatgctgacagtcacctctcctgtcatactgctacctcaggtggacaacaaggcattatgtttaccaaagagagcaagccttcaaaaaatagatccttggtgcctgaaacaagcaggcatactggagacacatctaatggctgtgctgatgtcaagggactttctaatcatgttcatcagttgatagcagatgctgtttccagtcctaaccatggagattcaccaaatttattaattgcagacaatcctcagctctctgctttgttgattggaaaagccaatggcaatgtgggtactggaacctgtgacaaagtgaataatattcacccagctgttcatacaaagactgatcattctgttgcctcttcaccctcttcagccatttccacagcaacaccttctcctaaatccactgagcagagaagcataaacagtgttaccagccttaacagtcctcacagtggattacacacagtcaatggagaggggctggggaagtcacagagctctacaaaagtagacctgcctttagctagccacagatctacttctcagatcttaccatcaatgtcagtgtctatatgccccagttcaacagaagttctgaaagcatgcaggaatccaggtaaaaatggcttgtctaatagctgcattttgttagataaatgtccacctccaagaccaccaacttcaccatacccacccttgccaaaggacaagttgaatccacccacacctagtatttacttggaaaataaacgtgatgctttctttcctccattacatcaattttgtacaaatccaaaaaaccctgttacagtaatacgtggccttgctggagctcttaaattagatcttggacttttctctaccaaaactttggtagaagctaacaatgaacatatggtagaagtgaggacacagttgctgcaaccagcagatgaaaactgggatcccactggaacaaagaaaatctggcgttgtgaaagcaatagatctcatactacaattgccaaatacgcacaataccaggcttcctccttccaggaatcattgagagctggaatgcaatggtgtgatctcagctcactgcagcctccgcctcctgggttcaagcgattctcccacctcagcctcccgaatagctggaattacaggcacctgccatcatgcccaactaatttttgtatttttgtagagacagggtttcaccatgttggccaggcttgtcttgaactcctgacctcaggtggtctgcttgcctcagcatcccaaagtgctgggattacaggtgtgagccaccatgcccggtaaacttttaaaaatgtaagcaaaattacagtatgtaaaacacacattgctaatggagaaataaagttcctactttacatcta

SEQ ID NO: 197818 - DNA, 4990 bp, Homo sapiens
  Payload ID: 19010
  Gene Name: ubiquitously transcribed tetratricopeptide repeat containing, Y-linked
  Uniprot ID: O14607
  ENST ID: ENST00000362096
  CDS Start-End: 1006-4728
gctcatcgtttgttgtttagataatatcatgaactgataaatgcagttgccacgttgattccctagggcctggcttaccgactgaggtcataagatattatgccttctctttagacttggtcagtggagaggaaatgggcaaagaaccagcctatggaggtgacaaggccttagggccaaaagtcttgagggtgaaggtttagggcctgcgcagcttccctgccatgccccgcaaggtctcgcattcgcaaggcttgtgacagtgggagcctcattacggactctcctaaagtccatggtgtcctcttttcgcatttgcgccccgtgggtgatgcccgatgccgcccttcccatcgctctcttccccttcaagcgtatcgcaactgcaaaaacacccagcacagacactccattttctatcttaatgcatttaactagcacaacctacaggttgttccatcccagagactacccttttctccatagacgtgaccatcaaccaaccagcggtcagaatcagtcagcctctgtcatgttcctaggtccttggcgaactggctgggcggggtcccagcagcctaggagtacagtggagcaatgcctgacgtaagtcaacaaagatcacgtgagacgaatcagtcgcctagattggctacaactaagtggttgggagcggggaggtcgcggcggctgcgtggggttcgcccgtgacacaattacaactttgtgctggtgctggcaaagtttgtgattttaagaaattctgctgtgctctccagcactgcgagcttctgccttccctgtagtttcccagatgtgatccaggtagccgagttccgctgcccgtgcttcggtagcttaagtctttgcctcagcttttttccttgcagccgctgaggaggcgataaaattggcgtcacagtctcaagcagcgattgaaggcgtcttttcaactactcgattaaggttgggtatcgtcgtgggacttggaaatttgttgtttccatgaaatcctgcgcagtgtcgctcactaccgccgctgttgccttcggtgatgaggcaaagaaaatggcggaaggaaaagcgagccgcgagagtgaagaggagtctgttagcctgacagtcgaggaaagggaggcgcttggtggcatggacagccgtctcttcgggttcgtgaggcttcatgaagatggcgccagaacgaagaccctactaggcaaggctgttcgctgctacgaatctttaatcttaaaagctgaaggaaaagtggagtctgacttcttttgccaattaggtcacttcaacctcttgttggaagattattcaaaagcattatctgcatatcagagatattacagtttacaggctgactactggaagaatgctgcgtttttatatggccttggtttggtctacttctactacaatgcatttcattgggcaattaaagcatttcaagatgtcctttatgttgaccccagcttttgtcgagccaaggaaattcatttacgacttgggctcatgttcaaagtgaacacagactacaagtctagtttaaagcattttcagttagccttgattgactgtaatccatgtactttgtccaatgctgaaattcaatttcatattgcccatttgtatgaaacccagaggaagtatcattctgcaaaggaggcatatgaacaacttttgcagacagaaaaccttcctgcacaagtaaaagcaactgtattgcaacagttaggttggatgcatcataatatggatctagtaggagacaaagccacaaaggaaagctatgctattcagtatctccaaaagtctttggaggcagatcctaattctggccaatcgtggtattttcttggaaggtgttattcaagtattgggaaagttcaggatgcctttatatcttacaggcaatctattgataaatcagaagcaagtgcagatacatggtgttcaataggtgtgttgtatcagcagcaaaatcagcctatggatgctttacaggcatatatttgtgctgtacaattggaccatgggcatgccgcagcctggatggacctaggtactctctatgaatcctgcaatcaacctcaagatgccattaaatgctacctaaatgcagctagaagcaaacgttgtagtaatacctctacgcttgctgcaagaattaaatttctacagaatggttctgataactggaatggtggccagagtctttcacatcatccagtacagcaagtttattcgttgtgtttgacaccacagaaattacagcacttggaacaactgcgagcaaatagagataatttaaatccagcacagaagcatcagctggaacagttagaaagtcagtttgtcttaatgcagcaaatgagacacaaagaagttgctcaggtacgaactactggaattcataacggggccataactgattcatcactgcctacaaactctgtctctaatcgacaaccacatggtgctctgaccagagtatctagcgtctctcagcctggagttcgccctgcttgtgttgaaaaacttttgtccagtggagctttttctgcaggctgtattccttgtggcacatcaaaaattctaggaagtacagacactatcttgctaggcagtaattgtatagcaggaagtgaaagtaatggaaatgtgccttacctgcagcaaaatacacacactctacctcataatcatacagacctgaacagcagcacagaagagccatggagaaaacagctatctaactccgctcaggggcttcataaaagtcagagttcatgtttgtcaggacctaatgaagaacaacctctgttttccactgggtcagcccagtatcaccaggcaactagcactggtattaagaaggcgaatgaacatctcactctgcctagtaattcagtaccacagggggatgctgacagtcacctctcctgtcatactgctacctcaggtggacaacaaggcattatgtttaccaaagagagcaagccttcaaaaaatagatccttggtgcctgaaacaagcaggcatactggagacacatctaatggctgtgctgatgtcaagggactttctaatcatgttcatcagttgatagcagatgctgtttccagtcctaaccatggagattcaccaaatttattaattgcagacaatcctcagctctctgctttgttgattggaaaagccaatggcaatgtgggtactggaacctgtgacaaagtgaataatattcacccagctgttcatacaaagactgatcattctgttgcctcttcaccctcttcagccatttccacagcaacaccttctcctaaatccactgagcagagaagcataaacagtgttaccagccttaacagtcctcacagtggattacacacagtcaatggagaggggctggggaagtcacagagctctacaaaagtagacctgcctttagctagccacagatctacttctcagatcttaccatcaatgtcagtgtctatatgccccagttcaacagaagttctgaaagcatgcaggaatccaggtaaaaatggcttgtctaatagctgcattttgttagataaatgtccacctccaagaccaccaacttcaccatacccacccttgccaaaggacaagttgaatccacccacacctagtatttacttggaaaataaacgtgatgctttctttcctccattacatcaattttgtacaaatccaaaaaaccctgttacagtaatacgtggccttgctggagctcttaaattagatcttggacttttctctaccaaaactttggtagaagctaacaatgaacatatggtagaagtgaggacacagttgctgcaaccagcagatgaaaactgggatcccactggaacaaagaaaatctggcgttgtgaaagcaatagatctcatactacaattgccaaatacgcacaataccaggcttcctccttccaggaatcattgagagaagaaaatgagaaaagaacacaacacaaagatcattcagataacgaatccacatcttcagagaattctggaaggagaaggaaaggaccttttaaaaccataaaatttgggaccaacattgacctctctgataacaaaaagtggaagttgcagttacatgaactgactaaacttcctgcttttgcgcgtgtggtgtcagcaggaaatcttctaacccatgttgggcataccattctgggcatgaatacagtacaactgtatatgaaagttccagggagtcggacaccaggtcaccaagaaaataacaacttctgctctgttaacataaatattggtccaggagattgtgaatggtttgttgtacctgaagattattggggtgttctgaatgacttctgtgaaaaaaataatttgaattttttaatgagttcttggtggcccaaccttgaagatctttatgaagcaaatgtccctgtgtatagatttattcagcgacctggagatttggtctggataaatgcaggcactgtgcattgggttcaagctgttggctggtgcaataacattgcctggaatgttggtccacttacagcctgccagtataaattggcagtggaacggtatgaatggaacaaattgaaaagtgtgaagtcaccagtacccatggtgcatctttcctggaatatggcacgaaatatcaaagtctcagatccaaagctttttgaaatgattaagtaagtgccttctgaaactgctgcagtttctctttgggggtattggtagccattcagtatttttttcaaaagaattctgttgacattaaatgatatcagcagtccagaagtcttggcaaaatgtaataagatgtaaataatcttatatattcataagtgttataaaatctcataagattaaaatattgccttcccttacagatagtcacttgtgtttattacaatttagagaggaataaagatgtacatgaatatacactggtaaa

SEQ ID NO: 197819 - DNA, 1539 bp, Homo sapiens
  Payload ID: 19010
  Gene Name: ubiquitously transcribed tetratricopeptide repeat containing, Y-linked
  ENST ID: ENST00000382893
  CDS Start-End: 314-937
gcgtggggttcgcccgtgacacaattacaactttgtgctggtgctggcaaagtttgtgattttaagaaattctgctgtgctctccagcactgcgagcttctgccttccctgtagtttcccagatgtgatccaggtagccgagttccgctgcccgtgcttcggtagcttaagtctttgcctcagcttttttccttgcagccgctgaggaggcgataaaattggcgtcacagtctcaagcagcgattgaaggcgtcttttcaactactcgattaaggttgggtatcgtcgtgggacttggaaatttgttgtttccatgaaatcctgcgcagtgtcgctcactaccgccgctgttgccttcggtgatgaggcaaagaaaatggcggaaggaaaagcgagccgcgagagtgaagaggagtctgttagcctgacagtcgaggaaagggaggcgcttggtggcatggacagccgtctcttcgggttcgtgaggcttcatgaagatggcgccagaacgaagaccctactaggcaaggctgttcgctgctacgaatctttaatcttaaaagctgaaggaaaagtggagtctgacttcttttgccaattaggtcacttcaacctcttgttggaagattattcaaaagcattatctgcatatcagagatattacagtttacaggctgactactggaagaatgctgcgtttttatatggccttggtttggtctacttctactacaatgcatttcattgggcaattaaagcatttcaagatgtcctttatgttgaccccagcttttgtcgagccaaggaaattcatttacgacttgggctcatgttcaaagtgaacacagactacaagtctagtttaaagcattttcagttagccttgattgactgtaatccatgtactttgtccaatgctgaaagtaagtatttttaaatgaaatacttttgagtaaagaatattaatgatacctttttttctactgatacctttgtttctgttcattcttgagaagagaagtgagaaggcatgtgcctgattcagagagtttaaatcactggagttgagttgatttgggtactatttttcttgctcaaagacagtcagtattattatttgataactgtagaaatgattggtatgtcacagagcactaacaaatagtgattacctactttagtagtttttctccctttatggtgtctatgttttcatattaatgaattacttcaccttttaatattttaggatttgcacataccgtaagcttgactattttttgaaacttttttgtgtacttggtgatgttgcaaaaatcaaaagttttcaaagccaattttaaacaaaacctgaataagttaaaaatgtgtagtttaaaaaataaatactgttttttgaactctttcagatgaatgactacagttaatattttgggaaaaaaacatgtttaaaaagaatatgaaactttaaattatgtgattttcctttgtgataaaaatgttagaatattaaagaccttttatgtcaattttttacct

SEQ ID NO: 197820 - DNA, 6661 bp, Homo sapiens
  Payload ID: 19010
  Gene Name: ubiquitously transcribed tetratricopeptide repeat containing, Y-linked
  Uniprot ID: O14607
  ENST ID: ENST00000382896
  CDS Start-End: 1006-5184
gctcatcgtttgttgtttagataatatcatgaactgataaatgcagttgccacgttgattccctagggcctggcttaccgactgaggtcataagatattatgccttctctttagacttggtcagtggagaggaaatgggcaaagaaccagcctatggaggtgacaaggccttagggccaaaagtcttgagggtgaaggtttagggcctgcgcagcttccctgccatgccccgcaaggtctcgcattcgcaaggcttgtgacagtgggagcctcattacggactctcctaaagtccatggtgtcctcttttcgcatttgcgccccgtgggtgatgcccgatgccgcccttcccatcgctctcttccccttcaagcgtatcgcaactgcaaaaacacccagcacagacactccattttctatcttaatgcatttaactagcacaacctacaggttgttccatcccagagactacccttttctccatagacgtgaccatcaaccaaccagcggtcagaatcagtcagcctctgtcatgttcctaggtccttggcgaactggctgggcggggtcccagcagcctaggagtacagtggagcaatgcctgacgtaagtcaacaaagatcacgtgagacgaatcagtcgcctagattggctacaactaagtggttgggagcggggaggtcgcggcggctgcgtggggttcgcccgtgacacaattacaactttgtgctggtgctggcaaagtttgtgattttaagaaattctgctgtgctctccagcactgcgagcttctgccttccctgtagtttcccagatgtgatccaggtagccgagttccgctgcccgtgcttcggtagcttaagtctttgcctcagcttttttccttgcagccgctgaggaggcgataaaattggcgtcacagtctcaagcagcgattgaaggcgtcttttcaactactcgattaaggttgggtatcgtcgtgggacttggaaatttgttgtttccatgaaatcctgcgcagtgtcgctcactaccgccgctgttgccttcggtgatgaggcaaagaaaatggcggaaggaaaagcgagccgcgagagtgaagaggagtctgttagcctgacagtcgaggaaagggaggcgcttggtggcatggacagccgtctcttcgggttcgtgaggcttcatgaagatggcgccagaacgaagaccctactaggcaaggctgttcgctgctacgaatctttaatcttaaaagctgaaggaaaagtggagtctgacttcttttgccaattaggtcacttcaacctcttgttggaagattattcaaaagcattatctgcatatcagagatattacagtttacaggctgactactggaagaatgctgcgtttttatatggccttggtttggtctacttctactacaatgcatttcattgggcaattaaagcatttcaagatgtcctttatgttgaccccagcttttgtcgagccaaggaaattcatttacgacttgggctcatgttcaaagtgaacacagactacaagtctagtttaaagcattttcagttagccttgattgactgtaatccatgtactttgtccaatgctgaaattcaatttcatattgcccatttgtatgaaacccagaggaagtatcattctgcaaaggaggcatatgaacaacttttgcagacagaaaaccttcctgcacaagtaaaagcaactgtattgcaacagttaggttggatgcatcataatatggatctagtaggagacaaagccacaaaggaaagctatgctattcagtatctccaaaagtctttggaggcagatcctaattctggccaatcgtggtattttcttggaaggtgttattcaagtattgggaaagttcaggatgcctttatatcttacaggcaatctattgataaatcagaagcaagtgcagatacatggtgttcaataggtgtgttgtatcagcagcaaaatcagcctatggatgctttacaggcatatatttgtgctgtacaattggaccatgggcatgccgcagcctggatggacctaggtactctctatgaatcctgcaatcaacctcaagatgccattaaatgctacctaaatgcagctagaagcaaacgttgtagtaatacctctacgcttgctgcaagaattaaatttctacaggctcagttgtgtaaccttccacaaagtagtctacagaataaaactaaattacttcctagtattgaggaggcatggagcctaccaatccccgcagagcttacctccaggcagggtgccatgaacacagcacagcagaatggttctgataactggaatggtggccagagtctttcacatcatccagtacagcaagtttattcgttgtgtttgacaccacagaaattacagcacttggaacaactgcgagcaaatagagataatttaaatccagcacagaagcatcagctggaacagttagaaagtcagtttgtcttaatgcagcaaatgagacacaaagaagttgctcaggtacgaactactggaattcataacggggccataactgattcatcactgcctacaaactctgtctctaatcgacaaccacatggtgctctgaccagagtatctagcgtctctcagcctggagttcgccctgcttgtgttgaaaaacttttgtccagtggagctttttctgcaggctgtattccttgtggcacatcaaaaattctaggaagtacagacactatcttgctaggcagtaattgtatagcaggaagtgaaagtaatggaaatgtgccttacctgcagcaaaatacacacactctacctcataatcatacagacctgaacagcagcacagaagagccatggagaaaacagctatctaactccgctcaggggcttcataaaagtcagagttcatgtttgtcaggacctaatgaagaacaacctctgttttccactgggtcagcccagtatcaccaggcaactagcactggtattaagaaggcgaatgaacatctcactctgcctagtaattcagtaccacagggggatgctgacagtcacctctcctgtcatactgctacctcaggtggacaacaaggcattatgtttaccaaagagagcaagccttcaaaaaatagatccttggtgcctgaaacaagcaggcatactggagacacatctaatggctgtgctgatgtcaagggactttctaatcatgttcatcagttgatagcagatgctgtttccagtcctaaccatggagattcaccaaatttattaattgcagacaatcctcagctctctgctttgttgattggaaaagccaatggcaatgtgggtactggaacctgtgacaaagtgaataatattcacccagctgttcatacaaagactgatcattctgttgcctcttcaccctcttcagccatttccacagcaacaccttctcctaaatccactgagcagagaagcataaacagtgttaccagccttaacagtcctcacagtggattacacacagtcaatggagaggggctggggaagtcacagagctctacaaaagtagacctgcctttagctagccacagatctacttctcagatcttaccatcaatgtcagtgtctatatgccccagttcaacagaagttctgaaagcatgcaggaatccaggtaaaaatggcttgtctaatagctgcattttgttagataaatgtccacctccaagaccaccaacttcaccatacccacccttgccaaaggacaagttgaatccacccacacctagtatttacttggaaaataaacgtgatgctttctttcctccattacatcaattttgtacaaatccaaaaaaccctgttacagtaatacgtggccttgctggagctcttaaattagatcttggacttttctctaccaaaactttggtagaagctaacaatgaacatatggtagaagtgaggacacagttgctgcaaccagcagatgaaaactgggatcccactggaacaaagaaaatctggcgttgtgaaagcaatagatctcatactacaattgccaaatacgcacaataccaggcttcctccttccaggaatcattgagagaagaaaatgagaaaagaacacaacacaaagatcattcagataacgaatccacatcttcagagaattctggaaggagaaggaaaggaccttttaaaaccataaaatttgggaccaacattgacctctctgataacaaaaagtggaagttgcagttacatgaactgactaaacttcctgcttttgcgcgtgtggtgtcagcaggaaatcttctaacccatgttgggcataccattctgggcatgaatacagtacaactgtatatgaaagttccagggagtcggacaccaggtcaccaagaaaataacaacttctgctctgttaacataaatattggtccaggagattgtgaatggtttgttgtacctgaagattattggggtgttctgaatgacttctgtgaaaaaaataatttgaattttttaatgagttcttggtggcccaaccttgaagatctttatgaagcaaatgtccctgtgtatagatttattcagcgacctggagatttggtctggataaatgcaggcactgtgcattgggttcaagctgttggctggtgcaataacattgcctggaatgttggtccacttacagcctgccagtataaattggcagtggaacggtatgaatggaacaaattgaaaagtgtgaagtcaccagtacccatggtgcatctttcctggaatatggcacgaaatatcaaagtctcagatccaaagctttttgaaatgattaagtattgtcttttgaaaattctgaagcaatatcagacattgagagaagctcttgttgcagcaggaaaagaggttatatggcatgggcggacaaatgatgaaccagctcattactgtagcatttgtgaggtggaggtttttaatctgctttttgtcactaatgaaagcaatactcaaaaaacctacatagtacattgccatgattgtgcacgaaaaacaagcaaaagtttggaaaattttgtggtgctcgaacagtacaaaatggaggacctaatccaagtttatgatcaatttacactagctctttcattatcatcctcatcttgatatagttccatgaatattaaatgagattatttctgctcttcaggaaatttctgcaccactggttttgtagctgtttcataaaactgttgactaaaagctatgtctatgcaaccttccaagaatagtatgtcaagcaactggacacagtgctgcctctgcttcaggacttaacatgctgatccagctgtacttcagaaaaataatattaatcatatgttttgtgtacgtatgacaaactgtcaaagtgacacagaatactgatttgaagatagccttttttatgtttctctatttctgggctgatgaattaatattcatttgtattttaaccctgcagaattttccttagttaaaaacactttcctagctggtcatttcttcataagatagcaaatttaaatctctcctcgatcagcttttaaaaaatgtgtactattatctgaggaagttttttactgctttatgtttttgtgtgttttgaggccatgatgattacatttgtggttccaaaataatttttttaaatattaatagcccatatacaaagataatggattgcacatagacaaagaaataaacttcagatttgtgatttttgtttctaaacttgatacagatttacactatttataaatacgtatttattgcctgaaaatatttgtgaatggaatgttgtttttttccagacgtaactgccattaaatactaaggagttctgtagttttaaacactactcctattacattttatatgtgtagataaaactgcttagtattatacagaaatttttattaaaattgttaaatgtttaaagggtttcccaatgtttgagtttaaaaaagactttctgaaaaaatccactttttgttcattttcaaacctaatgattatatgtattttatatgtgtgtgtatgtgtacacacatgtataatatatacagaaacctcgatatataattgtatagattttaaaagttttattttttacatctatggtagtttttgaggtgcctattataaagtattacggaagtttgctgtttttaaagtaaatgtcttttagtgtgatttattaagttgtagtcaccatagtgatagcccataaataattgctggaaaattgtattttataacagtagaaaacatatagtcagtgaagtaaatattttaaaggaaacattatatagatttgataaatgttgtttataattaagagtttcttatggaaaagagattcagaatgataacctcttttagagaacaaataagtgacttatttttttaaagctagatgactttgaaatgctatactgtcctgcttgtacaacatggtttggggtgaaggggaggaaagtattaaaaaatctatatcgctagtaaattgtaataagttctattaaaacttgtatttcatatgaaaaatttgctaatttaatattaactcatttgataataatacttgtcttttctacctctc

SEQ ID NO: 197821 - DNA, 6490 bp, Homo sapiens
  Payload ID: 19010
  Gene Name: ubiquitously transcribed tetratricopeptide repeat containing, Y-linked
  ENST ID: ENST00000537580
  CDS Start-End: 1006-5013
gctcatcgtttgttgtttagataatatcatgaactgataaatgcagttgccacgttgattccctagggcctggcttaccgactgaggtcataagatattatgccttctctttagacttggtcagtggagaggaaatgggcaaagaaccagcctatggaggtgacaaggccttagggccaaaagtcttgagggtgaaggtttagggcctgcgcagcttccctgccatgccccgcaaggtctcgcattcgcaaggcttgtgacagtgggagcctcattacggactctcctaaagtccatggtgtcctcttttcgcatttgcgccccgtgggtgatgcccgatgccgcccttcccatcgctctcttccccttcaagcgtatcgcaactgcaaaaacacccagcacagacactccattttctatcttaatgcatttaactagcacaacctacaggttgttccatcccagagactacccttttctccatagacgtgaccatcaaccaaccagcggtcagaatcagtcagcctctgtcatgttcctaggtccttggcgaactggctgggcggggtcccagcagcctaggagtacagtggagcaatgcctgacgtaagtcaacaaagatcacgtgagacgaatcagtcgcctagattggctacaactaagtggttgggagcggggaggtcgcggcggctgcgtggggttcgcccgtgacacaattacaactttgtgctggtgctggcaaagtttgtgattttaagaaattctgctgtgctctccagcactgcgagcttctgccttccctgtagtttcccagatgtgatccaggtagccgagttccgctgcccgtgcttcggtagcttaagtctttgcctcagcttttttccttgcagccgctgaggaggcgataaaattggcgtcacagtctcaagcagcgattgaaggcgtcttttcaactactcgattaaggttgggtatcgtcgtgggacttggaaatttgttgtttccatgaaatcctgcgcagtgtcgctcactaccgccgctgttgccttcggtgatgaggcaaagaaaatggcggaaggaaaagcgagccgcgagagtgaagaggagtctgttagcctgacagtcgaggaaagggaggcgcttggtggcatggacagccgtctcttcgggttcgtgaggcttcatgaagatggcgccagaacgaagaccctactaggcaaggctgttcgctgctacgaatctttaatcttaaaagctgaaggaaaagtggagtctgacttcttttgccaattaggtcacttcaacctcttgttggaagattattcaaaagcattatctgcatatcagagatattacagtttacaggctgactactggaagaatgctgcgtttttatatggccttggtttggtctacttctactacaatgcatttcattgggcaattaaagcatttcaagatgtcctttatgttgaccccagcttttgtcgagccaaggaaattcatttacgacttgggctcatgttcaaagtgaacacagactacaagtctagtttaaagcattttcagttagccttgattgactgtaatccatgtactttgtccaatgctgaaattcaatttcatattgcccatttgtatgaaacccagaggaagtatcattctgcaaaggaggcatatgaacaacttttgcagacagaaaaccttcctgcacaagtaaaagcaactgtattgcaacagttaggttggatgcatcataatatggatctagtaggagacaaagccacaaaggaaagctatgctattcagtatctccaaaagtctttggaggcagatcctaattctggccaatcgtggtattttcttggaaggtgttattcaagtattgggaaagttcaggatgcctttatatcttacaggcaatctattgataaatcagaagcaagtgcagatacatggtgttcaataggtgtgttgtatcagcagcaaaatcagcctatggatgctttacaggcatatatttgtgctgtacaattggaccatgggcatgccgcagcctggatggacctaggtactctctatgaatcctgcaatcaacctcaagatgccattaaatgctacctaaatgcagctagaagcaaacgttgtagtaatacctctacgcttgctgcaagaattaaatttctacaggctcagttgtgtaaccttccacaaagtagtctacagaataaaactaaattacttcctagtattgaggaggcatggagcctaccaatccccgcagagcttacctccaggcagggtgccatgaacacagcacagcagaatggttctgataactggaatggtggccagagtctttcacatcatccagtacagcaagtttattcgttgtgtttgacaccacagaaattacagcacttggaacaactgcgagcaaatagagataatttaaatccagcacagaagcatcagctggaacagttagaaagtcagtttgtcttaatgcagcaaatgagacacaaagaagttgctcaggtacgaactactggaattcataacggggccataactgattcatcactgcctacaaactctgtctctaatcgacaaccacatggtgctctgaccagagtatctagcgtctctcagcctggagttcgccctgcttgtgttgaaaaacttttgtccagtggagctttttctgcaggctgtattccttgtggcacatcaaaaattctaggaagtacagacactatcttgctaggcagtaattgtatagcaggaagtgaaagtaatggaaatgtgccttacctgcagcaaaatacacacactctacctcataatcatacagacctgaacagcagcacagaagagccatggagaaaacagctatctaactccgctcaggggcttcataaaagtcagagttcatgtttgtcaggacctaatgaagaacaacctctgttttccactgggtcagcccagtatcaccaggcaactagcactggtattaagaaggcgaatgaacatctcactctgcctagtaattcagtaccacagggggatgctgacagtcacctctcctgtcatactgctacctcaggtggacaacaaggcattatgtttaccaaagagagcaagccttcaaaaaatagatccttggtgcctgaaacaagcaggcatactggagacacatctaatggctgtgctgatgtcaagggactttctaatcatgttcatcagttgatagcagatgctgtttccagtcctaaccatggagattcaccaaatttattaattgcagacaatcctcagctctctgctttgttgattggaaaagccaatggcaatgtgggtactggaacctgtgacaaagtgaataatattcacccagctgttcatacaaagactgatcattctgttgcctcttcaccctcttcagccatttccacagcaacaccttctcctaaatccactgagcagagaagcataaacagtgttaccagccttaacagtcctcacagtggattacacacagtcaatggagaggggctggggaagtcacagagctctacaaaagtagacctgcctttagctagccacagatctacttctcagatcttaccatcaatgtcagtgtctatatgccccagttcaacagaagttctgaaagcatgcaggaatccaggtaaaaatggcttgtctaatagctgcattttgttagataaatgtccacctccaagaccaccaacttcaccatacccacccttgccaaaggacaagttgaatccacccacacctagtatttacttggaaaataaacgtgatgctttctttcctccattacatcaattttgtacaaatccaaaaaaccctgttacagtaatacgtggccttgctggagctcttaaattagatcttggacttttctctaccaaaactttggtagaagctaacaatgaacatatggtagaagtgaggacacagttgctgcaaccagcagatgaaaactgggatcccactggaacaaagaaaatctggcgttgtgaaagcaatagatctcatactacaattgccaaatacgcacaataccaggcttcctccttccaggaatcattgagagaagaaaatgagaaaagaacacaacacaaagatcattcagataacgaatccacatcttcagagaattctggaaggagaaggaaaggaccttttaaaaccataaaatttgggaccaacattgacctctctgataacaaaaagtggaagttgcagttacatgaactgactaaacttcctgcttttgcgcgtgtggtgtcagcaggaaatcttctaacccatgttgggcataccattctgggcatgaatacagtacaactgtatatgaaagttccagggagtcggacaccaggtcaccaagaaaataacaacttctgctctgttaacataaatattggtccaggagattgtgaatggtttgttgtacctgaagattattggggtgttctgaatgacttctgtgaaaaaaataatttgaattttttaatgagttcttggtggcccaaccttgaagatctttatgaagcaaatgtccctgtgtatagatttattcagcgacctggagatttggtctggataaatgcaggcactgtgcattgggttcaagctgttggctggtgcaataacattgcctggaatgttggtccacttacagcctgccagtataaattggcagtggaacggtatgaatggaacaaattgaaaagtgtgaagtcaccagtacccatggtgcatctttcctggaatatggcacgaaatatcaaagtctcagatccaaagctttttgaaatgattaagtattgtcttttgaaaattctgaagcaatatcagacattgagagaagctcttgttgcagcaggaaaagaggttatatggcatgggcggacaaatgatgaaccagctcattactgtagcatttgtgaggctctttcattatcatcctcatcttgatatagttccatgaatattaaatgagattatttctgctcttcaggaaatttctgcaccactggttttgtagctgtttcataaaactgttgactaaaagctatgtctatgcaaccttccaagaatagtatgtcaagcaactggacacagtgctgcctctgcttcaggacttaacatgctgatccagctgtacttcagaaaaataatattaatcatatgttttgtgtacgtatgacaaactgtcaaagtgacacagaatactgatttgaagatagccttttttatgtttctctatttctgggctgatgaattaatattcatttgtattttaaccctgcagaattttccttagttaaaaacactttcctagctggtcatttcttcataagatagcaaatttaaatctctcctcgatcagcttttaaaaaatgtgtactattatctgaggaagttttttactgctttatgtttttgtgtgttttgaggccatgatgattacatttgtggttccaaaataatttttttaaatattaatagcccatatacaaagataatggattgcacatagacaaagaaataaacttcagatttgtgatttttgtttctaaacttgatacagatttacactatttataaatacgtatttattgcctgaaaatatttgtgaatggaatgttgtttttttccagacgtaactgccattaaatactaaggagttctgtagttttaaacactactcctattacattttatatgtgtagataaaactgcttagtattatacagaaatttttattaaaattgttaaatgtttaaagggtttcccaatgtttgagtttaaaaaagactttctgaaaaaatccactttttgttcattttcaaacctaatgattatatgtattttatatgtgtgtgtatgtgtacacacatgtataatatatacagaaacctcgatatataattgtatagattttaaaagttttattttttacatctatggtagtttttgaggtgcctattataaagtattacggaagtttgctgtttttaaagtaaatgtcttttagtgtgatttattaagttgtagtcaccatagtgatagcccataaataattgctggaaaattgtattttataacagtagaaaacatatagtcagtgaagtaaatattttaaaggaaacattatatagatttgataaatgttgtttataattaagagtttcttatggaaaagagattcagaatgataacctcttttagagaacaaataagtgacttatttttttaaagctagatgactttgaaatgctatactgtcctgcttgtacaacatggtttggggtgaaggggaggaaagtattaaaaaatctatatcgctagtaaattgtaataagttctattaaaacttgtatttcatatgaaaaatttgctaatttaatattaactcatttgataataatacttgtcttttctacctctc

SEQ ID NO: 197822 - DNA, 6652 bp, Homo sapiens
  Payload ID: 19010
  Gene Name: ubiquitously transcribed tetratricopeptide repeat containing, Y-linked
  ENST ID: ENST00000540140
  CDS Start-End: 1006-5175
gctcatcgtttgttgtttagataatatcatgaactgataaatgcagttgccacgttgattccctagggcctggcttaccgactgaggtcataagatattatgccttctctttagacttggtcagtggagaggaaatgggcaaagaaccagcctatggaggtgacaaggccttagggccaaaagtcttgagggtgaaggtttagggcctgcgcagcttccctgccatgccccgcaaggtctcgcattcgcaaggcttgtgacagtgggagcctcattacggactctcctaaagtccatggtgtcctcttttcgcatttgcgccccgtgggtgatgcccgatgccgcccttcccatcgctctcttccccttcaagcgtatcgcaactgcaaaaacacccagcacagacactccattttctatcttaatgcatttaactagcacaacctacaggttgttccatcccagagactacccttttctccatagacgtgaccatcaaccaaccagcggtcagaatcagtcagcctctgtcatgttcctaggtccttggcgaactggctgggcggggtcccagcagcctaggagtacagtggagcaatgcctgacgtaagtcaacaaagatcacgtgagacgaatcagtcgcctagattggctacaactaagtggttgggagcggggaggtcgcggcggctgcgtggggttcgcccgtgacacaattacaactttgtgctggtgctggcaaagtttgtgattttaagaaattctgctgtgctctccagcactgcgagcttctgccttccctgtagtttcccagatgtgatccaggtagccgagttccgctgcccgtgcttcggtagcttaagtctttgcctcagcttttttccttgcagccgctgaggaggcgataaaattggcgtcacagtctcaagcagcgattgaaggcgtcttttcaactactcgattaaggttgggtatcgtcgtgggacttggaaatttgttgtttccatgaaatcctgcgcagtgtcgctcactaccgccgctgttgccttcggtgatgaggcaaagaaaatggcggaaggaaaagcgagccgcgagagtgaagaggagtctgttagcctgacagtcgaggaaagggaggcgcttggtggcatggacagccgtctcttcgggttcgtgaggcttcatgaagatggcgccagaacgaagaccctactaggcaaggctgttcgctgctacgaatctttaatcttaaaagctgaaggaaaagtggagtctgacttcttttgccaattaggtcacttcaacctcttgttggaagattattcaaaagcattatctgcatatcagagatattacagtttacaggctgactactggaagaatgctgcgtttttatatggccttggtttggtctacttctactacaatgcatttcattgggcaattaaagcatttcaagatgtcctttatgttgaccccagcttttgtcgagccaaggaaattcatttacgacttgggctcatgttcaaagtgaacacagactacaagtctagtttaaagcattttcagttagccttgattgactgtaatccatgtactttgtccaatgctgaaattcaatttcatattgcccatttgtatgaaacccagaggaagtatcattctgcaaaggaggcatatgaacaacttttgcagacagaaaaccttcctgcacaagtaaaagcaactgtattgcaacagttaggttggatgcatcataatatggatctagtaggagacaaagccacaaaggaaagctatgctattcagtatctccaaaagtctttggaggcagatcctaattctggccaatcgtggtattttcttggaagtgtgttgtatcagcagcaaaatcagcctatggatgctttacaggcatatatttgtgctgtacaattggaccatgggcatgccgcagcctggatggacctaggtactctctatgaatcctgcaatcaacctcaagatgccattaaatgctacctaaatgcagctagaagcaaacgttgtagtaatacctctacgcttgctgcaagaattaaatttctacaggctcagttgtgtaaccttccacaaagtagtctacagaataaaactaaattacttcctagtattgaggaggcatggagcctaccaatccccgcagagcttacctccaggcagggtgccatgaacacagcacagcagcaatccttgtcactacacatgattacttctagccaagtagaaggcctgtccagtcctgccaagaagaaaagaacatctagtccaacaaagaatggttctgataactggaatggtggccagagtctttcacatcatccagtacagcaagtttattcgttgtgtttgacaccacagaaattacagcacttggaacaactgcgagcaaatagagataatttaaatccagcacagaagcatcagctggaacagttagaaagtcagtttgtcttaatgcagcaaatgagacacaaagaagttgctcaggtacgaactactggaattcataacggggccataactgattcatcactgcctacaaactctgtctctaatcgacaaccacatggtgctctgaccagagtatctagcgtctctcagcctggagttcgccctgcttgtgttgaaaaacttttgtccagtggagctttttctgcaggctgtattccttgtggcacatcaaaaattctaggaagtacagacactatcttgctaggcagtaattgtatagcaggaagtgaaagtaatggaaatgtgccttacctgcagcaaaatacacacactctacctcataatcatacagacctgaacagcagcacagaagagccatggagaaaacagctatctaactccgctcaggggcttcataaaagtcagagttcatgtttgtcaggacctaatgaagaacaacctctgttttccactgggtcagcccagtatcaccaggcaactagcactggtattaagaaggcgaatgaacatctcactctgcctagtaattcagtaccacagggggatgctgacagtcacctctcctgtcatactgctacctcaggtggacaacaaggcattatgtttaccaaagagagcaagccttcaaaaaatagatccttggtgcctgaaacaagcaggcatactggagacacatctaatggctgtgctgatgtcaagggactttctaatcatgttcatcagttgatagcagatgctgtttccagtcctaaccatggagattcaccaaatttattaattgcagacaatcctcagctctctgctttgttgattggaaaagccaatggcaatgtgggtactggaacctgtgacaaagtgaataatattcacccagctgttcatacaaagactgatcattctgttgcctcttcaccctcttcagccatttccacagcaacaccttctcctaaatccactgagcagagaagcataaacagtgttaccagccttaacagtcctcacagtggattacacacagtcaatggagaggggctggggaagtcacagagctctacaaaagtagacctgcctttagctagccacagatctacttctcagatcttaccatcaatgtcagtgtctatatgccccagttcaacagaagttctgaaagcatgcaggaatccaggtaaaaatggcttgtctaatagctgcattttgttagataaatgtccacctccaagaccaccaacttcaccatacccacccttgccaaaggacaagttgaatccacccacacctagtatttacttggaaaataaacgtgatgctttctttcctccattacatcaattttgtacaaatccaaaaaaccctgttacagtaatacgtggccttgctggagctcttaaattagatcttggacttttctctaccaaaactttggtagaagctaacaatgaacatatggtagaagtgaggacacagttgctgcaaccagcagatgaaaactgggatcccactggaacaaagaaaatctggcgttgtgaaagcaatagatctcatactacaattgccaaatacgcacaataccaggcttcctccttccaggaatcattgagagaagaaaatgagaaaagaacacaacacaaagatcattcagataacgaatccacatcttcagagaattctggaaggagaaggaaaggaccttttaaaaccataaaatttgggaccaacattgacctctctgataacaaaaagtggaagttgcagttacatgaactgactaaacttcctgcttttgcgcgtgtggtgtcagcaggaaatcttctaacccatgttgggcataccattctgggcatgaatacagtacaactgtatatgaaagttccagggagtcggacaccaggtcaccaagaaaataacaacttctgctctgttaacataaatattggtccaggagattgtgaatggtttgttgtacctgaagattattggggtgttctgaatgacttctgtgaaaaaaataatttgaattttttaatgagttcttggtggcccaaccttgaagatctttatgaagcaaatgtccctgtgtatagatttattcagcgacctggagatttggtctggataaatgcaggcactgtgcattgggttcaagctgttggctggtgcaataacattgcctggaatgttggtccacttacagcctgccagtataaattggcagtggaacggtatgaatggaacaaattgaaaagtgtgaagtcaccagtacccatggtgcatctttcctggaatatggcacgaaatatcaaagtctcagatccaaagctttttgaaatgattaagtattgtcttttgaaaattctgaagcaatatcagacattgagagaagctcttgttgcagcaggaaaagaggttatatggcatgggcggacaaatgatgaaccagctcattactgtagcatttgtgaggtggaggtttttaatctgctttttgtcactaatgaaagcaatactcaaaaaacctacatagtacattgccatgattgtgcacgaaaaacaagcaaaagtttggaaaattttgtggtgctcgaacagtacaaaatggaggacctaatccaagtttatgatcaatttacactagctctttcattatcatcctcatcttgatatagttccatgaatattaaatgagattatttctgctcttcaggaaatttctgcaccactggttttgtagctgtttcataaaactgttgactaaaagctatgtctatgcaaccttccaagaatagtatgtcaagcaactggacacagtgctgcctctgcttcaggacttaacatgctgatccagctgtacttcagaaaaataatattaatcatatgttttgtgtacgtatgacaaactgtcaaagtgacacagaatactgatttgaagatagccttttttatgtttctctatttctgggctgatgaattaatattcatttgtattttaaccctgcagaattttccttagttaaaaacactttcctagctggtcatttcttcataagatagcaaatttaaatctctcctcgatcagcttttaaaaaatgtgtactattatctgaggaagttttttactgctttatgtttttgtgtgttttgaggccatgatgattacatttgtggttccaaaataatttttttaaatattaatagcccatatacaaagataatggattgcacatagacaaagaaataaacttcagatttgtgatttttgtttctaaacttgatacagatttacactatttataaatacgtatttattgcctgaaaatatttgtgaatggaatgttgtttttttccagacgtaactgccattaaatactaaggagttctgtagttttaaacactactcctattacattttatatgtgtagataaaactgcttagtattatacagaaatttttattaaaattgttaaatgtttaaagggtttcccaatgtttgagtttaaaaaagactttctgaaaaaatccactttttgttcattttcaaacctaatgattatatgtattttatatgtgtgtgtatgtgtacacacatgtataatatatacagaaacctcgatatataattgtatagattttaaaagttttattttttacatctatggtagtttttgaggtgcctattataaagtattacggaagtttgctgtttttaaagtaaatgtcttttagtgtgatttattaagttgtagtcaccatagtgatagcccataaataattgctggaaaattgtattttataacagtagaaaacatatagtcagtgaagtaaatattttaaaggaaacattatatagatttgataaatgttgtttataattaagagtttcttatggaaaagagattcagaatgataacctcttttagagaacaaataagtgacttatttttttaaagctagatgactttgaaatgctatactgtcctgcttgtacaacatggtttggggtgaaggggaggaaagtattaaaaaatctatatcgctagtaaattgtaataagttctattaaaacttgtatttcatatgaaaaatttgctaatttaatattaactcatttgataataatacttgtcttttctacctctc

SEQ ID NO: 197823 - DNA, 6817 bp, Homo sapiens
  Payload ID: 19010
  Gene Name: ubiquitously transcribed tetratricopeptide repeat containing, Y-linked
  ENST ID: ENST00000545955
  CDS Start-End: 1006-5340
gctcatcgtttgttgtttagataatatcatgaactgataaatgcagttgccacgttgattccctagggcctggcttaccgactgaggtcataagatattatgccttctctttagacttggtcagtggagaggaaatgggcaaagaaccagcctatggaggtgacaaggccttagggccaaaagtcttgagggtgaaggtttagggcctgcgcagcttccctgccatgccccgcaaggtctcgcattcgcaaggcttgtgacagtgggagcctcattacggactctcctaaagtccatggtgtcctcttttcgcatttgcgccccgtgggtgatgcccgatgccgcccttcccatcgctctcttccccttcaagcgtatcgcaactgcaaaaacacccagcacagacactccattttctatcttaatgcatttaactagcacaacctacaggttgttccatcccagagactacccttttctccatagacgtgaccatcaaccaaccagcggtcagaatcagtcagcctctgtcatgttcctaggtccttggcgaactggctgggcggggtcccagcagcctaggagtacagtggagcaatgcctgacgtaagtcaacaaagatcacgtgagacgaatcagtcgcctagattggctacaactaagtggttgggagcggggaggtcgcggcggctgcgtggggttcgcccgtgacacaattacaactttgtgctggtgctggcaaagtttgtgattttaagaaattctgctgtgctctccagcactgcgagcttctgccttccctgtagtttcccagatgtgatccaggtagccgagttccgctgcccgtgcttcggtagcttaagtctttgcctcagcttttttccttgcagccgctgaggaggcgataaaattggcgtcacagtctcaagcagcgattgaaggcgtcttttcaactactcgattaaggttgggtatcgtcgtgggacttggaaatttgttgtttccatgaaatcctgcgcagtgtcgctcactaccgccgctgttgccttcggtgatgaggcaaagaaaatggcggaaggaaaagcgagccgcgagagtgaagaggagtctgttagcctgacagtcgaggaaagggaggcgcttggtggcatggacagccgtctcttcgggttcgtgaggcttcatgaagatggcgccagaacgaagaccctactaggcaaggctgttcgctgctacgaatctttaatcttaaaagctgaaggaaaagtggagtctgacttcttttgccaattaggtcacttcaacctcttgttggaagattattcaaaagcattatctgcatatcagagatattacagtttacaggctgactactggaagaatgctgcgtttttatatggccttggtttggtctacttctactacaatgcatttcattgggcaattaaagcatttcaagatgtcctttatgttgaccccagcttttgtcgagccaaggaaattcatttacgacttgggctcatgttcaaagtgaacacagactacaagtctagtttaaagcattttcagttagccttgattgactgtaatccatgtactttgtccaatgctgaaattcaatttcatattgcccatttgtatgaaacccagaggaagtatcattctgcaaaggaggcatatgaacaacttttgcagacagaaaaccttcctgcacaagtaaaagcaactgtattgcaacagttaggttggatgcatcataatatggatctagtaggagacaaagccacaaaggaaagctatgctattcagtatctccaaaagtctttggaggcagatcctaattctggccaatcgtggtattttcttggaaggtgttattcaagtattgggaaagttcaggatgcctttatatcttacaggcaatctattgataaatcagaagcaagtgcagatacatggtgttcaataggtgtgttgtatcagcagcaaaatcagcctatggatgctttacaggcatatatttgtgctgtacaattggaccatgggcatgccgcagcctggatggacctaggtactctctatgaatcctgcaatcaacctcaagatgccattaaatgctacctaaatgcagctagaagcaaacgttgtagtaatacctctacgcttgctgcaagaattaaatttctacaggctcagttgtgtaaccttccacaaagtagtctacagaataaaactaaattacttcctagtattgaggaggcatggagcctaccaatccccgcagagcttacctccaggcagggtgccatgaacacagcacagcaggcttatagagctcatgatccaaatactgaacatgtattaaaccacagtcaaacaccaattttacagcaatccttgtcactacacatgattacttctagccaagtagaaggcctgtccagtcctgccaagaagaaaagaacatctagtccaacaaagaatggttctgataactggaatggtggccagagtctttcacatcatccagtacagcaagtttattcgttgtgtttgacaccacagaaattacagcacttggaacaactgcgagcaaatagagataatttaaatccagcacagaagcatcagctggaacagttagaaagtcagtttgtcttaatgcagcaaatgagacacaaagaagttgctcaggtacgaactactggaattcataacggggccataactgattcatcactgcctacaaactctgtctctaatcgacaaccacatggtgctctgaccagagtatctagcgtctctcagcctggagttcgccctgcttgtgttgaaaaacttttgtccagtggagctttttctgcaggctgtattccttgtggcacatcaaaaattctaggaagtacagacactatcttgctaggcagtaattgtatagcaggaagtgaaagtaatggaaatgtgccttacctgcagcaaaatacacacactctacctcataatcatacagacctgaacagcagcacagaagagccatggagaaaacagctatctaactccgctcaggggcttcataaaagtcagagttcatgtttgtcaggacctaatgaagaacaacctctgttttccactgggtcagcccagtatcaccaggcaactagcactggtattaagaaggcgaatgaacatctcactctgcctagtaattcagtaccacagggggatgctgacagtcacctctcctgtcatactgctacctcaggtggacaacaaggcattatgtttaccaaagagagcaagccttcaaaaaatagatccttggtgcctgaaacaagcaggcatactggagacacatctaatggctgtgctgatgtcaagggactttctaatcatgttcatcagttgatagcagatgctgtttccagtcctaaccatggagattcaccaaatttattaattgcagacaatcctcagctctctgctttgttgattggaaaagccaatggcaatgtgggtactggaacctgtgacaaagtgaataatattcacccagctgttcatacaaagactgatcattctgttgcctcttcaccctcttcagccatttccacagcaacaccttctcctaaatccactgagcagagaagcataaacagtgttaccagccttaacagtcctcacagtggattacacacagtcaatggagaggggctggggaagtcacagagctctacaaaagtagacctgcctttagctagccacagatctacttctcagatcttaccatcaatgtcagtgtctatatgccccagttcaacagaagttctgaaagcatgcaggaatccaggtaaaaatggcttgtctaatagctgcattttgttagataaatgtccacctccaagaccaccaacttcaccatacccacccttgccaaaggacaagttgaatccacccacacctagtatttacttggaaaataaacgtgatgctttctttcctccattacatcaattttgtacaaatccaaaaaaccctgttacagtaatacgtggccttgctggagctcttaaattagatcttggacttttctctaccaaaactttggtagaagctaacaatgaacatatggtagaagtgaggacacagttgctgcaaccagcagatgaaaactgggatcccactggaacaaagaaaatctggcgttgtgaaagcaatagatctcatactacaattgccaaatacgcacaataccaggcttcctccttccaggaatcattgagagaagaaaatgagaaaagaacacaacacaaagatcattcagataacgaatccacatcttcagagaattctggaaggagaaggaaaggaccttttaaaaccataaaatttgggaccaacattgacctctctgataacaaaaagtggaagttgcagttacatgaactgactaaacttcctgcttttgcgcgtgtggtgtcagcaggaaatcttctaacccatgttgggcataccattctgggcatgaatacagtacaactgtatatgaaagttccagggagtcggacaccaggtcaccaagaaaataacaacttctgctctgttaacataaatattggtccaggagattgtgaatggtttgttgtacctgaagattattggggtgttctgaatgacttctgtgaaaaaaataatttgaattttttaatgagttcttggtggcccaaccttgaagatctttatgaagcaaatgtccctgtgtatagatttattcagcgacctggagatttggtctggataaatgcaggcactgtgcattgggttcaagctgttggctggtgcaataacattgcctggaatgttggtccacttacagcctgccagtataaattggcagtggaacggtatgaatggaacaaattgaaaagtgtgaagtcaccagtacccatggtgcatctttcctggaatatggcacgaaatatcaaagtctcagatccaaagctttttgaaatgattaagtattgtcttttgaaaattctgaagcaatatcagacattgagagaagctcttgttgcagcaggaaaagaggttatatggcatgggcggacaaatgatgaaccagctcattactgtagcatttgtgaggtggaggtttttaatctgctttttgtcactaatgaaagcaatactcaaaaaacctacatagtacattgccatgattgtgcacgaaaaacaagcaaaagtttggaaaattttgtggtgctcgaacagtacaaaatggaggacctaatccaagtttatgatcaatttacactagctctttcattatcatcctcatcttgatatagttccatgaatattaaatgagattatttctgctcttcaggaaatttctgcaccactggttttgtagctgtttcataaaactgttgactaaaagctatgtctatgcaaccttccaagaatagtatgtcaagcaactggacacagtgctgcctctgcttcaggacttaacatgctgatccagctgtacttcagaaaaataatattaatcatatgttttgtgtacgtatgacaaactgtcaaagtgacacagaatactgatttgaagatagccttttttatgtttctctatttctgggctgatgaattaatattcatttgtattttaaccctgcagaattttccttagttaaaaacactttcctagctggtcatttcttcataagatagcaaatttaaatctctcctcgatcagcttttaaaaaatgtgtactattatctgaggaagttttttactgctttatgtttttgtgtgttttgaggccatgatgattacatttgtggttccaaaataatttttttaaatattaatagcccatatacaaagataatggattgcacatagacaaagaaataaacttcagatttgtgatttttgtttctaaacttgatacagatttacactatttataaatacgtatttattgcctgaaaatatttgtgaatggaatgttgtttttttccagacgtaactgccattaaatactaaggagttctgtagttttaaacactactcctattacattttatatgtgtagataaaactgcttagtattatacagaaatttttattaaaattgttaaatgtttaaagggtttcccaatgtttgagtttaaaaaagactttctgaaaaaatccactttttgttcattttcaaacctaatgattatatgtattttatatgtgtgtgtatgtgtacacacatgtataatatatacagaaacctcgatatataattgtatagattttaaaagttttattttttacatctatggtagtttttgaggtgcctattataaagtattacggaagtttgctgtttttaaagtaaatgtcttttagtgtgatttattaagttgtagtcaccatagtgatagcccataaataattgctggaaaattgtattttataacagtagaaaacatatagtcagtgaagtaaatattttaaaggaaacattatatagatttgataaatgttgtttataattaagagtttcttatggaaaagagattcagaatgataacctcttttagagaacaaataagtgacttatttttttaaagctagatgactttgaaatgctatactgtcctgcttgtacaacatggtttggggtgaaggggaggaaagtattaaaaaatctatatcgctagtaaattgtaataagttctattaaaacttgtatttcatatgaaaaatttgctaatttaatattaactcatttgataataatacttgtcttttctacctctc

SEQ ID NO: 197824 - DNA, 6574 bp, Homo sapiens
  Payload ID: 19010
  Gene Name: ubiquitously transcribed tetratricopeptide repeat containing, Y-linked
  ENST ID: ENST00000538878
  CDS Start-End: 1006-5097
gctcatcgtttgttgtttagataatatcatgaactgataaatgcagttgccacgttgattccctagggcctggcttaccgactgaggtcataagatattatgccttctctttagacttggtcagtggagaggaaatgggcaaagaaccagcctatggaggtgacaaggccttagggccaaaagtcttgagggtgaaggtttagggcctgcgcagcttccctgccatgccccgcaaggtctcgcattcgcaaggcttgtgacagtgggagcctcattacggactctcctaaagtccatggtgtcctcttttcgcatttgcgccccgtgggtgatgcccgatgccgcccttcccatcgctctcttccccttcaagcgtatcgcaactgcaaaaacacccagcacagacactccattttctatcttaatgcatttaactagcacaacctacaggttgttccatcccagagactacccttttctccatagacgtgaccatcaaccaaccagcggtcagaatcagtcagcctctgtcatgttcctaggtccttggcgaactggctgggcggggtcccagcagcctaggagtacagtggagcaatgcctgacgtaagtcaacaaagatcacgtgagacgaatcagtcgcctagattggctacaactaagtggttgggagcggggaggtcgcggcggctgcgtggggttcgcccgtgacacaattacaactttgtgctggtgctggcaaagtttgtgattttaagaaattctgctgtgctctccagcactgcgagcttctgccttccctgtagtttcccagatgtgatccaggtagccgagttccgctgcccgtgcttcggtagcttaagtctttgcctcagcttttttccttgcagccgctgaggaggcgataaaattggcgtcacagtctcaagcagcgattgaaggcgtcttttcaactactcgattaaggttgggtatcgtcgtgggacttggaaatttgttgtttccatgaaatcctgcgcagtgtcgctcactaccgccgctgttgccttcggtgatgaggcaaagaaaatggcggaaggaaaagcgagccgcgagagtgaagaggagtctgttagcctgacagtcgaggaaagggaggcgcttggtggcatggacagccgtctcttcgggttcgtgaggcttcatgaagatggcgccagaacgaagaccctactaggcaaggctgttcgctgctacgaatctttaatcttaaaagctgaaggaaaagtggagtctgacttcttttgccaattaggtcacttcaacctcttgttggaagattattcaaaagcattatctgcatatcagagatattacagtttacaggctgactactggaagaatgctgcgtttttatatggccttggtttggtctacttctactacaatgcatttcattgggcaattaaagcatttcaagatgtcctttatgttgaccccagcttttgtcgagccaaggaaattcatttacgacttgggctcatgttcaaagtgaacacagactacaagtctagtttaaagcattttcagttagccttgattgactgtaatccatgtactttgtccaatgctgaaattcaatttcatattgcccatttgtatgaaacccagaggaagtatcattctgcaaaggaggcatatgaacaacttttgcagacagaaaaccttcctgcacaagtaaaagcaactgtattgcaacagttaggttggatgcatcataatatggatctagtaggagacaaagccacaaaggaaagctatgctattcagtatctccaaaagtctttggaggcagatcctaattctggccaatcgtggtattttcttggaaggtgttattcaagtattgggaaagttcaggatgcctttatatcttacaggcaatctattgataaatcagaagcaagtgcagatacatggtgttcaataggtgtgttgtatcagcagcaaaatcagcctatggatgctttacaggcatatatttgtgctgtacaattggaccatgggcatgccgcagcctggatggacctaggtactctctatgaatcctgcaatcaacctcaagatgccattaaatgctacctaaatgcagctagaagcaaacgttgtagtaatacctctacgcttgctgcaagaattaaatttctacagaatggttctgataactggaatggtggccagagtctttcacatcatccagtacagcaagtttattcgttgtgtttgacaccacagaaattacagcacttggaacaactgcgagcaaatagagataatttaaatccagcacagaagcatcagctggaacagttagaaagtcagtttgtcttaatgcagcaaatgagacacaaagaagttgctcaggtacgaactactggaattcataacggggccataactgattcatcactgcctacaaactctgtctctaatcgacaaccacatggtgctctgaccagagtatctagcgtctctcagcctggagttcgccctgcttgtgttgaaaaacttttgtccagtggagctttttctgcaggctgtattccttgtggcacatcaaaaattctaggaagtacagacactatcttgctaggcagtaattgtatagcaggaagtgaaagtaatggaaatgtgccttacctgcagcaaaatacacacactctacctcataatcatacagacctgaacagcagcacagaagagccatggagaaaacagctatctaactccgctcaggcctaccttggacatcttacaggtttcatacaagacaactgcaataaagggcttcataaaagtcagagttcatgtttgtcaggacctaatgaagaacaacctctgttttccactgggtcagcccagtatcaccaggcaactagcactggtattaagaaggcgaatgaacatctcactctgcctagtaattcagtaccacagggggatgctgacagtcacctctcctgtcatactgctacctcaggtggacaacaaggcattatgtttaccaaagagagcaagccttcaaaaaatagatccttggtgcctgaaacaagcaggcatactggagacacatctaatggctgtgctgatgtcaagggactttctaatcatgttcatcagttgatagcagatgctgtttccagtcctaaccatggagattcaccaaatttattaattgcagacaatcctcagctctctgctttgttgattggaaaagccaatggcaatgtgggtactggaacctgtgacaaagtgaataatattcacccagctgttcatacaaagactgatcattctgttgcctcttcaccctcttcagccatttccacagcaacaccttctcctaaatccactgagcagagaagcataaacagtgttaccagccttaacagtcctcacagtggattacacacagtcaatggagaggggctggggaagtcacagagctctacaaaagtagacctgcctttagctagccacagatctacttctcagatcttaccatcaatgtcagtgtctatatgccccagttcaacagaagttctgaaagcatgcaggaatccaggtaaaaatggcttgtctaatagctgcattttgttagataaatgtccacctccaagaccaccaacttcaccatacccacccttgccaaaggacaagttgaatccacccacacctagtatttacttggaaaataaacgtgatgctttctttcctccattacatcaattttgtacaaatccaaaaaaccctgttacagtaatacgtggccttgctggagctcttaaattagatcttggacttttctctaccaaaactttggtagaagctaacaatgaacatatggtagaagtgaggacacagttgctgcaaccagcagatgaaaactgggatcccactggaacaaagaaaatctggcgttgtgaaagcaatagatctcatactacaattgccaaatacgcacaataccaggcttcctccttccaggaatcattgagagaagaaaatgagaaaagaacacaacacaaagatcattcagataacgaatccacatcttcagagaattctggaaggagaaggaaaggaccttttaaaaccataaaatttgggaccaacattgacctctctgataacaaaaagtggaagttgcagttacatgaactgactaaacttcctgcttttgcgcgtgtggtgtcagcaggaaatcttctaacccatgttgggcataccattctgggcatgaatacagtacaactgtatatgaaagttccagggagtcggacaccaggtcaccaagaaaataacaacttctgctctgttaacataaatattggtccaggagattgtgaatggtttgttgtacctgaagattattggggtgttctgaatgacttctgtgaaaaaaataatttgaattttttaatgagttcttggtggcccaaccttgaagatctttatgaagcaaatgtccctgtgtatagatttattcagcgacctggagatttggtctggataaatgcaggcactgtgcattgggttcaagctgttggctggtgcaataacattgcctggaatgttggtccacttacagcctgccagtataaattggcagtggaacggtatgaatggaacaaattgaaaagtgtgaagtcaccagtacccatggtgcatctttcctggaatatggcacgaaatatcaaagtctcagatccaaagctttttgaaatgattaagtattgtcttttgaaaattctgaagcaatatcagacattgagagaagctcttgttgcagcaggaaaagaggttatatggcatgggcggacaaatgatgaaccagctcattactgtagcatttgtgaggtggaggtttttaatctgctttttgtcactaatgaaagcaatactcaaaaaacctacatagtacattgccatgattgtgcacgaaaaacaagcaaaagtttggaaaattttgtggtgctcgaacagtacaaaatggaggacctaatccaagtttatgatcaatttacactagctctttcattatcatcctcatcttgatatagttccatgaatattaaatgagattatttctgctcttcaggaaatttctgcaccactggttttgtagctgtttcataaaactgttgactaaaagctatgtctatgcaaccttccaagaatagtatgtcaagcaactggacacagtgctgcctctgcttcaggacttaacatgctgatccagctgtacttcagaaaaataatattaatcatatgttttgtgtacgtatgacaaactgtcaaagtgacacagaatactgatttgaagatagccttttttatgtttctctatttctgggctgatgaattaatattcatttgtattttaaccctgcagaattttccttagttaaaaacactttcctagctggtcatttcttcataagatagcaaatttaaatctctcctcgatcagcttttaaaaaatgtgtactattatctgaggaagttttttactgctttatgtttttgtgtgttttgaggccatgatgattacatttgtggttccaaaataatttttttaaatattaatagcccatatacaaagataatggattgcacatagacaaagaaataaacttcagatttgtgatttttgtttctaaacttgatacagatttacactatttataaatacgtatttattgcctgaaaatatttgtgaatggaatgttgtttttttccagacgtaactgccattaaatactaaggagttctgtagttttaaacactactcctattacattttatatgtgtagataaaactgcttagtattatacagaaatttttattaaaattgttaaatgtttaaagggtttcccaatgtttgagtttaaaaaagactttctgaaaaaatccactttttgttcattttcaaacctaatgattatatgtattttatatgtgtgtgtatgtgtacacacatgtataatatatacagaaacctcgatatataattgtatagattttaaaagttttattttttacatctatggtagtttttgaggtgcctattataaagtattacggaagtttgctgtttttaaagtaaatgtcttttagtgtgatttattaagttgtagtcaccatagtgatagcccataaataattgctggaaaattgtattttataacagtagaaaacatatagtcagtgaagtaaatattttaaaggaaacattatatagatttgataaatgttgtttataattaagagtttcttatggaaaagagattcagaatgataacctcttttagagaacaaataagtgacttatttttttaaagctagatgactttgaaatgctatactgtcctgcttgtacaacatggtttggggtgaaggggaggaaagtattaaaaaatctatatcgctagtaaattgtaataagttctattaaaacttgtatttcatatgaaaaatttgctaatttaatattaactcatttgataataatacttgtcttttctacctctc

SEQ ID NO: 197825 - DNA, 6682 bp, Homo sapiens
  Payload ID: 19010
  Gene Name: ubiquitously transcribed tetratricopeptide repeat containing, Y-linked
  ENST ID: ENST00000617789
  CDS Start-End: 1006-5205
gctcatcgtttgttgtttagataatatcatgaactgataaatgcagttgccacgttgattccctagggcctggcttaccgactgaggtcataagatattatgccttctctttagacttggtcagtggagaggaaatgggcaaagaaccagcctatggaggtgacaaggccttagggccaaaagtcttgagggtgaaggtttagggcctgcgcagcttccctgccatgccccgcaaggtctcgcattcgcaaggcttgtgacagtgggagcctcattacggactctcctaaagtccatggtgtcctcttttcgcatttgcgccccgtgggtgatgcccgatgccgcccttcccatcgctctcttccccttcaagcgtatcgcaactgcaaaaacacccagcacagacactccattttctatcttaatgcatttaactagcacaacctacaggttgttccatcccagagactacccttttctccatagacgtgaccatcaaccaaccagcggtcagaatcagtcagcctctgtcatgttcctaggtccttggcgaactggctgggcggggtcccagcagcctaggagtacagtggagcaatgcctgacgtaagtcaacaaagatcacgtgagacgaatcagtcgcctagattggctacaactaagtggttgggagcggggaggtcgcggcggctgcgtggggttcgcccgtgacacaattacaactttgtgctggtgctggcaaagtttgtgattttaagaaattctgctgtgctctccagcactgcgagcttctgccttccctgtagtttcccagatgtgatccaggtagccgagttccgctgcccgtgcttcggtagcttaagtctttgcctcagcttttttccttgcagccgctgaggaggcgataaaattggcgtcacagtctcaagcagcgattgaaggcgtcttttcaactactcgattaaggttgggtatcgtcgtgggacttggaaatttgttgtttccatgaaatcctgcgcagtgtcgctcactaccgccgctgttgccttcggtgatgaggcaaagaaaatggcggaaggaaaagcgagccgcgagagtgaagaggagtctgttagcctgacagtcgaggaaagggaggcgcttggtggcatggacagccgtctcttcgggttcgtgaggcttcatgaagatggcgccagaacgaagaccctactaggcaaggctgttcgctgctacgaatctttaatcttaaaagctgaaggaaaagtggagtctgacttcttttgccaattaggtcacttcaacctcttgttggaagattattcaaaagcattatctgcatatcagagatattacagtttacaggctgactactggaagaatgctgcgtttttatatggccttggtttggtctacttctactacaatgcatttcattgggcaattaaagcatttcaagatgtcctttatgttgaccccagcttttgtcgagccaaggaaattcatttacgacttgggctcatgttcaaagtgaacacagactacaagtctagtttaaagcattttcagttagccttgattgactgtaatccatgtactttgtccaatgctgaaattcaatttcatattgcccatttgtatgaaacccagaggaagtatcattctgcaaaggaggcatatgaacaacttttgcagacagaaaaccttcctgcacaagtaaaagcaactgtattgcaacagttaggttggatgcatcataatatggatctagtaggagacaaagccacaaaggaaagctatgctattcagtatctccaaaagtctttggaggcagatcctaattctggccaatcgtggtattttcttggaaggtgttattcaagtattgggaaagttcaggatgcctttatatcttacaggcaatctattgataaatcagaagcaagtgcagatacatggtgttcaataggtgtgttgtatcagcagcaaaatcagcctatggatgctttacaggcatatatttgtgctgtacaattggaccatgggcatgccgcagcctggatggacctaggtactctctatgaatcctgcaatcaacctcaagatgccattaaatgctacctaaatgcagctagaagcaaacgttgtagtaatacctctacgcttgctgcaagaattaaatttctacaggcttatagagctcatgatccaaatactgaacatgtattaaaccacagtcaaacaccaattttacagcaatccttgtcactacacatgattacttctagccaagtagaaggcctgtccagtcctgccaagaagaaaagaacatctagtccaacaaagaatggttctgataactggaatggtggccagagtctttcacatcatccagtacagcaagtttattcgttgtgtttgacaccacagaaattacagcacttggaacaactgcgagcaaatagagataatttaaatccagcacagaagcatcagctggaacagttagaaagtcagtttgtcttaatgcagcaaatgagacacaaagaagttgctcaggtacgaactactggaattcataacggggccataactgattcatcactgcctacaaactctgtctctaatcgacaaccacatggtgctctgaccagagtatctagcgtctctcagcctggagttcgccctgcttgtgttgaaaaacttttgtccagtggagctttttctgcaggctgtattccttgtggcacatcaaaaattctaggaagtacagacactatcttgctaggcagtaattgtatagcaggaagtgaaagtaatggaaatgtgccttacctgcagcaaaatacacacactctacctcataatcatacagacctgaacagcagcacagaagagccatggagaaaacagctatctaactccgctcaggggcttcataaaagtcagagttcatgtttgtcaggacctaatgaagaacaacctctgttttccactgggtcagcccagtatcaccaggcaactagcactggtattaagaaggcgaatgaacatctcactctgcctagtaattcagtaccacagggggatgctgacagtcacctctcctgtcatactgctacctcaggtggacaacaaggcattatgtttaccaaagagagcaagccttcaaaaaatagatccttggtgcctgaaacaagcaggcatactggagacacatctaatggctgtgctgatgtcaagggactttctaatcatgttcatcagttgatagcagatgctgtttccagtcctaaccatggagattcaccaaatttattaattgcagacaatcctcagctctctgctttgttgattggaaaagccaatggcaatgtgggtactggaacctgtgacaaagtgaataatattcacccagctgttcatacaaagactgatcattctgttgcctcttcaccctcttcagccatttccacagcaacaccttctcctaaatccactgagcagagaagcataaacagtgttaccagccttaacagtcctcacagtggattacacacagtcaatggagaggggctggggaagtcacagagctctacaaaagtagacctgcctttagctagccacagatctacttctcagatcttaccatcaatgtcagtgtctatatgccccagttcaacagaagttctgaaagcatgcaggaatccaggtaaaaatggcttgtctaatagctgcattttgttagataaatgtccacctccaagaccaccaacttcaccatacccacccttgccaaaggacaagttgaatccacccacacctagtatttacttggaaaataaacgtgatgctttctttcctccattacatcaattttgtacaaatccaaaaaaccctgttacagtaatacgtggccttgctggagctcttaaattagatcttggacttttctctaccaaaactttggtagaagctaacaatgaacatatggtagaagtgaggacacagttgctgcaaccagcagatgaaaactgggatcccactggaacaaagaaaatctggcgttgtgaaagcaatagatctcatactacaattgccaaatacgcacaataccaggcttcctccttccaggaatcattgagagaagaaaatgagaaaagaacacaacacaaagatcattcagataacgaatccacatcttcagagaattctggaaggagaaggaaaggaccttttaaaaccataaaatttgggaccaacattgacctctctgataacaaaaagtggaagttgcagttacatgaactgactaaacttcctgcttttgcgcgtgtggtgtcagcaggaaatcttctaacccatgttgggcataccattctgggcatgaatacagtacaactgtatatgaaagttccagggagtcggacaccaggtcaccaagaaaataacaacttctgctctgttaacataaatattggtccaggagattgtgaatggtttgttgtacctgaagattattggggtgttctgaatgacttctgtgaaaaaaataatttgaattttttaatgagttcttggtggcccaaccttgaagatctttatgaagcaaatgtccctgtgtatagatttattcagcgacctggagatttggtctggataaatgcaggcactgtgcattgggttcaagctgttggctggtgcaataacattgcctggaatgttggtccacttacagcctgccagtataaattggcagtggaacggtatgaatggaacaaattgaaaagtgtgaagtcaccagtacccatggtgcatctttcctggaatatggcacgaaatatcaaagtctcagatccaaagctttttgaaatgattaagtattgtcttttgaaaattctgaagcaatatcagacattgagagaagctcttgttgcagcaggaaaagaggttatatggcatgggcggacaaatgatgaaccagctcattactgtagcatttgtgaggtggaggtttttaatctgctttttgtcactaatgaaagcaatactcaaaaaacctacatagtacattgccatgattgtgcacgaaaaacaagcaaaagtttggaaaattttgtggtgctcgaacagtacaaaatggaggacctaatccaagtttatgatcaatttacactagctctttcattatcatcctcatcttgatatagttccatgaatattaaatgagattatttctgctcttcaggaaatttctgcaccactggttttgtagctgtttcataaaactgttgactaaaagctatgtctatgcaaccttccaagaatagtatgtcaagcaactggacacagtgctgcctctgcttcaggacttaacatgctgatccagctgtacttcagaaaaataatattaatcatatgttttgtgtacgtatgacaaactgtcaaagtgacacagaatactgatttgaagatagccttttttatgtttctctatttctgggctgatgaattaatattcatttgtattttaaccctgcagaattttccttagttaaaaacactttcctagctggtcatttcttcataagatagcaaatttaaatctctcctcgatcagcttttaaaaaatgtgtactattatctgaggaagttttttactgctttatgtttttgtgtgttttgaggccatgatgattacatttgtggttccaaaataatttttttaaatattaatagcccatatacaaagataatggattgcacatagacaaagaaataaacttcagatttgtgatttttgtttctaaacttgatacagatttacactatttataaatacgtatttattgcctgaaaatatttgtgaatggaatgttgtttttttccagacgtaactgccattaaatactaaggagttctgtagttttaaacactactcctattacattttatatgtgtagataaaactgcttagtattatacagaaatttttattaaaattgttaaatgtttaaagggtttcccaatgtttgagtttaaaaaagactttctgaaaaaatccactttttgttcattttcaaacctaatgattatatgtattttatatgtgtgtgtatgtgtacacacatgtataatatatacagaaacctcgatatataattgtatagattttaaaagttttattttttacatctatggtagtttttgaggtgcctattataaagtattacggaagtttgctgtttttaaagtaaatgtcttttagtgtgatttattaagttgtagtcaccatagtgatagcccataaataattgctggaaaattgtattttataacagtagaaaacatatagtcagtgaagtaaatattttaaaggaaacattatatagatttgataaatgttgtttataattaagagtttcttatggaaaagagattcagaatgataacctcttttagagaacaaataagtgacttatttttttaaagctagatgactttgaaatgctatactgtcctgcttgtacaacatggtttggggtgaaggggaggaaagtattaaaaaatctatatcgctagtaaattgtaataagttctattaaaacttgtatttcatatgaaaaatttgctaatttaatattaactcatttgataataatacttgtcttttctacctctc

SEQ ID NO: 197826 - DNA, 6277 bp, Homo sapiens
  Payload ID: 19010
  Gene Name: ubiquitously transcribed tetratricopeptide repeat containing, Y-linked
  ENST ID: ENST00000618474
  CDS Start-End: 1006-4800
gctcatcgtttgttgtttagataatatcatgaactgataaatgcagttgccacgttgattccctagggcctggcttaccgactgaggtcataagatattatgccttctctttagacttggtcagtggagaggaaatgggcaaagaaccagcctatggaggtgacaaggccttagggccaaaagtcttgagggtgaaggtttagggcctgcgcagcttccctgccatgccccgcaaggtctcgcattcgcaaggcttgtgacagtgggagcctcattacggactctcctaaagtccatggtgtcctcttttcgcatttgcgccccgtgggtgatgcccgatgccgcccttcccatcgctctcttccccttcaagcgtatcgcaactgcaaaaacacccagcacagacactccattttctatcttaatgcatttaactagcacaacctacaggttgttccatcccagagactacccttttctccatagacgtgaccatcaaccaaccagcggtcagaatcagtcagcctctgtcatgttcctaggtccttggcgaactggctgggcggggtcccagcagcctaggagtacagtggagcaatgcctgacgtaagtcaacaaagatcacgtgagacgaatcagtcgcctagattggctacaactaagtggttgggagcggggaggtcgcggcggctgcgtggggttcgcccgtgacacaattacaactttgtgctggtgctggcaaagtttgtgattttaagaaattctgctgtgctctccagcactgcgagcttctgccttccctgtagtttcccagatgtgatccaggtagccgagttccgctgcccgtgcttcggtagcttaagtctttgcctcagcttttttccttgcagccgctgaggaggcgataaaattggcgtcacagtctcaagcagcgattgaaggcgtcttttcaactactcgattaaggttgggtatcgtcgtgggacttggaaatttgttgtttccatgaaatcctgcgcagtgtcgctcactaccgccgctgttgccttcggtgatgaggcaaagaaaatggcggaaggaaaagcgagccgcgagagtgaagaggagtctgttagcctgacagtcgaggaaagggaggcgcttggtggcatggacagccgtctcttcgggttcgtgaggcttcatgaagatggcgccagaacgaagaccctactaggcaagaatgctgcgtttttatatggccttggtttggtctacttctactacaatgcatttcattgggcaattaaagcatttcaagatgtcctttatgttgaccccagcttttgtcgagccaaggaaattcatttacgacttgggctcatgttcaaagtgaacacagactacaagtctagtttaaagaggaagtatcattctgcaaaggaggcatatgaacaacttttgcagacagaaaaccttcctgcacaagtaaaagcaactgtattgcaacagttaggttggatgcatcataatatggatctagtaggagacaaagccacaaaggaaagctatgctattcagtatctccaaaagtctttggaggcagatcctaattctggccaatcgtggtattttcttggaaggtgttattcaagtattgggaaagttcaggatgcctttatatcttacaggcaatctattgataaatcagaagcaagtgcagatacatggtgttcaataggtgtgttgtatcagcagcaaaatcagcctatggatgctttacaggcatatatttgtgctgtacaattggaccatgggcatgccgcagcctggatggacctaggtactctctatgaatcctgcaatcaacctcaagatgccattaaatgctacctaaatgcagctagaagcaaacgttgtagtaatacctctacgcttgctgcaagaattaaatttctacagaatggttctgataactggaatggtggccagagtctttcacatcatccagtacagcaagtttattcgttgtgtttgacaccacagaaattacagcacttggaacaactgcgagcaaatagagataatttaaatccagcacagaagcatcagctggaacagttagaaagtcagtttgtcttaatgcagcaaatgagacacaaagaagttgctcaggtacgaactactggaattcataacggggccataactgattcatcactgcctacaaactctgtctctaatcgacaaccacatggtgctctgaccagagtatctagcgtctctcagcctggagttcgccctgcttgtgttgaaaaacttttgtccagtggagctttttctgcaggctgtattccttgtggcacatcaaaaattctaggaagtacagacactatcttgctaggcagtaattgtatagcaggaagtgaaagtaatggaaatgtgccttacctgcagcaaaatacacacactctacctcataatcatacagacctgaacagcagcacagaagagccatggagaaaacagctatctaactccgctcaggggcttcataaaagtcagagttcatgtttgtcaggacctaatgaagaacaacctctgttttccactgggtcagcccagtatcaccaggcaactagcactggtattaagaaggcgaatgaacatctcactctgcctagtaattcagtaccacagggggatgctgacagtcacctctcctgtcatactgctacctcaggtggacaacaaggcattatgtttaccaaagagagcaagccttcaaaaaatagatccttggtgcctgaaacaagcaggcatactggagacacatctaatggctgtgctgatgtcaagggactttctaatcatgttcatcagttgatagcagatgctgtttccagtcctaaccatggagattcaccaaatttattaattgcagacaatcctcagctctctgctttgttgattggaaaagccaatggcaatgtgggtactggaacctgtgacaaagtgaataatattcacccagctgttcatacaaagactgatcattctgttgcctcttcaccctcttcagccatttccacagcaacaccttctcctaaatccactgagcagagaagcataaacagtgttaccagccttaacagtcctcacagtggattacacacagtcaatggagaggggctggggaagtcacagagctctacaaaagtagacctgcctttagctagccacagatctacttctcagatcttaccatcaatgtcagtgtctatatgccccagttcaacagaagttctgaaagcatgcaggaatccaggtaaaaatggcttgtctaatagctgcattttgttagataaatgtccacctccaagaccaccaacttcaccatacccacccttgccaaaggacaagttgaatccacccacacctagtatttacttggaaaataaacgtgatgctttctttcctccattacatcaattttgtacaaatccaaaaaaccctgttacagtaatacgtggccttgctggagctcttaaattagatcttggacttttctctaccaaaactttggtagaagctaacaatgaacatatggtagaagtgaggacacagttgctgcaaccagcagatgaaaactgggatcccactggaacaaagaaaatctggcgttgtgaaagcaatagatctcatactacaattgccaaatacgcacaataccaggcttcctccttccaggaatcattgagagaagaaaatgagaaaagaacacaacacaaagatcattcagataacgaatccacatcttcagagaattctggaaggagaaggaaaggaccttttaaaaccataaaatttgggaccaacattgacctctctgataacaaaaagtggaagttgcagttacatgaactgactaaacttcctgcttttgcgcgtgtggtgtcagcaggaaatcttctaacccatgttgggcataccattctgggcatgaatacagtacaactgtatatgaaagttccagggagtcggacaccaggtcaccaagaaaataacaacttctgctctgttaacataaatattggtccaggagattgtgaatggtttgttgtacctgaagattattggggtgttctgaatgacttctgtgaaaaaaataatttgaattttttaatgagttcttggtggcccaaccttgaagatctttatgaagcaaatgtccctgtgtatagatttattcagcgacctggagatttggtctggataaatgcaggcactgtgcattgggttcaagctgttggctggtgcaataacattgcctggaatgttggtccacttacagcctgccagtataaattggcagtggaacggtatgaatggaacaaattgaaaagtgtgaagtcaccagtacccatggtgcatctttcctggaatatggcacgaaatatcaaagtctcagatccaaagctttttgaaatgattaagtattgtcttttgaaaattctgaagcaatatcagacattgagagaagctcttgttgcagcaggaaaagaggttatatggcatgggcggacaaatgatgaaccagctcattactgtagcatttgtgaggtggaggtttttaatctgctttttgtcactaatgaaagcaatactcaaaaaacctacatagtacattgccatgattgtgcacgaaaaacaagcaaaagtttggaaaattttgtggtgctcgaacagtacaaaatggaggacctaatccaagtttatgatcaatttacactagctctttcattatcatcctcatcttgatatagttccatgaatattaaatgagattatttctgctcttcaggaaatttctgcaccactggttttgtagctgtttcataaaactgttgactaaaagctatgtctatgcaaccttccaagaatagtatgtcaagcaactggacacagtgctgcctctgcttcaggacttaacatgctgatccagctgtacttcagaaaaataatattaatcatatgttttgtgtacgtatgacaaactgtcaaagtgacacagaatactgatttgaagatagccttttttatgtttctctatttctgggctgatgaattaatattcatttgtattttaaccctgcagaattttccttagttaaaaacactttcctagctggtcatttcttcataagatagcaaatttaaatctctcctcgatcagcttttaaaaaatgtgtactattatctgaggaagttttttactgctttatgtttttgtgtgttttgaggccatgatgattacatttgtggttccaaaataatttttttaaatattaatagcccatatacaaagataatggattgcacatagacaaagaaataaacttcagatttgtgatttttgtttctaaacttgatacagatttacactatttataaatacgtatttattgcctgaaaatatttgtgaatggaatgttgtttttttccagacgtaactgccattaaatactaaggagttctgtagttttaaacactactcctattacattttatatgtgtagataaaactgcttagtattatacagaaatttttattaaaattgttaaatgtttaaagggtttcccaatgtttgagtttaaaaaagactttctgaaaaaatccactttttgttcattttcaaacctaatgattatatgtattttatatgtgtgtgtatgtgtacacacatgtataatatatacagaaacctcgatatataattgtatagattttaaaagttttattttttacatctatggtagtttttgaggtgcctattataaagtattacggaagtttgctgtttttaaagtaaatgtcttttagtgtgatttattaagttgtagtcaccatagtgatagcccataaataattgctggaaaattgtattttataacagtagaaaacatatagtcagtgaagtaaatattttaaaggaaacattatatagatttgataaatgttgtttataattaagagtttcttatggaaaagagattcagaatgataacctcttttagagaacaaataagtgacttatttttttaaagctagatgactttgaaatgctatactgtcctgcttgtacaacatggtttggggtgaaggggaggaaagtattaaaaaatctatatcgctagtaaattgtaataagttctattaaaacttgtatttcatatgaaaaatttgctaatttaatattaactcatttgataataatacttgtcttttctacctctc

SEQ ID NO: 197827 - DNA, 6586 bp, Homo sapiens
  Payload ID: 19010
  Gene Name: ubiquitously transcribed tetratricopeptide repeat containing, Y-linked
  ENST ID: ENST00000612274
  CDS Start-End: 1006-5109
gctcatcgtttgttgtttagataatatcatgaactgataaatgcagttgccacgttgattccctagggcctggcttaccgactgaggtcataagatattatgccttctctttagacttggtcagtggagaggaaatgggcaaagaaccagcctatggaggtgacaaggccttagggccaaaagtcttgagggtgaaggtttagggcctgcgcagcttccctgccatgccccgcaaggtctcgcattcgcaaggcttgtgacagtgggagcctcattacggactctcctaaagtccatggtgtcctcttttcgcatttgcgccccgtgggtgatgcccgatgccgcccttcccatcgctctcttccccttcaagcgtatcgcaactgcaaaaacacccagcacagacactccattttctatcttaatgcatttaactagcacaacctacaggttgttccatcccagagactacccttttctccatagacgtgaccatcaaccaaccagcggtcagaatcagtcagcctctgtcatgttcctaggtccttggcgaactggctgggcggggtcccagcagcctaggagtacagtggagcaatgcctgacgtaagtcaacaaagatcacgtgagacgaatcagtcgcctagattggctacaactaagtggttgggagcggggaggtcgcggcggctgcgtggggttcgcccgtgacacaattacaactttgtgctggtgctggcaaagtttgtgattttaagaaattctgctgtgctctccagcactgcgagcttctgccttccctgtagtttcccagatgtgatccaggtagccgagttccgctgcccgtgcttcggtagcttaagtctttgcctcagcttttttccttgcagccgctgaggaggcgataaaattggcgtcacagtctcaagcagcgattgaaggcgtcttttcaactactcgattaaggttgggtatcgtcgtgggacttggaaatttgttgtttccatgaaatcctgcgcagtgtcgctcactaccgccgctgttgccttcggtgatgaggcaaagaaaatggcggaaggaaaagcgagccgcgagagtgaagaggagtctgttagcctgacagtcgaggaaagggaggcgcttggtggcatggacagccgtctcttcgggttcgtgaggcttcatgaagatggcgccagaacgaagaccctactaggcaaggctgttcgctgctacgaatctttaatcttaaaagctgaaggaaaagtggagtctgacttcttttgccaattaggtcacttcaacctcttgttggaagattattcaaaagcattatctgcatatcagagatattacagtttacaggctgactactggaagaatgctgcgtttttatatggccttggtttggtctacttctactacaatgcatttcattgggcaattaaagcatttcaagatgtcctttatgttgaccccagcttttgtcgagccaaggaaattcatttacgacttgggctcatgttcaaagtgaacacagactacaagtctagtttaaagcattttcagttagccttgattgactgtaatccatgtactttgtccaatgctgaaattcaatttcatattgcccatttgtatgaaacccagaggaagtatcattctgcaaaggaggcatatgaacaacttttgcagacagaaaaccttcctgcacaagtaaaagcaactgtattgcaacagttaggttggatgcatcataatatggatctagtaggagacaaagccacaaaggaaagctatgctattcagtatctccaaaagtctttggaggcagatcctaattctggccaatcgtggtattttcttggaaggtgttattcaagtattgggaaagttcaggatgcctttatatcttacaggcaatctattgataaatcagaagcaagtgcagatacatggtgttcaataggtgtgttgtatcagcagcaaaatcagcctatggatgctttacaggcatatatttgtgctgtacaattggaccatgggcatgccgcagcctggatggacctaggtactctctatgaatcctgcaatcaacctcaagatgccattaaatgctacctaaatgcagctagaagcaaacgttgtagtaatacctctacgcttgctgcaagaattaaatttctacaggctcagttgtgtaaccttccacaaagtagtctacagaataaaactaaattacttcctagtattgaggaggcatggagcctaccaatccccgcagagcttacctccaggcagggtgccatgaacacagcacagcagaatggttctgataactggaatggtggccagagtctttcacatcatccagtacagcaagtttattcgttgtgtttgacaccacagaaattacagcacttggaacaactgcgagcaaatagagataatttaaatccagcacagaagcatcagctggaacagttagaaagtcagtttgtcttaatgcagcaaatgagacacaaagaagttgctcaggtacgaactactggaattcataacggggccataactgattcatcactgcctacaaactctgtctctaatcgacaaccacatggtgctctgaccagagtatctagcgtctctcagcctggagttcgccctgcttgtgttgaaaaacttttgtccagtggagctttttctgcaggctgtattccttgtggcacatcaaaaattctaggaagtacagacactatcttgctaggcagtaattgtatagcaggaagtgaaagtaatggaaatgtgccttacctgcagcaaaatacacacactctacctcataatcatacagacctgaacagcagcacagaagagccatggagaaaacagctatctaactccgctcaggggcttcataaaagtcagagttcatgtttgtcaggacctaatgaagaacaacctctgttttccactgggtcagcccagtatcaccaggcaactagcactggtattaagaaggcgaatgaacatctcactctgcctagtaattcagtaccacagggggatgctgacagtcacctctcctgtcatactgctacctcaggtggacaacaaggcattatgtttaccaaagagagcaagccttcaaaaaatagatccttggtgcctgaaacaagcaggcatactggagacacatctaatggctgtgctgatgtcaagggactttctaatcatgttcatcagttgatagcagatgctgtttccagtcctaaccatggagattcaccaaatttattaattgcagacaatcctcagctctctgctttgttgattggaaaagccaatggcaatgtgggtactggaacctgtgacaaagtgaataatattcacccagctgttcatacaaagactgatcattctgttgcctcttcaccctcttcagccatttccacagcaacaccttctcctaaatccactgagcagagaagcataaacagtgttaccagccttaacagtcctcacagtggattacacacagtcaatggagaggggctggggaagtcacagagctctacaaaagtagacctgcctttagctagccacagatctacttctcagatcttaccatcaatgtcagtgtctatatgccccagttcaacagaagttctgaaagcatgcaggaatccaggtaaaaatggcttgtctaatagctgcattttgttagataaatgtccacctccaagaccaccaacttcaccatacccacccttgccaaaggacaagttgaatccacccacacctagtatttacttggaaaataaacgtgatgctttctttcctccattacatcaattttgtacaaatccaaaaaaccctgttacagtaatacgtggccttgctggagctcttaaattagatcttggacttttctctaccaaaactttggtagaagctaacaatgaacatatggtagaagtgaggacacagttgctgcaaccagcagatgaaaactgggatcccactggaacaaagaaaatctggcgttgtgaaagcaatagatctcatactacaattgccaaatacgcacaataccaggcttcctccttccaggaatcattgagagaagaaaatgagaaaagaacacaacacaaagatcattcagataacgaatccacatcttcagagaagtggaagttgcagttacatgaactgactaaacttcctgcttttgcgcgtgtggtgtcagcaggaaatcttctaacccatgttgggcataccattctgggcatgaatacagtacaactgtatatgaaagttccagggagtcggacaccaggtcaccaagaaaataacaacttctgctctgttaacataaatattggtccaggagattgtgaatggtttgttgtacctgaagattattggggtgttctgaatgacttctgtgaaaaaaataatttgaattttttaatgagttcttggtggcccaaccttgaagatctttatgaagcaaatgtccctgtgtatagatttattcagcgacctggagatttggtctggataaatgcaggcactgtgcattgggttcaagctgttggctggtgcaataacattgcctggaatgttggtccacttacagcctgccagtataaattggcagtggaacggtatgaatggaacaaattgaaaagtgtgaagtcaccagtacccatggtgcatctttcctggaatatggcacgaaatatcaaagtctcagatccaaagctttttgaaatgattaagtattgtcttttgaaaattctgaagcaatatcagacattgagagaagctcttgttgcagcaggaaaagaggttatatggcatgggcggacaaatgatgaaccagctcattactgtagcatttgtgaggtggaggtttttaatctgctttttgtcactaatgaaagcaatactcaaaaaacctacatagtacattgccatgattgtgcacgaaaaacaagcaaaagtttggaaaattttgtggtgctcgaacagtacaaaatggaggacctaatccaagtttatgatcaatttacactagctctttcattatcatcctcatcttgatatagttccatgaatattaaatgagattatttctgctcttcaggaaatttctgcaccactggttttgtagctgtttcataaaactgttgactaaaagctatgtctatgcaaccttccaagaatagtatgtcaagcaactggacacagtgctgcctctgcttcaggacttaacatgctgatccagctgtacttcagaaaaataatattaatcatatgttttgtgtacgtatgacaaactgtcaaagtgacacagaatactgatttgaagatagccttttttatgtttctctatttctgggctgatgaattaatattcatttgtattttaaccctgcagaattttccttagttaaaaacactttcctagctggtcatttcttcataagatagcaaatttaaatctctcctcgatcagcttttaaaaaatgtgtactattatctgaggaagttttttactgctttatgtttttgtgtgttttgaggccatgatgattacatttgtggttccaaaataatttttttaaatattaatagcccatatacaaagataatggattgcacatagacaaagaaataaacttcagatttgtgatttttgtttctaaacttgatacagatttacactatttataaatacgtatttattgcctgaaaatatttgtgaatggaatgttgtttttttccagacgtaactgccattaaatactaaggagttctgtagttttaaacactactcctattacattttatatgtgtagataaaactgcttagtattatacagaaatttttattaaaattgttaaatgtttaaagggtttcccaatgtttgagtttaaaaaagactttctgaaaaaatccactttttgttcattttcaaacctaatgattatatgtattttatatgtgtgtgtatgtgtacacacatgtataatatatacagaaacctcgatatataattgtatagattttaaaagttttattttttacatctatggtagtttttgaggtgcctattataaagtattacggaagtttgctgtttttaaagtaaatgtcttttagtgtgatttattaagttgtagtcaccatagtgatagcccataaataattgctggaaaattgtattttataacagtagaaaacatatagtcagtgaagtaaatattttaaaggaaacattatatagatttgataaatgttgtttataattaagagtttcttatggaaaagagattcagaatgataacctcttttagagaacaaataagtgacttatttttttaaagctagatgactttgaaatgctatactgtcctgcttgtacaacatggtttggggtgaaggggaggaaagtattaaaaaatctatatcgctagtaaattgtaataagttctattaaaacttgtatttcatatgaaaaatttgctaatttaatattaactcatttgataataatacttgtcttttctacctctc

SEQ ID NO: 197828 - DNA, 3636 bp, Homo sapiens
  Payload ID: 19010
  Gene Name: ubiquitously transcribed tetratricopeptide repeat containing, Y-linked
  Uniprot ID: O14607
  ENST ID: ENST00000624098
  CDS Start-End: 1-3636
atgaaatcctgcgcagtgtcgctcactaccgccgctgttgccttcggtgatgaggcaaagaaaatggcggaaggaaaagcgagccgcgagagtgaagaggagtctgttagcctgacagtcgaggaaagggaggcgcttggtggcatggacagccgtctcttcgggttcgtgaggcttcatgaagatggcgccagaacgaagaccctactaggcaaggctgttcgctgctacgaatctttaatcttaaaagctgaaggaaaagtggagtctgacttcttttgccaattaggtcacttcaacctcttgttggaagattattcaaaagcattatctgcatatcagagatattacagtttacaggctgactactggaagaatgctgcgtttttatatggccttggtttggtctacttctactacaatgcatttcattgggcaattaaagcatttcaagatgtcctttatgttgaccccagcttttgtcgagccaaggaaattcatttacgacttgggctcatgttcaaagtgaacacagactacaagtctagtttaaagcattttcagttagccttgattgactgtaatccatgtactttgtccaatgctgaaattcaatttcatattgcccatttgtatgaaacccagaggaagtatcattctgcaaaggaggcatatgaacaacttttgcagacagaaaaccttcctgcacaagtaaaagcaactgtattgcaacagttaggttggatgcatcataatatggatctagtaggagacaaagccacaaaggaaagctatgctattcagtatctccaaaagtctttggaggcagatcctaattctggccaatcgtggtattttcttggaaggtgttattcaagtattgggaaagttcaggatgcctttatatcttacaggcaatctattgataaatcagaagcaagtgcagatacatggtgttcaataggtgtgttgtatcagcagcaaaatcagcctatggatgctttacaggcatatatttgtgctgtacaattggaccatgggcatgccgcagcctggatggacctaggtactctctatgaatcctgcaatcaacctcaagatgccattaaatgctacctaaatgcagctagaagcaaacgttgtagtaatacctctacgcttgctgcaagaattaaatttctacaggctcagttgtgtaaccttccacaaagtagtctacagaataaaactaaattacttcctagtattgaggaggcatggagcctaccaatccccgcagagcttacctccaggcagggtgccatgaacacagcacagcagaatggttctgataactggaatggtggccagagtctttcacatcatccagtacagcaagtttattcgttgtgtttgacaccacagaaattacagcacttggaacaactgcgagcaaatagagataatttaaatccagcacagaagcatcagctggaacagttagaaagtcagtttgtcttaatgcagcaaatgagacacaaagaagttgctcaggggcttcataaaagtcagagttcatgtttgtcaggacctaatgaagaacaacctctgttttccactgggtcagcccagtatcaccaggcaactagcactggtattaagaaggcgaatgaacatctcactctgcctagtaattcagtaccacagggggatgctgacagtcacctctcctgtcatactgctacctcaggtggacaacaaggcattatgtttaccaaagagagcaagccttcaaaaaatagatccttggtgcctgaaacaagcaggcatactggagacacatctaatggctgtgctgatgtcaagggactttctaatcatgttcatcagttgatagcagatgctgtttccagtcctaaccatggagattcaccaaatttattaattgcagacaatcctcagctctctgctttgttgattggaaaagccaatggcaatgtgggtactggaacctgtgacaaagtgaataatattcacccagctgttcatacaaagactgatcattctgttgcctcttcaccctcttcagccatttccacagcaacaccttctcctaaatccactgagcagagaagcataaacagtgttaccagccttaacagtcctcacagtggattacacacagtcaatggagaggggctggggaagtcacagagctctacaaaagtagacctgcctttagctagccacagatctacttctcagatcttaccatcaatgtcagtgtctatatgccccagttcaacagaagttctgaaagcatgcaggaatccaggtaaaaatggcttgtctaatagctgcattttgttagataaatgtccacctccaagaccaccaacttcaccatacccacccttgccaaaggacaagttgaatccacccacacctagtatttacttggaaaataaacgtgatgctttctttcctccattacatcaattttgtacaaatccaaaaaaccctgttacagtaatacgtggccttgctggagctcttaaattagatcttggacttttctctaccaaaactttggtagaagctaacaatgaacatatggtagaagtgaggacacagttgctgcaaccagcagatgaaaactgggatcccactggaacaaagaaaatctggcgttgtgaaagcaatagatctcatactacaattgccaaatacgcacaataccaggcttcctccttccaggaatcattgagagaagaaaatgagaaaagaacacaacacaaagatcattcagataacgaatccacatcttcagagaattctggaaggagaaggaaaggaccttttaaaaccataaaatttgggaccaacattgacctctctgataacaaaaagtggaagttgcagttacatgaactgactaaacttcctgcttttgcgcgtgtggtgtcagcaggaaatcttctaacccatgttgggcataccattctgggcatgaatacagtacaactgtatatgaaagttccagggagtcggacaccaggtcaccaagaaaataacaacttctgctctgttaacataaatattggtccaggagattgtgaatggtttgttgtacctgaagattattggggtgttctgaatgacttctgtgaaaaaaataatttgaattttttaatgagttcttggtggcccaaccttgaagatctttatgaagcaaatgtccctgtgtatagatttattcagcgacctggagatttggtctggataaatgcaggcactgtgcattgggttcaagctgttggctggtgcaataacattgcctggaatgttggtccacttacagcctgccagtataaattggcagtggaacggtatgaatggaacaaattgaaaagtgtgaagtcaccagtacccatggtgcatctttcctggaatatggcacgaaatatcaaagtctcagatccaaagctttttgaaatgattaagtattgtcttttgaaaattctgaagcaatatcagacattgagagaagctcttgttgcagcaggaaaagaggttatatggcatgggcggacaaatgatgaaccagctcattactgtagcatttgtgaggctctttcattatcatcctcatcttga

SEQ ID NO: 197829 - DNA, 574 bp, Homo sapiens
  Payload ID: 19011
  Gene Name: ubiquitously-expressed, prefoldin-like chaperone
  Uniprot ID: Q9UBK9
  ENST ID: ENST00000333119
  CDS Start-End: 57-530
cggaagccgcggttcctaccaaccgttcttattgctggcggcctgaggagcccatcatggcgacgccccctaagcggcgggcggtggaggccacgggggagaaagtgctgcgctacgagaccttcatcagtgacgtgctgcagcgggacttgcgaaaggtgctggaccatcgagacaaggtatatgagcagctggccaaataccttcaactgagaaatgtcattgagcgactccaggaagctaagcactcggagttatatatgcaggtggatttgggctgtaacttcttcgttgacacagtggtcccagatacttcacgcatctatgtggccctgggatatggttttttcctggagttgacactggcagaagctctcaagttcattgatcgtaagagctctctcctcacagagctcagcaacagcctcaccaaggactccatgaatatcaaagcccatatccacatgttgctagaggggcttagagaactacaaggcctgcagaatttcccagagaagcctcaccattgacttcttccccccatcctcagacattaaagagcctgaatgccttt

SEQ ID NO: 197830 - DNA, 701 bp, Homo sapiens
  Payload ID: 19011
  Gene Name: ubiquitously-expressed, prefoldin-like chaperone
  ENST ID: ENST00000335890
  CDS Start-End: 155-664
gaggtaaaggccgcgcttgggtgtccctgggtggtcgggtccccgagttgggaggggcggaaggctgaacctccagcttgagccggacaagccgattcccagcgttgagagggtagagatgaactgtgtgtgaggccaaactggatcggtcaacatggtcttccccctccccactccccaggagcccatcatggcgacgccccctaagcggcgggcggtggaggccacgggggagaaagtgctgcgctacgagaccttcatcagtgacgtgctgcagcgggacttgcgaaaggtgctggaccatcgagacaaggtatatgagcagctggccaaataccttcaactgagaaatgtcattgagcgactccaggaagctaagcactcggagttatatatgcaggtggatttgggctgtaacttcttcgttgacacagtggtcccagatacttcacgcatctatgtggccctgggatatggttttttcctggagttgacactggcagaagctctcaagttcattgatcgtaagagctctctcctcacagagctcagcaacagcctcaccaaggactccatgaatatcaaagcccatatccacatgttgctagaggggcttagagaactacaaggcctgcagaatttcccagagaagcctcaccattgacttcttccccccatcctcagacattaaagagcctgaa

SEQ ID NO: 197831 - DNA, 627 bp, Homo sapiens
  Payload ID: 19011
  Gene Name: ubiquitously-expressed, prefoldin-like chaperone
  ENST ID: ENST00000485641
  CDS Start-End: 145-444
ccgcgcttgggtgtccctgggtggtcgggtccccgagttgggaggggcggaaggctgaacctccagcttgagccggacaagccgattcccagcgttgagagggtagagatgaactgtgtgtgaggccaaactggatcggtcaacatggtcttccccctccccactccccaggagcccatcatggcgacgccccctaagcggcgggcggtggaggccacgggggagaaagtgctgcgctacgagaccttcatcagtgacgtgctgcagcgggacttgcgaaaggtgctggaccatcgagacaaggtatatgagcagctggccaaataccttcaactgagaaatgtcattgagcgactccagcccagatacttcacgcatctatgtggccctgggatatggttttttcctggagttgacactggcagaagctctcaagttcattgatcgtaagagctctctcctcacagagctcagcaacagcctcaccaaggactccatgaatatcaaagcccatatccacatgttgctagaggggcttagagaactacaaggcctgcagaatttcccagagaagcctcaccattgacttcttccccccatcctcagacattaaagagcctgaatgcc

SEQ ID NO: 197832 - DNA, 4631 bp, Homo sapiens
  Payload ID: 19012
  Gene Name: U-box domain containing 5
  Uniprot ID: O94941
  ENST ID: ENST00000217173
  CDS Start-End: 473-2098
ttttgtatttttagtagagacgggggtttcaccacgttagccaggctggtctcgaactcctgaactcaggtgatccgcccgccttggcctcccaaagtactgggattacaggcgtgagccaccgcgccgggactaagctgcttaatgacttccagagcgatccatccaggaaggtgttttccctctgcaggtcctagactccccctgcctcctcaacaacgtcctccagtggaaaatgtccttgggaaacgctgacagagtcttttgagcctcggccgcatccgtcactcgcgcagcaggcggaagtagcgggcagttggccggaagtggggctgtgaggctcggagtcgccggaggagccagtatctgtgtcgccgccgcccgcggcgtccccggtttggtgttgcggcgcccaccttcgggaggatcaggctgcttctgatgcttggaagatatcctctcagccacaaagatggtaataaatctttgcctcccacagttcagaccaagaattcactgcaacaagatatcagctgatggttacgaagtagaaaatctcatctctgaagatctcacaaagagaagtcatggtttcaggacagagtatttcattaagccaccagtctatgtgacagtttcatttccctttaatgtggaaatctgtaggatcaacatagacctcacagctgggggaggtcagaacgtcactggcctggaaatgtacacatctgcctcatctagcagagtgtcttggaatacgccccagtgccggaccctgggcccagctgagccatctgtcccagacaaggaggcgttcaccttggtaggcaaagtcttactgaaaaaccagagccaagtggtgtttagccacaggggcttcaaggccaggcccccttttggcgcgatggaagccacactcccctcccctgctgttgtggcccaggagctctggaataaaggggctctttcccttagccacgtggcccacttaaggatctgtatcacccatgtgacaggcggcggtatcccttgtatcaagcggttggaagtgtggggtcagccggccaagacctgctcccaggaagtgatagacagcatcctgctggtcacctcagagaacctgcctcaggatgtggctctgcaggctccagccttgcccatggaaagtgactgtgaccctggggaccagcctgagagccagcaggctccctccagcctgcagaagctggccgagatcattcaggatgtgcctgaggagttcctggatcccatcaccctggagatcatgccttgtcccatgctgctgccctcaggcaaggtcatcgaccagagcacactggagaagtgtaaccgcagtgaagccacatggggccgagtgcccagtgaccctttcacgggggtagcttttactccgcactctcagcccctgcctcacccctccctcaaggcccggattgaccatttcctgctccagcactccatccctggctgccacctgcttgggagagcacagacggcattggcagtgatcccttcttccattgttctgccctctcagaaaaggaagatagagcaggctgaacatgtcccagacagtaactttggtgtaaatgcttcctgtttttctgccacaagccctttggtcttacccactacctcagagcacactgctaagaaaatgaaagccaccaatgagcccagcctgacacatatggactgctcgacaggtccactgtcccacgagcagaagctgtcacaaagcttggaaattgccttggcatccacccttggctctatgccctccttcacggcacggctgaccaggggacagctccagcaccttggcacaagagggagcaacacttcctggaggcctggcaccggctcggagcagcctgggagcatcctgggccccgaatgtgcctcctgcaaaagagtattttctccctacttcaaaaaggagccggtgtaccagctgccctgcggccacctcctgtgccgaccctgcctgggtgagaagcaacgctccctgcccatgacgtgcacagcctgccagcggccggttgctagccaagacgtgctgcgggtccacttctgagtgactgacctccactggaggagacccattgctgggaggagctgagggggaacaggagcagggccacagcacccctgaggtctggccaggccccaggcacagagctgcctgctccctcccggggctcttcttcatcacctcacggtatagcacattgcttctgcgctggtggcaatagggcaacaaagccataggccagagggcggggggatgtccctgcctccctgccaccccccctgcctgagcccaggacccactggagccagccccaccctaggcaggaagacccctgctgagggcccccccgtgcagtccgcatacccccctgtccagcagggcactgtgggtggctcaccctagattgtggcccagatctcaggagtctctgccttcagggtcatccaaaagtggaccttgggagcagtgggggtgtctgtggagtgcatgactcagccccccgactcgcagccttaataaagcgatggttgacgtctgctgtgggtttcctcctggtggagtgcctgtctgtgtcacacactcctgtcgcccacctgcacccacacaagtggagctcacagggtagctgtgtgcagtcactgcagcttgccaggctgtcattcctgtcgatgacctgaaaggacacaaactggaattttcaggtctgtcccctgcatggggactcagaacccaggtttgcaggtgggcatacgtggtgggagggtggagggctccctctggccagtgccagctgtgctcagctggcttcagaaactgctccctgagggggagcgcagcgtttcctcatgcagttggtttcaggaaaaatacttgtttataggctgcatccttttttcagcccaacatttagctttatggagtgccaaagggaaaatatatccatatccctacaacttggtactctatcagattccagccactagaagaacctcagtgagaaaacacacccgcctttccctgttcccttctaagcacgtttgggaaggaacagcctaaagatgctttgtaaagctgtattttacccttgagcttagccgcgggtccctgtgaaccggcacattcctttcctttaggccgtccagagctctagtccacacccaatactttagagatctgggtttggggttagttgcttttttttttttttttttaattgagacagggttggtctctgttgcccaagcttgagggcagtggtgcaatcataactcattgcagcctcgaactcctgggcttaagggatccttctacctcagcctcccaggtagcaggaactataggcatgtgccaccatgcccagctaatttttttattttttgtagagacaaggtcttgctatgttgtccagactggtctcaaactcctgggctcaagcgatcctcccaaagtgcttggattgcaggcatgagccacttcgcctagccaagcctgcatttttttgagttcctacatcatttgtccacaaagatggcttcagagaggtggtcacatgctttgctctgcttcctcttggcactgaccttgatgcagccttcacatgagatttgagggtccgcatggatggcctgtgccgccctcgctggcgaggctcctgtgtgcccctggctttctgggtctgtgcctctccagaatcttgtcttaccctccggtgtgcttgtgttcttagaaaagccccagcatggccgggcatggtggctcatgcctattatcccagcactttgggaggccaaggtgggtggatcacttgaggtcaagagttcgagaccagcctggccaacatggcaaaaccccatctctactaaaaatacaaaaattagctgggcatggtggtgtgtgcctgtaatgccagctactcaggaggctgaggcatgagaatcgcttgaaccggggaggcagaggttgcagtgagccgagatctcaccactgtactccagcctgggcgacggagtgagactccctctcaaaaaaagaaaaaagccccagcatgtagcaaaagcatttcttggtgagtgtgggggctggtgattcccaccttcaccctgtcatggtctcagggaacagcctgcttcccaccagcagcttgacacccacagtgtgctctggctgctgggagcccatctctcggagaaaccctgtccacccaaccccgagagccctagcgtgcagtcagcgtcagcacggcgctcccagatgagggccggactgcctccccttaagcagctgtgttggaggtactgcccagaccgctgcaggtccctggggatctgcatttctaacaggctcctgcccccaagactgctctggtggaaaatccagcctgggagcccctggagtggcaggccctgtcctgggtacaggtggagccacccccaggagttgcgtgtgtttttcttaattgaaagacttcccccaaaaggaagtggtcttttcactacccttgccagaaacatgctaggcaccactgggctctgtttctgtcccctagaaaatgggaataaaatttcttttgctgtca

SEQ ID NO: 197833 - DNA, 4469 bp, Homo sapiens
  Payload ID: 19012
  Gene Name: U-box domain containing 5
  Uniprot ID: O94941
  ENST ID: ENST00000348031
  CDS Start-End: 473-1936
ttttgtatttttagtagagacgggggtttcaccacgttagccaggctggtctcgaactcctgaactcaggtgatccgcccgccttggcctcccaaagtactgggattacaggcgtgagccaccgcgccgggactaagctgcttaatgacttccagagcgatccatccaggaaggtgttttccctctgcaggtcctagactccccctgcctcctcaacaacgtcctccagtggaaaatgtccttgggaaacgctgacagagtcttttgagcctcggccgcatccgtcactcgcgcagcaggcggaagtagcgggcagttggccggaagtggggctgtgaggctcggagtcgccggaggagccagtatctgtgtcgccgccgcccgcggcgtccccggtttggtgttgcggcgcccaccttcgggaggatcaggctgcttctgatgcttggaagatatcctctcagccacaaagatggtaataaatctttgcctcccacagttcagaccaagaattcactgcaacaagatatcagctgatggttacgaagtagaaaatctcatctctgaagatctcacaaagagaagtcatggtttcaggacagagtatttcattaagccaccagtctatgtgacagtttcatttccctttaatgtggaaatctgtaggatcaacatagacctcacagctgggggaggtcagaacgtcactggcctggaaatgtacacatctgcctcatctagcagagtgtcttggaatacgccccagtgccggaccctgggcccagctgagccatctgtcccagacaaggaggcgttcaccttggtaggcaaagtcttactgaaaaaccagagccaagtggtgtttagccacaggggcttcaaggccaggcccccttttggcgcgatggaagccacactcccctcccctgctgttgtggcccaggagctctggaataaaggggctctttcccttagccacgtggcccacttaaggatctgtatcacccatgtgacaggcggcggtatcccttgtatcaagcggttggaagtgtggggtcagccggccaagacctgctcccaggaagtgatagacagcatcctgctggtcacctcagagaacctgcctcaggatgtggctctgcaggctccagccttgcccatggaaagtgactgtgaccctggggaccagcctgagagccagcaggctccctccagcctgcagaagctggccgagatcattcaggatgtgcctgaggagttcctggatcccatcaccctggagatcatgccttgtcccatgctgctgccctcaggcaaggtcatcgaccagagcacactggagaagtgtaaccgcagtgaagccacatggggccgagtgcccagtgaccctttcacgggggtagcttttactccgcactctcagcccctgcctcacccctccctcaaggcccggattgaccatttcctgctccagcactccatccctggctgccacctgcttgggagagcacagacggcattggcagtgatcccttcttccattgttctgccctctcagaaaaggaagatagagcaggctgaacatgtcccagacagtaactttggtgtaaatgcttcctgtttttctgccacaagccctttggtcttacccactacctcagagcacactgctaagaaaatgaaagccaccaatgagcccagcctgacacatatggactgctcgacagagcagcctgggagcatcctgggccccgaatgtgcctcctgcaaaagagtattttctccctacttcaaaaaggagccggtgtaccagctgccctgcggccacctcctgtgccgaccctgcctgggtgagaagcaacgctccctgcccatgacgtgcacagcctgccagcggccggttgctagccaagacgtgctgcgggtccacttctgagtgactgacctccactggaggagacccattgctgggaggagctgagggggaacaggagcagggccacagcacccctgaggtctggccaggccccaggcacagagctgcctgctccctcccggggctcttcttcatcacctcacggtatagcacattgcttctgcgctggtggcaatagggcaacaaagccataggccagagggcggggggatgtccctgcctccctgccaccccccctgcctgagcccaggacccactggagccagccccaccctaggcaggaagacccctgctgagggcccccccgtgcagtccgcatacccccctgtccagcagggcactgtgggtggctcaccctagattgtggcccagatctcaggagtctctgccttcagggtcatccaaaagtggaccttgggagcagtgggggtgtctgtggagtgcatgactcagccccccgactcgcagccttaataaagcgatggttgacgtctgctgtgggtttcctcctggtggagtgcctgtctgtgtcacacactcctgtcgcccacctgcacccacacaagtggagctcacagggtagctgtgtgcagtcactgcagcttgccaggctgtcattcctgtcgatgacctgaaaggacacaaactggaattttcaggtctgtcccctgcatggggactcagaacccaggtttgcaggtgggcatacgtggtgggagggtggagggctccctctggccagtgccagctgtgctcagctggcttcagaaactgctccctgagggggagcgcagcgtttcctcatgcagttggtttcaggaaaaatacttgtttataggctgcatccttttttcagcccaacatttagctttatggagtgccaaagggaaaatatatccatatccctacaacttggtactctatcagattccagccactagaagaacctcagtgagaaaacacacccgcctttccctgttcccttctaagcacgtttgggaaggaacagcctaaagatgctttgtaaagctgtattttacccttgagcttagccgcgggtccctgtgaaccggcacattcctttcctttaggccgtccagagctctagtccacacccaatactttagagatctgggtttggggttagttgcttttttttttttttttttaattgagacagggttggtctctgttgcccaagcttgagggcagtggtgcaatcataactcattgcagcctcgaactcctgggcttaagggatccttctacctcagcctcccaggtagcaggaactataggcatgtgccaccatgcccagctaatttttttattttttgtagagacaaggtcttgctatgttgtccagactggtctcaaactcctgggctcaagcgatcctcccaaagtgcttggattgcaggcatgagccacttcgcctagccaagcctgcatttttttgagttcctacatcatttgtccacaaagatggcttcagagaggtggtcacatgctttgctctgcttcctcttggcactgaccttgatgcagccttcacatgagatttgagggtccgcatggatggcctgtgccgccctcgctggcgaggctcctgtgtgcccctggctttctgggtctgtgcctctccagaatcttgtcttaccctccggtgtgcttgtgttcttagaaaagccccagcatggccgggcatggtggctcatgcctattatcccagcactttgggaggccaaggtgggtggatcacttgaggtcaagagttcgagaccagcctggccaacatggcaaaaccccatctctactaaaaatacaaaaattagctgggcatggtggtgtgtgcctgtaatgccagctactcaggaggctgaggcatgagaatcgcttgaaccggggaggcagaggttgcagtgagccgagatctcaccactgtactccagcctgggcgacggagtgagactccctctcaaaaaaagaaaaaagccccagcatgtagcaaaagcatttcttggtgagtgtgggggctggtgattcccaccttcaccctgtcatggtctcagggaacagcctgcttcccaccagcagcttgacacccacagtgtgctctggctgctgggagcccatctctcggagaaaccctgtccacccaaccccgagagccctagcgtgcagtcagcgtcagcacggcgctcccagatgagggccggactgcctccccttaagcagctgtgttggaggtactgcccagaccgctgcaggtccctggggatctgcatttctaacaggctcctgcccccaagactgctctggtggaaaatccagcctgggagcccctggagtggcaggccctgtcctgggtacaggtggagccacccccaggagttgcgtgtgtttttcttaattgaaagacttcccccaaaaggaagtggtcttttcactacccttgccagaaacatgctaggcaccactgggctctgtttctgtcccctagaaaatgggaataaaatttcttttgctgtca

SEQ ID NO: 197834 - DNA, 524 bp, Homo sapiens
  Payload ID: 19012
  Gene Name: U-box domain containing 5
  ENST ID: ENST00000449731
  CDS Start-End: 260-524
ccggaagtggggctgtgaggctcggagtcgccggaggagccagtatctgtgtcgccgccgcccgcggcgtccccggtttggtgttgcggcgcccaccttcgggaggatcagttagcatcgctccttcctctgcctggcccccctcctctaacttctagactctagtttaaaatgaagctattcggctctgctcagaccggtatgtggaagggagaaaggctgcttctgatgcttggaagatatcctctcagccacaaagatggtaataaatctttgcctcccacagttcagaccaagaattcactgcaacaagatatcagctgatggttacgaagtagaaaatctcatctctgaagatctcacaaagagaagtcatggtttcaggacagagtatttcattaagccaccagtctatgtgacagtttcatttccctttaatgtggaaatctgtaggatcaacatagacctcacagctgggggaggtcagaacgtcactggcctggaaatgtacacatctgcctcat

SEQ ID NO: 197835 - DNA, 1291 bp, Homo sapiens
  Payload ID: 19013
  Gene Name: UBX domain protein 1
  Uniprot ID: Q04323
  ENST ID: ENST00000294119
  CDS Start-End: 133-1071
ggctgctatagagccgggtgagagagcgagcgcccgtcggcgggtgtcgagggcgggttgcctcgcgctgacccttcccgccctccttctcgtcacacaccaggtccccgcggaagccgcggtgtcggcgccatggcggagctgacggctcttgagagtctcatcgagatgggcttccccaggggacgcgcggagaaggctctggccctcacagggaaccagggcatcgaggctgcgatggactggctgatggagcacgaagacgaccccgatgtggacgagcctttagagactccccttggacatatcctgggacgggagcccacttcctcagagcaaggcggccttgaaggatctggttctgctgccggagaaggcaaacccgctttgagtgaagaggaaagacaggaacaaactaagaggatgttggagctggtggcccagaagcagcgggagcgtgaagaaagagaggaacgggaggcattggaacgggaacggcagcgcaggagacaagggcaagagttgtcagcagcacgacagcggctacaggaagatgagatgcgccgggctgctgaggagaggcggagggaaaaggccgaggagttagcagccagacaaagagttagagaaaagatcgagagggacaaagcagagagagccaagaagtatggtggcagtgtgggctctcagccacccccagtggcaccagagccaggtcctgttccctcttctcccagccaggagcctcccaccaagcgggagtatgaccagtgtcgcatacaggtcaggctgccagatgggacctcactgacccagacgttccgggcccgggaacagctggcagctgtgaggctctatgtggagctccaccgtggggaggaactaggtgggggccaggaccctgtgcaattgctcagtggcttccccagacgggccttctcagaagctgacatggagcggcctctgcaggagctgggtatggctgcaagactagaaaccaggactagaaactgggggagtagggaggcatgcctaggaaaaggagggatgcaaagagaaggggctttgtgaacatggtgcaaggccaggaattttgggagcaaaaaccaagtatccttgtggttcaagcctgttttcttccatcttcaggactcgtgccttctgctgttctcattgtggccaagaaatgtcccagctgagggcctttgtcccattgtccctctgtgaccccttcatctttgataaagcactgacatctccttcctaataaatagaccctgagttctgtaca

SEQ ID NO: 197836 - DNA, 1153 bp, Homo sapiens
  Payload ID: 19013
  Gene Name: UBX domain protein 1
  Uniprot ID: Q04323
  ENST ID: ENST00000301935
  CDS Start-End: 168-1061
cgcttcccctcggctttcttctcgtcggtgttcccggctgctatagagccgggtgagagagcgagcgcccgtcggcgggtgtcgagggcgggttgcctcgcgctgacccttcccgccctccttctcgtcacacaccaggtccccgcggaagccgcggtgtcggcgccatggcggagctgacggctcttgagagtctcatcgagatgggcttccccaggggacgcgcggagaaggctctggccctcacagggaaccagggcatcgaggctgcgatggactggctgatggagcacgaagacgaccccgatgtggacgagcctttagagactccccttggacatatcctgggacgggagcccacttcctcagagcaaggcggccttgaaggatctggttctgctgccggagaaggcaaacccgctttgagtgaagaggaaagacaggaacaaactaagaggatgttggagctggtggcccagaagcagcgggagcgtgaagaaagagaggaacgggaggcattggaacgggaacggcagcgcaggagacaagggcaagagttgtcagcagcacgacagcggctacaggaagatgagatgcgccgggctgctgaggagaggcggagggaaaaggccgaggagttagcagccagacaaagagttagagaaaagatcgagagggacaaagcagagagagccaagaagtatggtggcagtgtgggctctcagccacccccagtggcaccagagccaggtcctgttccctcttctcccagccaggagcctcccaccaagcgggagtatgaccagtgtcgcatacaggtcaggctgccagatgggacctcactgacccagacgttccgggcccgggaacagctggcagctgtgaggctctatgtggagctccaccgtggggaggaactaggtgggggccaggaccctgtgcaattgctcagtggcttccccagacgggccttctcagaagctgacatggagcggcctctgcaggagctgggactcgtgccttctgctgttctcattgtggccaagaaatgtcccagctgagggcctttgtcccattgtccctctgtgaccccttcatctttgataaagcactgacatctccttcctaataaatagaccctgagttctgtaca

SEQ ID NO: 197837 - DNA, 367 bp, Homo sapiens
  Payload ID: 19013
  Gene Name: UBX domain protein 1
  ENST ID: ENST00000533000
  CDS Start-End: 2-304
gatgcgccgggctgctgaggagaggcggagggaaaaggccgaggagttagcagccagacaaagagttagagaaaagatcgagagggacaaagcagagagagccaagaagtatggtggcagtgtgggctctcagccacccccagtggcaccagagccaggtcctgttccctcttctcccagccaggagcctcccaccaagcgggagtatgaccagtgtcgcatacaggactcgtgccttctgctgttctcattgtggccaagaaatgtcccagctgagggcctttgtcccattgtccctctgtgaccccttcatctttgataaagcactgacatctccttcctaataaatagaccctgagttctgtac

SEQ ID NO: 197838 - DNA, 943 bp, Homo sapiens
  Payload ID: 19013
  Gene Name: UBX domain protein 1
  ENST ID: ENST00000534176
  CDS Start-End: 73-943
tcggctttcttctcgtcggtgttcccggctgctatagagccgggtccccgcggaagccgcggtgtcggcgccatggcggagctgacggctcttgagagtctcatcgagatgggcttccccaggggacgcgcggagaaggctctggccctcacagggaaccagggcatcgaggctgcgatggactggctgatggagcacgaagacgaccccgatgtggacgagcctttagagactccccttggacatatcctgggacgggagcccacttcctcagagcaaggcggccttgaaggatctggttctgctgccggagaaggcaaacccgctttgagtgaagaggaaagacaggaacaaactaagaggatgttggagctggtggcccagaagcagcgggagcgtgaagaaagagaggaacgggaggcattggaacgggaacggcagcgcaggagacaagggcaagagttgtcagcagcacgacagcggctacaggaagatgagatgcgccgggctgctgaggagaggcggagggaaaaggccgaggagttagcagccagacaaagagttagagaaaagatcgagagggacaaagcagagagagccaagaagtatggtggcagtgtgggctctcagccacccccagtggcaccagagccaggtcctgttccctcttctcccagccaggagcctcccaccaagcgggagtatgaccagtgtcgcatacaggtcaggctgccagatgggacctcactgacccagacgttccgggcccgggaacagctggcagctgtgaggctctatgtggagctccaccgtggggaggaactaggtgggggccaggaccctgtgcaattgctcagtggcttccccagacgggccttctcagaagctgacatggagcggcctctgcaggagctgggactcgtgccttctgctgttctcattg

SEQ ID NO: 197839 - DNA, 1110 bp, Homo sapiens
  Payload ID: 19013
  Gene Name: UBX domain protein 1
  ENST ID: ENST00000529640
  CDS Start-End: 143-1024
cggtgttcccggctgctatagagccgggtgagagagcgagcgcccgtcggcgggtgtcgagggcgggttgcctcgcgctgacccttcccgccctccttctcgtcacacaccaggtccccgcggaagccgcggtgtcggcgccatggcggagctgacggctcttgagagtctcatcgagatgggcttccccaggggacgcgcggagaaggctctggccctcacagggaaccagggcatcgaggctgcgatggactggctgatggagcacgaagacgaccccgatgtggacgagcctttagagactccccttggacatatcctgggacgggagcccacttcctcagagcaaggcggccttgaaggatctggttctgctgccggagaaggcaaacccgctttgagtgaagaggaaagacaggaacaaactaagaggatgttggagctggtggcccagaagcagcgggagcgtgaagaaagagaggaacgggaggcattggaacgggaacggcagcgcaggagacaagggcaagagttgtcagcagcacgacagcggctacaggaagatgagatgcgccgggctgctgaggagaggcggagggaaaaggccgaggaacaaagagttagagaaaagatcgagagggacaaagcagagagagccaagaagtatggtggcagtgtgggctctcagccacccccagtggcaccagagccaggtcctgttccctcttctcccagccaggagcctcccaccaagcgggagtatgaccagtgtcgcatacaggtcaggctgccagatgggacctcactgacccagacgttccgggcccgggaacagctggcagctgtgaggctctatgtggagctccaccgtggggaggaactaggtgggggccaggaccctgtgcaattgctcagtggcttccccagacgggccttctcagaagctgacatggagcggcctctgcaggagctgggactcgtgccttctgctgttctcattgtggccaagaaatgtcccagctgagggcctttgtcccattgtccctctgtgaccccttcatctttgataaagcactgacatctccttcctaataaatagaccctgagttc

SEQ ID NO: 197840 - DNA, 1002 bp, Homo sapiens
  Payload ID: 19013
  Gene Name: UBX domain protein 1
  ENST ID: ENST00000616865
  CDS Start-End: 195-911
acgtgacccaaacagatccggcacttccgcttcccctcggctttcttctcgtcggtgttcccggctgctatagagccgggtgagagagcgagcgcccgtcggcgggtgtcgagggcgggttgcctcgcgctgacccttcccgccctccttctcgtcacacaccaggtccccgcggaagccgcggtgtcggcgccatggcggagctgacggctcttgagagtctcatcgagatgggcttccccaggggacgcgcggagaaggctctggccctcacagggaaccagggcatcgaggctgcgatggactggatgttggagctggtggcccagaagcagcgggagcgtgaagaaagagaggaacgggaggcattggaacgggaacggcagcgcaggagacaagggcaagagttgtcagcagcacgacagcggctacaggaagatgagatgcgccgggctgctgaggagaggcggagggaaaaggccgaggagttagcagccagacaaagagttagagaaaagatcgagagggacaaagcagagagagccaagaagtatggtggcagtgtgggctctcagccacccccagtggcaccagagccaggtcctgttccctcttctcccagccaggagcctcccaccaagcgggagtatgaccagtgtcgcatacaggtcaggctgccagatgggacctcactgacccagacgttccgggcccgggaacagctggcagctgtgaggctctatgtggagctccaccgtggggaggaactaggtgggggccaggaccctgtgcaattgctcagtggcttccccagacgggccttctcagaagctgacatggagcggcctctgcaggagctgggactcgtgccttctgctgttctcattgtggccaagaaatgtcccagctgagggcctttgtcccattgtccctctgtgaccccttcatctttgataaagcactgacatctccttcctaataaatagaccctgagttctgtac

SEQ ID NO: 197841 - DNA, 5571 bp, Homo sapiens
  Payload ID: 19014
  Gene Name: UBX domain protein 10
  Uniprot ID: Q96LJ8
  ENST ID: ENST00000375099
  CDS Start-End: 85-927
gggagaccagggttgtttaccagcaggacagagcccgggcgcaggcggcggatggagcggaacggctaggggtcttgagaagcaatggccacagaagcccctgtgaatatagcaccacctgagtgtagcactgttgtcagcacagcagttgacagcctcatttggcagccaaactcactaaatatgcacatgataaggcccaagtccgccaagggacggacaagaccgagtctgcagaaatcccagggcgtggaggtgtgcgctcatcatataccatctccgcctccagccattccctatgagttgccaagcagccaaaaaccaggagcctgtgcacccaaatctccaaaccagggagcttctgatgagatccctgagctgcagcagcaagtacccactggggcttcctcttctctcaataagtatccagtccttccttccatcaacagaaagaacctggaggaggaggctgtggaaaccgttgccaaaaaggccagctcactgcaactgagcagtatccgggctctttaccaagacgagacgggcaccatgaagacaagtgaagaagattccagagctcgagcttgtgccgtggagaggaaattcatcgtccgaaccaagaaacagggctcttccagggctggaaatctggaggaaccatcggaccaagaaccaaggttgctgcttgctgttagatcaccaacaggccaaaggtttgtacgccatttccggccaacagatgatttgcaaaccattgttgctgtggccgaacagaaaaacaaaacctcctaccgacactgcagcattgaaacaatggaggtgcccaggaggcgattttctgacctcaccaaatctctgcaagagtgcagaatcccccacaagtctgtgctgggcatctcactggaagatggggaagggtggccctgagtccacagccacccagctgaggtcctgggtctctgagcaaaggagcatgcttgggcgttgtggcctcttaggcagcctgtttcaagtgccatgtggacctggtgcagctgggaagcttgggactctcgtctgcactgcgtgtcctctgaagcagtgaagtctgtgcctatgccgagcgcgctaagaagtctcccttccagctgttccattctctccaccaccagcgtaactggcaagttaccaaggttgttcctgaaacagcagtgatcatgacttctcctttccagagttttgggtccttctgaattaatggtccttttcgaacaccggcttgcctttacagtgaactgtgattctctcgaagccaatgctttcctgtctgtatttgatgcaggattaaacacttcccagagaggattctagtctggtaaataaccacagtgtaggaactatctaactggcatttgtgtttcttgcgagtattttgaagaaacaggccgttgaccccatctttggaagtagccctttaccatgcatggtcagtttcttagggatttactatttgtgtgaggtggcatctaagggaagaatgggttttcttccccaaaacatcagcatttctaaaatagtcctaaagcttgaaagtaagttgcttccatgagcatggattacccagtagctactttttaatagagactgactaggtttacaacttctgggagctactctgtgggctgaattcttccaaaaccgagaaaagccagtgcagtctgatttcttttgcttttgtcagtaatggaatcttttgtttttaaaatgtacaaacctataagtttaaacaggtttgtactgacaacctccttggcttatttgggggtggagcaattgttttattccccagtttcagtgcgttgcccacttcaaacatggtgtgtcctttggagctgtgacagaggtgcctgttctgacttagaacctctggaggaggaggggggtgccttggtctcgtgttactttgctgtgcctgtgctgagagaccatgtgcccgagcatctggttgaccggcatgaagtacatcagcctgtcttagcctgagctgctttgaagaccatggggtcttgtgtttccaacttcgaagtgctgatgtggacagtttgccaatgttctcttctattgcaagttcagccagactccatgactcatctgatcccttttatggccaaatcatccttcagagtagggaacactcagacattctgtgcatgttgttcccccaaagcatggtcatcacaaagtcctgagttctggtgtgtgctcccgcctcctgggtatacagagagaaggcaggaatcaggagttccagaagcatatacatgtggctaccccagcaacaagcgcatcctgtgctcagataagctgcatggttgggagtgttttttctcgcacgttgaggcttagtggagatgggcaccactgccatttgctcagaagaaggctggtctggtcctaactgcatcccacactgcccagatcattctagaataggttatttctgaatgttttatagaatttcttaataccatcctggtttggtcagccattcctttgattggaaaggtcagctggggccagtggtgcctcaggcaggcccacacaactggccacctcttcccgttaatgaccacagcagacagaatttgagcccagcacctaaaagtacaggaatttcacttcccaccaggacttgagcacataactctatgtctgatctaggaggctgggggaagagcctcccataaaatcacacctactctgtggtaagaataaaatcccacccacctgggacttggtaatttctccagacaggaaagctttagaaaacttgagtgaaatggagcaagcttgaaggagttagaatcttctgtgcttagggtttgctgctgctggtgagcttagaattttggggttgggaaaaagtggaaggcataagcatagaaatattttaggatattttaggatatgtgaataaagctagactcaaaccatcataataaacattttttttttggacaaaagatgatacgataaaaaccaacttgtgtgaaactgagtcagtggagaagtgcatctcgtattttaacctaaggcttcagctcccacacacgactggacagaggggtgtgttagcctgatcttcagttttctcattgggaaagcacttgttccactgttagaaccaagtcctcctccccggacacttctgatgcccactgcagaagcgacggggctcctgctctcagcttctgtcacagcacttagcttgtctggataagagtcacctgaatttttcctaaacatcattccaagtactctgattttggggattggcaagaacaaactaaatcagaattcagagttcctgatggctccacatgttgcattgcagctgaggccccctgtcctaaatgggctcaaccggcctagcacactcctcttggtggctttgggtgggtcagccttgcccagtttggggtcatagacctcagttattcatttaaccgatggccattgagggcttacccagtgccacactttgagacaagcatgggtgtcctgaaaagaaagtgttggcaagaaaacatgaacccaccattggactctcaactcaaaccttactgaagtcagtggctatagctttatctgcaaaggaccccaaagtgaggatcccacattgttactgctggctcttcatcccaccctctggagatgctaaggaagctcttgcccaccttttctagtgatggagtaggaactttgcataggacaaaccttcatgataggttactctagtatattccctcataaagtccaataggtaaattagtcttggcagcagaaggaacagcaggagaagtaagtgattcatcatctagaatccagaaaatttgcaccaacagatggcaggtggttataacacaacagatcttgccctgagaatatctggggacccagccaacagccttcaaggcagggcactcctgcggaagagatggcttgtgaacatgactgtggacccagagtcaccccagagctcccatataaaatgcttcacagagaaactaagagcagccttggggcattcattccaattaataaccttaaagactagagccagatccacctgcattacaaaagcaggcattcgaggaactaaactttgcttttgttcatgctcttacctgccgttttaaatgggtttctaatgtcaaataaagccaccctgcctcttgggacaaagatgtttctctttacttagttttaaaaataaaatcctcataataagttcggataaaagagacttttacatggtaagaggatctacttttctaccttttaaacggaataaagaagacagctatattattttgctttagcattagtttagaagtcattccaagaattaagcaggaacatctgttttctcagtccattaaggcaacaccccacagtaaagttaaaagttcacgagcctattgactctcatccagaaaccagaaccaaccaaaccccaccatataacagggaaggcctgaggtcgcttcggaggagttagcaatcaaaggagaacagacttttggtgactcagttaccaacacacaacactcataaaactaaaattaggtgttttattttttgtctacacgggtggcgtgccactttcctttcctgattagggaagcttctcccagccctttctgacgttcatctgtgtgcctttatgttcaaacagtttaggaagcagcagccctcctaacagtcgacgcggaagcacaaatctctggaggtatttttggacacacttaaatcctatcccaagagactgaacgactgtggtgacaaatgcccacgggtaaaactgagcaagcctcattcagactgtcctgctcagaggcgccctctggctgccgtgttgaggggctggggtggaagatggaagacttgagtgctggaggtatgaaggtgaccagagagaggtgatggtggttcgggccagggtggtagccagagatgtcatgagaggtggccagattctggacatataatccattttcttaaggagaaaaaaaaggatagtttgacaagttgggattcacccaggtggacttagcttgaccaatatcgccaacgtggattgtttctgcaaaaacaaacaagcaaacaaccaccacggcagcaaagcacatggcaggcaggggaaagacactgaccagcaggaacattcccatcaaggaaatgcacgagtgtttttggacaaagtgtacagagaaaatcaaagctattcattgttttaattaagagataaaactaaggtcactgtttcacttaatgttgagatataagttaaaagtatcatctacctctaggggtatgatatgactgctgaccaaggttacttaataagaaatccttgttctagttaaatacactgtttatctctatctcctgtccttcatccctccctttcttgccacccttccctccatttattccagtccagcagctgactggggatgcatttcttcttgggaaggcaaacaaagccatcattctggggcttaattaataaagctcctagtttcatag

SEQ ID NO: 197842 - DNA, 2254 bp, Homo sapiens
  Payload ID: 19015
  Gene Name: UBX domain protein 11
  Uniprot ID: Q5T124
  ENST ID: ENST00000314675
  CDS Start-End: 81-1283
gacaacaagatggcggcgctgcgggacggctagcggccctgcgtgggagttcctgacagctggattctagaagtagaactatgagctcacctttggcctcccttagcaagacccgaaaagtgcccctgccctcggagcctatgaatcctgggaggcgaggaatccgcatctatggagatgaagatgaggtggacatgttgagtgatgggtgtggctcagaagaaaagatctcagtcccttcctgctatggcggcataggtgcccctgtgagtcggcaaggggactcattggcgccccctgaggtggactttgacaggctgctggccagcctgcaggatcttagtgagctggtggtagagggtgacacccaagtgacaccagtgcccggcggggcacggctgcgtaccctcgagcccatcccgctgaagctctaccggaatggcatcatgatgttcgacgggcccttccagcccttctacgatccctccacacagcgctgcctccgagacatattggatggcttctttccctcagagctccagcgactgtaccccaatggggtcccctttaaggtgagtgacttgcgcaatcaggtctacctggaggatggactggaccccttcccaggcgagggccgtgtggtgggcaggcagctgatgcacaaggccttggacagggtggaggagcacccaggctccaggatgactgctgagaaatttctgaacaggctccccaagtttgtgatccggcaaggcgaggtgattgacatccggggccccatcagggacaccttgcagaactgctgcccattgcctgcccggatccaggagattgtggtggagacgcccaccttggccgctgagcgagagaggagccaggagtcacccaacacgccggcacccccgctctccatgctgcgcatcaagtctgagaatggggaacaggccttcctactgatgatgcagcctgacaacaccattggggacgtgcgagctctgctagcgcaggccagggtcatggatgcctctgcctttgagatcttcagcacattcccgcccaccctctaccaggacgatacactcacgctgcaggctgcaggccttgtgcccaaagcagcactgctgctgcgggcacgccgagccccgaagtccagcctgaaattcagtcctggtccctgtcccggtcccggtcccggccccagtcccggtcccggtcccggccccagtcccggtcccggtcccggccccagtccctgtcctggacccagtcccagcccccaataaagcacccgccccctcaacccgctgctccgccaggctcttgggtgggccatctcgccaggcacgtaggaaaggcctgggaccagctgggccagggagggggcggtgccgacccgccccttggtaactcgagccccggctggcgggcctggctgctgggtctttgtcttctaggttcctctttctcccaagaagggctaagtggatcctgtgaagggagggatgcagtggggggaaggagctggccccagctgggtttacattctcagctgggacagcagagcctcactgtgtatgtgtgcagccagcagatacctgtgcacaggcacagacccaccaactcgtggggacacttcaacaccgcacaaagccattttgccactagacccatgcccccaaattagcagaactgcagctgggtacccacctcccatgatacactcattcttagccattgtgctccaacacaggcgcatgggatggccacactcactgacaggcatggagatgtgcactacacaccaaggcacaagcatgatatggacacatgcatgtgaactggagggtggcccacccagacatctccagaaaccactggtccatacaggtatttgtgtgtcagacatatccaaacacatgcactaacaaacacagaggtgacagtcacaagagaacagctcagccacccttcccacagagcagtctcagcacagtcacaactaccaaccttgcccagggcagggacccaggaggcccaggccacaaccaaccagacacagtgccaatggaacaggacatcatttaattgcctctagggtcctcctgggagagggactgcggggcctttggcagagctctggctgatggaaccaacagaggtgcccatcagccagtgccaggcaggatggcggccccaatgcttggctgggggcagccagcatttggggctgttgcttaagacaatttctgagact

SEQ ID NO: 197843 - DNA, 1555 bp, Homo sapiens
  Payload ID: 19015
  Gene Name: UBX domain protein 11
  Uniprot ID: Q5T124
  ENST ID: ENST00000357089
  CDS Start-End: 77-1540
acaagatggcggcgctgcgggacggctagcggccctgcgtgggagttcctgacagctggattctagaagtagaactatgagctcacctttggcctcccttagcaagacccgaaaagtgcccctgccctcggagcctatgaatcctgggaggcgaggaatccgcatctatggagatgtccctgcatcccatgactcggagctgatggccttcatgacgaggaagttgtgggacctggagcagcaggtgaaggcccagactgatgagatactgtccaaggatcagaagatagcggccctagaggacctggtgcagaccctccggccacacccagccgaggcaaccctgcagcggcaggaggaactggagacgatgtgtgtgcagctgcagcggcaggtcagggagatggagcggttcctcagtgactatggcctgcagtgggtgggcgagcccatggaccaggaggactcagagagcaagacagtctcagagcatggcgagagggactggatgacagccaagaagttctggaagccaggggactcattggcgccccctgaggtggactttgacaggctgctggccagcctgcaggatcttagtgagctggtggtagagggtgacacccaagtgacaccagtgcccggcggggcacggctgcgtaccctcgagcccatcccgctgaagctctaccggaatggcatcatgatgttcgacgggcccttccagcccttctacgatccctccacacagcgctgcctccgagacatattggatggcttctttccctcagagctccagcgactgtaccccaatggggtcccctttaaggtgagtgacttgcgcaatcaggtctacctggaggatggactggaccccttcccaggcgagggccgtgtggtgggcaggcagctgatgcacaaggccttggacagggtggaggagcacccaggctccaggatgactgctgagaaatttctgaacaggctccccaagtttgtgatccggcaaggcgaggtgattgacatccggggccccatcagggacaccttgcagaactgctgcccattgcctgcccggatccaggagattgtggtggagacgcccaccttggccgctgagcgagagaggagccaggagtcacccaacacgccggcacccccgctctccatgctgcgcatcaagtctgagaatggggaacaggccttcctactgatgatgcagcctgacaacaccattggggacgtgcgagctctgctagcgcaggccagggtcatggatgcctctgcctttgagatcttcagcacattcccgcccaccctctaccaggacgatacactcacgctgcaggctgcaggccttgtgcccaaagcagcactgctgctgcgggcacgccgagccccgaagtccagcctgaaattcagtcctggtccctgtcccggtcccggtcccggccccagtcccggtcccggtcccggccccagtcccggtcccggtcccggccccagtccctgtcctggacccagtcccagcccccaataaagcacccgccccctc

SEQ ID NO: 197844 - DNA, 938 bp, Homo sapiens
  Payload ID: 19015
  Gene Name: UBX domain protein 11
  ENST ID: ENST00000374215
  CDS Start-End: 197-938
ggctagcggccctgcgtgggagttcctgacagctggattctagaagtagaactatgagctcacctttggcctcccttagcaagacccgaaaagtgcccctgccctcggagcctatgaatcctgggaggcgaggaatccgcatctatggagatgagcggtgacctaggcatccctgtctgcagaagatgaggtggacatgttgagtgatgggtgtggctcagaagaaaagatctcagtcccttcctgctatggcggcataggtgcccctgtgagtcggcaagtccctgcatcccatgactcggagctgatggccttcatgacgaggaagttgtgggacctggagcagcaggtgaaggcccagactgatgagatactgtccaaggatcagaagatagcggccctagaggacctggtgcagaccctccggccacacccagccgaggcaaccctgcagcggcaggaggaactggagacgatgtgtgtgcagctgcagcggcaggtcagggagatggagcggttcctcagtgactatggcctgcagtgggtgggcgagcccatggaccaggaggactcagagagcaagacagtctcagagcatggcgagagggactggatgacagccaagaagttctggaagccaggggactcattggcgccccctgaggtggactttgacaggctgctggccagcctgcaggatcttagtgagctggtggtagagggtgacacccaagtgacaccagtgcccggcggggcacggctgcgtaccctcgagcccatcccgctgaagctctaccggaatggcatcatgatgttcgacgggcccttccagcccttctacgatccctccacacagcgctgcctccgagacatattggatggcttctttccctcagagctccagcgactgtaccccaatggggtcccctttaaggtga

SEQ ID NO: 197845 - DNA, 1846 bp, Homo sapiens
  Payload ID: 19015
  Gene Name: UBX domain protein 11
  Uniprot ID: Q5T124
  ENST ID: ENST00000374217
  CDS Start-End: 368-1831
agtgcagccccagccagaagagctggaaggctgggcggccaggcccgctgtgtccccagttttcctgttggagtccatctgctgtgctctcaggagagaaggctgggtctctgggagctcacatcctgtatgccctccctccatgccaagcaactttggggagtcctggcagtggtgccaggcgttgctcttacctgtaccataaccaggaggctgatggttgctcaggcctccctcaaactagccaatgagaagtgcacgggtcctggtcgcctaggaaaccgcgtgacaacaagatggcggcgctgcgggacggctagcggccctgcgtgggagttcctgacagctggattctagaagtagaactatgagctcacctttggcctcccttagcaagacccgaaaagtgcccctgccctcggagcctatgaatcctgggaggcgaggaatccgcatctatggagatgtccctgcatcccatgactcggagctgatggccttcatgacgaggaagttgtgggacctggagcagcaggtgaaggcccagactgatgagatactgtccaaggatcagaagatagcggccctagaggacctggtgcagaccctccggccacacccagccgaggcaaccctgcagcggcaggaggaactggagacgatgtgtgtgcagctgcagcggcaggtcagggagatggagcggttcctcagtgactatggcctgcagtgggtgggcgagcccatggaccaggaggactcagagagcaagacagtctcagagcatggcgagagggactggatgacagccaagaagttctggaagccaggggactcattggcgccccctgaggtggactttgacaggctgctggccagcctgcaggatcttagtgagctggtggtagagggtgacacccaagtgacaccagtgcccggcggggcacggctgcgtaccctcgagcccatcccgctgaagctctaccggaatggcatcatgatgttcgacgggcccttccagcccttctacgatccctccacacagcgctgcctccgagacatattggatggcttctttccctcagagctccagcgactgtaccccaatggggtcccctttaaggtgagtgacttgcgcaatcaggtctacctggaggatggactggaccccttcccaggcgagggccgtgtggtgggcaggcagctgatgcacaaggccttggacagggtggaggagcacccaggctccaggatgactgctgagaaatttctgaacaggctccccaagtttgtgatccggcaaggcgaggtgattgacatccggggccccatcagggacaccttgcagaactgctgcccattgcctgcccggatccaggagattgtggtggagacgcccaccttggccgctgagcgagagaggagccaggagtcacccaacacgccggcacccccgctctccatgctgcgcatcaagtctgagaatggggaacaggccttcctactgatgatgcagcctgacaacaccattggggacgtgcgagctctgctagcgcaggccagggtcatggatgcctctgcctttgagatcttcagcacattcccgcccaccctctaccaggacgatacactcacgctgcaggctgcaggccttgtgcccaaagcagcactgctgctgcgggcacgccgagccccgaagtccagcctgaaattcagtcctggtccctgtcccggtcccggtcccggccccagtcccggtcccggtcccggccccagtcccggtcccggtcccggccccagtccctgtcctggacccagtcccagcccccaataaagcacccgccccctc

SEQ ID NO: 197846 - DNA, 1792 bp, Homo sapiens
  Payload ID: 19015
  Gene Name: UBX domain protein 11
  Uniprot ID: Q5T124
  ENST ID: ENST00000374221
  CDS Start-End: 215-1777
aaaccgcgtgacaacaagatggcggcgctgcgggacggctagcggccctgcgtgtactttcccaagcaccaccaggccaaaggtctctcagttcagagcagaaagccgtatacccagaggagcaggcagataacagaaacttccagaaacctctgtggagacagtggaagaggcaaaagggagttcctgacagctggattctagaagtagaactatgagctcacctttggcctcccttagcaagacccgaaaagtgcccctgccctcggagcctatgaatcctgggaggcgaggaatccgcatctatggagatgaagatgaggtggacatgttgagtgatgggtgtggctcagaagaaaagatctcagtcccttcctgctatggcggcataggtgcccctgtgagtcggcaagtccctgcatcccatgactcggagctgatggccttcatgacgaggaagttgtgggacctggagcagcaggtgaaggcccagactgatgagatactgtccaaggatcagaagatagcggccctagaggacctggtgcagaccctccggccacacccagccgaggcaaccctgcagcggcaggaggaactggagacgatgtgtgtgcagctgcagcggcaggtcagggagatggagcggttcctcagtgactatggcctgcagtgggtgggcgagcccatggaccaggaggactcagagagcaagacagtctcagagcatggcgagagggactggatgacagccaagaagttctggaagccaggggactcattggcgccccctgaggtggactttgacaggctgctggccagcctgcaggatcttagtgagctggtggtagagggtgacacccaagtgacaccagtgcccggcggggcacggctgcgtaccctcgagcccatcccgctgaagctctaccggaatggcatcatgatgttcgacgggcccttccagcccttctacgatccctccacacagcgctgcctccgagacatattggatggcttctttccctcagagctccagcgactgtaccccaatggggtcccctttaaggtgagtgacttgcgcaatcaggtctacctggaggatggactggaccccttcccaggcgagggccgtgtggtgggcaggcagctgatgcacaaggccttggacagggtggaggagcacccaggctccaggatgactgctgagaaatttctgaacaggctccccaagtttgtgatccggcaaggcgaggtgattgacatccggggccccatcagggacaccttgcagaactgctgcccattgcctgcccggatccaggagattgtggtggagacgcccaccttggccgctgagcgagagaggagccaggagtcacccaacacgccggcacccccgctctccatgctgcgcatcaagtctgagaatggggaacaggccttcctactgatgatgcagcctgacaacaccattggggacgtgcgagctctgctagcgcaggccagggtcatggatgcctctgcctttgagatcttcagcacattcccgcccaccctctaccaggacgatacactcacgctgcaggctgcaggccttgtgcccaaagcagcactgctgctgcgggcacgccgagccccgaagtccagcctgaaattcagtcctggtccctgtcccggtcccggtcccggccccagtcccggtcccggtcccggccccagtcccggtcccggtcccggccccagtccctgtcctggacccagtcccagcccccaataaagcacccgccccctc

SEQ ID NO: 197847 - DNA, 2043 bp, Homo sapiens
  Payload ID: 19015
  Gene Name: UBX domain protein 11
  Uniprot ID: Q5T124
  ENST ID: ENST00000374222
  CDS Start-End: 466-2028
attattccacaacaccccttgggtgccccaacgcgcctagcaccctgtaagtgctccccagctgtggatacaggtttctctcagggcagcccgcaagcagtgcagccccagccagaagagctggaaggctgggcggccaggcccgctgtgtccccagttttcctgttggagtccatctgctgtgctctcaggagagaaggctgggtctctgggagctcacatcctgtatgccctccctccatgccaagcaactttggggagtcctggcagtggtgccaggcgttgctcttacctgtaccataaccaggaggctgatggttgctcaggcctccctcaaactagccaatgagaagtgcacgggtcctggtcgcctaggaaaccgcgtgacaacaagatggcggcgctgcgggacggctagcggccctgcgtgggagttcctgacagctggattctagaagtagaactatgagctcacctttggcctcccttagcaagacccgaaaagtgcccctgccctcggagcctatgaatcctgggaggcgaggaatccgcatctatggagatgaagatgaggtggacatgttgagtgatgggtgtggctcagaagaaaagatctcagtcccttcctgctatggcggcataggtgcccctgtgagtcggcaagtccctgcatcccatgactcggagctgatggccttcatgacgaggaagttgtgggacctggagcagcaggtgaaggcccagactgatgagatactgtccaaggatcagaagatagcggccctagaggacctggtgcagaccctccggccacacccagccgaggcaaccctgcagcggcaggaggaactggagacgatgtgtgtgcagctgcagcggcaggtcagggagatggagcggttcctcagtgactatggcctgcagtgggtgggcgagcccatggaccaggaggactcagagagcaagacagtctcagagcatggcgagagggactggatgacagccaagaagttctggaagccaggggactcattggcgccccctgaggtggactttgacaggctgctggccagcctgcaggatcttagtgagctggtggtagagggtgacacccaagtgacaccagtgcccggcggggcacggctgcgtaccctcgagcccatcccgctgaagctctaccggaatggcatcatgatgttcgacgggcccttccagcccttctacgatccctccacacagcgctgcctccgagacatattggatggcttctttccctcagagctccagcgactgtaccccaatggggtcccctttaaggtgagtgacttgcgcaatcaggtctacctggaggatggactggaccccttcccaggcgagggccgtgtggtgggcaggcagctgatgcacaaggccttggacagggtggaggagcacccaggctccaggatgactgctgagaaatttctgaacaggctccccaagtttgtgatccggcaaggcgaggtgattgacatccggggccccatcagggacaccttgcagaactgctgcccattgcctgcccggatccaggagattgtggtggagacgcccaccttggccgctgagcgagagaggagccaggagtcacccaacacgccggcacccccgctctccatgctgcgcatcaagtctgagaatggggaacaggccttcctactgatgatgcagcctgacaacaccattggggacgtgcgagctctgctagcgcaggccagggtcatggatgcctctgcctttgagatcttcagcacattcccgcccaccctctaccaggacgatacactcacgctgcaggctgcaggccttgtgcccaaagcagcactgctgctgcgggcacgccgagccccgaagtccagcctgaaattcagtcctggtccctgtcccggtcccggtcccggccccagtcccggtcccggtcccggccccagtcccggtcccggtcccggccccagtccctgtcctggacccagtcccagcccccaataaagcacccgccccctc

SEQ ID NO: 197848 - DNA, 1312 bp, Homo sapiens
  Payload ID: 19015
  Gene Name: UBX domain protein 11
  ENST ID: ENST00000374223
  CDS Start-End: 462-1295
cgctgcgggacggctagcggccctgcgtggaggcgaggaatccgcatctatggagatgtccctgcatcccatgactcggagctgatggccttcatgacgaggaagttgtgggacctggagcagcaggtgaaggcccagactgatgagatactgtccaaggatcagaagatagcggccctagaggacctggtgcagaccctccggccacacccagccgaggcaaccctgcagcggcaggaggaactggagacgatgtgtgtgcagctgcagcggcaggtcagggagatggaggggactcattggcgccccctgaggtggactttgacaggctgctggccagcctgcaggatcttagtgagctggtggtagagggtgacacccaagtgacaccagtgcccggcggggcacggctgcgtaccctcgagcccatcccgctgaagctctaccggaatggcatcatgatgttcgacgggcccttccagcccttctacgatccctccacacagcgctgcctccgagacatattggatggcttctttccctcagagctccagcgactgtaccccaatggggtcccctttaaggtgagtgacttgcgcaatcaggtctacctggaggatggactggaccccttcccaggcgagggccgtgtggtgggcaggcagctgatgcacaaggccttggacagggtggaggagcacccaggctccaggatgactgctgagaaatttctgaacaggctccccaagtttgtgatccggcaaggcgaggtgattgacatccggggccccatcagggacaccttgcagaactgctgcccattgcctgcccggatccaggagattgtggtggagacgcccaccttggccgctgagcgagagaggagccaggagtcacccaacacgccggcacccccgctctccatgctgcgcatcaagtctgagaatggggaacaggccttcctactgatgatgcagcctgacaacaccattggggacgtgcgagctctgctagcgcaggccagggtcatggatgcctctgcctttgagatcttcagcacattcccgcccaccctctaccaggacgatacactcacgctgcaggctgcaggccttgtgcccaaagcagcactgctgctgcgggcacgccgagccccgaagtccagcctgaaattcagtcctggtccctgtcccggtcccggtcccggccccagtcccggtcccggtcccggccccagtcccggtcccggtcccggccccagtccctgtcctggacccagtcccagcccccaataaagcacccgccccctcaa

SEQ ID NO: 197849 - DNA, 793 bp, Homo sapiens
  Payload ID: 19015
  Gene Name: UBX domain protein 11
  ENST ID: ENST00000423664
  CDS Start-End: 349-793
gacaacaagatggcggcgctgcgggacggctagcggccctgcgtgtactttcccaagcaccaccaggccaaaggtctctcagttcagagcagaaagccgtatacccagaggagcaggcagataacagaaacttccagaaacctctgtggagacagtggaagaggcaaaagggagttcctgacagctggattctagaagtagaactatgagctcacctttggcctcccttagcaagacccgaaaagtgcccctgccctcggagcctatgaatcctgggaggcgaggaatccgcatctatggagatgagcggtgacctaggcatccctgtctgcagaagatgaggtggacatgttgagtgatgggtgtggctcagaagaaaagatctcagtcccttcctgctatggcggcataggtgcccctgtgagtcggcaagtccctgcatcccatgactcggagctgatggccttcatgacgaggaagttgtgggacctggagcagcaggtgaaggcccagactgatgagatactgtccaaggatcagaagatagcggccctagaggacctggtgcagaccctccggccacacccagccgaggcaaccctgcagcggcaggaggaactggagacgatgtgtgtgcagctgcagcggcaggtcagggagatggagcggttcctcagtgactatggcctgcagtgggtgggcgagcccatggaccaggaggactcagagagcaagacagtctcagagcatggcgagagggactggatgacagccaagaagttctggaagccag

SEQ ID NO: 197850 - DNA, 728 bp, Homo sapiens
  Payload ID: 19015
  Gene Name: UBX domain protein 11
  ENST ID: ENST00000421827
  CDS Start-End: 325-728
gacctttctgcccctggagtccccacgcaggctggagcccgagccccgagggcctgcgagctccgcggctcccacaggagaggttcaagaccctgcttaccatgactacgcgtggaggcggaaggaggcgacacggcctccagggctgggttagatcgtgatagacgtcgctccctgagcgcgtcctgggggcattagggagtcctggcagcgggccggaccgtgtccccgccagagctctgggctctggggatgacggagaggccgaggaggtgtgaagaagaatgttggagttcctgacagctggattctagaagtagaactatgagctcacctttggcctcccttagcaagacccgaaaagtgcccctgccctcggagcctatgaatcctgggaggcgaggaatccgcatctatggagatgaagatgaggtggacatgttgagtgatgggtgtggctcagaagaaaagatctcagtcccttcctgctatggcggcataggtgcccctgtgagtcggcaagtccctgcatcccatgactcggagctgatggccttcatgacgaggaagttgtgggacctggagcagcaggtgaaggcccagactgatgagatactgtccaaggatcagaagatagcggccctagaggacctggtgcagaccctccggccacacccagccgaggcaaccctgcagcggcaggaggaactggagacgatgtgtgtgca

SEQ ID NO: 197851 - DNA, 688 bp, Homo sapiens
  Payload ID: 19015
  Gene Name: UBX domain protein 11
  ENST ID: ENST00000442942
  CDS Start-End: 134-688
attaggaagagtagccagggaagtggaaacttcaggctaccccctgggcttggagccctgagtctgtccccaggggctgacttcctgcattcctctagggagttcctgacagctggattctagaagtagaactatgagctcacctttggcctcccttagcaagacccgaaaagtgcccctgccctcggagcctatgaatcctgggaggcgaggaatccgcatctatggagatgtccctgcatcccatgactcggagctgatggccttcatgacgaggaagttgtgggacctggagcagcaggtgaaggcccagactgatgagatactgtccaaggatcagaagatagcggccctagaggacctggtgcagaccctccggccacacccagccgaggcaaccctgcagcggcaggaggaactggagacgatgtgtgtgcagctgcagcggcaggtcagggagatggagcggttcctcagtgactatggcctgcagtgggtgggcgagcccatggaccaggaggactcagagagcaagacagtctcagagcatggcgagagggactggatgacagccaagaagttctggaagccaggggactcattggcgccccctgaggtggactttgacaggctgctggccagcctgcaggatcttagtgagctggtggtagagggtgacacccaagtg

SEQ ID NO: 197852 - DNA, 782 bp, Homo sapiens
  Payload ID: 19015
  Gene Name: UBX domain protein 11
  ENST ID: ENST00000452980
  CDS Start-End: 161-782
tactttcccaagcaccaccaggccaaaggtctctcagttcagagcagaaagccgtatacccagaggagcaggcagataacagaaacttccagaaacctctgtggagacagtggaagaggcaaaagggagttcctgacagctggattctagaagtagaactatgagctcacctttggcctcccttagcaagacccgaaaagtgcccctgccctcggagcctatgaatcctgggaggcgaggaatccgcatctatggagatgtccctgcatcccatgactcggagctgatggccttcatgacgaggaagttgtgggacctggagcagcaggtgaaggcccagactgatgagatactgtccaaggatcagaagatagcggccctagaggacctggtgcagaccctccggccacacccagccgaggcaaccctgcagcggcaggaggaactggagacgatgtgtgtgcagctgcagcggcaggtcagggagatggagcggttcctcagtgactatggcctgcagtgggtgggcgagcccatggaccaggaggactcagagagcaagacagtctcagagcatggcgagagggactggatgacagccaagaagttctggaagccaggggactcattggcgccccctgaggtggactttgacaggctgctggccagcctgcaggatcttagtgagctggtggtagagggtgacacccaagtgacaccagtgcccggcggggcacggctgcgtaccctcgagcccatcccgctgaagctctaccggaatg

SEQ ID NO: 197853 - DNA, 649 bp, Homo sapiens
  Payload ID: 19015
  Gene Name: UBX domain protein 11
  ENST ID: ENST00000450041
  CDS Start-End: 303-649
aagagggataattcctcccaagatcaatttagcaaaatagcggcactgtcgggatcacacattcaggtcctgaatgtgaggctgccagcagtttcattaacctaatcccaggctccttcctcccgcacctgagggttgctcaggcctccctcaaactagccaatgagaagtgcacgggtcctggtcgcctaggaaaccgcgtgacaacaagatggcggcgctgcgggacggctagcggccctgcgtggaggcgaggaatccgcatctatggagatgtccctgcatcccatgactcggagctgatggccttcatgacgaggaagttgtgggacctggagcagcaggtgaaggcccagactgatgagatactgtccaaggatcagaagatagcggccctagaggacctggtgcagaccctccggccacacccagccgaggcaaccctgcagcggcaggaggaactggagacgatgtgtgtgcagctgcagcggcaggtcagggagatggagcggttcctcagtgactatggcctgcagtgggtgggcgagcccatggaccaggaggactcagagagcaagacagtctcagagcatggcgagagggactggatgacagccaagaagttctggaagccaggtagagcagggcg

SEQ ID NO: 197854 - DNA, 6066 bp, Homo sapiens
  Payload ID: 19016
  Gene Name: UBX domain protein 2A
  Uniprot ID: P68543
  ENST ID: ENST00000309033
  CDS Start-End: 245-1024
ccgcgcgcgctcctcgggtctgcgcggagccggcgtcggcgcgcgcttgggcgcctggcgaagaccgagagaggctggcgggatctcagcggcgcggccgcggaacctgaggcggtctggggcggcggcgctccggctctgaagggctccagccaaacggagcccgcggccaaacggtgcctgcggtgcctgagctgagtgaggccgaggccgggaggccgtgcccggagtaaggcgaaagagaatgaaagacgtagataacctcaaaagtataaaagaagaatgggtttgtgaaacaggatctgataatcaacctcttggtaataatcaacaatcaaattgtgaatattttgttgatagcctttttgaggaagctcagaaggttagttccaaatgtgtgtctcccgctgaacagaagaaacaggtagatgtaaatataaaattatggaaaaacggattcaccgtcaacgacgatttcagaagttattccgatggtgccagtcagcagtttttgaactccatcaaaaagggggaattaccttcagaattacagggaatttttgataaagaagaggtggacgttaaagttgaagacaagaaaaatgaaatatgtttgtctacgaagcctgtgttccagcccttttcaggacagggtcacagactaggaagtgccacaccaaaaattgtttctaaagcaaagaatattgaagttgaaaataaaaataatttgtctgctgttccactgaacaacttggaacccattactaatatacagatctggttggccaatggaaaaaggattgtccagaaatttaacattactcatagagtaagccatatcaaagacttcattgaaaaataccaaggatctcaaagaagtcctccgttttccctggcaacagctcttcctgtcctcaggttgctagatgagacactcacactggaagaagcagatttacagaatgctgtcatcattcagagactccaaaaaactgcatcttttagagaactttcagagcactgatttttgatagactaagtggaaaatttgcagagaaatgatggttgtaagtggacatgcaaaccaaaattggggattggagaagtcagactcactagacttttggttcgagtactattgaactctctcctgatgagaagatgtttagataagtacaagttaagaaagtagcatatgactggaaactatattcagtgcactttctccaaaagactacccagaaaaatagacttattttcaaataccagttatcaagatatattaaatagctgtattgtttagaatcttaatatggtataaattagcatatgtattcacaatattcattcagacatcattcccagacagcagggatttatttaaatgttagctgtctgagtttttaaatagctaatacgaccgggtacagtggttcatgcctgtaatcccagaacttcgggaggccgagacaggcagatcacgaggtcaacagattgagaccatcctggcaaacatggtgaaaccccatctctagtaaaaatacaaaaattagctgggcgtggcggtgcgcaactgtagtcccagctactcgggaggctgaggcaggagaatctcttgaacctggcaagtgtaggttgcagtgagctgagattgagcaactgtactccagcttggcgacagagcaagaccccctctcaaaaataaataaaataaagtaaaataaatataaataattgtggccgggtgcaatggctcatgcctgtaatcccagcactttgggaggctgagatgggaggatcacttgaagccaggagtttaaaaccagaatgatcaacagagtgagacccctgtctatatatttttttaatttaaaaaataaaagaataaaattgtgtagctcagtatagtatcaagattaatctgcctactcacatttctacactttataaaaatgtaataaaagaaaattatctttctaaaaagcctattccctttccattttattttctttcaaaaattatggatttgtttttggctaacatttgggattagccattcatttgccaccactcacttagaatataatgccggtgtgtgtcacattactagtattttttaaatgcatcatataaagtatggttttctgtttctttttcgtttgtttgagatggagtttcgctcttgttgcccaggctggagtgcagtggcgcaatctcagctcaccacaacctccacctcccgggttcaagagattctcctgctcagcctcccaagtagctgggattacaggcatgcgccaccatgcttggctaattttgcatttttagtagacacgggatttcaccatgttggtcaggctggtctcgaactcccgacctcaggggatctgcctgcctaggcctcctgaagtgctgggattacaagtgtgaaccaccgtgcccagctggttttctgtttcatacatcagagtcaacttgtgaatacatttaaagattatttcattttgatatcacgaagaaaaacaggctttatatctcagactttaactaaatccagttagacctcaatttttcactgtcagattaaatccccatacctgaaaataagtttaacatttttttttgcaaatgatctattgaatcagatttaaaatgaagcatgcattgagtgtgccaaggaactaagtggtccatagcagcagtaatgttcatagggtgcgagatgcctgctatgaaacagcaactctcaaacatttttatctcaagaccatttgtttatgtgagctatatatattattatattaaatattaaatttttaaaatatttatttatgggccaggcacggtggcttacgcctgtaatcccagcactttgggaggctgaggcaggcggatcacaaggtcaagtgattgagaccatcctgtccaacatggtgaatccccgtctctactaaaaatacaaaaaaaattagctgggtgtggtggcatgcgcctgtagtcccagctacgtgggaggctgagggaggagaatggcttgaacccgggaggtggaggtttcagtgagccgagattgcgcccctgcactccagcctggtgacggagcgagactctttctcaaaaaaaaaaaattattcatttaaaaataacttctggctggacatggtgtctcacgcctgtaatcctagcactttgggaggccaagacaggtggatcacttgagcccaggagtttgagaccagcctgggcaacaaggcaaaactctatctataaaaattacaaaaattagtgcagtagctcacacctgtaatcccagcactttgggacactaaagcgggcagatcacctgaggtcaggagttcgagaccagcctggtcaatgtggtgaaaccatgtctgtactaaaaatacaaaaattagcctggtgtggtggcacatgcctgtaatctcagctactagggaggctgagggaggagaattgcttgaactcaggaggcagaggttgcagtgagccgagattgcgccactgcactctagcttaggcaacagagtaagaccctgccgtaataataataacttttttttttttgagatagagttttgctctttcccccagactagagtgcaatggcgcgatcttggctcactgcaacttgtccccccgggttcaagcgattcttctgccacagcctcccgagtagctgggattataggcgcccactaccacgcctggctaatttttgtatttttagtagagacggggtttcgccatgttggcctggctggcctctaactcgtaacctcaggtgatccgcccgccttggcctcccaaagtgctaggattataggcgtgagccactgtgcccagccaataataacttataaaacatgaaacgatttagtgagaaaagtggccggttttttggggggaattactttctgtcataaagaagatagatgggttctcatgtcttctacattcagtctgttgtgcagtcacatatcatgtagactctggaaaacacctctgtatactggtgaaagaatgaaaagaagcaaataatgccttagtatgattatgaaaaacgttttgacttcacagtgccctgaatgggtcttgggaatctccagggatccctcaggcacactttgagaaccaatctatataaagtgatggttcacaatgattctgaagccttagtttcagaatcatttggggcagcttttcaaaaatgccattcctgccacctaccacaaagattctgattcactgtatctgtgatgggtctcagatctctgcatttttaatctcacgtgattcttaagtatgtggtggaagtacctttcttcaggaaattctgtcctaagcttttaccctgagaaaataaaacctgcatgctttcaccatggacggtgggagactccactgaaacacatctgctagaccactaagtttatccttgtcacccagtttgctcttggaaagagtctgttcccttttgtcactgaaccaatcatgacataaacttgtgctttacctcctatagcacagccgagacaaggctggaacatttaattaaggtttttactaaggactcaggaataacaacagggaaatatctatgtaactagatgacctgacataaaatctatcttctgattgcagtctattgtgagaatgctgcttttcctagctcccagccttccatggggcagaaggctcttttaattaggaagagagggaggacaaaggagagccttttcttttgtccattactcttagaaatgaacaggtacataatagaaaataaataattattgttggtaatgtttacacagcagtgttagagcctctctgtagtgaaacaaaaataatgttcttaccaaaaaaaaaaaaaaaaaaaagaggcaatgataaaatcaatgagcttatctttctgatatagaaaataacaggatgacagttaatacatgttcaggaatctaagaaaatgtttcatataggcctatcatgtagcatttttatttgcataattatagtcaacatatgattctccatgtaggggtctctcattgagaatgtttcctgtgtacctatagaaaagcctctttggtagattttccggtttataattatttaaccagaagatacatgggaggttcttttgtatgtacctgtagaatacatcccagtaagggtcctatggagaaagacctgttgtcatcaataaccttcattattctaactgtgaaacgttcattaatgcgaataatatcctcaaagattttctacaatgagaatcatccagtaaagctttttaactgagaatttaaaagttgtaaaattgttagttaaatgtgtataattatcaaaagaggttgactttggaaaacaaacaatttgctaagggaaggaaaacttgaaaataatcaccttagatggggcatacaatttgacctaagcaattgtttcaaaactgtcttcagtttcttgaaaataattgttagggctgatatatagaaatacatatctaggccaggcacggtgactcatgcctgcaatcccagcactttgggaggctgaggtggatggatcacgaggtcaagagatcgagaccatcctggtcaacatggggaaaccccgtctatactaaaaatacaaaaattagctgggtgtagtggtgtgcgcctgtagtcccagctactcaggaggctgaggcaggagaatcacctgagccccggaggcagaggttgcagtgagccgagatcgtgccactgcactccagcctgggcaacagagcgagactccgtctcaaaaaaaagaaaaaaagaaatacatatctaatgttacagattgtggtttattggttaattactatgcatttttttcagtttaaaaaataatcttattttatatacttctctcggtataatttttcatgacatttcagcatgttgataatatgtgtgcatctatttcagtgccttaaagtattttgagagcaatcttttgctgacagttgaagaactgttaatgaaatactgttcattaaaaggatctgtgaaatca

SEQ ID NO: 197855 - DNA, 1557 bp, Homo sapiens
  Payload ID: 19016
  Gene Name: UBX domain protein 2A
  Uniprot ID: P68543
  ENST ID: ENST00000404924
  CDS Start-End: 442-1221
gaccagaaaagccagactaatcaggacgagttcgggcgtggaattgggcctgaagccctcatgcccagccaggcctgaatgccccagaccccaccgtcacccccgtggcctggatggagcaggggacggccggcgaaggcgcggggtggaaggggagcggcgacgaaggcgcgaggagctgactgggaatccccaagctacccgaggcaagacactgaacttgagtcgcacttttcatgcctgtagaaatgagaatgacagctgtgataaaaaaaaaattcatctgggcggtatctggaacttggcggtggatgaggagggctgctcgctggctgcggctgaggctcggtcaccgtgtagagaggcccagggagagctgcttcactcaagtcctgtcaagtcaaggcagccgggatttgtccacatctaaggcgaaagagaatgaaagacgtagataacctcaaaagtataaaagaagaatgggtttgtgaaacaggatctgataatcaacctcttggtaataatcaacaatcaaattgtgaatattttgttgatagcctttttgaggaagctcagaaggttagttccaaatgtgtgtctcccgctgaacagaagaaacaggtagatgtaaatataaaattatggaaaaacggattcaccgtcaacgacgatttcagaagttattccgatggtgccagtcagcagtttttgaactccatcaaaaagggggaattaccttcagaattacagggaatttttgataaagaagaggtggacgttaaagttgaagacaagaaaaatgaaatatgtttgtctacgaagcctgtgttccagcccttttcaggacagggtcacagactaggaagtgccacaccaaaaattgtttctaaagcaaagaatattgaagttgaaaataaaaataatttgtctgctgttccactgaacaacttggaacccattactaatatacagatctggttggccaatggaaaaaggattgtccagaaatttaacattactcatagagtaagccatatcaaagacttcattgaaaaataccaaggatctcaaagaagtcctccgttttccctggcaacagctcttcctgtcctcaggttgctagatgagacactcacactggaagaagcagatttacagaatgctgtcatcattcagagactccaaaaaactgcatcttttagagaactttcagagcactgatttttgatagactaagtggaaaatttgcagagaaatgatggttgtaagtggacatgcaaaccaaaattggggattggagaagtcagactcactagacttttggttcgagtactattgaactctctcctgatgagaagatgtttagataagtacaagttaagaaagtagcatatgactggaaactatattcagtgcactttctccaaaagactacccagaaaaatagacttattttcaaataccagttatcaagatatattaaatagctgtattgtttagaatcttaatatggtataaattagcatatgtattcacaatattcattcagacatcatt

SEQ ID NO: 197856 - DNA, 1821 bp, Homo sapiens
  Payload ID: 19016
  Gene Name: UBX domain protein 2A
  Uniprot ID: P68543
  ENST ID: ENST00000535786
  CDS Start-End: 247-867
gtccgcgcgcgctcctcgggtctgcgcggagccggcgtcggcgcgcgcttgggcgcctggcgaagaccgagagaggctggcgggatctcagcggcgcggccgcggaacctgaggcggtctggggcggcggcgctccggctctgaagggctccagccaaacggagcccgcggccaaacggtgcctgcggtgcctgagctgagtgaggccgaggccgggaggccgtgcccggagtaaggcgaaagagaatgaaagacgtagataacctcaaaagtataaaagaagaatgggtttgtgaaacaggatctgataatcaacctcttggtaataatcaacaatcaaattgtgaatattttgttgatagcctttttgaggaagctcagaaggttagttccaaatgtgtgtctcccgctgaacagaagaaacaggtagatgtaaatataaaattatggaaaaacggattcaccgtcaacgacgatttcagaagttattccgatggtgccagtcagcagtttttgaactccatcaaaaagggggaattaccttcagaattacagggaatttttgataaagaagaggtggacgttaaagttgaagacaagaaaaatgaaatatgtttgtctacgaagcctgtgttccagcccttttcaggacagggtcacagactaggaagagtaagccatatcaaagacttcattgaaaaataccaaggatctcaaagaagtcctccgttttccctggcaacagctcttcctgtcctcaggttgctagatgagacactcacactggaagaagcagatttacagaatgctgtcatcattcagagactccaaaaaactgcatcttttagagaactttcagagcactgatttttgatagactaagtggaaaatttgcagagaaatgatggttgtaagtggacatgcaaaccaaaattggggattggagaagtcagactcactagacttttggttcgagtactattgaactctctcctgatgagaagatgtttagataagtacaagttaagaaagtagcatatgactggaaactatattcagtgcactttctccaaaagactacccagaaaaatagacttattttcaaataccagttatcaagatatattaaatagctgtattgtttagaatcttaatatggtataaattagcatatgtattcacaatattcattcagacatcattcccagacagcagggatttatttaaatgttagctgtctgagtttttaaatagctaatacgaccgggtacagtggttcatgcctgtaatcccagaacttcgggaggccgagacaggcagatcacgaggtcaacagattgagaccatcctggcaaacatggtgaaaccccatctctagtaaaaatacaaaaattagctgggcgtggcggtgcgcaactgtagtcccagctactcgggaggctgaggcaggagaatctcttgaacctggcaagtgtaggttgcagtgagctgagattgagcaactgtactccagcttggcgacagagcaagaccccctctcaaaaataaataaaataaagtaaaataaatataaataattgtggccgggtgcaatggctcatgcctgtaatcccagcactttgggaggctgagatgggaggatcacttgaagccaggagtttaaaaccagaatgatcaacagagtgagacccctgtctatatatttttttaatttaaaaaataaaagaataaaattgtgtagctcagtatagtatcaagattaatctgcctactcacatttctacactttataaaaatgtaataaaagaaaattatctttct

SEQ ID NO: 197857 - DNA, 5068 bp, Homo sapiens
  Payload ID: 19017
  Gene Name: UBX domain protein 2B
  Uniprot ID: Q14CS0
  ENST ID: ENST00000399598
  CDS Start-End: 123-1118
ggttcgggtagcggggacgcgcacgcaccttgcgcgtcttcgcccctcctgcggttgccaggcaaccggccccggaagttgcggcaggtgcgtccgcagcgggcgccgctagccagcggaagatggcggagggcggaggccctgagcccggcgagcaggagaggaggtcttccgggccgcggcctccgagcgcgcgggatttgcagttggccttggcagaattgtatgaagatgaagtgaagtgcaaatcttccaagtctaatagacctaaagccacagtcttcaagagcccacggacaccacctcaacggttttactcaagtgaacatgaatacagtggattaaatatagttcgaccttcaactgggaaaattgtgaatgaacttttcaaagaggcaagggaacatggggctgtccctctgaatgaagccacaagagcttcaggtgatgataaatctaagtcatttacaggtggaggatacagattgggtagttctttttgtaagcggtctgaatatatctatggagaaaatcagctgcaagatgttcagattttgcttaaactgtggagcaatggtttcagtttagatgatggagaattgagaccttacaatgaaccaacaaatgctcaatttctggagtctgttaagagaggagagattcccctggagcttcagcgccttgttcatggtggccaagtgaatttggatatggaggatcatcaggatcaagaatacataaaacctagattgaggttcaaggcttttagtggagaagggcaaaaacttggaagccttacacctgaaatagtcagtacaccttcctctccagaagaggaggataaatcaatacttaatgcagttgttcttattgatgattcagtgccaacaacaaaaattcaaatcaggttagcagatgggagtcgtttgatacaaagattcaatagtacacacaggatcctggatgtccggaactttattgtacagtctcgtcctgaatttgcggctcttgactttattcttgtgacttcatttccgaataaagagctaacagatgaaagcctgacactgctagaagcagatattcttaacactgtgttactccagcaactaaaataatattgttcctgtccatgcagtagcatgtgggaatagatgatgtgccgtattaataaggacaatacttcagcattaaaaacagccaaattatttttattatttttacagataaattttggttttattgttattctgtcttccaatctgaatatagacaaatttggattaggaatagaccttgagataagtatgtttgagtttttagttgaaggactggcttatgttgatagtttttggatttctaggcaaatgagttgttacatgcttagtgttaatgtaacaacatttgtttgcagagaaaaatgaacaaaacccctttttgataaatgcatttggtaaaatttgcactaaagtttcttgatgcagcattgaccaacagccattaagaaatcttttgatcaaataagttgaaaatttgtctataatatatactgaaacgtgtcttttgattttgaaattgtttgatcatacaataattatttctcctattaagattttacacatcctttttacttactgatttagatatattactagtatcagaaactacagttttgccttgtattttacagaattatgactgttgtgaacttaaacagaaacacataaaggtcagcaattctttttttttttttttttgatatggagttttgctcttgttgcccaggctggagtgcaatggcataatttctgctcaccgcaacctccgcctcccaggttcaaaagattctcctgccttagcctcccaagtagctgggattacaggcatgcgccaccatgcctggctaatttttgtacttttgctagagacagcgtttctctgtgttgatcaggctggtctcgaactccgaacctcaggtgatccacccacctcagcctcccaaagtgctgggattacaggcatgagccaccacgcccagcctaaaggtcagcagttcttaagaagatatggtaaacagcaacaatattttaaaatcaagtaattacagttcctcccagagcttgcgttgatcacattcatttattcattcaacacatttttctaggaaactcactgtatacactaaacactattctgtgtgctcaacctagaatgtcttctccagaacaagactagtgtagaaatacaggaatgtaaattctgtcagacggactagatctaaagaattaccagcataaatgtttgcatttctgctgaagccagaagcttttccttcttcctagacaccatttcatccttaattattacttctggttagttttccattgccaccataacaagttacaaaatgtggcttaaaatagcacaaatttattatcttcacaattctgtaggttaggagtccaggttaagagtttcgcggtgccaagatcaatttgttggcagggttgcattctgttaggaggctctacaggagaatcatttccttgtcattccaccttctacaggacatcctcattccttggcttgtgacctccttcttccatcttaaaaaccagtgctgtttcatctctatgacccttctgttaccacatctctctgacaccagtgtggagaggttctctgcaggactcatgattaaatgaggcccaccggatatccaatctaggcttatctccttgtcttgaaatccatagtaaccttaattacatctgcaaaatctcttttaccatctaaggttacatacaggtttggagattaggacattaacattttacatggaacattattcttgcctactacagttcccacccaccccccgctccactcctgtgttaaagattcagattcatcacaaataaatttacatcactcataggtgctcaaaagtcacaatccattattacagcatcaactctaaatccaaaatcttatctgagtctcaccaactcaaaagtctcaaatctcacattgaagccatctaaattaagtttgggagaggatctgtgtgtgatttctgggacataattccaactgtgcacttgtgaacctagaaaacaagttatctgttcccaagtatgatggcatgacaggcagacaataatagttacacacgttcctgttcaaaaagcagaaacagatggaaaaaggagccatcagcaccaatcaatttacaaaaccagcgaggcacccttctttaagtttcaaggcctgggagtaatcttcagctcactgctgttctctgggcttgttgactgtctcagagtcatctttactttttcacaaaaggtagcacacgtttgcagctgagtatcaacttatcagtttgttcttcttttatattctctaaagctttctgttaaaaatggtggtgcttctgctgctataacgttgtcaagaaacttgtgggtcttttacatatgtcacagggatgcactcatttagataggaggctcctcacgtatctttcctggaaaatcctgtctctgtttttggctttttctgaaatagctgagaggatctatgattcacacccttaatatcttcaaagagtcttgtgtgtgacctgatattcagaccttttgatgtttctgaagtattagcaaaaggttatacagccatatcttcatcactttctctagagtaaaggctgtcctgacggtgaatcttagttttagtggcttttgccatttgaataggccgcgaatttcccaaatcatcaagtcctggtttctttatatttaacaggtcttccctcaatctacctctttccacattttactataatcagcaagaagacagcaggctgtaccttccacagcttgcttggaaatatcctcagctaaatattgaagtcatcacttaaaagttctgctttacacataacggcaggacacaactcagcttagcttttcgccactatgtaacaaggactcctttcctccacttctccagtaacatattcctcattttttaccaacagtctattcatgatgatttagatattctatggcaatcgaggtattctctattatgctcctttcttcaaggccgccctagcattaacattccatatttctactaacagtctgtttaaggcagtttagcttcttttctggcatgctcctcagaattcttccagcctccacctactgcccaattccagagccacttttctacttttaggtatttgttacagcagcacctcaagtacctagaaaactcttttatgcctgcttctctgccagatgacttgaatatggtactagatttggaattcacctttctccagggtcactgtttatttcaaagaggtgaatttacctgtgctagggttttcacactgggagtgctaccagaactaccacaggatgaaagtggtgagcccaccactgcagagaagttttctcagtgccgtaatatagaggaattctcaaaataagccctactccttttcacttactgaaaacaacttggataatgtgtaacagccagccccatttcaaaaagattaccaggggtaaaacaactttttcatgggtcaaaatcatcttccgaagaaaatgatttcttaaaagaattgaacattgtaaatcaaagggcattgtcctgttttggattaacaaaacaggaaaaataaccaatccttgtaaaattatttgaaattttcttgtttttatcagttgagtgcctatagatgcacatacaaaaacaactgccatttttgtatataatagtcttccaagatagagatttacattaggagagaattaaacatccaggagggatgaacagtatttcatgtgtgctatgtagtgttttgcttcattgagagtcattttcatgaattatttttactactgcagtcatcttaaatttataatcatctcaaaaaagatgtcacaatgaacagacaaccatctgtgaggtcagtcattttgcatgatgtatgtaatcaaaaagtttgaaatgtctgcttactaataaagaatgttttcactgaaactta

SEQ ID NO: 197858 - DNA, 684 bp, Homo sapiens
  Payload ID: 19017
  Gene Name: UBX domain protein 2B
  ENST ID: ENST00000520732
  CDS Start-End: 6-320
ggaagatggcggagggcggaggccctgagcccggcgagcaggagaggaggtcttccgggccgcggcctccgagcgcgcgggatttgcagttggccttggcagaattgtatgaagatgaagtgaagtgcaaatcttccaagtctaatagacctaaagccacagtcttcaagagcccacggacaccacctcaacgtcatttacaggtggaggatacagattgggtagttctttttgtaagcggtctgaatatatctatggagaaaatcagctgcaagatgttcagattttgcttaaactgtggagcaatggtttcagtttagatgatggagaattgagaccttacaatgaaccaacaaatgctcaatttctggagtctgttaagagaggagagattcccctggagcttcagcgccttgttcatggtggccaagtgaatttggatatggaggatcatcaggatcaagaatacataaaacctagattgaggttcaaggcttttagtggagaagggcaaaaacttggaagccttacacctgaaatagtcagtacaccttcctctccagaagaggaggataaatcaatacttaatgcagttgttcttattgatgattcagtgccaacaacaaaaattcaaatcaggttagcagatgggagtcgtttgatacaaagattcaatagtacaca

SEQ ID NO: 197859 - DNA, 618 bp, Homo sapiens
  Payload ID: 19017
  Gene Name: UBX domain protein 2B
  ENST ID: ENST00000521796
  CDS Start-End: 1-427
gagcccacggacaccacctcaacggttttactcaagtgaacatgaatacagtggattaaatatagttcgaccttcaactgggaaaattgtgaatgaacttttcaaagaggcaagggaacatggggctgtccctctgaatgaagccacaagagcttcaggtgatgataaatctaagtcatttacaggtggaggatacagattgggtagttctttttgtaagcggtctgaatatatctatggagaaaatcagctgcaagatgttcagattttgcttaaactgtggagcaatggtttcagtttagatgatggagaattgagaccttacaatgaaccaacaaatgctcaatttctggagtctgttaagagaggggtgactctcattgcatgtatgcctgaaattcagcaacttatgttagaaatcttttaatgtggcattactgctggcagaagatttcaaaaggttagtttgaagttataatttgtgaaagtaaactcagatattcagtgctctcacccatccaaagaacattgtaacttaccagctcttcttgctaaaggatgaggaatcaagtgattttgctatgataataaaagcttttctgtgttatgattaaacta

SEQ ID NO: 197860 - DNA, 1225 bp, Homo sapiens
  Payload ID: 19017
  Gene Name: UBX domain protein 2B
  ENST ID: ENST00000523409
  CDS Start-End: 6-596
ggaagatggcggagggcggaggccctgagcccggcgagcaggagaggaggtcttccgggccgcggcctccgagcgcgcgggatttgcagttggccttggcagaattgtatgaagatgaagtgaagtgcaaatcttccaagtctaatagacctaaagccacagtcttcaagagcccacggacaccacctcaacggttttactcaagtgaacatgaatacagtggattaaatatagttcgaccttcaactgggaaaattgtgaatgaacttttcaaagaggcaagggaacatggggctgtccctctgaatgaagccacaagagcttcaggtgatgataaatctaagtcatttacaggtggaggatacagattgggtagttctttttgtaagcggtctgaatatatctatggagaaaatcagctgcaagatgttcagattttgcttaaactgtggagcaatggtttcagtttagatgatggagaattgagaccttacaatgaaccaacaaatgctcaatttctggagtctgttaagagaggggtgactctcattgcatgtatgcctgaaattcagcaacttatgttagaaatcttttaatgtggcattactgctggcagaagatttcaaaagagagattcccctggagcttcagcgccttgttcatggtggccaagtgaatttggatatggaggatcatcaggatcaagaatacataaaacctagattgaggttcaaggcttttagtggagaagggcaaaaacttggaagccttacacctgaaatagtcagtacaccttcctctccagaagaggaggataaatcaatacttaatgcagttgttcttattgatgattcagtgccaacaacaaaaattcaaatcaggttagcagatgggagtcgtttgatacaaagattcaatagtacacacaggatcctggatgtccggaactttattgtacagtctcgtcctgaatttgcggctcttgactttattcttgtgacttcatttccgaataaagagctaacagatgaaagcctgacactgctagaagcagatattcttaacactgtgttactccagcaactaaaataatattgttcctgtccatgcagtagcatgtgggaatagatgatgtgccgtattaataaggacaatacttcagcattaaaaacagccaaattatttttattatttttacagataaattttggttttattgttattc

SEQ ID NO: 197861 - DNA, 4006 bp, Homo sapiens
  Payload ID: 19018
  Gene Name: UBX domain protein 4
  Uniprot ID: Q92575
  ENST ID: ENST00000272638
  CDS Start-End: 312-1838
ttcctccacttcctggactgcgcgaccggaggcctagcgggcgcgcgcccgcaccatcgactcgccaacgagagaaggtcctggggcacggacaccgacgggttgcgactgtgacgtgaggtgttctcgcgcgcgctagcgcgcgtctccgggtgccgctgacgggcgtgcgcgcttgtgcggagccggaggtgggggccgaaccagccaaggttgcgggggccgcagagccggacgaagacggagggcggagccggcttcgggactgcggagactacacaccgagcgagcgcctgggcccgaagggagcgatgctgtggttccagggcgccattccggccgccatcgcgacggccaaaaggagcggcgcggtcttcgtggtgttcgtggcaggtgatgatgaacagtctacacagatggctgcaagttgggaagatgataaagttacagaagcatcttcaaacagttttgttgctattaaaatcgataccaaaagtgaagcctgcctacagttttcacaaatctatcctgtagtgtgtgttccatccagtttctttattggagacagtggaattcccttggaagtaatagcaggaagtgtttctgcagatgaacttgttacaagaattcacaaggtccgacagatgcatttgctaaaaagtgaaacatcagtagcaaatggcagtcagtcagaaagttcagtgtctactccatctgcgtcatttgaacctaacaacacttgtgaaaactctcagtccagaaatgcagagctttgtgagataccacccacttctgatacaaagtcagatactgcaacaggaggagaaagtgcaggccatgccacttcctctcaggagcctagtggatgctcagatcagagacctgcagaggacctcaacatccgagtggaaagactaacaaaaaaacttgaagaaaggagagaagagaaaagaaaagaggaagaacagagagaaattaagaaggaaattgagaggagaaaaactggaaaagaaatgttggattataaaagaaaacaagaagaagaattaacaaaaagaatgctggaggaaagaaacagagagaaagcagaagatagggcagctcgagaacgtataaaacagcagattgcattggaccgtgcagagagagctgctcgttttgcaaagacaaaggaagaagtagaggctgccaaagctgctgccttgctagcaaaacaggcagaaatggaagtcaagagggaatcttatgcaagagaaagaagcactgttgcaagaattcaattccgtcttcctgatggttcttcctttacaaatcagttcccttctgatgctcctctagaagaggcaaggcagtttgctgcacagactgttggcaacacttacggtaatttttcgttagcaaccatgtttcccaggagggaatttaccaaagaagattataaaaagaagttactggatttggaacttgccccaagcgcttcggtggtactgttgccagcaggaagaccaactgcatccattgtacactcttccagcggagacatttggaccttgttgggaacagtgctttatccattccttgccatctggagattaattagcaatttcttgtttagtaatccgcctcccacacagacttcagtgagagtaacatcgtcagaacccccaaaccctgcatcatctagcaaatcagaaaaaagggaaccagtgagaaaaagagtgctggaaaaacgtggagacgactttaaaaaggaggggaaaatttatagattaaggactcaagatgatggtgaagatgaaaacaacacttggaatggaaattccactcaacagatgtagtgtgacaagtataatatgtgcaataatcattgtttctcttatgatttaattcaactaaaattctactggagaagtgggactgctttatattttccaactggtctataaaatgtctctttattcctgcttagtgggtgtgggttgaaggtgtttaactcagaaaagtaaagacaggaaataactctctgctaggtccttgcttatatggcaaccactgctagaaccctaaaagaaccaaaaatctgccacagcctgcctccatcagcttcttatttagtatttcatatgcccattagccctatgcttcagatgacacgttttgtttagagctactttgctccaagactcttaagcccaaagtaactggtatgtcactgagtaacttgactcggtgtcagagcattttaactagccactcagatgagaatttatgtttaacttctctttttactcatcagctgcaagcaaaatcttgtagtttttaatcttaaacactgaataaaaaaactttcccctaaattggaatgatcttagttttgctttgagttttgttatctagcatctttttgttgcacagggctctattgaggtcctatgtctctgatttttttttttccccagtattgccctggagctgtctctggaaagtagctggcgaggttaccttaactatcactgaagaaagaaattttctgacacactgatggcatgtgacttgtctcctaagtcagtgaggcatcactttgtttgcataaagtatacggtttgttaaggcctttgttcttgtgagatgcaaaacagctgctagtctgcaacctagttttccctctcacctttaactgacgttttgtcctcaataattacacaaggacctagagtacctataggacaaaaagtatagaataaaaatatgcctttagtcatttggtttttcttaaaaagttgagattcttaatctgacttacatgttactttatccgtatgtctttgttagtggagaccgctaaactaatgatgtttgaaaacagttcctctgttttagattggaagatagcactctagagtggacatacggaaagactgtgactttattttgtaatgggaggaagaaattttctcagagcaaactttctattttttacctgtgaaataacagtgactttttaaaatggtgacagtgttggcaaggaaacagcaacacaggctgcgctgttggtaggagtgaaaaccagtataattcttctgaaaaacatttatcagaaacttaaaatatttcataccgtttgatccagtagcttcttctaaatcataaatgcagacaatgtttaggtaaagacatactcattaagtgttatttattttactcaagaactggaaaccaactaaatgccttctatagaagtaatttttgatgaggagaaatggtacaatactaattaacaacttggtttaacatgtttactgagcatctgttaagtgttgggggaaaaagcagcaggatccagagctataggtacagtgtgatctcagctttgcaaacacattttctacatagatagtactaggtattaatagatatgtaaagaaagaaatcacaccattaataatggtaagattggtttatgtgattttagtggtatttttggcacccttatatatgttttccaaactttcagcagtgatattatttccataacttaaaaagtgagtttgaaaaagaaaatctccagcaagcatctcatttaaataaaggtttgtcatctttaaaaatacagcaatatgtgactttttaaaaaagctgtcaaataggtgtgaccctactaataattattagaaatacatttaaaaacatcgagtacctcaagtcagtttgccttgaaaaatatcaaatataactcttagagaaatgtacataaaagaatgcttcgtaattttggagtaggaggttccctcctcaattttgtatttttaaaagtacatggtaaaaaaaaaaattcacaacagtatataaggctgtaaaatgagaattctgccccctcacctcttaccccagtactattctccagaggtaatctattaacaatttcttatgtaattttcagaaaatttgtatgcgtatataagcaaatatgtaatctttattttttaaataaatgggatcatattat

SEQ ID NO: 197862 - DNA, 1255 bp, Homo sapiens
  Payload ID: 19018
  Gene Name: UBX domain protein 4
  ENST ID: ENST00000416538
  CDS Start-End: 63-350
ggagccggcttcgggactgcggagactacacaccgagcgagcgcctgggcccgaagggagcgatgctgtggttccagggcgccattccggccgccatcgcgacggccaaaaggagcggcgcggtcttcgtggtgttcgtggcaggtgatgatgaacagtctacacagatggctgcaagttgggaagatgataaagttacagaagcatcttcaaacagttttgttgctattaaaatcgataccaaaagtgaagcctgcctacagttttcacaaatctgtatcctttcagtaaagaatggcttatatatatacatttatttaccttccttttggttaatttatgaaatttagaaattattcatttttatttaggaaatcatacattcttttttatggaaactttattactaagtgtcctcatttaaaaaaaatgttattataggaaatttcaaacatatataaaagtaactcaatggtgtagtgcaccccatacattgagataatatattgcagctaaagataggatagggagtttttaaaatgtgaatatctgaaaaacaatatagatcagttgggttggaatgttacaagtagcttgcaagaggcagctggcagcaagatggatagaaaaggaagttatgatagaggagaatgtagtagattcttcactagaatatacctcataaattaacatgtcacatgtattaatactacaggtataatgatgcagtacttgaaattatttaataaatgttagattatattgtgaaaatcacaaagatcatttgttttcctttgttaccaatagtgtttcgtaaaactatcctttcgtttcacatgaattgttagacttcattaaactgtacagatcctgtagtgtgtgttccatccagtttctttattggagacagtggaattcccttggaagtaatagcaggaagtgtttctgcagatgaacttgttacaagaattcacaaggtccgacagatgcatttgctaaaaagtgaaacatcagtagcaaatggcagtcagtcagaaagttcagtgtctactccatctgcgtcatttgaacctaacaacacttgtgaaaactctcagtccagaaatgcagagctttgtgagataccacccacttctgatacaaagtcagatactgcaacaggaggagaaagtgcaggccatgccacttcctctcaggagcctagtggatgctcagatcagagacctgcagaggacctcaacatccgagtggaaag

SEQ ID NO: 197863 - DNA, 548 bp, Homo sapiens
  Payload ID: 19018
  Gene Name: UBX domain protein 4
  ENST ID: ENST00000415164
  CDS Start-End: 197-548
gtgaggtgttctcgcgcgcgctagcgcgcgtctccgggtgccgctgacgggcgtgcgcgcttgtgcggagccggaggtgggggccgaaccagccaaggttgcgggggccgcagagccggacgaagacggagggcggagccggcttcgggactgcggagactacacaccgagcgagcgcctgggcccgaagggagcgatgctgtggttccagggcgccattccggccgccatcgcgacggccaaaaggagcggcgcggtcttcgtggtgttcgtggcagacggtctcactgtgtcacccaggctggagtgcagtggtgcaatctccgctcactgcaacttccaccttccgagtgcaagcaattctcctgcctcagcctcctatgtaggtgatgatgaacagtctacacagatggctgcaagttgggaagatgataaagttacagaagcatcttcaaacagttttgttgctattaaaatcgataccaaaagtgaagcctgcctacagttttcacaaatctatcctgtagtgtgtgttccatccagtttct

SEQ ID NO: 197864 - DNA, 568 bp, Homo sapiens
  Payload ID: 19018
  Gene Name: UBX domain protein 4
  ENST ID: ENST00000426921
  CDS Start-End: 145-342
gtgcgcgcttgtgcggagccggaggtgggggccgaaccagccaaggttgcgggggccgcagagccggacgaagacggagggcggagccggcttcgggactgcggagactacacaccgagcgagcgcctgggcccgaagggagcgatgctgtggttccagggcgccattccggccgccatcgcgacggccaaaaggagcggcgcggtcttcgtggtgttcgtggcaggtgatgatgaacagtctacacagatggctgcaagttgggaagatgataaagttacagaagcatcttcaaacagttttgttgctattaaaatcgataccaaaagatgcatttgctaaaaagtgaaacatcagtagcaaatggcagtcagtcagaaagttcagtgtctactccatctgcgtcatttgaacctaacaacacttgtgaaaactctcagtccagaaatgcagagctttgtgagataccacccacttctgatacaaagtcagatactgcaacaggaggagaaagtgcaggccatgccacttcctctcaggagcctagtggatgctcagatcagagacc

SEQ ID NO: 197865 - DNA, 1943 bp, Homo sapiens
  Payload ID: 19019
  Gene Name: UBX domain protein 6
  Uniprot ID: Q9BZV1
  ENST ID: ENST00000301281
  CDS Start-End: 126-1451
tttttttttttttttttttttttttttaattttcttccggtggctggtctccggcggccccgtccccgactgggccccgtgcccccccgcccccgcggccccccgccgccgggccagccgccaccatgaagaaattctttcaggagttcaaggccgacatcaagttcaagagcgcgggacccggtcagaagctcaaagagtccgtgggggaaaaggcccacaaagagaagcccaaccagccagcccccaggccgccccgccagggacccaccaatgaggcacagatggcagccgctgccgccctagcccggctggagcagaagcagtcccgggcctggggccccacatcgcaggacaccatccgaaaccaggtgagaaaggaacttcaagccgaagccaccgtcagcgggagccccgaggccccagggaccaacgtggtatctgagcccagagaggaaggctctgcccacctggctgtgcctggcgtgtacttcacctgtccgctcactggggccaccctgaggaaggaccagcgggacgcctgcatcaaggaggccattctcttgcacttctccaccgacccagtggccgcctccatcatgaagatctacacgttcaacaaagaccaggaccgggtgaagctgggtgtggacaccattgccaagtacctggacaacatccacctgcaccccgaggaggagaagtaccggaagatcaagctgcagaacaaggtgtttcaggagcgcattaactgcctggaagggacccacgagttttttgaggccattgggttccagaaggtgttgcttcccgcccaggatcaggaggaccccgaggagttctacgtgctgagcgagaccaccttggcccagccccagagcctggagaggcacaaggaacagctgctggctgcggagcccgtgcgcgccaagctggacaggcagcgccgcgtcttccagccctcgcccctggcctcgcagttcgaactgcctggggacttcttcaacctcacagcagaggagatcaagcgggagcagaggctcaggtccgaggcggtggagcggctgagcgtgctgcggaccaaggccatgcgggagaaggaggagcagcgggggctgcgcaagtacaactacacgctgctgcgcgtgcgcctccccgatggctgcctcctgcagggcactttctacgctcgggagcggctgggggcggtgtacgggttcgtccgggaggccctgcagagcgactggctgccttttgagctgctggcctcgggagggcagaagctgtccgaggacgagaacctggccttgaacgagtgcgggctggtgccctctgccctcctgaccttctcgtgggacatggctgtgctggaggacatcaaggccgcgggggccgagccggactccatcctgaaacccgagctcctgtcagccatcgagaagctcttgtgaaataaaagcagggttggcctcagccctgtgggtctgtctcatgctctccctgttcctctccccgccaccccagggcctccaagccacctctggaaatacttggctctgccccatgggcacgggaggggcgccagccgtggagctgtggaattgggccccgtggcagagcccccatcccttgggggctgtggggatgcgcccaagcccccgagggagaggcctggggacaccaacaaatctaagccctccctagctgcttggtaactgtgtcatgaagctgccggacagacacacgtggcatctccctgggcaggagagcaggcctgcagcatgggtcctgttcccgtgtgccgtgggtggcagtggctgcacctggcactagggctgctctgtggatgtgggtgacaacggcaggaggggatgctggccttcctgcacatagacctgcagttagtaaatcataagcccaaataaacaggttgtttgaatata

SEQ ID NO: 197866 - DNA, 1809 bp, Homo sapiens
  Payload ID: 19019
  Gene Name: UBX domain protein 6
  Uniprot ID: Q9BZV1
  ENST ID: ENST00000394765
  CDS Start-End: 155-1321
ggagtatagggcttgaactgagagcctggcctcccagaaggttttaatagacctacggcacagaaattgacacagcccggaaaaggcccacaaagagaagcccaaccagccagcccccaggccgccccgccagggacccaccaatgaggcacagatggcagccgctgccgccctagcccggctggagcagaagcagtcccgggcctggggccccacatcgcaggacaccatccgaaaccaggtgagaaaggaacttcaagccgaagccaccgtcagcgggagccccgaggccccagggaccaacgtggtatctgagcccagagaggaaggctctgcccacctggctgtgcctggcgtgtacttcacctgtccgctcactggggccaccctgaggaaggaccagcgggacgcctgcatcaaggaggccattctcttgcacttctccaccgacccagtggccgcctccatcatgaagatctacacgttcaacaaagaccaggaccgggtgaagctgggtgtggacaccattgccaagtacctggacaacatccacctgcaccccgaggaggagaagtaccggaagatcaagctgcagaacaaggtgtttcaggagcgcattaactgcctggaagggacccacgagttttttgaggccattgggttccagaaggtgttgcttcccgcccaggatcaggaggaccccgaggagttctacgtgctgagcgagaccaccttggcccagccccagagcctggagaggcacaaggaacagctgctggctgcggagcccgtgcgcgccaagctggacaggcagcgccgcgtcttccagccctcgcccctggcctcgcagttcgaactgcctggggacttcttcaacctcacagcagaggagatcaagcgggagcagaggctcaggtccgaggcggtggagcggctgagcgtgctgcggaccaaggccatgcgggagaaggaggagcagcgggggctgcgcaagtacaactacacgctgctgcgcgtgcgcctccccgatggctgcctcctgcagggcactttctacgctcgggagcggctgggggcggtgtacgggttcgtccgggaggccctgcagagcgactggctgccttttgagctgctggcctcgggagggcagaagctgtccgaggacgagaacctggccttgaacgagtgcgggctggtgccctctgccctcctgaccttctcgtgggacatggctgtgctggaggacatcaaggccgcgggggccgagccggactccatcctgaaacccgagctcctgtcagccatcgagaagctcttgtgaaataaaagcagggttggcctcagccctgtgggtctgtctcatgctctccctgttcctctccccgccaccccagggcctccaagccacctctggaaatacttggctctgccccatgggcacgggaggggcgccagccgtggagctgtggaattgggccccgtggcagagcccccatcccttgggggctgtggggatgcgcccaagcccccgagggagaggcctggggacaccaacaaatctaagccctccctagctgcttggtaactgtgtcatgaagctgccggacagacacacgtggcatctccctgggcaggagagcaggcctgcagcatgggtcctgttcccgtgtgccgtgggtggcagtggctgcacctggcactagggctgctctgtggatgtgggtgacaacggcaggaggggatgctggccttcctgcacatagacctgcagttagtaaatcataagcccaaataaacaggttgtttgaa

SEQ ID NO: 197867 - DNA, 403 bp, Homo sapiens
  Payload ID: 19019
  Gene Name: UBX domain protein 6
  ENST ID: ENST00000592515
  CDS Start-End: 15-403
gacccagatatcggatgaggccgggggaaaaggcccacaaagagaagcccaaccagccagcccccaggccgccccgccagggacccaccaatgaggcacagatggcagccgctgccgccctagcccggctggagcagaagcagtcccgggcctggggccccacatcgcaggacaccatccgaaaccaggtgagaaaggaacttcaagccgaagccaccgtcagcgggagccccgaggccccagggaccaacgtggtatctgagcccagagaggaaggctctgcccacctggctgtgcctggcgtgtacttcacctgtccgctcactggggccaccctgaggaaggaccagcgggacgcctgcatcaaggaggccattctcttgcacttctccaccgacccagt

SEQ ID NO: 197868 - DNA, 803 bp, Homo sapiens
  Payload ID: 19019
  Gene Name: UBX domain protein 6
  ENST ID: ENST00000590466
  CDS Start-End: 1-203
gcgccaagctggacaggcagcgccgcgtcttccagccctcgcccctggcctcgcagttcgaactgcctggggacttcttcaacctcacagcagaggagatcaagcgggagcagaggctcaggcactttctacgctcgggagcggctgggggcggtgtacgggttcgtccgggaggccctgcagagcgactggctgccttttgagctgctggcctcgggagggcagaagctgtccgaggacgagaacctggccttgaacgagtgcgggctggtgccctctgccctcctgaccttctcgtgggacatggctgtgctggaggacatcaaggccgcgggggccgagccggactccatcctgaaacccgagctcctgtcagccatcgagaagctcttgtgaaataaaagcagggttggcctcagccctgtgggtctgtctcatgctctccctgttcctctccccgccaccccagggcctccaagccacctctggaaatacttggctctgccccatgggcacgggaggggcgccagccgtggagctgtggaattgggccccgtggcagagcccccatcccttgggggctgtggggatgcgcccaagcccccgagggagaggcctggggacaccaacaaatctaagccctccctagctgcttggtaactgtgtcatgaagctgccggacagacacacgtggcatctccctgggcaggagagcaggcctgcagcatgggtcctgttcccgtgtgccgtgggtggcagtggctgcacctggcactagggctgctctgtggatgtgggtgaca

SEQ ID NO: 197869 - DNA, 1613 bp, Homo sapiens
  Payload ID: 19019
  Gene Name: UBX domain protein 6
  ENST ID: ENST00000591919
  CDS Start-End: 1-1114
ggaaaaggcccacaaagagaagcccaaccagccagcccccaggccgccccgccagggacccaccaatgaggcacagatggcagccgctgccgccctagcccggctggagcagaagcagtcccgggcctggggccccacatcgcaggacaccatccgaaaccaggtgagaaaggaacttcaagccgaagccaccgtcagcgggagccccgaggccccagggaccaacgtgcacttctccaccgacccagtggccgcctccatcatgaagatctacacgttcaacaaagaccaggaccgggtgaagctgggtgtggacaccattgccaagtacctggacaacatccacctgcaccccgaggaggagaagtaccggaagatcaagctgcagaacaaggtgtttcaggagcgcattaactgcctggaagggacccacgagttttttgaggccattgggttccagaaggtgttgcttcccgcccaggatcaggaggaccccgaggagttctacgtgctgagcgagaccaccttggcccagccccagagcctggagaggcacaaggaacagctgctggctgcggagcccgtgcgcgccaagctggacaggcagcgccgcgtcttccagccctcgcccctggcctcgcagttcgaactgcctggggacttcttcaacctcacagcagaggagatcaagcgggagcagaggctcaggtccgaggcggtggagcggctgagcgtgctgcggaccaaggccatgcgggagaaggaggagcagcgggggctgcgcaagtacaactacacgctgctgcgcgtgcgcctccccgatggctgcctcctgcagggcactttctacgctcgggagcggctgggggcggtgtacgggttcgtccgggaggccctgcagagcgactggctgccttttgagctgctggcctcgggagggcagaagctgtccgaggacgagaacctggccttgaacgagtgcgggctggtgccctctgccctcctgaccttctcgtgggacatggctgtgctggaggacatcaaggccgcgggggccgagccggactccatcctgaaacccgagctcctgtcagccatcgagaagctcttgtgaaataaaagcagggttggcctcagccctgtgggtctgtctcatgctctccctgttcctctccccgccaccccagggcctccaagccacctctggaaatacttggctctgccccatgggcacgggaggggcgccagccgtggagctgtggaattgggccccgtggcagagcccccatcccttgggggctgtggggatgcgcccaagcccccgagggagaggcctggggacaccaacaaatctaagccctccctagctgcttggtaactgtgtcatgaagctgccggacagacacacgtggcatctccctgggcaggagagcaggcctgcagcatgggtcctgttcccgtgtgccgtgggtggcagtggctgcacctggcactagggctgctctgtggatgtgggtgacaacggcaggaggggatgctggccttcctgcacatagacctgcagttagtaaatcataagcccaaataaacaggttgtttgaatatagtttctt

SEQ ID NO: 197870 - DNA, 10568 bp, Homo sapiens
  Payload ID: 19020
  Gene Name: UBX domain protein 7
  Uniprot ID: O94888
  ENST ID: ENST00000296328
  CDS Start-End: 76-1545
acaccgcacggcgaagtgggggagggcagtccgtgtgtgtctgtgttgttgttcggcggcggcggcggcggtaagatggctgcccacgggggctccgcggcgtcctcggcgctgaaggggttaattcaacagttcaccaccattaccggtgcaagtgaaagtgtaggaaaacatatgcttgaagcgtgcaacaataatctggaaatggcagtcactatgtttttggatggtggaggaatcgctgaagagcccagtaccagttcagcaagtgtctctactgtcagaccacacacagaagaagaagttcgtgccccaattcctcaaaagcaggaaatactggtggaaccagaaccattatttggtgctcctaaaagacgacggcctgcacgttcaatttttgatggtttccgggattttcagactgaaactattcggcaagaacaagaattaagaaatggaggagctatcgataagaaattaactacccttgcagatctattccggccacccattgatttgatgcataaaggcagctttgaaacagccaaagagtgtggccagatgcaaaataagtggctgatgataaacattcaaaatgttcaagactttgcatgtcagtgcctcaaccgcgatgtgtggagcaacgaagctgtgaagaatattatccgggaacatttcattttctggcaggtttatcatgacagtgaggaaggtcagagatacatacagttttataagttaggggatttcccctatgtttccatattggacccacggacaggtcagaagctagtagaatggcaccagttagatgtatcttctttcttggaccaagtgacgggatttctgggtgaacatggacaactggatggactttctagcagtccccccaaaaaatgtgcccgttcagagagccttatagatgcaagtgaagacagccagctagaagctgccatcagagcctccttacaagaaacacattttgattcaacacagacaaaacaggatagccgctcagatgaagaatctgaatctgaacttttttctggcagtgaggagttcatatccgtttgtggctctgatgaagaagaagaggtagagaatcttgccaagtccagaaagtctccccacaaagatttggggcatagaaaagaggagaatagaaggccgctgactgagccaccagtcagaactgatcctggaacagccacaaaccaccaaggattgccagctgtggattcagagatactggagatgccacctgaaaaagcagatggagtagtggaggggatagatgtaaatggaccaaaagcacagctgatgttgcggtatccagatggaaaaagggaacagatcactcttccagagcaagctaaactgctagctttggtgaagcacgtgcagtctaaaggatacccaaatgaacgttttgaacttctcaccaactttcctcgaaggaaattatctcatctggactatgatattacattgcaagaggcaggcctttgtcctcaagagactgtctttgtacaggaaagaaattaacaccatggcttgacctctctcagcttaccccttttttcccttttcctgtgagatacatgtcactaagtatgcattttggctcataggaccacagagccaaagttgggcaagcaagtcaccttccttctcttatttcttgatctctcctataatcagtctctttctccccctttgtttctttctcctcttctgttttctcgctccccactccgtacccttctgcctccccctccccccacacttttctttcttacctaatctggtgaccaaactgaagtgtaaggataagacctctcctagtactagcagcaggaattgtgtgttccagtaagtggtctcttgcacggcacttttttgggatcaaatgttaacgttactccccagactcttcgggcaaaggaatggctagattcagagtaagaacaaccctcccttttttgtaagtccccgtgtttagcagggagaagaaattctctaacatgggtttggttttgttgtgttcttcatgtggaaatgtcgcttaacaaaatatccaggcttttgtttacgtggaaaaagcatcccttgtaatgattgctcatcatacttaaaaacctttttcaaaggattttcatgttcccagctataaggactatttccatgacatgtgttattggcagaatgagtgttaaatatggagcatatagcatggggtgactttcattgtcctaacctgagacagttttccttattactctgtattgatcctgctagtccaagaatggacatgaagtgaacctatcgtggtgactgggataggaaggtgcttgctatttttgccagcacagcatattagttcctttggagccctccattgtctgagtctgcagtgatctgtaggaaggcagctggtcaataatcatgtagtacaatggcttggaattgtaaccactatggttattgattgtcctgtgttgtttcaggcatacttaggtatgtccctggggaaaaagaaaaccattcagctgagagttgctaaccatgttcttttggttagaaataatggttcattttttgcccctggttggaatagtctctaaaaggctctggtgactgaattgaacatgagtccgcatgctgttttctttcaaaaggtatcaaaacggaaagcctctctaaggggaagacctttcaactccattcagaagacaacatttagtaaggaggatggcggaggttactagtaattttcagatgtcttgggctttttctgccaacaaaacccaaaatcaaattagagttggtgaaagctttcttcagtgtttttagaagaggccatcttgaatctgtagaataccatttacacatcaacttcaccctatgctcatttcgtattttgagcttaaatggagtcctctgaagggggggtagtcgtgattctggtggcaaaactagaacttttaacttgtaaaatgaaaaatattaaatggacctttttgtcagttgaggatttagattgattcttttatctgaggagcgtatgttcctcagatgttgcgtagagacctttaggttttcatctactttaagattgctctcttggcaattaggggatttgggaaaagaagaaaaaaagatgccatgtgttgctagtacacagttataggatatggtttctaatggttgaattttgaggaactctccctaaagaatgagttttatatctcctcaaggaaatcatggaaaaatctgtttattcttcagtgagtccttttgaattaatgttcttaaatttttttctaagtctgtgtaagtgcttatgtataagtatataattgtataaatatttataaatatatttatataattacggtttcatttctaccttgagtcaaagttctgtctttagattggtgactgagtaatacttacactttggtgttttttcttaggttcttgaggcttacttaactagcagcttctgatttattgagtgaaagatggttttcatgttaattcctcagttgcatctctgaacttggataacatacttgccgtttgaaaaatagagctgtatactgtcaaaggtgcactggagggtaaaacatttgttggtagtagacaagctcagaaatccaaaaattcagggagggcacagggtaagaagagaggtttgctcagctttgtgctctgatggcacccatctgtactccagcaaagtcatagctgaagcccaaatcgctcaaacgtgtgaagtcaatcatttttcctatagggctctgtttccttttctttaccttctagcttctcttgataaaacagttgggagaactgccaacgtgttcatcagtgagagggtgtggttctttccgatatgttcagcacgtgcatattcatttatgagaaaccaaagtaacttcttcaactcgggttactgtgggatgattaagtagatataaagtgatttaaaagacagcatggtactttcactcagcttaacatgcagctgggatgtctacaatacaagatgtggtgggttttattttattttattttgaggcaggagtgtaattatcttagggttgatataaaggcccatgggaagagttacggattgtacatgggaagaatccataaggagtattgccttgctcaagaatttaatccgctgacagtatgcttcttccagtttgccttacttcctctgcaagtttctttgctccttagggcagaggttttattgaatagattaaatgaggtcagtaagattagttaaaaatagtcattccttgtgggtgttggacacagcttgaaaggagtgtttaaaaaaaaaaagctagggaggaaaagaacaagaaagatagacttcgagagtgataagagaaaaatacagggagatggaatggaaactaccaggaaggccgggcgcggtggctcatgcctgtaatcccaacactttgggaggcggaggtgggcagatcacctaaggtcaggagatcgaggccagcctgagcaacatggtgaaaccccgtctctactaaaaatacaaaaattacctgggtgtggtggcgtgcacctgtaatcccagctactcagaggctgaggcaggggaatggcttgaacctgggaggcagaggttgcagtgagccaagatcgcaccattacactccagcctgggcgacaaagcgacactccatctcaaatttaaaaaaaaaaaagaagaagaagaagaaaactagtgggaaaaaagtgagaggaatacttttttgaaattggtatcggaaggaactggagaagagaaaacaacagtgccaaatgagaaaagaacaggaaacttaatactaattggcatgcaccagatacttttgtgtacatttgcctcttcaatctcccgaagaatcgtacaaaatgtatactttcttcccatgttaagaaaacaggtatagagaacttattcaggactcatagctagtgagtggcaaatcagaattggaatccagagtccatgctgtggtctccttcagcaagagaatcaagctacccagatgattctcttctcattgtttggctttgtaaagtgtcacttagttttgttcccataaatatagaggaagtagttgggttaaagttgtgggatttgcactatgcctatacatttttatttatgccattattttgagaggctgattattgcttttttaaaatgatgcactggtgaagatgtgaaagtaaaattgccacgtggcattatttgccaagaataaatgaaaagggtaaaaaaacaattttttctttttttaaacatttttcagaaaagatacaattaccttttttaataggtgagcgccaccacgcccggctaatttttgcatttttagtagagacagggtttcaccatgttggccaggatggtctcgatctcttgatctcgtgttccgcccacctcggcctcctaaagtgctgggattacaggcatgagccactgcgcccgatctacaattctgttttctgtgtcccatccataccagattattgaaccctctgtgtgtatgtttttaaatcttgtatataattctacttccttgacttacaagtcaacaattagctattgagttctttatagaagttggaagtattttgaaatctgagatctaattcctggccaggtgtggtggctcatgcctgtaatcccaatattttgggaggccgaggtgggtggatcacctgaggttgggagttcgagatcagcctggccaacatggtgaaaccccatctctactgaaaaatacaaaaattagccaggcatggtggctgtctgtaatcccagctaatggggaggctgaggcacaagaatctcttgaacctgggaggcggaggttgcagtgagccgagatcacaccactgcactccatcctgggcaatggagcgagactctgtctcaaaaaataataaataagatatgattcctgcctgttttatccagttagagagacacactacacatgaaataattggagagcatgtaaatgtttacctattagttcaaacttagaaaaagggaagaatatgttttagttagcaaagtcttaaacaagactgaagtggcaagcactgtagctcacgttttcttttgactcacctttttctttagctccaccttttgtaacttctagatttggggcatgaagttctgccactaaggcataaccagtacccaagtaggaaaggattattgatccctggagtaaagattcctagcttgcggggatctcactattgatcccccggagtaaagattcctagctcgcaggaatcttacttgcacacttagggaaaataccagagggagccactagcaaccgaaaaatgaaggaaagatttaatttctctacccaggtacaaatccaatgcatagtatagtatatgttatatgcagaaagggcactggaggtgtgagagccctttgggtaacagctctgctagttgttaccttcacacttctctttcttcttaatctctggtttctcgtctgaaaaatgagataattggactagattaatagttctcagccttttctagaacaacaaattagattatctctgaagtccttttccaaaatttcatgcttccagtctctccccgtgattgcgtattatccctaggctaattaaaagtgtgctggttaatcagtttctttactttttttttctctcttttttttattctgtgttcaggtatcatttgaccaacaacttgctcttaatcttactgcgatgactgaaatctccaaagaggagagtatagtagttataggtctagtaataataatcttgtaaacaattcattattttttaaaacttaatgctgtgtgcctaatcagtgttgagtatgactaaaatgtaaatgagaaccaaatatgacactaacgctggcactaaattttatttttacttgtgtacttaaagtactttactggcctgttgggaaattgatttgtataagattcacacctggttttggcagaaacagctttttaaagatacaattaggctgacttaaaaatgttttttattccacagaatgtatctttattatgtcattcttaccgtctctctgccttttttgaccatcatgtaactacgcagtagtaaatcatggggtgcaggctgatgaattagtagtctttgtaaaactaaaatgtaatgagcataggaagagacagctcttctggtgaacatggcagttttccggtaataccagccttgatgaataggctaaagacagctgtgtactatggacattcaacttcactggattgcctggcttagcttttcagttattgtcttgccgtgaaacatggtgttgcactgtacacattttagaatagtggcaagaatgttctttagaactgcagataacccaacagagaataccataccaatatatcggtttctcctgttacatagagatttggtatttcagtgatggttatggtttttgactcacctgtgtgtcagtcctgctagagagacagtatagaatcaagaatttcttgatgtctttttaaaaatagagattataatggccttgctagttgtcctgtgaagtgacagacccttaattagaaatcttttaatcctgctttccattttacttctccaccatttatttttaacattcattctctgaaaatagttatgatttttagtgtaattggctatgtttaagaaattccatttcaaagtcttaatatgtaacaatcttcattttttataaaattgaaggacatttttgaggcaaacttacttttatagctcattttctccctagttaaggagaattctctggtttcatatagagaatggctagctctgtgataccccaccctctttgtggcctaccagttgctgttgtgttgcttaaaattgcagatattctcataaacatgatgatttttggcacaggcctttctttgctattgatttcaaaataaagttgggcaatccaatttgaactactttaataaacataatttagcattcctgtaatgagaaagtattttcaaaagataaccagatttatttctaggattagagatggcaaataccaatgatagtatttttcccaagagcaatcacagattaatctataaatatgagaagtcgcattattgtacttaattctttggcaacaaacagcaagtttttattgtttaattgtatttcctctctagagatcacaatactctgggtattttatatcccttctaaaggtcatttgggttttcaaatgggaagaatagtcaagctaagctggactaaacctaagtaatattttttctcatcaaaagaagttattaatctaactgggttagcatgagtcattcattttttagacatgataaatgggaaacatatcaaatcattagataaattctgacctggaattgaattccccctttcttaaaatctttttaatttgcttttttcatagactcagtatggaactcttaactgataagggagagattcttgatctggaaccgttccctgccattctccttttttctctctatctaggtagctggttccatagtgcccgtcacgagggtccatttcagtttgatgacattagactgcttacactcagctggatgccttgctgtttgcagcaacatgattttacagtatgcttttctcaaagctttgcattcttaatggagatatcaaatggtgtaattccaaatataaatatgtttatgacactaatcatatgcttttaacaataactttttgataacttattgccctgtaagttaaaccttacacggagtgactgttgccatcagaaaatcccctttcacctgctagagagagtgaaagtagtgcgtggcctccacttttcagttaacgagtagcaagcttctagtaggggctgcttatctgacccatgtggggtcttgggccttgttactttcctgggttcgtcccttcagctggaaaggctgttgaaaacacttgccaggaaacagtaaagctgtgagagaatcttctagtcttagatatagagaaatgagtaccagttgatgctaacacgatacttagactttgaggggcttccatccaagctttggcatgaatctgttagacacggttttcttcactcctctgataatctttttttccagaatggttttttgttgttgttgttgttaacaaattctaaacatccagtgttactttttgttttgtttgttttgttttgttttgttttgttttgtttgcccttcaggaaagtcctttttcgagtaggtattgattgttccctggaaactctcagcagtgtctgtgcaggctctgtgcatgctttgtatgagttcggcttgaacaatgcatttgaagtcacctgggatgtccagttctggcatgtcttcattgattgtgtttttaaacatgtttcatgtttcatgtcattttccaaacctcactttacatcttactcagagaagttaatcaaggaatgaaatttctagggggatagggatgatgagggtgggttgggggcttgagtgaagtcaacttggggtatttgctttaaagtgttttctaaagcagttcctaacagtatttagagattccctgggatgtttgtggctcaacttattctggacaaagtgtgtgtgggggtggtcttactgagatttgcattcttaatgcaggacaggctctaaatttcatctgtactctaaatttgtgattgaatccaagaagataacagagacagtgctcctgttgtaatgtttctggcaagtgctccctaaaatgcacatcgaattctgttttctgggccttttctccaatggtgctaggagataccgttgatttctgcagctcttctcagtggtgggaagaagtctttgggattgttgagcaaggggcagctggaccatccactaaatttttttgttcaagacacattagagaccctcctgtatatctagtaagtcataataaaggtgcttgggaaagccttaaatttgaagacacatggaggcggtagaaaattaaacttgtaagaggagaaaaacatgccattaggtaacgcagagttgtaactactggctaagactcaatggaacttccacttgctctaaaaccagggaaatcttagataactgggtgtgatctacctatagatctacctagtctataggtaataatttccagaaggaggatcttgctgtcagttggggatcctctggtttggtctgtaccaaattgtgaatactcttgctgtgttgtacccagttgctttatattaatactgcaacttgaaacggggagggtggggggacaatggggtgggggagggaagggagtgggacgataagtcttttgaagacatcagctcactgtgctgagagagggaccaaactcaaggaaacctctgatctatacattcaactgctgcatttttttataaatacatgtaaatgtcctgttgtaatatttgatcttggaaataaaaacaaaaacttttcagta

SEQ ID NO: 197871 - DNA, 375 bp, Homo sapiens
  Payload ID: 19020
  Gene Name: UBX domain protein 7
  ENST ID: ENST00000381887
  CDS Start-End: 1-375
ggctgcccacgggggctccgcggcgtcctcggcgctgaaggggttaattcaacagttcaccaccattaccggtgcaagtgaaagtgtaggaaaacatatgcttgaagcgtgcaacaataatctggaaatggcagtcactatgtttttggatggtggaggaatcgctgaagagcccagtaccagttcagcaagtgtctctactgtcagaccacacacagaagaagaagttcgtgccccaattcctcaaaagcaggaaatactggtggaaccagaaccattatttggtgttcggcaagaacaagaattaagaaatggaggagctatcgataagaaattaactacccttgcagatctattccggccacccattgattt

SEQ ID NO: 197872 - DNA, 3158 bp, Homo sapiens
  Payload ID: 19020
  Gene Name: UBX domain protein 7
  ENST ID: ENST00000429160
  CDS Start-End: 29-256
gttgttcggcggcggcggcggcggtaagatggctgcccacgggggctccgcggcgtcctcggcgctgaaggggttaattcaacagttcaccaccattaccgagaagaagttcgtgccccaattcctcaaaagcaggaaatactggtggaaccagaaccattatttggtgctcctaaaagacgacggcctgcacgttcaatttttgatggtttccgggattttcagactgaaactattcggcaagaacaagaattaagaaatggaggagctatcgataagaaattaactacccttgcagatctattccggccacccattgatttgatgcataaaggcagctttgaaacagccaaagagtgtggccagatgcaaaataagtggctgatgataaacattcaaaatgttcaagactttgcatgtcagtgcctcaaccgcgatgtgtggagcaacgaagctgtgaagaatattatccgggaacatttcattttctggcaggtttatcatgacagtgaggaaggtcagagatacatacagttttataagttaggggatttcccctatgtttccatattggacccacggacaggtcagaagctagtagaatggcaccagttagatgtatcttctttcttggaccaagtgacgggatttctgggtgaacatggacaactggatggactttctagcagtccccccaaaaaatgtgcccgttcagagagccttatagatgcaagtgaagacagccagctagaagctgccatcagagcctccttacaagaaacacattttgattcaacacagacaaaacaggatagccgctcagatgaagaatctgaatctgaacttttttctggcagtgaggagttcatatccgtttgtggctctgatgaagaagaagaggtagagaatcttgccaagtccagaaagtctccccacaaagatttggggcatagaaaagaggagaatagaaggccgctgactgagccaccagtcagaactgatcctggaacagccacaaaccaccaaggattgccagctgtggattcagagatactggagatgccacctgaaaaagcagatggagtagtggaggggatagatgtaaatggaccaaaagcacagctgatgttgcggtatccagatggaaaaagggaacagatcactcttccagagcaagctaaactgctagctttggtgaagcacgtgcagtctaaaggatacccaaatgaacgttttgaacttctcaccaactttcctcgaaggaaattatctcatctggactatgatattacattgcaagaggcaggcctttgtcctcaagagactgtctttgtacaggaaagaaattaacaccatggcttgacctctctcagcttaccccttttttcccttttcctgtgagatacatgtcactaagtatgcattttggctcataggaccacagagccaaagttgggcaagcaagtcaccttccttctcttatttcttgatctctcctataatcagtctctttctccccctttgtttctttctcctcttctgttttctcgctccccactccgtacccttctgcctccccctccccccacacttttctttcttacctaatctggtgaccaaactgaagtgtaaggataagacctctcctagtactagcagcaggaattgtgtgttccagtaagtggtctcttgcacggcacttttttgggatcaaatgttaacgttactccccagactcttcgggcaaaggaatggctagattcagagtaagaacaaccctcccttttttgtaagtccccgtgtttagcagggagaagaaattctctaacatgggtttggttttgttgtgttcttcatgtggaaatgtcgcttaacaaaatatccaggcttttgtttacgtggaaaaagcatcccttgtaatgattgctcatcatacttaaaaacctttttcaaaggattttcatgttcccagctataaggactatttccatgacatgtgttattggcagaatgagtgttaaatatggagcatatagcatggggtgactttcattgtcctaacctgagacagttttccttattactctgtattgatcctgctagtccaagaatggacatgaagtgaacctatcgtggtgactgggataggaaggtgcttgctatttttgccagcacagcatattagttcctttggagccctccattgtctgagtctgcagtgatctgtaggaaggcagctggtcaataatcatgtagtacaatggcttggaattgtaaccactatggttattgattgtcctgtgttgtttcaggcatacttaggtatgtccctggggaaaaagaaaaccattcagctgagagttgctaaccatgttcttttggttagaaataatggttcattttttgcccctggttggaatagtctctaaaaggctctggtgactgaattgaacatgagtccgcatgctgttttctttcaaaaggtatcaaaacggaaagcctctctaaggggaagacctttcaactccattcagaagacaacatttagtaaggaggatggcggaggttactagtaattttcagatgtcttgggctttttctgccaacaaaacccaaaatcaaattagagttggtgaaagctttcttcagtgtttttagaagaggccatcttgaatctgtagaataccatttacacatcaacttcaccctatgctcatttcgtattttgagcttaaatggagtcctctgaagggggggtagtcgtgattctggtggcaaaactagaacttttaacttgtaaaatgaaaaatattaaatggacctttttgtcagttgaggatttagattgattcttttatctgaggagcgtatgttcctcagatgttgcgtagagacctttaggttttcatctactttaagattgctctcttggcaattaggggatttgggaaaagaagaaaaaaagatgccatgtgttgctagtacacagttataggatatggtttctaatggttgaattttgaggaactctccctaaagaatgagttttatatctcctcaaggaaatcatggaaaaatctgtttattcttcagtgagtccttttgaattaatgttcttaaatttttttctaagtctgtgtaagtgcttatgtataagt

SEQ ID NO: 197873 - DNA, 1173 bp, Homo sapiens
  Payload ID: 19020
  Gene Name: UBX domain protein 7
  ENST ID: ENST00000428095
  CDS Start-End: 123-1106
gttgttgttcggcggcggcggcggcggtaagatggctgcccacgggggctccgcggcgtcctcggcgctgaaggggttaattcaacagttcaccaccattaccggccaaagagtgtggccagatgcaaaataagtggctgatgataaacattcaaaatgttcaagactttgcatgtcagtgcctcaaccgcgatgtgtggagcaacgaagctgtgaagaatattatccgggaacatttcattttctggcaggtttatcatgacagtgaggaaggtcagagatacatacagttttataagttaggggatttcccctatgtttccatattggacccacggacaggtcagaagctagtagaatggcaccagttagatgtatcttctttcttggaccaagtgacgggatttctgggtgaacatggacaactggatggactttctagcagtccccccaaaaaatgtgcccgttcagagagccttatagatgcaagtgaagacagccagctagaagctgccatcagagcctccttacaagaaacacattttgattcaacacagacaaaacaggatagccgctcagatgaagaatctgaatctgaacttttttctggcagtgaggagttcatatccgtttgtggctctgatgaagaagaagaggtagagaatcttgccaagtccagaaagtctccccacaaagatttggggcatagaaaagaggagaatagaaggccgctgactgagccaccagtcagaactgatcctggaacagccacaaaccaccaaggattgccagctgtggattcagagatactggagatgccacctgaaaaagcagatggagtagtggaggggatagatgtaaatggaccaaaagcacagctgatgttgcggtatccagatggaaaaagggaacagatcactcttccagagcaagctaaactgctagctttggtgaagcacgtgcagtctaaaggatacccaaatgaacgttttgaacttctcaccaactttcctcgaaggaaattatctcatctggactatgatattacattgcaagaggcaggcctttgtcctcaagagactgtctttgtacaggaaagaaattaacaccatggcttgacctctctcagcttaccccttttttcccttttcctgtgagatacatgtcactaag

SEQ ID NO: 197874 - DNA, 374 bp, Homo sapiens
  Payload ID: 19020
  Gene Name: UBX domain protein 7
  ENST ID: ENST00000413584
  CDS Start-End: 146-374
actcctggcctcaggtgatccgccccccgctcagcctcccacagtgctgggattacaggcgtgagccaccgcacccggtagtgaggaggcagaggaaatgttcagaacgtaacagaaaggtgcaagtgaaagtgtaggaaaacatatgcttgaagcgtgcaacaataatctggaaatggcagtcactatgtttttggatggtggaggaatcgctgaagagcccagtaccagttcagcaagtgtctctactgtcagaccacacacagaagaagaagttcgtgccccaattcctcaaaagcaggaaatactggtggaaccagaaccattatttggtgctcctaaaagacgacggcctgcacgttcaatttttgatg

SEQ ID NO: 197875 - DNA, 1058 bp, Homo sapiens
  Payload ID: 19021
  Gene Name: UBX domain protein 8
  ENST ID: ENST00000620074
  CDS Start-End: 50-982
gaccttttgctgggacaccccacggcagtcgggtgcgccaagagaacagatgctctactccggcacctggaggactgtgggtataaggtgtccaagaaaaaaagctcagatctgccaacagcaggaatgttgcatagaacgaccgcctcttcggctgcgtggcttcggagcagctttgactacaactcccagactgcatcgcccctgcccccccacttccggagctgacttcacttcgaggaaccttttccctccaggaatcaaggattttcttttgctttgtggccggattttgctactgcttgctcttcttactttaactatttctgtgactacctcatggcttaactcatttaaatctccccaagtttatctgaaggaagaagaagaaaagaatgagaaaagacaaaaacttgtgagaaaaaaacaacaagaagcacaaggagagaaggccagcagatacatagagaatgttttaaaacctcaccaggaaatgaaattgagaaaactggaggagcgcttttatcaaatgacgggtgaagcctggaaattaagcagtggtcacaaacttgggggtgatgaaggtacaagtcagacatcttttgaaacatcaaacagagaagcagcaaagagccagaacttgcctaaacctttaactgaatttccgtctcctgctgaacagcccacatgcaaggagattcctgatttacctgaagaaccttctcaaacagcagaagaagtagttactgttgctctccgatgtcccagtgggaatgtcctgaggagaaggtttttgaagtcctacagctcacaggtcttatttgactggatgacgagaattgggtaccacatatctctatacagcctttctacttcctttcccagacggcctctggcagtggagggaggccagtcgctggaggacataggaataactgtggacactgtactcatcctggaggagaaggagcagaccaactaggaaagaagggagagctccctgtttgcatgaagtcagttatgctatgaccttctggcacaataaaggcttcactttc

SEQ ID NO: 197876 - DNA, 1202 bp, Homo sapiens
  Payload ID: 19021
  Gene Name: UBX domain protein 8
  ENST ID: ENST00000341403
  CDS Start-End: 2-691
catggcttcacgtggggttgttggcattttcttcctctctgctgtcccccttgtgtgtctggagctccggcgtgggatcccggatataggaatcaaggattttcttttgctttgtggccggattttgctactgcttgctcttcttactttaactatttctgtgactacctcatggcttaactcatttaaatctccccaagtttatctgaaggaagaagaagaaaagaatgagaaaagacaaaaacttgtgagaaaaaaacaacaagaagcacaaggagagaagggtgatgaaggtacaagtcagacatcttttgaaacatcaaacagagaagcagcaaagagccagaacttgcctaaacctttaactgaatttccgtctcctgctgaacagcccacatgcaaggagattcctgatttacctgaagaaccttctcaaacagcagaagaagtagttactgttgctctccgatgtcccagtgggaatgtcctgaggagaaggtttttgaagtcctacagctcacaggtcttatttgactggatgacgagaattgggtaccacatatctctatacagcctttctacttcctttcccagacggcctctggcagtggagggaggccagtcgctggaggacataggaataactgtggacactgtactcatcctggaggagaaggagcagaccaactaggaaagaagggagagctccctgtttgcatgaagtcagttatgctatgaccttctggcacaataaaggcttcactttcaaatcacactataccttgattgagctcatggcagtaaactttgaacattgatatccatgggaataggattagaaaaggattgctttctatatataataatctgtggactgtgccattttacagtgtaccaaatgagaatgaggttgaaatgtatgcagtaaggtactcagtaattaattggtattttttcccagctgacatgatttctcagtgttagaaaacaaacccttagaactttcctttctgcctcttcaatccatcttaccacacaatatttcatgattcaaattcttcaaagtcttatacgcaggaatgtttattctgctgtatttctgtgaaattaaaaacttggaagaagcttcaaagctcttggaggctttaaagttctttctgttgggtgtgcattacagtttacttaactgatgtttgcgattt

SEQ ID NO: 197877 - DNA, 1450 bp, Homo sapiens
  Payload ID: 19021
  Gene Name: UBX domain protein 8
  ENST ID: ENST00000265616
  CDS Start-End: 26-838
gcctgcaccaggcgcttccgccaccatggcttcacgtggggttgttggcattttcttcctctctgctgtcccccttgtgtgtctggagctccggcgtgggatcccggatataggaatcaaggattttcttttgctttgtggccggattttgctactgcttgctcttcttactttaactatttctgtgactacctcatggcttaactcatttaaatctccccaagtttatctgaaggaagaagaagaaaagaatgagaaaagacaaaaacttgtgagaaaaaaacaacaagaagcacaaggagagaaggccagcagatacatagagaatgttttaaaacctcaccaggaaatgaaattgagaaaactggaggagcgcttttatcaaatgacgggtgaagcctggaaattaagcagtggtcacaaacttgggggtgatgaaggtacaagtcagacatcttttgaaacatcaaacagagaagcagcaaagagccagaacttgcctaaacctttaactgaatttccgtctcctgctgaacagcccacatgcaaggagattcctgatttacctgaagaaccttctcaaacagcagaagaagtagttactgttgctctccgatgtcccagtgggaatgtcctgaggagaaggtttttgaagtcctacagctcacaggtcttatttgactggatgacgagaattgggtaccacatatctctatacagcctttctacttcctttcccagacggcctctggcagtggagggaggccagtcgctggaggacataggaataactgtggacactgtactcatcctggaggagaaggagcagaccaactaggaaagaagggagagctccctgtttgcatgaagtcagttatgctatgaccttctggcacaataaaggcttcactttcaaatcacactataccttgattgagctcatggcagtaaactttgaacattgatatccatgggaataggattagaaaaggattgctttctatatataataatctgtggactgtgccattttacagtgtaccaaatgagaatgaggttgaaatgtatgcagtaaggtactcagtaattaattggtattttttcccagctgacatgatttctcagtgttagaaaacaaacccttagaactttcctttctgcctcttcaatccatcttaccacacaatatttcatgattcaaattcttcaaagtcttatacgcaggaatgtttattctgctgtatttctgtgaaattaaaaacttggaagaagcttcaaagctcttggaggctttaaagttctttctgttgggtgtgcattacagtttacttaactgatgtttgcgatttatataattttgccttgtattaaatgttacaaagttccaaatgaatcagtattttaaaaaataaaactatgaaagcattaaaatataggtgaatttttaaaa

SEQ ID NO: 197878 - DNA, 493 bp, Homo sapiens
  Payload ID: 19021
  Gene Name: UBX domain protein 8
  ENST ID: ENST00000518059
  CDS Start-End: 1-283
aatcaaggattttcttttgctttgtggccggattttgctactgcttgctcttcttactttaactatttctgtgactacctcatggcttaactcatttaaatctccccaagtttatctgaaggaagaagaagaaaagaatgagaaaagacaaaaacttgtgagaaaaaaacaacaagaagcacaaggagagaaggccagcagatacatagagaatgttttaaaacctcaccaggaaatgaaattgagaaaactggaggagcgcttttatcaaatgacggggtgatgaaggtacaagtcagacatcttttgaaacatcaaacagagaagcagcaaagagccagaacttgcctaaacctttaactgaatttccgtctcctgctgaacagcccacatgcaaggagattcctgatttacctgaagaaccttctcaaacagcagaagaagtagttactgttgctctccgatgtcccagtgggaatgtcctgaggagaag

SEQ ID NO: 197879 - DNA, 702 bp, Homo sapiens
  Payload ID: 19021
  Gene Name: UBX domain protein 8
  Uniprot ID: O00124
  ENST ID: ENST00000615729
  CDS Start-End: 1-702
atggcttcacgtggggttgttggcattttcttcctctctgctgtcccccttgtgtgtctggagctccggcgtgggatcccggatatagtttatctgaaggaagaagaagaaaagaatgagaaaagacaaaaacttgtgagaaaaaaacaacaagaagcacaaggagagaaggccagcagatacatagagaatgttttaaaacctcaccaggaaatgaaattgagaaaactggaggagcgcttttatcaaatgacgggtgaagcctggaaattaagcagtggtcacaaacttgggggtgatgaaggtacaagtcagacatcttttgaaacatcaaacagagaagcagcaaagagccagaacttgcctaaacctttaactgaatttccgtctcctgctgaacagcccacatgcaaggagattcctgatttacctgaagaaccttctcaaacagcagaagaagtagttactgttgctctccgatgtcccagtgggaatgtcctgaggagaaggtttttgaagtcctacagctcacaggtcttatttgactggatgacgagaattgggtaccacatatctctatacagcctttctacttcctttcccagacggcctctggcagtggagggaggccagtcgctggaggacataggaataactgtggacactgtactcatcctggaggagaaggagcagaccaactag

SEQ ID NO: 197880 - DNA, 1624 bp, Homo sapiens
  Payload ID: 19021
  Gene Name: UBX domain protein 8
  ENST ID: ENST00000380154
  CDS Start-End: 17-145
aggcgcttccgccaccatggcttcacgtggggttgttggcattttcttcctctctgctgtcccccttgtgtgtctggagctccggcgtgggatcccggatataggtaagtgtgactttttcccttcgacagtcacagctgggtaattttcacaggaatgttgcatagaacgaccgcctcttcggctgcgtggcttcggagcagctttgactacaactcccagactgcatcgcccctgcccccccacttccggagctgacttcacttcgaggaaccttttccctccaggaatcaaggattttcttttgctttgtggccggattttgctactgcttgctcttcttactttaactatttctgtgactacctcatggcttaactcatttaaatctccccaagtttatctgaaggaagaagaagaaaagaatgagaaaagacaaaaacttgtgagaaaaaaacaacaagaagcacaaggagagaaggccagcagatacatagagaatgttttaaaacctcaccaggaaatgaaattgagaaaactggaggagcgcttttatcaaatgacgggtgaagcctggaaattaagcagtggtcacaaacttgggggtgatgaaggtacaagtcagacatcttttgaaacatcaaacagagaagcagcaaagagccagaacttgcctaaacctttaactgaatttccgtctcctgctgaacagcccacatgcaaggagattcctgatttacctgaagaaccttctcaaacagcagaagaagtagttactgttgctctccgatgtcccagtgggaatgtcctgaggagaaggtttttgaagtcctacagctcacaggtcttatttgactggatgacgagaattgggtaccacatatctctatacagcctttctacttcctttcccagacggcctctggcagtggagggaggccagtcgctggaggacataggaataactgtggacactgtactcatcctggaggagaaggagcagaccaactaggaaagaagggagagctccctgtttgcatgaagtcagttatgctatgaccttctggcacaataaaggcttcactttcaaatcacactataccttgattgagctcatggcagtaaactttgaacattgatatccatgggaataggattagaaaaggattgctttctatatataataatctgtggactgtgccattttacagtgtaccaaatgagaatgaggttgaaatgtatgcagtaaggtactcagtaattaattggtattttttcccagctgacatgatttctcagtgttagaaaacaaacccttagaactttcctttctgcctcttcaatccatcttaccacacaatatttcatgattcaaattcttcaaagtcttatacgcaggaatgtttattctgctgtatttctgtgaaattaaaaacttggaagaagcttcaaagctcttggaggctttaaagttctttctgttgggtgtgcattacagtttacttaactgatgtttgcgatttatataattttgccttgtattaaatgttacaaagttccaaatgaatcagtattttaaaaaataaaactatgaaagcattaaaatataggtgaatttttaaaa

SEQ ID NO: 197881 - DNA, 813 bp, Homo sapiens
  Payload ID: 19021
  Gene Name: UBX domain protein 8
  ENST ID: ENST00000522968
  CDS Start-End: 69-813
gttaaaggaaagacttatgtcagccccagccctggggctacccgatctgacaaagccttttacattgtatgtgtcagagagagaaaagatggcagttgggagttttaacccaaactgtggggccctggccgaggccggtggcctacctctctaaacaactagacggggtttttaaaggatggcccccatgtttgagggccttggcagcaactgccctgctagtacaagaagcagataagctgactcttgggcaaaaccggaacataaaggccccccatgctgtggtgactttaatgaatactaaaggacatcattggctaatgagtgctagactcactaagtaccaaagtttgctttgtgaaaatccccgtataaccattgaagtttgtaacaccctgaaccccgctaccttgttcccagtatcagagagccctgttgagcatgactgtgtagaagtgttggactcagtttactctagcagacctgacctccgggaccagccttgggcatcagtagactgggaactatacgtggatgggagcagctttatcaacccacaaggagagagatttgcagggtatgcggtggtaactctggacactgttgttgaagccagatcgttgccccagggcacttcagctcagaaagctgaactcattgctttaattcgggccttagaactcagtgaaggaatcaaggattttcttttgctttgtggccggattttgctactgcttgctcttcttactttaactatttctgtgactacctcatggcttaactcatttaaatctccccaagtttatctgaagg

SEQ ID NO: 197882 - DNA, 2382 bp, Homo sapiens
  Payload ID: 19022
  Gene Name: UDP glucuronosyltransferase 1 family, polypeptide A1
  Uniprot ID: P22309
  ENST ID: ENST00000305208
  CDS Start-End: 41-1642
aagtaggagagggcgaacctctggcaggagcaaaggcgccatggctgtggagtcccagggcggacgcccacttgtcctgggcctgctgctgtgtgtgctgggcccagtggtgtcccatgctgggaagatactgttgatcccagtggatggcagccactggctgagcatgcttggggccatccagcagctgcagcagaggggacatgaaatagttgtcctagcacctgacgcctcgttgtacatcagagacggagcattttacaccttgaagacgtaccctgtgccattccaaagggaggatgtgaaagagtcttttgttagtctcgggcataatgtttttgagaatgattctttcctgcagcgtgtgatcaaaacatacaagaaaataaaaaaggactctgctatgcttttgtctggctgttcccacttactgcacaacaaggagctcatggcctccctggcagaaagcagctttgatgtcatgctgacggaccctttccttccttgcagccccatcgtggcccagtacctgtctctgcccactgtattcttcttgcatgcactgccatgcagcctggaatttgaggctacccagtgccccaacccattctcctacgtgcccaggcctctctcctctcattcagatcacatgaccttcctgcagcgggtgaagaacatgctcattgccttttcacagaactttctgtgcgacgtggtttattccccgtatgcaacccttgcctcagaattccttcagagagaggtgactgtccaggacctattgagctctgcatctgtctggctgtttagaagtgactttgtgaaggattaccctaggcccatcatgcccaatatggtttttgttggtggaatcaactgccttcaccaaaatccactatcccaggaatttgaagcctacattaatgcttctggagaacatggaattgtggttttctctttgggatcaatggtctcagaaattccagagaagaaagctatggcaattgctgatgctttgggcaaaatccctcagacagtcctgtggcggtacactggaacccgaccatcgaatcttgcgaacaacacgatacttgttaagtggctaccccaaaacgatctgcttggtcacccgatgacccgtgcctttatcacccatgctggttcccatggtgtttatgaaagcatatgcaatggcgttcccatggtgatgatgcccttgtttggtgatcagatggacaatgcaaagcgcatggagactaagggagctggagtgaccctgaatgttctggaaatgacttctgaagatttagaaaatgctctaaaagcagtcatcaatgacaaaagttacaaggagaacatcatgcgcctctccagccttcacaaggaccgcccggtggagccgctggacctggccgtgttctgggtggagtttgtgatgaggcacaagggcgcgccacacctgcgccccgcagcccacgacctcacctggtaccagtaccattccttggacgtgattggtttcctcttggccgtcgtgctgacagtggccttcatcacctttaaatgttgtgcttatggctaccggaaatgcttggggaaaaaagggcgagttaagaaagcccacaaatccaagacccattgagaagtgggtgggaaataaggtaaaattttgaaccattccctagtcatttccaaacttgaaaacagaatcagtgttaaattcattttattcttattaaggaaatactttgcataaattaatcagccccagagtgctttaaaaaattctcttaaataaaaataatagactcgctagtcagtaaagatatttgaatatgtatcgtgccccctctggtgtctttgatcaggatgacatgtgccatttttcagaggacgtgcagacaggctggcattctagattacttttcttactctgaaacatggcctgtttgggagtgcgggattcaaaggtggtcccacggctgcccctactgcaaatggcagttttaatcttatcttttggcttctgcagatggttgcaattgatccttaaccaataatggtcagtcctcatctctgtcgtgcttcataggtgccaccttgtgtgtttaaagaagggaagctttgtacctttagagtgtaggtgaaatgaatgaatggcttggagtgcactgagaacagcatatgatttcttgctttggggaaaaagaatgatgctatgaaattggtgggtggtgtatttgagaagataatcattgcttatgtcaaatggagctgaatttgataaaaacccaaaatacagctatgaagtgctgggcaagtttactttttttctgatgtttcctacaactaaaaataaattaataaatttatataaattct

SEQ ID NO: 197883 - DNA, 3389 bp, Homo sapiens
  Payload ID: 19022
  Gene Name: UDP glucuronosyltransferase 1 family, polypeptide A1
  Uniprot ID: P22309
  ENST ID: ENST00000360418
  CDS Start-End: 1-1335
atggctgtggagtcccagggcggacgcccacttgtcctgggcctgctgctgtgtgtgctgggcccagtggtgtcccatgctgggaagatactgttgatcccagtggatggcagccactggctgagcatgcttggggccatccagcagctgcagcagaggggacatgaaatagttgtcctagcacctgacgcctcgttgtacatcagagacggagcattttacaccttgaagacgtaccctgtgccattccaaagggaggatgtgaaagagtcttttgttagtctcgggcataatgtttttgagaatgattctttcctgcagcgtgtgatcaaaacatacaagaaaataaaaaaggactctgctatgcttttgtctggctgttcccacttactgcacaacaaggagctcatggcctccctggcagaaagcagctttgatgtcatgctgacggaccctttccttccttgcagccccatcgtggcccagtacctgtctctgcccactgtattcttcttgcatgcactgccatgcagcctggaatttgaggctacccagtgccccaacccattctcctacgtgcccaggcctctctcctctcattcagatcacatgaccttcctgcagcgggtgaagaacatgctcattgccttttcacagaactttctgtgcgacgtggtttattccccgtatgcaacccttgcctcagaattccttcagagagaggtgactgtccaggacctattgagctctgcatctgtctggctgtttagaagtgactttgtgaaggattaccctaggcccatcatgcccaatatggtttttgttggtggaatcaactgccttcaccaaaatccactatcccaggaatttgaagcctacattaatgcttctggagaacatggaattgtggttttctctttgggatcaatggtctcagaaattccagagaagaaagctatggcaattgctgatgctttgggcaaaatccctcagacagtcctgtggcggtacactggaacccgaccatcgaatcttgcgaacaacacgatacttgttaagtggctaccccaaaacgatctgcttggtcacccgatgacccgtgcctttatcacccatgctggttcccatggtgtttatgaaagcatatgcaatggcgttcccatggtgatgatgcccttgtttggtgatcagatggacaatgcaaagcgcatggagactaagggagctggagtgaccctgaatgttctggaaatgacttctgaagatttagaaaatgctctaaaagcagtcatcaatgacaaaagaaagaagcagcagtcaggaagacagatgtgaagagctggagcatgttcagatgagaggagacggaacacggggacacaccagcttgagcaagggacaacaggggaggactgatgactgacttcccacctttgaggtgctaatgtgtgtgtggtggcactggataaaagatcaatgttggctaggcaccatggcacacgcctgtagtcccagccactctggaggctaaggcgggaggattgcttgagcccagaagttggaggctgctatgagccgtgatcatgccactgcactccagcaacctgggcaacagagtgagaccctgtctcaaaaaaaaaaaaaaaaatgaaaagtccacataacctgagcatcatgtgcccagagcgttgggtggtgtggtcccattccttccttccagcggcttcttctggccacctcaatgtcaggatgtcctgctcacatatcaataccattaaaacctgacttctttccctgcactgttgaagctccttcttgaggctcacattatggatataattttgattctttcttcagtggtatagataactacttgtaacctaagaacaacttggtgaaagtcctctaatacattattttttaaaaaaacacaaatcaatgagctcaacttattaactaactttcatctattcatttttgagccatccctgtctgattgtgaatctccatgattccaacactctgagctggggatagtgcctacacaaaataaaaagaagtggaaaattttcaaacatcagtttatgctgacaaccaggccataataggtgctcaattactattgaatgaatgaatgaaagttctggccaggtacggtggctcatgcctgtagtcccaacactttgggaggccgaggcaggtggatcacttgaggttaggagttcgaaaccaacctgaccaacatgaagaaaccttatctctaccaaaaaaatataaaaaaattacccaggcatggtggtgtatgcctgtaatcccagctatttgggaggctgaggcaggaaaatcacttgaacctgagaggcggaggttgcagtgagctgagattgtgccactccactccagcctgggcgacagagtgagactccgtcttacttaaaaaaaaaaaaaagaaggttccaagaaaattcatcttaaggtttatgtaaaaggaagatgatatttaacatgattcatggccaagtactaatattacattataataatgtttccaaataacattatagatatgtttaaagacagtgtattaggctgttcttgcattgctgtaaagaaatacccaagactgggtaatttataaagaaaagaggtttcattggctcgtgtttctgcaggctgtacaggaagcttagtgctgacatcacttggctgccgggggaacctcagggagcttttactcatggcagaaggcaatgcgggagcttgcatgtcacatggcaaaagcaggagcgagagagagttgggggggaaggtgccacacactttttaatgaccggctctcacaataactcatgaaaactcactatcaggaagacagcactaaagcacaagggatccgaccccatgatccaaacacctcccaccaggccccatctccagcactggggattacaattcaacatgagatctgagtgtggacaaatatccaaactgtatcagtcaacagcgatcataattagtcctgaataggagtgcctttttttttctttcttctcccttttcttttctacttcctcctccttttccctctcctcttcaatctcctcttcattcctgtagcaccaagggttgaagcacctaacccgttttggattgagatgttctgattgggcaatgaacactgtccagaataaacagaaatccattttgcactaagtggctgcacagaccctgcctcatgctaaatctagcacccagatagtttaatgtttcaatgactgaattacaaatatatcatcaccttggatttggcacttacaaatggctgttaatttggccagaggtggttgtttacaacttcaaataggagactattcataatttctgacgtg

SEQ ID NO: 197884 - DNA, 2408 bp, Homo sapiens
  Payload ID: 19023
  Gene Name: UDP glucuronosyltransferase 1 family, polypeptide A10
  Uniprot ID: Q9HAW8
  ENST ID: ENST00000344644
  CDS Start-End: 70-1662
gtacttcttccgcctactgtatcatagcagcttagaatcccagctgctggctcgggctgcagttctctcatggctcgcgcagggtggaccagccccgttcctttatgtgtgtgtctactgctgacctgtggctttgccgaggcagggaagctgctggtagtgcccatggatgggagtcactggttcaccatgcagtcggtggtggagaaacttatcctcagggggcatgaggtggttgtagtcatgccagaggtgagttggcaactggaaagatcactgaattgcacagtgaagacttactcaacctcgtacactctggaagatcagaaccgggaattcatggttttcgcccatgctcaatggaaagcacaggcacaaagtatattttctctattaatgagttcatccagtggttttcttgacttatttttttcgcattgcaggagtttgtttaatgaccgaaaattagtagaatacttaaaggagagttcttttgatgcagtgtttctggatccttttgatacctgtggcttaattgttgctaaatatttctccctcccctctgtggtcttcaccaggggaatattttgccaccatcttgaagaaggtgcacagtgccctgctcctctttcctatgtccccaatgatctcttagggttctcagatgccatgactttcaaggagagagtatggaaccacatcgtgcacttggaggaccatttattttgccagtatctttttagaaatgccctagaaatagcctctgaaattctccaaacccctgtcacggcatatgatctctacagtcacacatcaatttggttgttgcgaacggactttgttttggactatcccaaacccgtgatgcccaacatgatcttcattggtggtatcaactgtcatcagggaaagccattgcctatggaatttgaagcctacattaatgcttctggagaacatggaattgtggttttctctttgggatcaatggtctcagaaattccagagaagaaagctatggcaattgctgatgctttgggcaaaatccctcagacagtcctgtggcggtacactggaacccgaccatcgaatcttgcgaacaacacgatacttgttaagtggctaccccaaaacgatctgcttggtcacccgatgacccgtgcctttatcacccatgctggttcccatggtgtttatgaaagcatatgcaatggcgttcccatggtgatgatgcccttgtttggtgatcagatggacaatgcaaagcgcatggagactaagggagctggagtgaccctgaatgttctggaaatgacttctgaagatttagaaaatgctctaaaagcagtcatcaatgacaaaagttacaaggagaacatcatgcgcctctccagccttcacaaggaccgcccggtggagccgctggacctggccgtgttctgggtggagtttgtgatgaggcacaagggcgcgccacacctgcgccccgcagcccacgacctcacctggtaccagtaccattccttggacgtgattggtttcctcttggccgtcgtgctgacagtggccttcatcacctttaaatgttgtgcttatggctaccggaaatgcttggggaaaaaagggcgagttaagaaagcccacaaatccaagacccattgagaagtgggtgggaaataaggtaaaattttgaaccattccctagtcatttccaaacttgaaaacagaatcagtgttaaattcattttattcttattaaggaaatactttgcataaattaatcagccccagagtgctttaaaaaattctcttaaataaaaataatagactcgctagtcagtaaagatatttgaatatgtatcgtgccccctctggtgtctttgatcaggatgacatgtgccatttttcagaggacgtgcagacaggctggcattctagattacttttcttactctgaaacatggcctgtttgggagtgcgggattcaaaggtggtcccacggctgcccctactgcaaatggcagttttaatcttatcttttggcttctgcagatggttgcaattgatccttaaccaataatggtcagtcctcatctctgtcgtgcttcataggtgccaccttgtgtgtttaaagaagggaagctttgtacctttagagtgtaggtgaaatgaatgaatggcttggagtgcactgagaacagcatatgatttcttgctttggggaaaaagaatgatgctatgaaattggtgggtggtgtatttgagaagataatcattgcttatgtcaaatggagctgaatttgataaaaacccaaaatacagctatgaagtgctgggcaagtttactttttttctgatgtttcctacaactaaaaataaattaataaatttatataaattctatttaa

SEQ ID NO: 197885 - DNA, 2065 bp, Homo sapiens
  Payload ID: 19023
  Gene Name: UDP glucuronosyltransferase 1 family, polypeptide A10
  Uniprot ID: Q9HAW8
  ENST ID: ENST00000373445
  CDS Start-End: 22-1347
ggctcgggctgcagttctctcatggctcgcgcagggtggaccagccccgttcctttatgtgtgtgtctactgctgacctgtggctttgccgaggcagggaagctgctggtagtgcccatggatgggagtcactggttcaccatgcagtcggtggtggagaaacttatcctcagggggcatgaggtggttgtagtcatgccagaggtgagttggcaactggaaagatcactgaattgcacagtgaagacttactcaacctcgtacactctggaagatcagaaccgggaattcatggttttcgcccatgctcaatggaaagcacaggcacaaagtatattttctctattaatgagttcatccagtggttttcttgacttatttttttcgcattgcaggagtttgtttaatgaccgaaaattagtagaatacttaaaggagagttcttttgatgcagtgtttctggatccttttgatacctgtggcttaattgttgctaaatatttctccctcccctctgtggtcttcaccaggggaatattttgccaccatcttgaagaaggtgcacagtgccctgctcctctttcctatgtccccaatgatctcttagggttctcagatgccatgactttcaaggagagagtatggaaccacatcgtgcacttggaggaccatttattttgccagtatctttttagaaatgccctagaaatagcctctgaaattctccaaacccctgtcacggcatatgatctctacagtcacacatcaatttggttgttgcgaacggactttgttttggactatcccaaacccgtgatgcccaacatgatcttcattggtggtatcaactgtcatcagggaaagccattgcctatggaatttgaagcctacattaatgcttctggagaacatggaattgtggttttctctttgggatcaatggtctcagaaattccagagaagaaagctatggcaattgctgatgctttgggcaaaatccctcagacagtcctgtggcggtacactggaacccgaccatcgaatcttgcgaacaacacgatacttgttaagtggctaccccaaaacgatctgcttggtcacccgatgacccgtgcctttatcacccatgctggttcccatggtgtttatgaaagcatatgcaatggcgttcccatggtgatgatgcccttgtttggtgatcagatggacaatgcaaagcgcatggagactaagggagctggagtgaccctgaatgttctggaaatgacttctgaagatttagaaaatgctctaaaagcagtcatcaatgacaaaagaaagaagcagcagtcaggaagacagatgtgaagagctggagcatgttcagatgagaggagacggaacacggggacacaccagcttgagcaagggacaacaggggaggactgatgactgacttcccacctttgaggtgctaatgtgtgtgtggtggcactggataaaagatcaatgttggctaggcaccatggcacacgcctgtagtcccagccactctggaggctaaggcgggaggattgcttgagcccagaagttggaggctgctatgagccgtgatcatgccactgcactccagcaacctgggcaacagagtgagaccctgtctcaaaaaaaaaaaaaaaaatgaaaagtccacataacctgagcatcatgtgcccagagcgttgggtggtgtggtcccattccttccttccagcggcttcttctggccacctcaatgtcaggatgtcctgctcacatatcaataccattaaaacctgacttctttccctgcactgttgaagctccttcttgaggctcacattatggatataattttgattctttcttcagtggtatagataactacttgtaacctaagaacaacttggtgaaagtcctctaatacattattttttaaaaaaacacaaatcaatgagctcaacttattaactaactttcatctattcatttttgagccatccctgtctgattgtgaatctccatgattccaacactctgagctggggatagtgcctacacaaaataa

SEQ ID NO: 197886 - DNA, 2364 bp, Homo sapiens
  Payload ID: 19024
  Gene Name: UDP glucuronosyltransferase 1 family, polypeptide A3
  Uniprot ID: P35503
  ENST ID: ENST00000482026
  CDS Start-End: 20-1624
gtccgtgtcttctgctgagatggccacaggactccaggttcccctgccgtggctggccacaggactgctgcttctcctcagtgtccagccctgggctgagagtggaaaggtgttggtggtgcccattgatggcagccactggctcagcatgcgggaggtcttgcgggagctccatgccagaggccaccaggcagtggtcctcaccccagaggtgaatatgcacatcaaagaagagaactttttcaccctgacaacctatgccatttcgtggacccaggatgaatttgatcgccatgtgctgggccacactcaactgtactttgaaacagaacattttctgaagaaatttttcagaagtatggcaatgttgaacaatatgtctttggtctatcataggtcttgtgtggagctactacataatgaggccctgatcaggcacctgaatgctacttcctttgatgtggttttaacagaccccgttaacctctgcgcggcagtgctggctaagtacctgtcgattcctactgtgttttttttgaggaacattccatgtgatttagactttaagggcacacagtgtccaaacccttcctcctatattcctagattactaacaaccaattcagaccacatgacattcatgcaaagggtcaagaacatgctctaccctctggccctgtcctacatttgccatgctttttctgctccttatgcaagccttgcctctgagctttttcagagagaggtgtcagtggtggatattctcagtcatgcatctgtgtggctgttccgaggggactttgtgatggactaccccaggccaatcatgcccaacatggtcttcattgggggcatcaactgtgccaacaggaagccactatctcaggaatttgaagcctacattaatgcttctggagaacatggaattgtggttttctctttgggatcaatggtctcagaaattccagagaagaaagctatggcaattgctgatgctttgggcaaaatccctcagacagtcctgtggcggtacactggaacccgaccatcgaatcttgcgaacaacacgatacttgttaagtggctaccccaaaacgatctgcttggtcacccgatgacccgtgcctttatcacccatgctggttcccatggtgtttatgaaagcatatgcaatggcgttcccatggtgatgatgcccttgtttggtgatcagatggacaatgcaaagcgcatggagactaagggagctggagtgaccctgaatgttctggaaatgacttctgaagatttagaaaatgctctaaaagcagtcatcaatgacaaaagttacaaggagaacatcatgcgcctctccagccttcacaaggaccgcccggtggagccgctggacctggccgtgttctgggtggagtttgtgatgaggcacaagggcgcgccacacctgcgccccgcagcccacgacctcacctggtaccagtaccattccttggacgtgattggtttcctcttggccgtcgtgctgacagtggccttcatcacctttaaatgttgtgcttatggctaccggaaatgcttggggaaaaaagggcgagttaagaaagcccacaaatccaagacccattgagaagtgggtgggaaataaggtaaaattttgaaccattccctagtcatttccaaacttgaaaacagaatcagtgttaaattcattttattcttattaaggaaatactttgcataaattaatcagccccagagtgctttaaaaaattctcttaaataaaaataatagactcgctagtcagtaaagatatttgaatatgtatcgtgccccctctggtgtctttgatcaggatgacatgtgccatttttcagaggacgtgcagacaggctggcattctagattacttttcttactctgaaacatggcctgtttgggagtgcgggattcaaaggtggtcccacggctgcccctactgcaaatggcagttttaatcttatcttttggcttctgcagatggttgcaattgatccttaaccaataatggtcagtcctcatctctgtcgtgcttcataggtgccaccttgtgtgtttaaagaagggaagctttgtacctttagagtgtaggtgaaatgaatgaatggcttggagtgcactgagaacagcatatgatttcttgctttggggaaaaagaatgatgctatgaaattggtgggtggtgtatttgagaagataatcattgcttatgtcaaatggagctgaatttgataaaaacccaaaatacagctatgaagtgctgggcaagtttactttttttctgatgtttcctacaactaaaaataaattaataaatttatataaattct

SEQ ID NO: 197887 - DNA, 2388 bp, Homo sapiens
  Payload ID: 19025
  Gene Name: UDP glucuronosyltransferase 1 family, polypeptide A4
  Uniprot ID: P22310
  ENST ID: ENST00000373409
  CDS Start-End: 44-1648
acagcgtggggtggacagtcagctgtcggtggcttctgctgagatggccagaggactccaggttcccctgccgcggctggccacaggactgctgctcctcctcagtgtccagccctgggctgagagtggaaaggtgttggtggtgcccactgatggcagcccctggctcagcatgcgggaggccttgcgggagctccatgccagaggccaccaggcggtggtcctcaccccagaggtgaatatgcacatcaaagaagagaaatttttcaccctgacagcctatgctgttccatggacccagaaggaatttgatcgcgttacgctgggctacactcaagggttctttgaaacagaacatcttctgaagagatattctagaagtatggcaattatgaacaatgtatctttggcccttcataggtgttgtgtggagctactgcataatgaggccctgatcaggcacctgaatgctacttcctttgatgtggttttaacagaccccgttaacctctgtggggcggtgctggctaagtacctgtcgattcctgctgtgtttttttggaggtacattccatgtgacttagactttaagggcacacagtgtccaaatccttcctcctatattcctaagttactaacgaccaattcagaccacatgacattcctgcaaagggtcaagaacatgctctaccctctggccctgtcctacatttgccatactttttctgccccttatgcaagtcttgcctctgagctttttcagagagaggtgtcagtggtggatcttgtcagctatgcatccgtgtggctgttccgaggggactttgtgatggactaccccaggccgatcatgcccaacatggtcttcattgggggcatcaactgtgccaacgggaagccactatctcaggaatttgaagcctacattaatgcttctggagaacatggaattgtggttttctctttgggatcaatggtctcagaaattccagagaagaaagctatggcaattgctgatgctttgggcaaaatccctcagacagtcctgtggcggtacactggaacccgaccatcgaatcttgcgaacaacacgatacttgttaagtggctaccccaaaacgatctgcttggtcacccgatgacccgtgcctttatcacccatgctggttcccatggtgtttatgaaagcatatgcaatggcgttcccatggtgatgatgcccttgtttggtgatcagatggacaatgcaaagcgcatggagactaagggagctggagtgaccctgaatgttctggaaatgacttctgaagatttagaaaatgctctaaaagcagtcatcaatgacaaaagttacaaggagaacatcatgcgcctctccagccttcacaaggaccgcccggtggagccgctggacctggccgtgttctgggtggagtttgtgatgaggcacaagggcgcgccacacctgcgccccgcagcccacgacctcacctggtaccagtaccattccttggacgtgattggtttcctcttggccgtcgtgctgacagtggccttcatcacctttaaatgttgtgcttatggctaccggaaatgcttggggaaaaaagggcgagttaagaaagcccacaaatccaagacccattgagaagtgggtgggaaataaggtaaaattttgaaccattccctagtcatttccaaacttgaaaacagaatcagtgttaaattcattttattcttattaaggaaatactttgcataaattaatcagccccagagtgctttaaaaaattctcttaaataaaaataatagactcgctagtcagtaaagatatttgaatatgtatcgtgccccctctggtgtctttgatcaggatgacatgtgccatttttcagaggacgtgcagacaggctggcattctagattacttttcttactctgaaacatggcctgtttgggagtgcgggattcaaaggtggtcccacggctgcccctactgcaaatggcagttttaatcttatcttttggcttctgcagatggttgcaattgatccttaaccaataatggtcagtcctcatctctgtcgtgcttcataggtgccaccttgtgtgtttaaagaagggaagctttgtacctttagagtgtaggtgaaatgaatgaatggcttggagtgcactgagaacagcatatgatttcttgctttggggaaaaagaatgatgctatgaaattggtgggtggtgtatttgagaagataatcattgcttatgtcaaatggagctgaatttgataaaaacccaaaatacagctatgaagtgctgggcaagtttactttttttctgatgtttcctacaactaaaaataaattaataaatttatataaattct

SEQ ID NO: 197888 - DNA, 2186 bp, Homo sapiens
  Payload ID: 19025
  Gene Name: UDP glucuronosyltransferase 1 family, polypeptide A4
  Uniprot ID: P22310
  ENST ID: ENST00000450233
  CDS Start-End: 1-1338
atggccagaggactccaggttcccctgccgcggctggccacaggactgctgctcctcctcagtgtccagccctgggctgagagtggaaaggtgttggtggtgcccactgatggcagcccctggctcagcatgcgggaggccttgcgggagctccatgccagaggccaccaggcggtggtcctcaccccagaggtgaatatgcacatcaaagaagagaaatttttcaccctgacagcctatgctgttccatggacccagaaggaatttgatcgcgttacgctgggctacactcaagggttctttgaaacagaacatcttctgaagagatattctagaagtatggcaattatgaacaatgtatctttggcccttcataggtgttgtgtggagctactgcataatgaggccctgatcaggcacctgaatgctacttcctttgatgtggttttaacagaccccgttaacctctgtggggcggtgctggctaagtacctgtcgattcctgctgtgtttttttggaggtacattccatgtgacttagactttaagggcacacagtgtccaaatccttcctcctatattcctaagttactaacgaccaattcagaccacatgacattcctgcaaagggtcaagaacatgctctaccctctggccctgtcctacatttgccatactttttctgccccttatgcaagtcttgcctctgagctttttcagagagaggtgtcagtggtggatcttgtcagctatgcatccgtgtggctgttccgaggggactttgtgatggactaccccaggccgatcatgcccaacatggtcttcattgggggcatcaactgtgccaacgggaagccactatctcaggaatttgaagcctacattaatgcttctggagaacatggaattgtggttttctctttgggatcaatggtctcagaaattccagagaagaaagctatggcaattgctgatgctttgggcaaaatccctcagacagtcctgtggcggtacactggaacccgaccatcgaatcttgcgaacaacacgatacttgttaagtggctaccccaaaacgatctgcttggtcacccgatgacccgtgcctttatcacccatgctggttcccatggtgtttatgaaagcatatgcaatggcgttcccatggtgatgatgcccttgtttggtgatcagatggacaatgcaaagcgcatggagactaagggagctggagtgaccctgaatgttctggaaatgacttctgaagatttagaaaatgctctaaaagcagtcatcaatgacaaaagaaagaagcagcagtcaggaagacagatgtgaagagctggagcatgttcagatgagaggagacggaacacggggacacaccagcttgagcaagggacaacaggggaggactgatgactgacttcccacctttgagttacaaggagaacatcatgcgcctctccagccttcacaaggaccgcccggtggagccgctggacctggccgtgttctgggtggagtttgtgatgaggcacaagggcgcgccacacctgcgccccgcagcccacgacctcacctggtaccagtaccattccttggacgtgattggtttcctcttggccgtcgtgctgacagtggccttcatcacctttaaatgttgtgcttatggctaccggaaatgcttggggaaaaaagggcgagttaagaaagcccacaaatccaagacccattgagaagtgggtgggaaataaggtaaaattttgaaccattccctagtcatttccaaacttgaaaacagaatcagtgttaaattcattttattcttattaaggaaatactttgcataaattaatcagccccagagtgctttaaaaaattctcttaaataaaaataatagactcgctagtcagtaaagatatttgaatatgtatcgtgccccctctggtgtctttgatcaggatgacatgtgccatttttcagaggacgtgcagacaggctggcattctagattacttttcttactctgaaacatggcctgtttgggagtgcgggattcaaaggtggtcccacggctgcccctactgcaaatggcagttttaatcttatcttttggcttctgcagatggttgcaattgatccttaaccaataatggtcagtcctcatctctgtcgtgcttca

SEQ ID NO: 197889 - DNA, 2345 bp, Homo sapiens
  Payload ID: 19026
  Gene Name: UDP glucuronosyltransferase 1 family, polypeptide A5
  Uniprot ID: P35504
  ENST ID: ENST00000373414
  CDS Start-End: 1-1605
atggccacaggactccaggttcccctgccgcagctggccacaggactgctgcttctcctcagtgtccagccctgggctgagagtgggaaggtgctggtggtgcccactgatggcagccactggctcagcatgcgggaggccttgcgggacctccatgcgagaggccaccaggtggtggtcctcaccctggaggtgaatatgtacatcaaagaagagaactttttcaccctgacaacgtatgccatttcatggacccaggacgaatttgatcgccttttgctgggtcacactcaatcgttctttgaaacagaacatcttctgatgaaattttctagaagaatggcaattatgaacaatatgtctttgatcatacataggtcttgtgtggagctactgcataatgaggccctgatcaggcacctgcatgctacttcctttgatgtggttctaacagacccctttcacctctgcgcggcggtgctggctaagtacctgtcgattcctgctgtgtttttcttgaggaacattccatgtgatttagactttaagggcacacagtgtccaaacccttcctcctatattcctagattactaacgaccaattcagaccacatgacattcctgcaaagggtcaagaacatgctctaccctctggccctgtcctacctttgccatgctgtttctgctccttatgcaagccttgcctctgagctttttcagagagaggtgtcagtggtggatcttgtcagccatgcatctgtgtggctgttccgaggggactttgtgatggattaccccaggccgatcatgcccaacatggtcttcattgggggcatcaactgtgccaacgggaagccactatctcaggaatttgaagcctacattaatgcttctggagaacatggaattgtggttttctctttgggatcaatggtctcagaaattccagagaagaaagctatggcaattgctgatgctttgggcaaaatccctcagacagtcctgtggcggtacactggaacccgaccatcgaatcttgcgaacaacacgatacttgttaagtggctaccccaaaacgatctgcttggtcacccgatgacccgtgcctttatcacccatgctggttcccatggtgtttatgaaagcatatgcaatggcgttcccatggtgatgatgcccttgtttggtgatcagatggacaatgcaaagcgcatggagactaagggagctggagtgaccctgaatgttctggaaatgacttctgaagatttagaaaatgctctaaaagcagtcatcaatgacaaaagttacaaggagaacatcatgcgcctctccagccttcacaaggaccgcccggtggagccgctggacctggccgtgttctgggtggagtttgtgatgaggcacaagggcgcgccacacctgcgccccgcagcccacgacctcacctggtaccagtaccattccttggacgtgattggtttcctcttggccgtcgtgctgacagtggccttcatcacctttaaatgttgtgcttatggctaccggaaatgcttggggaaaaaagggcgagttaagaaagcccacaaatccaagacccattgagaagtgggtgggaaataaggtaaaattttgaaccattccctagtcatttccaaacttgaaaacagaatcagtgttaaattcattttattcttattaaggaaatactttgcataaattaatcagccccagagtgctttaaaaaattctcttaaataaaaataatagactcgctagtcagtaaagatatttgaatatgtatcgtgccccctctggtgtctttgatcaggatgacatgtgccatttttcagaggacgtgcagacaggctggcattctagattacttttcttactctgaaacatggcctgtttgggagtgcgggattcaaaggtggtcccacggctgcccctactgcaaatggcagttttaatcttatcttttggcttctgcagatggttgcaattgatccttaaccaataatggtcagtcctcatctctgtcgtgcttcataggtgccaccttgtgtgtttaaagaagggaagctttgtacctttagagtgtaggtgaaatgaatgaatggcttggagtgcactgagaacagcatatgatttcttgctttggggaaaaagaatgatgctatgaaattggtgggtggtgtatttgagaagataatcattgcttatgtcaaatggagctgaatttgataaaaacccaaaatacagctatgaagtgctgggcaagtttactttttttctgatgtttcctacaactaaaaataaattaataaatttatataaattct

SEQ ID NO: 197890 - DNA, 2479 bp, Homo sapiens
  Payload ID: 19027
  Gene Name: UDP glucuronosyltransferase 1 family, polypeptide A6
  Uniprot ID: P19224
  ENST ID: ENST00000305139
  CDS Start-End: 140-1738
aaagggtaaaattcagagcaagggagaggtagacaggacctgtgaaaagcagtggttagtttagggaaaatacctaggagccctgtgatttggagagtgaaaactctttattaccgttgttactttaactctttccaggatggcctgcctccttcgctcatttcagagaatttctgcaggggttttcttcttagcactttggggcatggttgtaggtgacaagctgctggtggtccctcaggacggaagccactggcttagtatgaaggatatagttgaggttctcagtgaccggggtcatgagattgtagtggtggtgcctgaagttaatttgcttttgaaagaatccaaatactacacaagaaaaatctatccagtgccgtatgaccaagaagagctgaagaaccgttaccaatcatttggaaacaatcactttgctgagcgatcattcctaactgctcctcagacagagtacaggaataacatgattgttattggcctgtacttcatcaactgccagagcctcctgcaggacagggacaccctgaacttctttaaggagagcaagtttgatgctcttttcacagacccagccttaccctgtggggtgatcctggctgagtatttgggcctaccatctgtgtacctcttcaggggttttccgtgttccctggagcatacattcagcagaagcccagaccctgtgtcctacattcccaggtgctacacaaagttttcagaccacatgactttttcccaacgagtggccaacttccttgttaatttgttggagccctatctattttattgtctgttttcaaagtatgaagaactcgcatcagctgtcctcaagagagatgtggatataatcaccttatatcagaaggtctctgtttggctgttaagatatgactttgtgcttgaatatcctaggccggtcatgcccaacatggtcttcattggaggtatcaactgtaagaagaggaaagacttgtctcaggaatttgaagcctacattaatgcttctggagaacatggaattgtggttttctctttgggatcaatggtctcagaaattccagagaagaaagctatggcaattgctgatgctttgggcaaaatccctcagacagtcctgtggcggtacactggaacccgaccatcgaatcttgcgaacaacacgatacttgttaagtggctaccccaaaacgatctgcttggtcacccgatgacccgtgcctttatcacccatgctggttcccatggtgtttatgaaagcatatgcaatggcgttcccatggtgatgatgcccttgtttggtgatcagatggacaatgcaaagcgcatggagactaagggagctggagtgaccctgaatgttctggaaatgacttctgaagatttagaaaatgctctaaaagcagtcatcaatgacaaaagttacaaggagaacatcatgcgcctctccagccttcacaaggaccgcccggtggagccgctggacctggccgtgttctgggtggagtttgtgatgaggcacaagggcgcgccacacctgcgccccgcagcccacgacctcacctggtaccagtaccattccttggacgtgattggtttcctcttggccgtcgtgctgacagtggccttcatcacctttaaatgttgtgcttatggctaccggaaatgcttggggaaaaaagggcgagttaagaaagcccacaaatccaagacccattgagaagtgggtgggaaataaggtaaaattttgaaccattccctagtcatttccaaacttgaaaacagaatcagtgttaaattcattttattcttattaaggaaatactttgcataaattaatcagccccagagtgctttaaaaaattctcttaaataaaaataatagactcgctagtcagtaaagatatttgaatatgtatcgtgccccctctggtgtctttgatcaggatgacatgtgccatttttcagaggacgtgcagacaggctggcattctagattacttttcttactctgaaacatggcctgtttgggagtgcgggattcaaaggtggtcccacggctgcccctactgcaaatggcagttttaatcttatcttttggcttctgcagatggttgcaattgatccttaaccaataatggtcagtcctcatctctgtcgtgcttcataggtgccaccttgtgtgtttaaagaagggaagctttgtacctttagagtgtaggtgaaatgaatgaatggcttggagtgcactgagaacagcatatgatttcttgctttggggaaaaagaatgatgctatgaaattggtgggtggtgtatttgagaagataatcattgcttatgtcaaatggagctgaatttgataaaaacccaaaatacagctatgaagtgctgggcaagtttactttttttctgatgtttcctacaactaaaaataaattaataaatttatataaattcta

SEQ ID NO: 197891 - DNA, 1128 bp, Homo sapiens
  Payload ID: 19027
  Gene Name: UDP glucuronosyltransferase 1 family, polypeptide A6
  Uniprot ID: P19224
  ENST ID: ENST00000373424
  CDS Start-End: 222-1019
gggaccgccctcagcagtgtggttagcaggcagggccagtgtgaccctccctttctgggcctcagttgagaaacctgaagctcaggagaggagtcactcccctggcagatgggtggctgggccagaagcagataccaggctttctgactcctgctctaggattctcaccacgtactggctagacttatacttctcaaatcttaatttcctaaaggccggtcatgcccaacatggtcttcattggaggtatcaactgtaagaagaggaaagacttgtctcaggaatttgaagcctacattaatgcttctggagaacatggaattgtggttttctctttgggatcaatggtctcagaaattccagagaagaaagctatggcaattgctgatgctttgggcaaaatccctcagacagtcctgtggcggtacactggaacccgaccatcgaatcttgcgaacaacacgatacttgttaagtggctaccccaaaacgatctgcttggtcacccgatgacccgtgcctttatcacccatgctggttcccatggtgtttatgaaagcatatgcaatggcgttcccatggtgatgatgcccttgtttggtgatcagatggacaatgcaaagcgcatggagactaagggagctggagtgaccctgaatgttctggaaatgacttctgaagatttagaaaatgctctaaaagcagtcatcaatgacaaaagttacaaggagaacatcatgcgcctctccagccttcacaaggaccgcccggtggagccgctggacctggccgtgttctgggtggagtttgtgatgaggcacaagggcgcgccacacctgcgccccgcagcccacgacctcacctggtaccagtaccattccttggacgtgattggtttcctcttggccgtcgtgctgacagtggccttcatcacctttaaatgttgtgcttatggctaccggaaatgcttggggaaaaaagggcgagttaagaaagcccacaaatccaagacccattgagaagtgggtgggaaataaggtaaaattttgaaccattccctagtcatttccaaacttgaaaacagaatcagtgttaaattcattttattcttattaaggaaatactttg

SEQ ID NO: 197892 - DNA, 785 bp, Homo sapiens
  Payload ID: 19027
  Gene Name: UDP glucuronosyltransferase 1 family, polypeptide A6
  ENST ID: ENST00000406651
  CDS Start-End: 115-645
gaagaactcgcatcagctgtcctcaagagagatgtggatataatcaccttatatcagaaggtctctgtttggctgttaagatatgactttgtgcttgaatatcctaggccggtcatgcccaacatggtcttcattggaggtatcaactgtaagaagaggaaagacttgtctcaggaatttgaagcctacattaatgcttctggagaacatggaattgtggttttctctttgggatcaatggtctcagaaattccagagaagaaagctatggcaattgctgatgctttgggcaaaatccctcagacagtcctgtggcggtacactggaacccgaccatcgaatcttgcgaacaacacgatacttgttaagtggctaccccaaaacgatctgcttggtcacccgatgacccgtgcctttatcacccatgctggttcccatggtgtttatgaaagcatatgcaatggcgttcccatggtgatgatgcccttgtttggtgatcagatggacaatgcaaagcgcatggagactaagggagctggagtgaccctgaatgttctggaaatgacttctgaagatttagaaaatgctctaaaagcagtcatcaatgacaaaagaaagaagcagcagtcaggaagacagatgtgaagagctggagcatgttcagatgagaggagacggaacacggggacacaccagcttgagcaagggacaacaggggaggactgatgactgacttcccacctttgaggtgctaatgtgtgtgtggtggcactggataaaagatc

SEQ ID NO: 197893 - DNA, 745 bp, Homo sapiens
  Payload ID: 19027
  Gene Name: UDP glucuronosyltransferase 1 family, polypeptide A6
  ENST ID: ENST00000441351
  CDS Start-End: 179-745
agtgtgaccctccctttctgggcctcagttgagaaacctgaagctcaggagaggagtcactcccctggcagatgggtggctgggccagaagcagataccaggctttctgactcctgctctaggattctcaccacgtactggctagacttatacttctcaaatcttaatttcctaaaggatggcctgcctccttcgctcatttcagagaatttctgcaggggttttcttcttagcactttggggcatggttgtaggtgacaagctgctggtggtccctcaggacggaagccactggcttagtatgaaggatatagttgaggttctcagtgaccggggtcatgagattgtagtggtggtgcctgaagttaatttgcttttgaaagaatccaaatactacacaagaaaaatctatccagtgccgtatgaccaagaagagctgaagaaccgttaccaatcatttggaaacaatcactttgctgagcgatcattcctaactgctcctcagacagagtacaggaataacatgattgttattggcctgtacttcatcaactgccagagcctcctgcaggacagggacaccctgaacttctttaaggagagcaagtttgatgctcttttcacagacccagccttaccctgtggggtgatcctggctgagtatttgggcctaccatctgtgtacctcttcaggggttttccgtgttccctggagcatacattcagcagaagcccagaccctgtg

SEQ ID NO: 197894 - DNA, 832 bp, Homo sapiens
  Payload ID: 19027
  Gene Name: UDP glucuronosyltransferase 1 family, polypeptide A6
  ENST ID: ENST00000446481
  CDS Start-End: 119-649
ggcagatgggtggctgggccagaagcagataccaggctttctgactcctgctctaggattctcaccacgtactggctagacttatacttctcaaatcttaatttcctaaaggccggtcatgcccaacatggtcttcattggaggtatcaactgtaagaagaggaaagacttgtctcaggaatttgaagcctacattaatgcttctggagaacatggaattgtggttttctctttgggatcaatggtctcagaaattccagagaagaaagctatggcaattgctgatgctttgggcaaaatccctcagacagtcctgtggcggtacactggaacccgaccatcgaatcttgcgaacaacacgatacttgttaagtggctaccccaaaacgatctgcttggtcacccgatgacccgtgcctttatcacccatgctggttcccatggtgtttatgaaagcatatgcaatggcgttcccatggtgatgatgcccttgtttggtgatcagatggacaatgcaaagcgcatggagactaagggagctggagtgaccctgaatgttctggaaatgacttctgaagatttagaaaatgctctaaaagcagtcatcaatgacaaaagaaagaagcagcagtcaggaagacagatgtgaagagctggagcatgttcagatgagaggagacggaacacggggacacaccagcttgagcaagggacaacaggggaggactgatgactgacttcccacctttgagttacaaggagaacatcatgcgcctctccagccttcacaaggaccgcccggtggagccgctggacctggccgtgttctggg

SEQ ID NO: 197895 - DNA, 567 bp, Homo sapiens
  Payload ID: 19027
  Gene Name: UDP glucuronosyltransferase 1 family, polypeptide A6
  ENST ID: ENST00000484784
  CDS Start-End: 1-204
ctattttattgtctgttttcaaagtatgaagaactcgcatcagctgtcctcaagagagatgtggatataatcaccttatatcagaaggtctctgtttggctgttaagatatgactttgtgcttgaatatcctaggccggtcatgcccaacatggtcttcattggaggtatcaactgtaagaagaggaaagacttgtctcagtagtgcccccacaaattatgcagcccgttctgttctggaggaaccattcttatcagaacttggtgctggattgacttggagaaaagcctggccataatcttcaggatgaaataaaggcctggatgaatggatacttcagtctctatgcagacttgcagaagactggagcctttggcattcagaagaggaattcagactgtgcaagatctgaggccaggctccagctccccaggtcctttggaatttgaagcctacattaatgcttctggagaacatggaattgtggttttctctttgggatcaatggtctcagaaattccagagaagaaagctatggcaattgctgatgctttgggcaaaatccct

SEQ ID NO: 197896 - DNA, 2333 bp, Homo sapiens
  Payload ID: 19028
  Gene Name: UDP glucuronosyltransferase 1 family, polypeptide A7
  Uniprot ID: Q9HAW7
  ENST ID: ENST00000373426
  CDS Start-End: 1-1593
atggctcgtgcagggtggactggcctccttcccctatatgtgtgtctactgctgacctgtggctttgccaaggcagggaagctgctggtagtgcccatggatgggagccactggttcaccatgcagtcggtggtggagaaactcatcctcagggggcatgaggtggtcgtagtcatgccagaggtgagttggcaactgggaagatcactgaattgcacagtgaagacttactcaacctcatacactctggaggatcaggaccgggagttcatggtttttgccgatgctcgctggacggcaccattgcgaagtgcattttctctattaacaagttcatccaatggtatttttgacttatttttttcaaattgcaggagtttgtttaatgaccgaaaattagtagaatacttaaaggagagttgttttgatgcagtgtttctcgatccttttgatgcctgtggcttaattgttgccaaatatttctccctcccctctgtggtcttcgccaggggaatattttgccactatcttgaagaaggtgcacagtgccctgctcctctttcctatgtccccagacttctcttagggttctcagacgccatgactttcaaggagagagtatggaaccacatcatgcacttggaggaacatttattttgcccctattttttcaaaaatgtcttagaaatagcctctgaaattctccaaacccctgtcacggcatatgatctctacagccacacatcaatttggttgttgcgaactgactttgttttggagtatcccaaacccgtgatgcccaatatgatcttcattggtggtatcaactgtcatcagggaaagccagtgcctatggaatttgaagcctacattaatgcttctggagaacatggaattgtggttttctctttgggatcaatggtctcagaaattccagagaagaaagctatggcaattgctgatgctttgggcaaaatccctcagacagtcctgtggcggtacactggaacccgaccatcgaatcttgcgaacaacacgatacttgttaagtggctaccccaaaacgatctgcttggtcacccgatgacccgtgcctttatcacccatgctggttcccatggtgtttatgaaagcatatgcaatggcgttcccatggtgatgatgcccttgtttggtgatcagatggacaatgcaaagcgcatggagactaagggagctggagtgaccctgaatgttctggaaatgacttctgaagatttagaaaatgctctaaaagcagtcatcaatgacaaaagttacaaggagaacatcatgcgcctctccagccttcacaaggaccgcccggtggagccgctggacctggccgtgttctgggtggagtttgtgatgaggcacaagggcgcgccacacctgcgccccgcagcccacgacctcacctggtaccagtaccattccttggacgtgattggtttcctcttggccgtcgtgctgacagtggccttcatcacctttaaatgttgtgcttatggctaccggaaatgcttggggaaaaaagggcgagttaagaaagcccacaaatccaagacccattgagaagtgggtgggaaataaggtaaaattttgaaccattccctagtcatttccaaacttgaaaacagaatcagtgttaaattcattttattcttattaaggaaatactttgcataaattaatcagccccagagtgctttaaaaaattctcttaaataaaaataatagactcgctagtcagtaaagatatttgaatatgtatcgtgccccctctggtgtctttgatcaggatgacatgtgccatttttcagaggacgtgcagacaggctggcattctagattacttttcttactctgaaacatggcctgtttgggagtgcgggattcaaaggtggtcccacggctgcccctactgcaaatggcagttttaatcttatcttttggcttctgcagatggttgcaattgatccttaaccaataatggtcagtcctcatctctgtcgtgcttcataggtgccaccttgtgtgtttaaagaagggaagctttgtacctttagagtgtaggtgaaatgaatgaatggcttggagtgcactgagaacagcatatgatttcttgctttggggaaaaagaatgatgctatgaaattggtgggtggtgtatttgagaagataatcattgcttatgtcaaatggagctgaatttgataaaaacccaaaatacagctatgaagtgctgggcaagtttactttttttctgatgtttcctacaactaaaaataaattaataaatttatataaattct

SEQ ID NO: 197897 - DNA, 2259 bp, Homo sapiens
  Payload ID: 19028
  Gene Name: UDP glucuronosyltransferase 1 family, polypeptide A7
  ENST ID: ENST00000485022
  CDS Start-End: 1-473
cagtgtttctcgatccttttgatgcctgtggcttaattgttgccaaatatttctccctcccctctgtggtcttcgccaggggaatattttgccactatcttgaagaaggtgcacagtgccctgctcctctttcctatgtccccagacttctcttagggttctcagacgccatgactttcaaggagagagtatggaaccacatcatgcacttggaggaacatttattttgcccctattttttcaaaaatgtcttagaaatagcctctgaaattctccaaacccctgtcacggcatatgatctctacagccacacatcaatttggttgttgcgaactgactttgttttggagtatcccaaacccgtgatgcccaatatgatcttcattggtggtatcaactgtcatcagggaaagccagtgcctatgggccaggatctacttctttcaccccactggaatatgtcccaagcctgagtcattcagcctgcagcaatccctgagaaaaaaaaaaaatcggcctttgcctggacactcaagtgatacctgaggacaccttgactcctacagcaccaaccagggcaggcctgggtctccagcggagctactctttagggatcgtcattatgacgaacagacatgccagattcctctggctagtgtccagtgcagacatacacacacacacacatacacacacacacacacacacacaccattcttagtacagtcaaagctcacaggagaaagaaaaatgttttctaataccttcttaatttgcaagaaggtgttaggaattcaagggatggtatgcatagtgatgttagtttcatttcttcagctccttcctccaactcatgttctgtagggacttctgggactaagaacaggacccacatatgagcaacaggattttcagagcaaggctgtggttggaagggctcagaccaacgtccacagcagagtggaggtctagtataaagaatgtgaagtttgtagcatctcttgatcccgctattcctacatgcttgcttaagccattcttcctctagatgaactgttctttgaaggaaacctgcctaatgtctgcctgctcaagaaggtggacctgagctctgttccctttgcaaccttcctggagtcttattgctatctagatgaactcaaagcaagatgctgccgcccccatgactttgatcattgtaagctgccaatcctcttgggaggctgctcccagcttggactgagctgagtcttcgcatgccttgaacaatgaatttgcatcctggttatgttccccatgggggccagccctgtccttggagtggcccctctaatcatgttgctcaggcttcttctcccttcctgggccccagaacacctccggtgccaaacttgtgggtgggaacaggaactcgcgtgccagccaggtgtgcatgactagctctgggcaagtctgttctagtaattcaaggtaccacctctcactgggacagcctagtttctacacaggtcttgctctgggaccgccctcagcagtgtggttagcaggcagggccagtgtgaccctccctttctgggcctcagttgagaaacctgaagctcaggagaggagtcactcccctggcagatgggtggctgggccagaagcagataccaggctttctgactcctgctctaggattctcaccacgtactggctagacttatacttctcaaatcttaatttcctaaaggcaagtaacagtttgaatgttgttatattgtgatgtataataagaaatatatgtttgtctttgtttcctggacacagctcctgaaaccataagtggtgggagcgataaacgtgaacaaagaatcttttgttattcaaaacagatccctttcgatcacacctaagtttatgtaaaggagatgtaaagtctctaaggatgagggctagttgccagggaacaaaacccttgcgattagagggaagaaaggagagagagattgaagattgatttgatcaccgatgggcaacaatctaatcaatcatgcctactatgtatggaagcctacataaaaactcagaagggcagggttcagagagctttcaggttgctgaaggtgtggagggtggggcacccagagatggcagatggggctccatggccatacccccatatcttgttctttgtactttttcctctggctattcatccgtattgtttgcaatatcctttgtaataaaccaaacctagtaaataaactgttttcttca

SEQ ID NO: 197898 - DNA, 2407 bp, Homo sapiens
  Payload ID: 19029
  Gene Name: UDP glucuronosyltransferase 1 family, polypeptide A8
  Uniprot ID: Q9HAW9
  ENST ID: ENST00000373450
  CDS Start-End: 64-1656
cttccgcctactgtatcatagcagcttagaatcccagctgctggctcgggctgcagttctctcatggctcgcacagggtggaccagccccattcccctatgtgtttctctgctgctgacctgtggctttgctgaggcagggaagctgctggtagtgcccatggatgggagtcactggttcaccatgcagtcggtggtggagaaacttatcctcagggggcatgaggtggttgtagtcatgccagaggtgagttggcaactgggaaaatcactgaattgcacagtgaagacttactcaacctcatacactctggaggatctggaccgggaattcatggatttcgccgatgctcaatggaaagcacaagtacgaagtttgttttctctatttctgagttcatccaatggtttttttaacttatttttttcgcattgcaggagtttgtttaatgaccgaaaattagtagaatacttaaaggagagttcttttgatgcggtgtttcttgatccttttgatgcctgtggcttaattgttgccaaatatttctccctcccctctgtggtcttcgccaggggaatagcttgccactatcttgaagaaggtgcacagtgccctgctcctctttcctatgtccccagaattctcttagggttctcagatgccatgactttcaaggagagagtacggaaccacatcatgcacttggaggaacatttattttgccagtatttttccaaaaatgccctagaaatagcctctgaaattctccaaacacctgtcacagcatatgatctctacagccacacatcaatttggttgttgcgaacagactttgttttggactatcccaaacccgtgatgcccaatatgatcttcattggtggtatcaactgccatcagggaaagccattgcctatggaatttgaagcctacattaatgcttctggagaacatggaattgtggttttctctttgggatcaatggtctcagaaattccagagaagaaagctatggcaattgctgatgctttgggcaaaatccctcagacagtcctgtggcggtacactggaacccgaccatcgaatcttgcgaacaacacgatacttgttaagtggctaccccaaaacgatctgcttggtcacccgatgacccgtgcctttatcacccatgctggttcccatggtgtttatgaaagcatatgcaatggcgttcccatggtgatgatgcccttgtttggtgatcagatggacaatgcaaagcgcatggagactaagggagctggagtgaccctgaatgttctggaaatgacttctgaagatttagaaaatgctctaaaagcagtcatcaatgacaaaagttacaaggagaacatcatgcgcctctccagccttcacaaggaccgcccggtggagccgctggacctggccgtgttctgggtggagtttgtgatgaggcacaagggcgcgccacacctgcgccccgcagcccacgacctcacctggtaccagtaccattccttggacgtgattggtttcctcttggccgtcgtgctgacagtggccttcatcacctttaaatgttgtgcttatggctaccggaaatgcttggggaaaaaagggcgagttaagaaagcccacaaatccaagacccattgagaagtgggtgggaaataaggtaaaattttgaaccattccctagtcatttccaaacttgaaaacagaatcagtgttaaattcattttattcttattaaggaaatactttgcataaattaatcagccccagagtgctttaaaaaattctcttaaataaaaataatagactcgctagtcagtaaagatatttgaatatgtatcgtgccccctctggtgtctttgatcaggatgacatgtgccatttttcagaggacgtgcagacaggctggcattctagattacttttcttactctgaaacatggcctgtttgggagtgcgggattcaaaggtggtcccacggctgcccctactgcaaatggcagttttaatcttatcttttggcttctgcagatggttgcaattgatccttaaccaataatggtcagtcctcatctctgtcgtgcttcataggtgccaccttgtgtgtttaaagaagggaagctttgtacctttagagtgtaggtgaaatgaatgaatggcttggagtgcactgagaacagcatatgatttcttgctttggggaaaaagaatgatgctatgaaattggtgggtggtgtatttgagaagataatcattgcttatgtcaaatggagctgaatttgataaaaacccaaaatacagctatgaagtgctgggcaagtttactttttttctgatgtttcctacaactaaaaataaattaataaatttatataaattctatttaagtgtt

SEQ ID NO: 197899 - DNA, 2416 bp, Homo sapiens
  Payload ID: 19030
  Gene Name: UDP glucuronosyltransferase 1 family, polypeptide A9
  Uniprot ID: O60656
  ENST ID: ENST00000354728
  CDS Start-End: 83-1675
ggttttgtgctggtatttctcccacctactgtatcataggagcttagattcccagctgcttgctctcagctgcagttctctgatggcttgcacagggtggaccagcccccttcctctatgtgtgtgtctgctgctgacctgtggctttgccgaggcagggaagctactggtagtgcccatggatgggagccactggttcaccatgaggtcggtggtggagaaactcattctcagggggcatgaggtggttgtagtcatgccagaggtgagttggcaactgggaagatcactgaattgcacagtgaagacttattcaacttcatataccctggaggatctggaccgggagttcaaggcttttgcccatgctcaatggaaagcacaagtacgaagtatatattctctattaatgggttcatacaatgacatttttgacttatttttttcaaattgcaggagtttgtttaaagacaaaaaattagtagaatacttaaaggagagttcttttgatgcagtgtttctcgatccttttgataactgtggcttaattgttgccaaatatttctccctcccctccgtggtcttcgccaggggaatactttgccactatcttgaagaaggtgcacagtgccctgctcctctttcctatgtccccagaattctcttagggttctcagatgccatgactttcaaggagagagtacggaaccacatcatgcacttggaggaacatttattatgccaccgttttttcaaaaatgccctagaaatagcctctgaaattctccaaacacctgttacggagtatgatctctacagccacacatcaatttggttgttgcgaacggactttgttttggactatcccaaacccgtgatgcccaacatgatcttcattggtggtatcaactgccatcagggaaagccgttgcctatggaatttgaagcctacattaatgcttctggagaacatggaattgtggttttctctttgggatcaatggtctcagaaattccagagaagaaagctatggcaattgctgatgctttgggcaaaatccctcagacagtcctgtggcggtacactggaacccgaccatcgaatcttgcgaacaacacgatacttgttaagtggctaccccaaaacgatctgcttggtcacccgatgacccgtgcctttatcacccatgctggttcccatggtgtttatgaaagcatatgcaatggcgttcccatggtgatgatgcccttgtttggtgatcagatggacaatgcaaagcgcatggagactaagggagctggagtgaccctgaatgttctggaaatgacttctgaagatttagaaaatgctctaaaagcagtcatcaatgacaaaagttacaaggagaacatcatgcgcctctccagccttcacaaggaccgcccggtggagccgctggacctggccgtgttctgggtggagtttgtgatgaggcacaagggcgcgccacacctgcgccccgcagcccacgacctcacctggtaccagtaccattccttggacgtgattggtttcctcttggccgtcgtgctgacagtggccttcatcacctttaaatgttgtgcttatggctaccggaaatgcttggggaaaaaagggcgagttaagaaagcccacaaatccaagacccattgagaagtgggtgggaaataaggtaaaattttgaaccattccctagtcatttccaaacttgaaaacagaatcagtgttaaattcattttattcttattaaggaaatactttgcataaattaatcagccccagagtgctttaaaaaattctcttaaataaaaataatagactcgctagtcagtaaagatatttgaatatgtatcgtgccccctctggtgtctttgatcaggatgacatgtgccatttttcagaggacgtgcagacaggctggcattctagattacttttcttactctgaaacatggcctgtttgggagtgcgggattcaaaggtggtcccacggctgcccctactgcaaatggcagttttaatcttatcttttggcttctgcagatggttgcaattgatccttaaccaataatggtcagtcctcatctctgtcgtgcttcataggtgccaccttgtgtgtttaaagaagggaagctttgtacctttagagtgtaggtgaaatgaatgaatggcttggagtgcactgagaacagcatatgatttcttgctttggggaaaaagaatgatgctatgaaattggtgggtggtgtatttgagaagataatcattgcttatgtcaaatggagctgaatttgataaaaacccaaaatacagctatgaagtgctgggcaagtttactttttttctgatgtttcctacaactaaaaataaattaataaatttatataaattcta

SEQ ID NO: 197900 - DNA, 1698 bp, Homo sapiens
  Payload ID: 19031
  Gene Name: UDP glucuronosyltransferase 2 family, polypeptide A1, complex locus
  Uniprot ID: Q9Y4X1
  ENST ID: ENST00000286604
  CDS Start-End: 115-1698
acattcggcttcttcctaatgtcaaatgagtgctgttaaagttcctccaggaaacttcagcagagaaaaacatttgcttcacatctcatcaaatcttctgcatcaagccacatcatgttaaacaaccttctgctgttctcccttcagataagtctcataggaaccactcttggtgggaatgttttgatttggccaatggaaggtagtcattggctaaatgttaagataattatagatgagctcattaaaaaggagcataatgtgactgtcctagttgcctctggtgcacttttcatcacaccaacctctaacccatctctgacatttgaaatatataaggtgccctttggcaaagaaagaatagaaggagtaattaaggacttcgttttgacatggctggaaaatagaccatctccttcaaccatttggagattctatcaggagatggccaaagtaatcaaggacttccacatggtgtctcaggagatctgtgatggcgttcttaaaaaccaacagctgatggcaaagctaaagaaaagcaagtttgaagtcctggtgtctgatccagtatttccttgtggcgatatagtagctttaaaacttggaattccatttatgtactccttgaggttttctccagcctcaacagtggaaaagcactgtgggaaggtaccataccctccttcctatgttcctgctgttttatcagaactcaccgaccaaatgtctttcactgacagaataagaaatttcatctcctaccacctacaggactacatgtttgaaactctttggaaatcatgggattcatactatagtaaagctttaggtggactcttactctgttgcccaggctggagtgcagtggcggatcttggctcactgcaacctctgcttcccgggttcaagcgattctcccgcctcagcctccattgtagttgggattacaggctgccagcaggaagacccactacgttatgtgagactatggggaaagctgaaatttggttaatccgaacatattgggattttgaatttcctcgtccatacttacctaattttgagtttgttggaggattgcactgcaaacctgccaaacctttacctaaggttttatggagatacaaaggaaagaaaccagccacattaggaaacaatactcagctctttgattggataccccagaatgatcttcttggacatcccaaaaccaaagcttttatcactcatggtggaactaatgggatctacgaagctatttaccacggagtccctatggtgggagttcccatgtttgctgatcagcctgataacattgctcacatgaaggccaaaggagcagctgtggaagtgaacctaaacacaatgacaagtgtggatttgcttagcgctttgagaacagtcattaatgaaccttcttataaagagaatgctatgaggttatcaagaattcaccatgatcaacctgtaaagcccctggatcgagcagtcttctggatcgagtttgtcatgcgccacaaaggagccaagcaccttcgggttgcagcccatgacctcacctggttccagtaccactctttggatgtaattgggttcttgctggtctgtgtgacaacggctatatttttggtcatacaatgttgtttgttttcctgtcaaaaatttggtaagataggaaagaagaaaaaaagagaatag

SEQ ID NO: 197901 - DNA, 2519 bp, Homo sapiens
  Payload ID: 19031
  Gene Name: UDP glucuronosyltransferase 2 family, polypeptide A1, complex locus
  ENST ID: ENST00000512704
  CDS Start-End: 118-1569
ggatattaatggtttgcctcaaaattgagaaataattttgtctttcctttttttctttaaaagcagagaaaaacatttgcttcacatctcatcaaatcttctgcatcaagccacatcatgttaaacaaccttctgctgttctcccttcagataagtctcataggaaccactcttggtgggaatgttttgatttggccaatggaaggtagtcattggctaaatgttaagataattatagatgagctcattaaaaaggagcataatgtgactgtcctagttgcctctggtgcacttttcatcacaccaacctctaacccatctctgacatttgaaatatataaggtgccctttggcaaagaaagaatagaaggagtaattaaggacttcgttttgacatggctggaaaatagaccatctccttcaaccatttggagattctatcaggagatggccaaagtaatcaaggacttccacatggtgtctcaggagatctgtgatggcgttcttaaaaaccaacagctgatggcaaagctaaagaaaagcaagtttgaagtcctggtgtctgatccagtatttccttgtggcgatatagtagctttaaaacttggaattccatttatgtactccttgaggttttctccagcctcaacagtggaaaagcactgtgggaaggtaccataccctccttcctatgttcctgctgttttatcagaactcaccgaccaaatgtctttcactgacagaataagaaatttcatctcctaccacctacaggactacatgtttgaaactctttggaaatcatgggattcatactatagtaaagctttaggaagacccactacgttatgtgagactatggggaaagctgaaatttggttaatccgaacatattgggattttgaatttcctcgtccatacttacctaattttgagtttgttggaggattgcactgcaaacctgccaaacctttacctaaggttttatggagatacaaaggaaagaaaccagccacattaggaaacaatactcagctctttgattggataccccagaatgatcttcttggacatcccaaaaccaaagcttttatcactcatggtggaactaatgggatctacgaagctatttaccacggagtccctatggtgggagttcccatgtttgctgatcagcctgataacattgctcacatgaaggccaaaggagcagctgtggaagtgaacctaaacacaatgacaagtgtggatttgcttagcgctttgagaacagtcattaatgaaccttcttataaagagaatgctatgaggttatcaagaattcaccatgatcaacctgtaaagcccctggatcgagcagtcttctggatcgagtttgtcatgcgccacaaaggagccaagcaccttcgggttgcagcccatgacctcacctggttccagtaccactctttggatgtaattgggttcttgctggtctgtgtgacaacggctatatttttggtcatacaatgttgtttgttttcctgtcaaaaatttggtaagataggaaagaagaaaaaaagagaataggtcaagaaaaagaggaaatatatatatttttaagtttggcaaaatcctgagtagtgtagtcctattaattccagacaaaaggagtttaacaaaaacacgtctcccatcctgtttccaaattttctatttctctacctgcgataagcctactgataaagcctagattttggcatgattattattaacttgtgagttatagtcttctatttttcctttgtctctccctgctgactataccctcttcctgtcacttttctgacacaaggatactacctaattttaaatatgttctattcatagtatcaaattattttatcgttaaccttaattaatgattaacaatatgctgaatcctggtaatgcatacagtgtagatggaatttgataggtgtaaggaagagtcaaattcacaaatttccatataccaaacaaatcagggagccaccgtaggagagtagtgtgttatgagaaaggtaatgatttccttttttaataaaaacaaactcttctgcttgctcaatgtttcaggagttagagaatgaattttaagtgtgacgtgcgtccctattaaatgtctacaaaattttcattaagcatatctagaaaatcacggcataacttgcctgcctttcttcaacatatattcttatataacctgtagtggaagatttgggtactgtctttaataaatcaatcaatcgactcttttatttcaaggagaaagttctatgttatatgttgaaggtgaacagatcatatttagaggatataacaattagaaatctagaaaataattatcatttttataaaatttttagtcaactgtacaaataattacataaaacatcaattaattatgcttaaaaatcactaatgttcataatatataatcactatttgtaatcaaaagtttaattttatgccaaaaaataaaaaatgcttacttggaa

SEQ ID NO: 197902 - DNA, 2595 bp, Homo sapiens
  Payload ID: 19031
  Gene Name: UDP glucuronosyltransferase 2 family, polypeptide A1, complex locus
  Uniprot ID: Q9Y4X1
  ENST ID: ENST00000503640
  CDS Start-End: 57-1640
agcagagaaaaacatttgcttcacatctcatcaaatcttctgcatcaagccacatcatgttaaacaaccttctgctgttctcccttcagataagtctcataggaaccactcttggtgggaatgttttgatttggccaatggaaggtagtcattggctaaatgttaagataattatagatgagctcattaaaaaggagcataatgtgactgtcctagttgcctctggtgcacttttcatcacaccaacctctaacccatctctgacatttgaaatatataaggtgccctttggcaaagaaagaatagaaggagtaattaaggacttcgttttgacatggctggaaaatagaccatctccttcaaccatttggagattctatcaggagatggccaaagtaatcaaggacttccacatggtgtctcaggagatctgtgatggcgttcttaaaaaccaacagctgatggcaaagctaaagaaaagcaagtttgaagtcctggtgtctgatccagtatttccttgtggcgatatagtagctttaaaacttggaattccatttatgtactccttgaggttttctccagcctcaacagtggaaaagcactgtgggaaggtaccataccctccttcctatgttcctgctgttttatcagaactcaccgaccaaatgtctttcactgacagaataagaaatttcatctcctaccacctacaggactacatgtttgaaactctttggaaatcatgggattcatactatagtaaagctttaggaagacccactacgttatgtgagactatggggaaagctgaaatttggttaatccgaacatattgggattttgaatttcctcgtccatacttacctaattttgagtttgttggaggattgcactgcaaacctgccaaacctttacctaaggaaatggaagaatttatccagagctcaggtaaaaatggtgttgtggtgttttctctgggatcaatggtcaaaaaccttacagaagaaaaggccaatcttattgcctcagcccttgcccagattccacagaaggttttatggagatacaaaggaaagaaaccagccacattaggaaacaatactcagctctttgattggataccccagaatgatcttcttggacatcccaaaaccaaagcttttatcactcatggtggaactaatgggatctacgaagctatttaccacggagtccctatggtgggagttcccatgtttgctgatcagcctgataacattgctcacatgaaggccaaaggagcagctgtggaagtgaacctaaacacaatgacaagtgtggatttgcttagcgctttgagaacagtcattaatgaaccttcttataaagagaatgctatgaggttatcaagaattcaccatgatcaacctgtaaagcccctggatcgagcagtcttctggatcgagtttgtcatgcgccacaaaggagccaagcaccttcgggttgcagcccatgacctcacctggttccagtaccactctttggatgtaattgggttcttgctggtctgtgtgacaacggctatatttttggtcatacaatgttgtttgttttcctgtcaaaaatttggtaagataggaaagaagaaaaaaagagaataggtcaagaaaaagaggaaatatatatatttttaagtttggcaaaatcctgagtagtgtagtcctattaattccagacaaaaggagtttaacaaaaacacgtctcccatcctgtttccaaattttctatttctctacctgcgataagcctactgataaagcctagattttggcatgattattattaacttgtgagttatagtcttctatttttcctttgtctctccctgctgactataccctcttcctgtcacttttctgacacaaggatactacctaattttaaatatgttctattcatagtatcaaattattttatcgttaaccttaattaatgattaacaatatgctgaatcctggtaatgcatacagtgtagatggaatttgataggtgtaaggaagagtcaaattcacaaatttccatataccaaacaaatcagggagccaccgtaggagagtagtgtgttatgagaaaggtaatgatttccttttttaataaaaacaaactcttctgcttgctcaatgtttcaggagttagagaatgaattttaagtgtgacgtgcgtccctattaaatgtctacaaaattttcattaagcatatctagaaaatcacggcataacttgcctgcctttcttcaacatatattcttatataacctgtagtggaagatttgggtactgtctttaataaatcaatcaatcgactcttttatttcaaggagaaagttctatgttatatgttgaaggtgaacagatcatatttagaggatataacaattagaaatctagaaaataattatcatttttataaaatttttagtcaactgtacaaataattacataaaacatcaattaattatgcttaaaaatcactaatgttcataatatataatcactatttgtaatcaaaagtttaattttatgccaaaaaataaaaaatgcttacttggaatttga

SEQ ID NO: 197903 - DNA, 2376 bp, Homo sapiens
  Payload ID: 19031
  Gene Name: UDP glucuronosyltransferase 2 family, polypeptide A1, complex locus
  Uniprot ID: Q9Y4X1
  ENST ID: ENST00000514019
  CDS Start-End: 117-2198
ttacattcggcttcttcctaatgtcaaatgagtgctgttaaagttcctccaggaaacttcagcagagaaaaacatttgcttcacatctcatcaaatcttctgcatcaagccacatcatgttaaacaaccttctgctgttctcccttcagataagtctcataggaaccactcttggtgggaatgttttgatttggccaatggaaggtagtcattggctaaatgttaagataattatagatgagctcattaaaaaggagcataatgtgactgtcctagttgcctctggtgcacttttcatcacaccaacctctaacccatctctgacatttgaaatatataaggtgccctttggcaaagaaagaatagaaggagtaattaaggacttcgttttgacatggctggaaaatagaccatctccttcaaccatttggagattctatcaggagatggccaaagtaatcaaggacttccacatggtgtctcaggagatctgtgatggcgttcttaaaaaccaacagctgatggcaaagctaaagaaaagcaagtttgaagtcctggtgtctgatccagtatttccttgtggcgatatagtagctttaaaacttggaattccatttatgtactccttgaggttttctccagcctcaacagtggaaaagcactgtgggaaggtaccataccctccttcctatgttcctgctgttttatcagaactcaccgaccaaatgtctttcactgacagaataagaaatttcatctcctaccacctacaggactacatgtttgaaactctttggaaatcatgggattcatactatagtaaagctttagatggtagccattggttaaatattaagattattctagaagagttgattcaaagaaatcacaatgtgactgtactggcttcatcagcaactctattcatcaactccaatcccgattctcctgtgaattttgaagtgatacctgtttcctacaagaagagcaatatagattccttaattgagcatatgataatgctgtggattgaccatagaccaactcctctcacaatatgggctttctacaaagaactaggaaaacttctagacactttctttcaaattaacatacaactctgtgatggtgtactaaagaacccaaagttgatggcaagacttcagaaaggtggttttgatgtgttggtagcagacccagtaacaatctgtggtgatcttgttgctctgaaattaggaattccatttatgtacacattgaggttctctccagcatcaacagtggagagacactgtgggaaaatcccagcaccagtctcctatgtaccggcagccttatcagagctcactgaccagatgacctttggtgaaaggattaaaaataccatatcttattctctgcaagactatatatttcagtcctactggggagaatggaattcatactatagcaaaattttaggaagacccactacgttatgtgagactatggggaaagctgaaatttggttaatccgaacatattgggattttgaatttcctcgtccatacttacctaattttgagtttgttggaggattgcactgcaaacctgccaaacctttacctaaggttttatggagatacaaaggaaagaaaccagccacattaggaaacaatactcagctctttgattggataccccagaatgatcttcttggacatcccaaaaccaaagcttttatcactcatggtggaactaatgggatctacgaagctatttaccacggagtccctatggtgggagttcccatgtttgctgatcagcctgataacattgctcacatgaaggccaaaggagcagctgtggaagtgaacctaaacacaatgacaagtgtggatttgcttagcgctttgagaacagtcattaatgaaccttcttataaagagaatgctatgaggttatcaagaattcaccatgatcaacctgtaaagcccctggatcgagcagtcttctggatcgagtttgtcatgcgccacaaaggagccaagcaccttcgggttgcagcccatgacctcacctggttccagtaccactctttggatgtaattgggttcttgctggtctgtgtgacaacggctatatttttggtcatacaatgttgtttgttttcctgtcaaaaatttggtaagataggaaagaagaaaaaaagagaataggtcaagaaaaagaggaaatatatatatttttaagtttggcaaaatcctgagtagtgtagtcctattaattccagacaaaaggagtttaacaaaaacacgtctcccatcctgtttccaaattttctatttctctacctgcgataagcctactgataaagcctagattttggcatgatta

SEQ ID NO: 197904 - DNA, 586 bp, Homo sapiens
  Payload ID: 19031
  Gene Name: UDP glucuronosyltransferase 2 family, polypeptide A1, complex locus
  ENST ID: ENST00000505512
  CDS Start-End: 112-586
acattcggcttcttcctaatgtcaaatgagtgctgttaaagttcctccaggaaacttcagagaaaaacatttgcttcacatctcatcaaatcttctgcatcaagccacatcatgttaaacaaccttctgctgttctcccttcagataagtctcataggaaccactcttggtgggaatgttttgatttggccaatggaaggtagtcattggctaaatgttaagataattatagatgagctcattaaaaaggagcataatgtgactgtcctagttgcctctggtgcacttttcatcacaccaacctctaacccatctctgacatttgaaatatataaggtgccctttggcaaagaaagaatagaaggagtaattaaggacttcgttttgacatggctggaaaatagaccatctccttcaaccatttggagattctatcaggagatggccaaagtaatcaaggacttccacatggtgtctcaggagatctgtgatggcgttcttaaaaaccaacagctgatggcaaagctaaagaaaagcaagtttgaagtcctggtgtctgatccagtatttccttgtggcgatatag

SEQ ID NO: 197905 - DNA, 1544 bp, Homo sapiens
  Payload ID: 19032
  Gene Name: UDP glucuronosyltransferase 2 family, polypeptide A2
  Uniprot ID: Q9Y4X1
  ENST ID: ENST00000604021
  CDS Start-End: 3-1481
ggatggtttccataagggattttaccatgcctaagaagtttgtccagatgctggtttttaatttgactctgactgaagttgttctaagtgggaatgtgttaatttggcctacagatggtagccattggttaaatattaagattattctagaagagttgattcaaagaaatcacaatgtgactgtactggcttcatcagcaactctattcatcaactccaatcccgattctcctgtgaattttgaagtgatacctgtttcctacaagaagagcaatatagattccttaattgagcatatgataatgctgtggattgaccatagaccaactcctctcacaatatgggctttctacaaagaactaggaaaacttctagacactttctttcaaattaacatacaactctgtgatggtgtactaaagaacccaaagttgatggcaagacttcagaaaggtggttttgatgtgttggtagcagacccagtaacaatctgtggtgatcttgttgctctgaaattaggaattccatttatgtacacattgaggttctctccagcatcaacagtggagagacactgtgggaaaatcccagcaccagtctcctatgtaccggcagccttatcagagctcactgaccagatgacctttggtgaaaggattaaaaataccatatcttattctctgcaagactatatatttcagtcctactggggagaatggaattcatactatagcaaaattttaggaagacccactacgttatgtgagactatggggaaagctgaaatttggttaatccgaacatattgggattttgaatttcctcgtccatacttacctaattttgagtttgttggaggattgcactgcaaacctgccaaacctttacctaaggttttatggagatacaaaggaaagaaaccagccacattaggaaacaatactcagctctttgattggataccccagaatgatcttcttggacatcccaaaaccaaagcttttatcactcatggtggaactaatgggatctacgaagctatttaccacggagtccctatggtgggagttcccatgtttgctgatcagcctgataacattgctcacatgaaggccaaaggagcagctgtggaagtgaacctaaacacaatgacaagtgtggatttgcttagcgctttgagaacagtcattaatgaaccttcttataaagagaatgctatgaggttatcaagaattcaccatgatcaacctgtaaagcccctggatcgagcagtcttctggatcgagtttgtcatgcgccacaaaggagccaagcaccttcgggttgcagcccatgacctcacctggttccagtaccactctttggatgtaattgggttcttgctggtctgtgtgacaacggctatatttttggtcatacaatgttgtttgttttcctgtcaaaaatttggtaagataggaaagaagaaaaaaagagaataggtcaagaaaaagaggaaatatatatatttttaagtttggcaaaatcctgagtagtgtagtcct

SEQ ID NO: 197906 - DNA, 1676 bp, Homo sapiens
  Payload ID: 19032
  Gene Name: UDP glucuronosyltransferase 2 family, polypeptide A2
  Uniprot ID: Q9Y4X1
  ENST ID: ENST00000604629
  CDS Start-End: 3-1613
ggatggtttccataagggattttaccatgcctaagaagtttgtccagatgctggtttttaatttgactctgactgaagttgttctaagtgggaatgtgttaatttggcctacagatggtagccattggttaaatattaagattattctagaagagttgattcaaagaaatcacaatgtgactgtactggcttcatcagcaactctattcatcaactccaatcccgattctcctgtgaattttgaagtgatacctgtttcctacaagaagagcaatatagattccttaattgagcatatgataatgctgtggattgaccatagaccaactcctctcacaatatgggctttctacaaagaactaggaaaacttctagacactttctttcaaattaacatacaactctgtgatggtgtactaaagaacccaaagttgatggcaagacttcagaaaggtggttttgatgtgttggtagcagacccagtaacaatctgtggtgatcttgttgctctgaaattaggaattccatttatgtacacattgaggttctctccagcatcaacagtggagagacactgtgggaaaatcccagcaccagtctcctatgtaccggcagccttatcagagctcactgaccagatgacctttggtgaaaggattaaaaataccatatcttattctctgcaagactatatatttcagtcctactggggagaatggaattcatactatagcaaaattttaggaagacccactacgttatgtgagactatggggaaagctgaaatttggttaatccgaacatattgggattttgaatttcctcgtccatacttacctaattttgagtttgttggaggattgcactgcaaacctgccaaacctttacctaaggaaatggaagaatttatccagagctcaggtaaaaatggtgttgtggtgttttctctgggatcaatggtcaaaaaccttacagaagaaaaggccaatcttattgcctcagcccttgcccagattccacagaaggttttatggagatacaaaggaaagaaaccagccacattaggaaacaatactcagctctttgattggataccccagaatgatcttcttggacatcccaaaaccaaagcttttatcactcatggtggaactaatgggatctacgaagctatttaccacggagtccctatggtgggagttcccatgtttgctgatcagcctgataacattgctcacatgaaggccaaaggagcagctgtggaagtgaacctaaacacaatgacaagtgtggatttgcttagcgctttgagaacagtcattaatgaaccttcttataaagagaatgctatgaggttatcaagaattcaccatgatcaacctgtaaagcccctggatcgagcagtcttctggatcgagtttgtcatgcgccacaaaggagccaagcaccttcgggttgcagcccatgacctcacctggttccagtaccactctttggatgtaattgggttcttgctggtctgtgtgacaacggctatatttttggtcatacaatgttgtttgttttcctgtcaaaaatttggtaagataggaaagaagaaaaaaagagaataggtcaagaaaaagaggaaatatatatatttttaagtttggcaaaatcctgagtagtgtagtcct

SEQ ID NO: 197907 - DNA, 2965 bp, Homo sapiens
  Payload ID: 19033
  Gene Name: UDP glucuronosyltransferase 2 family, polypeptide A3
  Uniprot ID: Q6UWM9
  ENST ID: ENST00000251566
  CDS Start-End: 32-1615
ttgcagatcagtgtgtgagggaactgccatcatgaggtctgacaagtcagctttggtatttctgctcctgcagctcttctgtgttggctgtggattctgtgggaaagtcctggtgtggccctgtgacatgagccattggcttaatgtcaaggtcattctagaagagctcatagtgagaggccatgaggtaacagtattgactcactcaaagccttcgttaattgactacaggaagccttctgcattgaaatttgaggtggtccatatgccacaggacagaacagaagaaaatgaaatatttgttgacctagctctgaatgtcttgccaggcttatcaacctggcaatcagttataaaattaaatgatttttttgttgaaataagaggaactttaaaaatgatgtgtgagagctttatctacaatcagacgcttatgaagaagctacaggaaaccaactacgatgtaatgcttatagaccctgtgattccctgtggagacctgatggctgagttgcttgcagtcccttttgtgctcacacttagaatttctgtaggaggcaatatggagcgaagctgtgggaaacttccagctccactttcctatgtacctgtgcctatgacaggactaacagacagaatgacctttctggaaagagtaaaaaattcaatgctttcagttttgttccacttctggattcaggattacgactatcatttttgggaagagttttatagtaaggcattaggaaggcccactacattatgtgagactgtgggaaaagctgagatatggctaatacgaacatattgggattttgaatttcctcaaccataccaacctaactttgagtttgttggaggattgcactgtaaacctgccaaagctttgcctaaggaaatggaaaattttgtccagagttcaggggaagatggtattgtggtgttttctctggggtcactgtttcaaaatgttacagaagaaaaggctaatatcattgcttcagcccttgcccagatcccacagaaggtgttatggaggtacaaaggaaaaaaaccatccacattaggagccaatactcggctgtatgattggataccccagaatgatcttcttggtcatcccaaaaccaaagcttttatcactcatggtggaatgaatgggatctatgaagctatttaccatggggtccctatggtgggagttcccatatttggtgatcagcttgataacatagctcacatgaaggccaaaggagcagctgtagaaataaacttcaaaactatgacaagcgaagatttactgagggctttgagaacagtcattaccgattcctcttataaagagaatgctatgagattatcaagaattcaccatgatcaacctgtaaagcccctagatcgagcagtcttctggatcgagtttgtcatgcgccacaaaggagccaagcacctgcgatcagctgcccatgacctcacctggttccagcactactctatagatgtgattgggttcctgctggcctgtgtggcaactgctatattcttgttcacaaaatgttttttattttcctgtcaaaaatttaataaaactagaaagatagaaaagagggaatagatctttccaaattcaagaaagacctgatggggtaatcctgttaattccagccacatagaatttggtgaaaaccttgctattttcatattatctattctgttattttatcttagctatatagcctagaattccacgatcatgaggttgtgagtatatctcattctttcgttgtattttcctaggtgtctttactctcttctctcactttgtgacacaaggacatgaatacatctaaattttcctatttctgatatgactgttttgatgatgtcattacttctataaccttaagtgatagggtgacatgcaatatgattattcctggtgtgcgcccaaacacatggatataaagaggtaaaaaacttaaaattcacaaaattcagtaaaccacacaaatcaggtaagtgttctatgagattagctggctatgagaaacataatgatgtttctttttcaatttaaataagcccttctacatagccagcatcagtgatctcagaaaataaattgctaataatgatgacatggcattatgcttagaaaagtttgctgtatttccatagacctcatctagatgtcatggcctacatttctgccatcactcaaccaatacttttttctgttttcttgatgataaaaagacctttctcatgattgccatcaaataacaaaagaaactattttttttctcacatagagaacatgtcagtaagatattcaaggtgaacagattatttttgggattagtaactatttgaaatatgtggtgataattactgagtttataaaatttatttgatagtacacttaaagaagatttatatgtttattctttaaaaatgatgaatactcataattcttatctctataatcaaaagtataatttactgtagaaaaataaagagatgcttgttctgaaagtaagatcagtgaactgcttttcagtctcaatctttgagaattgtaaattcatcaaataattgcttacatagtaaaaatttaaggtattagaaaacctgcataacaaatagtattatatattaaatattttgatatgtaaagctctacacaaagctaaatatagtgtaataatgtttacactaataagcaaatatgttaatcttctcatttttttactgtcatataatcttagtgatatgcctattaatagttttaaataaataaattggctcatctggctttttgaaaattttgaaattcttacagatgttgattaggtatatctacaaattaatttcaattttaaaatgatgatataaaaataaatataagtatttttcttgtgtatgtatacaataaatataaataaaattgtttactgttttgaaa

SEQ ID NO: 197908 - DNA, 1645 bp, Homo sapiens
  Payload ID: 19033
  Gene Name: UDP glucuronosyltransferase 2 family, polypeptide A3
  ENST ID: ENST00000503012
  CDS Start-End: 4-522
cttatgaagaagctacaggaaaccaactacgatgtaatgcttatagaccctgtgattccctgtggagacctgatggctgagttgcttgcagtcccttttgtgctcacacttagaatttctgtaggaggcaatatggagcgaagctgtgggaaacttccagctccactttcctatgtacctgtgcctatgacaggactaacagacagaatgacctttctggaaagagtaaaaaattcaatgctttcagttttgttccacttctggattcaggattacgactatcatttttgggaagagttttatagtaaggcattaggaaggcccactacattatgtgagactgtgggaaaagctgagatatggctaatacgaacatattgggattttgaatttcctcaaccataccaacctaactttgagtttgttggaggattgcactgtaaacctgccaaagctttgcctaaggaaagttataccagaaaaccaagctctcttaagccatggcatctgtatctaaaatagaaatacagaaggagagctgacaatttccatcattctctaggaaatggaaaattttgtccagagttcaggggaagatggtattgtggtgttttctctggggtcactgtttcaaaatgttacagaagaaaaggctaatatcattgcttcagcccttgcccagatcccacagaaggtgttatggaggtacaaaggaaaaaaaccatccacattaggagccaatactcggctgtatgattggataccccagaatgatcttcttggtcatcccaaaaccaaagcttttatcactcatggtggaatgaatgggatctatgaagctatttaccatggggtccctatggtgggagttcccatatttggtgatcagcttgataacatagctcacatgaaggccaaaggagcagctgtagaaataaacttcaaaactatgacaagcgaagatttactgagggctttgagaacagtcattaccgattcctcttataaagagaatgctatgagattatcaagaattcaccatgatcaacctgtaaagcccctagatcgagcagtcttctggatcgagtttgtcatgcgccacaaaggagccaagcacctgcgatcagctgcccatgacctcacctggttccagcactactctatagatgtgattgggttcctgctggcctgtgtggcaactgctatattcttgttcacaaaatgttttttattttcctgtcaaaaatttaataaaactagaaagatagaaaagagggaatagatctttccaaattcaagaaagacctgatggggtaatcctgttaattccagccacatagaatttggtgaaaaccttgctattttcatattatctattctgttattttatcttagctatatagcctagaattccacgatcatgaggttgtgagtatatctcattctttcgttgtattttcctaggtgtctttactctcttctctcactttgtgacacaaggacatgaatacatctaaattttcctatttctgatatgactgttttgatgatgtcattacttctataaccttaagtgatagggtgacatgcaatatgattattcctggtgtgcgcccaaacacatggatataaagaggtaaaaaac

SEQ ID NO: 197909 - DNA, 2965 bp, Homo sapiens; identical to SEQ ID NO: 197907
  Payload ID: 19033
  Gene Name: UDP glucuronosyltransferase 2 family, polypeptide A3
  Uniprot ID: Q6UWM9
  ENST ID: ENST00000611042
  CDS Start-End: 32-1615

SEQ ID NO: 197910 - DNA, 1645 bp, Homo sapiens; identical to SEQ ID NO: 197908
  Payload ID: 19033
  Gene Name: UDP glucuronosyltransferase 2 family, polypeptide A3
  ENST ID: ENST00000626124
  CDS Start-End: 1-522

SEQ ID NO: 197911 - DNA, 1931 bp, Homo sapiens
  Payload ID: 19034
  Gene Name: UDP glucuronosyltransferase 2 family, polypeptide B10
  Uniprot ID: P36537
  ENST ID: ENST00000265403
  CDS Start-End: 28-1614
ggaaaagaattatcacattgcacaaggatggctctgaaatggactacagttctgctgatacaactcagtttttactttagctctgggagttgtggaaaggtgctggtatgggccgcagaatacagcctttggatgaatatgaagacaatcctgaaagaacttgttcagagaggtcatgaggtgactgtactggcatcttcagcttccattctttttgatcccaacgactcatccactcttaaacttgaagtttatcctacatctttaactaaaactgaatttgagaatatcatcatgcaattggttaagagattgtcagaaattcaaaaagatacattttggttacctttttcacaagaacaagaaatcctgtgggcaattaatgacataattagaaacttctgtaaagatgtagtttcaaataagaaacttatgaaaaaactacaagagtcaagatttgacatcgtttttgcagatgcttatttaccctgtggtgagctgctggctgagctatttaacataccctttgtgtacagtcacagcttcagtcctggctactcatttgaaaggcacagtggaggatttattttccctccttcctacgtacctgttgttatgtcaaaattaagtgatcaaatgactttcatggagagggtaaaaaatatgctctatgtgctttattttgacttttggttccaaatatttaatatgaagaagtgggatcagttttacagtgaagttttaggaagacccactacattatctgagacaatgaggaaagctgacatatggcttatgcgaaactcctggaattttaaatttcctcatccattcttaccaaatgttgattttgttggaggactccactgcaaacctgccaaacccctacctaaggaaatggaggagtttgtacagagctctggagaaaatggtgttgtggtgttttctctggggtcaatggtcagtaacatgacagaagaaagggccaacgtaattgcaacagcccttgccaagatcccacaaaaggttctttggagatttgatgggaataaaccagatgccttaggtctcaatactcgactgtacaagtggataccccagaatgaccttctaggtcatccaaaaaccagagcttttataactcatggtggagccaatggcatctatgaggcaatctaccatgggatccctatggtgggcattccattgttttttgatcaacctgataatattgctcacatgaaggccaagggagcagctgttagagtggacttcaacacaatgtcgagtacagacctgctgaatgcactgaagacagtaattaatgatccttcatataaagagaatattatgaaattatcaagaattcaacatgatcaaccagtgaagcccctggatcgagcagtcttctggattgaatttgtcatgcgccacaaaggagccaaacatcttcgagttgcagcccacaacctcacctggttccagtaccactctttggatgtgattgggttcctgctggcttgtgtggcaaccgtgctatttatcatcacaaagtgttgtctgttttgtttctggaagtttgctagaaaaggaaagaagggaaaaagggattagttatatctgagatttgaagctggaaaacctgatagataggaatacttcagttgattccagcaataaatattgtgatgcaagatttctttcttcctgtgacaaaaaaaaatcctttcgaagtctaccttgtcaagtaaaaatttgtttttcagagatttaccacccagttaatggttagaaatattctgtggcaatgaagaaaacactaggggaaataaaaaataatataaagccatatgagcttgtattgaaatttgttgcacttatattgaaatgtgatcatggctcacttcagcctcaacttactaagctcaaga

SEQ ID NO: 197912 - DNA, 1424 bp, Homo sapiens
  Payload ID: 19034
  Gene Name: UDP glucuronosyltransferase 2 family, polypeptide B10
  Uniprot ID: P36537
  ENST ID: ENST00000458688
  CDS Start-End: 26-1360
aaaagaattatcacattgcacaaggatggctctgaaatggactacagttctgctgatacaactcagtttttactttagctctgggagttgtggaaaggtgctggtatgggccgcagaatacagcctttggatgaatatgaagacaatcctgaaagaacttgttcagagaggtcatgaggtgactgtactggcatcttcagcttccattctttttgatcccaacgactcatccactcttaaacttgaagtttatcctacatctttaactaaaactgaatttgagaatatcatcatgcaattggttaagagattgtcagaaattcaaaaagatacattttggttacctttttcacaagaacaagaaatcctgtgggcaattaatgacataattagaaacttctgtaaagatgtagtttcaaataagaaacttatgaaaaaactacaagagtcaagatttgacatcgtttttgcagatgcttatttaccctgtggaagacccactacattatctgagacaatgaggaaagctgacatatggcttatgcgaaactcctggaattttaaatttcctcatccattcttaccaaatgttgattttgttggaggactccactgcaaacctgccaaacccctacctaaggaaatggaggagtttgtacagagctctggagaaaatggtgttgtggtgttttctctggggtcaatggtcagtaacatgacagaagaaagggccaacgtaattgcaacagcccttgccaagatcccacaaaaggttctttggagatttgatgggaataaaccagatgccttaggtctcaatactcgactgtacaagtggataccccagaatgaccttctaggtcatccaaaaaccagagcttttataactcatggtggagccaatggcatctatgaggcaatctaccatgggatccctatggtgggcattccattgttttttgatcaacctgataatattgctcacatgaaggccaagggagcagctgttagagtggacttcaacacaatgtcgagtacagacctgctgaatgcactgaagacagtaattaatgatccttcatataaagagaatattatgaaattatcaagaattcaacatgatcaaccagtgaagcccctggatcgagcagtcttctggattgaatttgtcatgcgccacaaaggagccaaacatcttcgagttgcagcccacaacctcacctggttccagtaccactctttggatgtgattgggttcctgctggcttgtgtggcaaccgtgctatttatcatcacaaagtgttgtctgttttgtttctggaagtttgctagaaaaggaaagaagggaaaaagggattagttatatctgagatttgaagctggaaaacctgatagataggaatacttcagttgattccagcaat

SEQ ID NO: 197913 - DNA, 1931 bp, Homo sapiens; identical to SEQ ID NO: 197911
  Payload ID: 19034
  Gene Name: UDP glucuronosyltransferase 2 family, polypeptide B10
  Uniprot ID: P36537
  ENST ID: ENST00000615213
  CDS Start-End: 28-1614

SEQ ID NO: 197914 - DNA, 1424 bp, Homo sapiens; identical to SEQ ID NO: 197912
  Payload ID: 19034
  Gene Name: UDP glucuronosyltransferase 2 family, polypeptide B10
  Uniprot ID: P36537
  ENST ID: ENST00000627047
  CDS Start-End: 26-1360

SEQ ID NO: 197915 - DNA, 2088 bp, Homo sapiens
  Payload ID: 19035
  Gene Name: UDP glucuronosyltransferase 2 family, polypeptide B11
  Uniprot ID: O75310
  ENST ID: ENST00000446444
  CDS Start-End: 10-1599
tgcaccaggatgactctgaaatggacttcagttcttctgctgatacatctcagttgttactttagctctgggagttgtggaaaagtgctggtgtgggccgcagaatacagccattggatgaatatgaagacaatcctgaaagagcttgttcagagaggtcatgaggtgactgtactggcatcttcagcttccattctttttgatcccaatgatgcatccactcttaaatttgaagtttatcctacatctttaactaaaactgaatttgagaatatcatcatgcaacaggttaagagatggtcagacattcgaaaagatagcttttggttatatttttcacaagaacaagaaatcctgtgggaattatatgacatatttagaaacttctgtaaagatgtagtttcaaataagaaagttatgaaaaaactacaagagtcaagatttgacatcgtttttgcagatgctgtttttccctgtggtgagctgctggctgcgctacttaacatacggtttgtgtacagtctccgctttactcctggctacacaattgaaaggcacagtggaggactgattttccctccttcctacatacctattgttatgtcaaaattaagtgatcaaatgactttcatggagagggtaaaaaatatgatctatgtgctttattttgacttttggttccaaatgtctgatatgaagaagtgggatcagttttacagtgaagttttaggaagacccactaccttatttgagacaatgggaaaagctgacatatggcttatgcgaaactcctggagttttcaatttcctcatccattcttaccaaacgttgattttgttggaggattccactgcaaacctgccaaacccctacctaaggaaatggaggagtttgtacagagctctggagaaaatggtgttgtggtgttttctctggggtcagtgataagtaacatgacagcagaaagggccaatgtaattgcaacagcccttgccaagatcccacaaaaggttctgtggagatttgacgggaataaaccagatgccttaggtctcaatactcggctgtacaagtggataccccagaatgaccttctaggtcatccaaaaaccagagcttttataactcatggtggagccaatggcatctatgaggcaatctaccatgggatccctatggtgggcattccattgttttttgatcaacctgataacattgctcacatgaaggccaagggagcagctgttagattggacttcaacacaatgtcgagtacagacctgctgaatgcactgaagacagtaattaatgatcctttatataaagagaatattatgaaattatcaagaattcaacatgatcaaccagtaaagcccctggatcgagcagtcttctggattgaatttgtcatgccccacaaaggagccaaacaccttcgagttgcagcccatgacctcacctggttccagtaccactctttggatgtgattgggtttctgctggcctgtgtggcaactgtgatatttatcatcacaaagttttgtctgttttgtttctggaagtttgctagaaaagggaagaagggaaaaagagattagttatgtctgacatttgaagctggaaaaccagatagataggacaacttcagtttattccagcaagaaagaaaagattgttatgcaagatttctttcttcctgtgacaaaaaaaaaaaaaaaaaaaaaattttcaaatctaccttgtcaagtaaaaatttgtttttcagagatttaccacccaggtaatggttagaaatattttgtggcaatgaagaaaatactaggaaaattaaaaaataatataaagccatttgagctcatattgaaatttgttgcacttatattgagatttgttgtttgaattcacaagttacatgaaaaaatttactcagcttaactatatttcacacattttacataaacacaagaacattaagaagtctactgacagtatcagtagtcacatcctcagaataatttggcttcattttgaacaggattctgttgttttaactgttgctaaagaaactattacatagttaaattgta

SEQ ID NO: 197916 - DNA, 1833 bp, Homo sapiens
  Payload ID: 19035
  Gene Name: UDP glucuronosyltransferase 2 family, polypeptide B11
  Uniprot ID: O75310
  ENST ID: ENST00000615638
  CDS Start-End: 3-1592
ggatgactctgaaatggacttcagttcttctgctgatacatctcagttgttactttagctctgggagttgtggaaaagtgctggtgtgggccgcagaatacagccattggatgaatatgaagacaatcctgaaagagcttgttcagagaggtcatgaggtgactgtactggcatcttcagcttccattctttttgatcccaatgatgcatccactcttaaatttgaagtttatcctacatctttaactaaaactgaatttgagaatatcatcatgcaacaggttaagagatggtcagacattcgaaaagatagcttttggttatatttttcacaagaacaagaaatcctgtgggaattatatgacatatttagaaacttctgtaaagatgtagtttcaaataagaaagttatgaaaaaactacaagagtcaagatttgacatcgtttttgcagatgctgtttttccctgtggtgagctgctggctgcgctacttaacatacggtttgtgtacagtctccgctttactcctggctacacaattgaaaggcacagtggaggactgattttccctccttcctacatacctattgttatgtcaaaattaagtgatcaaatgactttcatggagagggtaaaaaatatgatctatgtgctttattttgacttttggttccaaatgtctgatatgaagaagtgggatcagttttacagtgaagttttaggaagacccactaccttatttgagacaatgggaaaagctgacatatggcttatgcgaaactcctggagttttcaatttcctcatccattcttaccaaacgttgattttgttggaggattccactgcaaacctgccaaacccctacctaaggaaatggaggagtttgtacagagctctggagaaaatggtgttgtggtgttttctctggggtcagtgataagtaacatgacagcagaaagggccaatgtaattgcaacagcccttgccaagatcccacaaaaggttctgtggagatttgacgggaataaaccagatgccttaggtctcaatactcggctgtacaagtggataccccagaatgaccttctaggtcatccaaaaaccagagcttttataactcatggtggagccaatggcatctatgaggcaatctaccatgggatccctatggtgggcattccattgttttttgatcaacctgataacattgctcacatgaaggccaagggagcagctgttagattggacttcaacacaatgtcgagtacagacctgctgaatgcactgaagacagtaattaatgatcctttatataaagagaatattatgaaattatcaagaattcaacatgatcaaccagtaaagcccctggatcgagcagtcttctggattgaatttgtcatgccccacaaaggagccaaacaccttcgagttgcagcccatgacctcacctggttccagtaccactctttggatgtgattgggtttctgctggcctgtgtggcaactgtgatatttatcatcacaaagttttgtctgttttgtttctggaagtttgctagaaaagggaagaagggaaaaagagattagttatgtctgacatttgaagctggaaaaccagatagataggacaacttcagtttattccagcaagaaagaaaagattgttatgcaagatttctttcttcctgtgacaaaaaaaaaaatcttttcgaaatctaccttgtcaagtaaaaatttgtttttcagagatttaccacccagttaatggttagaaatattttgtggcaatgaagaaaacactagggaaaataaaaaataacataaagcc

SEQ ID NO: 197917 - DNA, 1525 bp, Homo sapiens
  Payload ID: 19035
  Gene Name: UDP glucuronosyltransferase 2 family, polypeptide B11
  ENST ID: ENST00000620779
  CDS Start-End: 3-1010
ggatgactctgaaatggacttcagttcttctgctgatacatctcagttgttactttagctctgggagttgtggaaaagtgctggtgtgggccgcagaatacagccattggatgaatatgaagacaatcctgaaagagcttgttcagagaggtcatgaggtgactgtactggcatcttcagcttccattctttttgatcccaatgatgcatccactcttaaatttgaagtttatcctacatctttaactaaaactgaatttgagaatatcatcatgcaacaggttaagagatggtcagacattcgaaaagatagcttttggttatatttttcacaagaacaagaaatcctgtgggaattatatgacatatttagaaacttctgtaaagatgtagtttcaaataagaaagttatgaaaaaactacaagagtcaagatttgacatcgtttttgcagatgctgtttttccctgtggtgagctgctggctgcgctacttaacatacggtttgtgtacagtctccgctttactcctggctacacaattgaaaggcacagtggaggactgattttccctccttcctacatacctattgttatgtcaaaattaagtgatcaaatgactttcatggagagggtaaaaaatatgatctatgtgctttattttgacttttggttccaaatgtctgatatgaagaagtgggatcagttttacagtgaagttttaggaagacccactaccttatttgagacaatgggaaaagctgacatatggcttatgcgaaactcctggagttttcaatttcctcatccattcttaccaaacgttgattttgttggaggattccactgcaaacctgccaaacccctacctaaggaaatggaggagtttgtacagagctctggagaaaatggtgttgtggtgttttctctggggtcagtgataagtaacatgacagcagaaagggccaatgtaattgcaacagcccttgccaagatcccacaaaagatataaagagaatattatgaaattatcaagaattcaacatgatcaaccagtaaagcccctggatcgagcagtcttctggattgaatttgtcatgccccacaaaggagccaaacaccttcgagttgcagcccatgacctcacctggttccagtaccactctttggatgtgattgggtttctgctggcctgtgtggcaactgtgatatttatcatcacaaagttttgtctgttttgtttctggaagtttgctagaaaagggaagaagggaaaaagagattagttatgtctgacatttgaagctggaaaaccagatagataggacaacttcagtttattccagcaagaaagaaaagattgttatgcaagatttctttcttcctgtgacaaaaaaaaaaatcttttcgaaatctaccttgtcaagtaaaaatttgtttttcagagatttaccacccagttaatggttagaaatattttgtggcaatgaagaaaacactagggaaaataaaaaataacataaagcc

SEQ ID NO: 197918 - DNA, 2077 bp, Homo sapiens
  Payload ID: 19036
  Gene Name: UDP glucuronosyltransferase 2 family, polypeptide B15
  Uniprot ID: P54855
  ENST ID: ENST00000338206
  CDS Start-End: 11-1603
taagaccaggatgtctctgaaatggacgtcagtctttctgctgatacagctcagttgttactttagctctggaagctgtggaaaggtgctagtgtggcccacagaatacagccattggataaatatgaagacaatcctggaagagcttgttcagaggggtcatgaggtgactgtgttgacatcttcggcttctactcttgtcaatgccagtaaatcatctgctattaaattagaagtttatcctacatctttaactaaaaattatttggaagattctcttctgaaaattctcgatagatggatatatggtgtttcaaaaaatacattttggtcatatttttcacaattacaagaattgtgttgggaatattatgactacagtaacaagctctgtaaagatgcagttttgaataagaaacttatgatgaaactacaagagtcaaagtttgatgtcattctggcagatgcccttaatccctgtggtgagctactggctgaactatttaacataccctttctgtacagtcttcgattctctgttggctacacatttgagaagaatggtggaggatttctgttccctccttcctatgtacctgttgttatgtcagaattaagtgatcaaatgattttcatggagaggataaaaaatatgatacatatgctttattttgacttttggtttcaaatttatgatctgaagaagtgggaccagttttatagtgaagttctaggaagacccactacattatttgagacaatggggaaagctgaaatgtggctcattcgaacctattgggattttgaatttcctcgcccattcttaccaaatgttgattttgttggaggacttcactgtaaaccagccaaacccctgcctaaggaaatggaagagtttgtgcagagctctggagaaaatggtattgtggtgttttctctggggtcgatgatcagtaacatgtcagaagaaagtgccaacatgattgcatcagcccttgcccagatcccacaaaaggttctatggagatttgatggcaagaagccaaatactttaggttccaatactcgactgtacaagtggttaccccagaatgaccttcttggtcatcccaaaaccaaagcttttataactcatggtggaaccaatggcatctatgaggcgatctaccatgggatccctatggtgggcattcccttgtttgcggatcaacatgataacattgctcacatgaaagccaagggagcagccctcagtgtggacatcaggaccatgtcaagtagagatttgctcaatgcattgaagtcagtcattaatgaccctgtctataaagagaatgtcatgaaattatcaagaattcatcatgaccaaccaatgaagcccctggatcgagcagtcttctggattgagtttgtcatgcgccacaaaggagccaagcaccttcgagtcgcagctcacaacctcacctggatccagtaccactctttggatgtgatagcattcctgctggcctgcgtggcaactgtgatatttatcatcacaaaattttgcctgttttgtttccgaaagcttgccaaaaaaggaaagaagaagaaaagagattagttatatcaaaagcctgaagtggaatgactgaaagatgggactcctcctttatttcagcatggagggttttaaatggaggatttcctttttcctgtgacaaaacatcttttcacaacttaccttgttaagacaaaatttattttccagggatttaatacgtactttagctgaattattctatgtcaatgatttttaagctatgaaaaatacaatggggggaaggatagcatttggagatatacctaatgttaaatgacgagttactggatgcagcacgccaacatggcacatgtatacatatgtagctaacctgcacgttgtgcacatgtaccctaaaacttaaagtataatttaaaaaaagcaaaaaaaaaaaatacaactcttttttttaaaccaggaaggaaaatgtgaacatggaaacaacttctagtattggatctgaaaataaagtgtcatccaagccataaaaaaaaa

SEQ ID NO: 197919 - DNA, 2112 bp, Homo sapiens
  Payload ID: 19036
  Gene Name: UDP glucuronosyltransferase 2 family, polypeptide B15
  ENST ID: ENST00000611777
  CDS Start-End: 605-1603
taagaccaggatgtctctgaaatggacgtcagtctttctgctgatacagctcagttgttactttagctctggaagctgtggaaaggtgctagtgtggcccacagaatacagccattggataaatatgaagacaatcctggaagagcttgttcagaggggtcatgaggtgactgtgttgacatcttcggcttctactcttgtcaatgccagtaaatcatctgctattaaattagaagtttatcctacatctttaactaaaaatgatttggaagattctcttctgaaaattctcgatagatggatatatggtgtttcaaaaaatacattttggtcatatttttcacaattacaagaattgtgttgggaatattatgactacagtaacaagctctgtaaagatgcagttttgaataagaaacttatgatgaaactacaagagtcaaagtttgatgtcattctggcagatgcccttaatccctgtggtgagctactggctgaactatttaacataccctttctgtacagtcttcgattctctgttggctacacatttgagaagaatggtggaggatttctgttccctccttcctatgtacctgttgttatgtcagaattaagtgatcaaatgattttcatggagaggataaaaaatatgatacatatgctttattttgacttttggtttcaaatttatgatctgaagaagtgggaccagttttatagtgaagttctaggaagacccactacattatttgagacaatggggaaagctgaaatgtggctcattcgaacctattgggattttgaatttcctcgcccattcttaccaaatgttgattttgttggaggacttcactgtaaaccagccaaacccctgcctaaggaaatggaagagtttgtgcagagctctggagaaaatggtattgtggtgttttctctggggtcgatgatcagtaacatgtcagaagaaagtgccaacatgattgcatcagcccttgcccagatcccacaaaaggttctatggagatttgatggcaagaagccaaatactttaggttccaatactcgactgtacaagtggttaccccagaatgaccttcttggtcatcccaaaaccaaagcttttataactcatggtggaaccaatggcatctatgaggcgatctaccatgggatccctatggtgggcattcccttgtttgcggatcaacatgataacattgctcacatgaaagccaagggagcagccctcagtgtggacatcaggaccatgtcaagtagagatttgctcaatgcattgaagtcagtcattaatgaccctgtctataaagagaatgtcatgaaattatcaagaattcatcatgaccaaccaatgaagcccctggatcgagcagtcttctggattgagtttgtcatgcgccacaaaggagccaagcaccttcgagtcgcagctcacaacctcacctggatccagtaccactctttggatgtgatagcattcctgctggcctgcgtggcaactgtgatatttatcatcacaaaattttgcctgttttgtttccgaaagcttgccaaaaaaggaaagaagaagaaaagagattagttatatcaaaagcctgaagtggaatgactgaaagatgggactcctcctttatttcagcatggagggttttaaatggaggatttcctttttcctgtgacaaaacatcttttcacaacttaccttgttaagacaaaatttattttccagggatttaatacgtactttagctggaattattctatgtcaatgatttttaagctatgaaaaatacaatggggggaaggatagcatttggagatatacctaatgttaaatgacgagttactggatgcagcacgccaacatggcacatgtatacatatgtagctaacctgcacgttgtgcacatgtaccctaaaacttaaagtataatttaaaaaaagcaaaaaaaaaaaaatacaactcttttttttaaaccaggaaggaaaatgtgaacatggaaacaacttctagtattggatctgaaaataaagtgtcatccaagccataaaaaaaaaagaaaagaaaaataaaaataatataaaacctta

SEQ ID NO: 197920 - DNA, 1846 bp, Homo sapiens
  Payload ID: 19036
  Gene Name: UDP glucuronosyltransferase 2 family, polypeptide B15
  Uniprot ID: P54855
  ENST ID: ENST00000616841
  CDS Start-End: 1-1593
atgtctctgaaatggacgtcagtctttctgctgatacagctcagttgttactttagctctggaagctgtggaaaggtgctagtgtggcccacagaatacagccattggataaatatgaagacaatcctggaagagcttgttcagaggggtcatgaggtgactgtgttgacatcttcggcttctactcttgtcaatgccagtaaatcatctgctattaaattagaagtttatcctacatctttaactaaaaattatttggaagattctcttctgaaaattctcgatagatggatatatggtgtttcaaaaaatacattttggtcatatttttcacaattacaagaattgtgttgggaatattatgactacagtaacaagctctgtaaagatgcagttttgaataagaaacttatgatgaaactacaagagtcaaagtttgatgtcattctggcagatgcccttaatccctgtggtgagctactggctgaactatttaacataccctttctgtacagtcttcgattctctgttggctacacatttgagaagaatggtggaggatttctgttccctccttcctatgtacctgttgttatgtcagaattaagtgatcaaatgattttcatggagaggataaaaaatatgatacatatgctttattttgacttttggtttcaaatttatgatctgaagaagtgggaccagttttatagtgaagttctaggaagacccactacattatttgagacaatggggaaagctgaaatgtggctcattcgaacctattgggattttgaatttcctcgcccattcttaccaaatgttgattttgttggaggacttcactgtaaaccagccaaacccctgcctaaggaaatggaagagtttgtgcagagctctggagaaaatggtattgtggtgttttctctggggtcgatgatcagtaacatgtcagaagaaagtgccaacatgattgcatcagcccttgcccagatcccacaaaaggttctatggagatttgatggcaagaagccaaatactttaggttccaatactcgactgtacaagtggttaccccagaatgaccttcttggtcatcccaaaaccaaagcttttataactcatggtggaaccaatggcatctatgaggcgatctaccatgggatccctatggtgggcattcccttgtttgcggatcaacatgataacattgctcacatgaaagccaagggagcagccctcagtgtggacatcaggaccatgtcaagtagagatttgctcaatgcattgaagtcagtcattaatgaccctgtctataaagagaatgtcatgaaattatcaagaattcatcatgaccaaccaatgaagcccctggatcgagcagtcttctggattgagtttgtcatgcgccacaaaggagccaagcaccttcgagtcgcagctcacaacctcacctggatccagtaccactctttggatgtgatagcattcctgctggcctgcgtggcaactgtgatatttatcatcacaaaattttgcctgttttgtttccgaaagcttgccaaaaaaggaaagaagaagaaaagagattagttatatcaaaagcctgaagtggaatgactgaaagatgggactcctcctttatttcagcatggagggttttaaatggaggatttcctttttcctgtgacaaaacatcttttcacaacttaccttgttaagacaaaatttaaaaacgtcttttcacaacttaccctgttaagtcaaaatttattttccaggaatttaatatgtactttagttggaattattctatgtcaatgatttttaagctatgaaaaataat

SEQ ID NO: 197921 - DNA, 2077 bp, Homo sapiens
  Payload ID: 19037
  Gene Name: UDP glucuronosyltransferase 2 family, polypeptide B17
  Uniprot ID: O75795
  ENST ID: ENST00000317746
  CDS Start-End: 44-1636
gaaagaaacaacaactggaaaagaagcactgcataagaccaggatgtctctgaaatggatgtcagtctttctgctgatgcagctcagttgttactttagctctgggagttgtggaaaggtgctggtgtggcccacagaatacagccattggataaatatgaagacaatcctggaagagcttgttcagaggggtcatgaggtgattgtgttgacatcttcggcttctattcttgtcaatgccagtaaatcatctgctattaaattagaagtttatcctacatctttaactaaaaatgatttggaagatttttttatgaaaatgttcgatagatggacatatagtatttcaaaaaatacattttggtcatatttttcacaactacaagaattgtgttgggaatattctgactataatataaagctctgtgaagatgcagttttgaacaagaaacttatgagaaaactacaagagtcaaaatttgatgtccttctggcagatgccgttaatccctgtggtgagctgctggctgagctacttaacataccctttctgtacagtctccgcttctctgttggctacacagttgagaagaatggtggaggatttctgttccctccttcctatgtacctgttgttatgtcagaattaagtgatcaaatgattttcatggagaggataaaaaatatgatatatatgctttattttgacttttggtttcaagcatatgatctgaagaagtgggaccagttttatagtgaagttctaggaagacccactacattatttgagacaatggggaaagctgaaatgtggctcattcgaacctattgggattttgaatttcctcgcccattcttaccaaatgttgattttgttggaggacttcactgtaaaccagccaaacccttgcctaaggaaatggaagagtttgtgcagagctctggagaaaatggtattgtggtgttttctctggggtcgatgatcagtaacatgtcagaagaaagtgccaacatgattgcatcagcccttgcccagatcccacaaaaggttctatggagatttgatggcaagaagccaaatactttaggttccaatactcgactgtataagtggttaccccagaatgaccttcttggtcatcccaaaaccaaagcttttataactcatggtggaaccaatggcatctatgaggcaatctaccatgggatccctatggtgggcattcccttgtttgcggatcaacatgataacattgctcacatgaaagccaagggagcagccctcagtgtggacatcaggaccatgtcaagtagagatttgctcaatgcattgaagtcagtcattaatgaccctatctataaagagaatatcatgaaattatcaagaattcatcatgatcaaccggtgaagcccctggatcgagcagtcttctggattgagtttgtcatgcgccataaaggagccaagcaccttcgggtcgcagcccacaacctcacctggatccagtaccactctttggatgtgatagcattcctgctggcctgcgtggcaactatgatatttatgatcacaaaatgttgcctgttttgtttccgaaagcttgccaaaacaggaaagaagaagaaaagggattagttatatcaaaagcctgaagtggaatgaccaaaagatgggactcctcctttattccagcatggagggttttaaatggaggatttcctttttcctgcgacaaaacgtcttttcacaacttaccctgttaagtcaaaatttattttccaggaatttaatatgtactttagttggaattattctatgtcaatgatttttaagctatgaaaaataataatataaaaccttatgggcttatattgaaatttattattctaatccaaaagttaccccacacaaaagttactgagcttccttatgtttcacacattgtatttgaacacaaaacattaacaactccactcatagtatcaacattgttttgcaaatactcagaatattttggcttcattttgagcagaatttttgtttttaattttgccaatgaaatcttcaataattaaa

SEQ ID NO: 197922 - DNA, 1833 bp, Homo sapiens
  Payload ID: 19038
  Gene Name: UDP glucuronosyltransferase 2 family, polypeptide B28
  Uniprot ID: Q9BY64
  ENST ID: ENST00000335568
  CDS Start-End: 3-1592
ggatggctctgaagtggacttcagttcttctgctgatacatctcggttgttactttagctctgggagttgtggaaaggtgctggtgtggaccggtgaatacagccattggatgaatatgaagacaatcctgaaagagcttgttcagagaggtcatgaggtgactgtactggcatcttcagcttccattctttttgatcccaatgacgcattcactcttaaactcgaagtttatcctacatctttaactaaaactgaatttgagaatatcatcatgcaacaggttaagagatggtcagacattcaaaaagatagcttttggttatatttttcacaagaacaagaaatcctgtgggaatttcatgacatatttagaaacttctgtaaagatgtagtttcaaataagaaagttatgaaaaaactacaagagtcaagatttgacatcatttttgcagatgctttttttccttgtggtgagctgctggctgcgctacttaacataccgtttgtgtacagtctctgcttcactcctggctacacaattgaaaggcacagtggaggactgattttccctccttcctacatacctgttgttatgtcaaaattaagtgatcaaatgactttcatggagagggtaaaaaacatgatctatgtgctttattttgacttttggttccaaatgtgtgatatgaagaagtgggatcagttttacagtgaagttttaggaagacccactaccttatttgagacaatggggaaagctgacatatggcttatgcgaaactcctggagttttcaatttcctcatccattcttaccaaacattgattttgttggaggactccactgcaaacctgccaaacccctacctaaggaaatggaggaatttgtacagagctctggtgaaaatggtgttgtggtgttttctctggggtcagtgataagtaacatgacagcagaaagggccaacgtaattgcaacagcccttgccaagatcccacaaaaggttctgtggagatttgatgggaataaaccagatgccttaggtctcaatactcggctgtataagtggataccccagaatgaccttctaggtcttccaaaaaccagagcttttataactcatggtggagccaatggcatctatgaggcaatctaccatgggatccctatggtaggcattccattgttttgggatcaacctgataacattgctcacatgaaggccaagggagcagctgttagactggacttccacacaatgtcgagtacagacctgctgaatgcactgaagacagtaattaatgatccttcatataaagagaatgttatgaaattatcaataattcaacatgatcaaccagtaaagcccctgcatcgagcagtcttctggattgaatttgtgatgtgccacaaaggagccaaacaccttcgagttgcagcccgtgacctcacctggttccagtaccactctttggatgtgattgggtttctgctggcctgtgtggcaactgtgatatttgtcgtcacaaagttttgtctgttttgtttctggaagtttgctagaaaagggaagaagggaaaaagagattagttatgtctgacatttgaagctggaaaaccagatagatgggttgacatcagtttattccagcaagaaagaaaagattgttatgcaagatttctttcttcctgtgacaaaaaaaaaaacttttcaaaatctaccttgtcaagtaaaaatttgtttttcagagatttaccacccaggtaatggttagaaatattctgtggcaatgaagaaaacactagggaaaataaaaaataatataaagcca

SEQ ID NO: 197923 - DNA, 1525 bp, Homo sapiens
  Payload ID: 19038
  Gene Name: UDP glucuronosyltransferase 2 family, polypeptide B28
  Uniprot ID: Q9BY64
  ENST ID: ENST00000511240
  CDS Start-End: 3-1010
ggatggctctgaagtggacttcagttcttctgctgatacatctcggttgttactttagctctgggagttgtggaaaggtgctggtgtggaccggtgaatacagccattggatgaatatgaagacaatcctgaaagagcttgttcagagaggtcatgaggtgactgtactggcatcttcagcttccattctttttgatcccaatgacgcattcactcttaaactcgaagtttatcctacatctttaactaaaactgaatttgagaatatcatcatgcaacaggttaagagatggtcagacattcaaaaagatagcttttggttatatttttcacaagaacaagaaatcctgtgggaatttcatgacatatttagaaacttctgtaaagatgtagtttcaaataagaaagttatgaaaaaactacaagagtcaagatttgacatcatttttgcagatgctttttttccttgtggtgagctgctggctgcgctacttaacataccgtttgtgtacagtctctgcttcactcctggctacacaattgaaaggcacagtggaggactgattttccctccttcctacatacctgttgttatgtcaaaattaagtgatcaaatgactttcatggagagggtaaaaaacatgatctatgtgctttattttgacttttggttccaaatgtgtgatatgaagaagtgggatcagttttacagtgaagttttaggaagacccactaccttatttgagacaatggggaaagctgacatatggcttatgcgaaactcctggagttttcaatttcctcatccattcttaccaaacattgattttgttggaggactccactgcaaacctgccaaacccctacctaaggaaatggaggaatttgtacagagctctggtgaaaatggtgttgtggtgttttctctggggtcagtgataagtaacatgacagcagaaagggccaacgtaattgcaacagcccttgccaagatcccacaaaagatataaagagaatgttatgaaattatcaataattcaacatgatcaaccagtaaagcccctgcatcgagcagtcttctggattgaatttgtgatgtgccacaaaggagccaaacaccttcgagttgcagcccgtgacctcacctggttccagtaccactctttggatgtgattgggtttctgctggcctgtgtggcaactgtgatatttgtcgtcacaaagttttgtctgttttgtttctggaagtttgctagaaaagggaagaagggaaaaagagattagttatgtctgacatttgaagctggaaaaccagatagatgggttgacatcagtttattccagcaagaaagaaaagattgttatgcaagatttctttcttcctgtgacaaaaaaaaaaacttttcaaaatctaccttgtcaagtaaaaatttgtttttcagagatttaccacccaggtaatggttagaaatattctgtggcaatgaagaaaacactagggaaaataaaaaataatataaagcca

SEQ ID NO: 197924 - DNA, 1854 bp, Homo sapiens
  Payload ID: 19038
  Gene Name: UDP glucuronosyltransferase 2 family, polypeptide B28
  ENST ID: ENST00000612433
  CDS Start-End: 15-1604
tgcattgcaccaggatggctctgaagtggacttcagttcttctgctgatacatctcggttgttactttagctctgggagttgtggaaaggtgctggtgtggaccggtgaatacagccattggatgaatatgaagacaatcctgaaagagcttgttcagagaggtcatgaggtgactgtactggcatcttcagcttccattctttttgatcccaatgacgcattcactcttaaactcgaagtttatcctacatctttaactaaaactgaatttgagaatatcatcatgcaacaggttaagagatggtcagacattcaaaaagatagcttttggttatatttttcacaagaacaagaaatcctgtgggaatttcatgacatatttagaaacttctgtaaagatgtagtttcaaataagaaagttatgaaaaaactacaagagtcaagatttgacatcatttttgcagatgctttttttccttgtggtgagctgctggctgcgctacttaacataccgtttgtgtacagtctctgcttcactcctggctacacaattgaaaggcacagtggaggactgattttccctccttcctacatacctgttgttatgtcaaaattaagtgatcaaatgactttcatggagagggtaaaaaacatgatctatgtgctttattttgacttttggttccaaatgtgtgatatgaagaagtgggatcagttttacagtgaagttttaggaagacccactaccttatttgagacaatggggaaagctgacatatggcttatgcgaaactcctggagttttcaatttcctcatccattcttaccaaacattgattttgttggaggactccactgcaaacctgccaaacccctacctaaggaaatggaggaatttgtacagagctctggtgaaaatggtgttgtggtgttttctctggggtcagtgataagtaacatgacagcagaaagggccaacgtaattgcaacagcccttgccaagatcccacaaaaggttctgtggagatttgatgggaataaaccagatgccttaggtctcaatactcggctgtataagtggataccccagaatgaccttctaggtcatccaaaaaccagagcttttataactcatggtggagccaatggcatctatgaggcaatctaccatgggatccctatattgggcattccattgtttgccgatcaacctgataatattgctcacatgaaggccaagggagcagctgttagattggacttcaacacaatgtcgagtacagacttgttgaatgcactgaagacagtaattaatgttcctttatataaagagagtgttatgaaattatcaagaattcaacatgatcaaccagtgaagcccctggatcgagcagtcttctggattgaatttgtcatgcgccacaaaggagccaaacaccttcgagttgcagcccgtgacctcacctggttccagtaccactctttggatgtgattgggtttctgctggcctgtgtggcaactgtgacatttatcatcacaaagtgttgtctgttttgtttctggaagtttactagaaaagtgaagaaggaaaaaagggattagttatgtccgacatttgaagctggaaaacctgatagatgggatgacttcagtttattccagcaagaaagattgtgatgaaagatttctttcttcctatgacaaaaaaaaaaatacaaaaaaaaatctttttgaaatctaccttgtcaagtgaaaatttgtttttcagagatttaccacccaagtaatggttagaaatattttgtggcaatgaggaaaacactagggaaaataaaaaataatataaagccat

SEQ ID NO: 197925 - DNA, 2103 bp, Homo sapiens
  Payload ID: 19039
  Gene Name: UDP glucuronosyltransferase 2 family, polypeptide B4
  Uniprot ID: P06133
  ENST ID: ENST00000305107
  CDS Start-End: 48-1634
gacagaaaggagcagcaactggaaaacaagcattgcattgcatcaggatgtctatgaaatggacttcagctcttctgctgatacagctgagctgttactttagctctgggagttgtggaaaggtgctggtgtggcccacagaattcagccactggatgaatataaagacaatcctggatgaacttgtccagagaggtcatgaggtgactgtattggcatcttcagcttccatttctttcgatcccaacagcccatctactcttaaatttgaagtttatcctgtatctttaactaaaactgagtttgaggatattatcaagcagctggttaagagatgggcagaacttccaaaagacacattttggtcatatttttcacaagtacaagaaatcatgtggacatttaatgacatacttagaaagttctgtaaggatatagtttcaaataagaaacttatgaagaaactacaggagtcaagatttgatgttgttcttgcagatgctgttttcccctttggtgagctgctggccgagttacttaaaataccctttgtctacagcctccgcttctctcctggctacgcaattgaaaagcatagtggaggacttctgttccctccttcctatgtgcctgttgttatgtcagaactaagtgaccaaatgactttcatagagagggtaaaaaatatgatctatgtgctttattttgaattttggttccaaatatttgacatgaagaagtgggatcagttctacagtgaagttctaggaagacccactacgttatctgagacaatggcaaaagctgacatatggcttattcgaaactactgggattttcaatttcctcacccactcttaccaaatgttgagttcgttggaggactccactgcaaacctgccaaacccctaccgaaggaaatggaagagtttgtccagagctctggagaaaatggtgttgtggtgttttctctggggtcgatggtcagtaacacgtcagaagaaagggccaatgtaattgcatcagcccttgccaagatcccacaaaaggttctgtggagatttgatgggaataaaccagatactttaggactcaatactcggctgtacaagtggataccccagaatgatcttcttggtcacccaaaaaccagagcttttataactcatggtggagccaatggcatctatgaggcaatctaccatggaatccctatggtgggcgttccattgtttgcagatcaacctgataacattgcacacatgaaggccaagggagcagctgttagtttggacttccacacaatgtcgagtacagacttactcaatgcactgaagacagtaattaatgatcctttatataaagagaatgctatgaaattatcaagaattcatcatgatcaaccagtgaagccccttgatcgagcagtcttctggattgaatttgtcatgcgccataaaggagccaagcaccttcgggttgcagcccacgacctcacctggttccagtaccactctttggatgtgactgggttcctgctggcctgtgtggcaactgtgatattcatcatcacaaaatgtctgttttgtgtctggaagtttgttagaacaggaaagaaggggaaaagagattaattacgtctgaggctggaagctgggaaacccaataaatgaactcctttagtttattacaacaagaagacgttgtgatacaagagattcctttcttcttgtgacaaaacatctttcaaaacttaccttgtcaagtcaaaatttgttttagtacctgtttaaccattagaaatatttcatgtcaaggaggaaaacattagggaaaacaaaaatgatataaagccatatgaggttatattgaaatgtattgagcttatattgaaatttattgttccaattcacaggttacatgaaaaaaaatttactaagcttaactacatgtcacacattgtacatggaaacaagaacattaagaagtccactgacagtatcagtactgttttgcaaatactcagcatactttggatccatttcatgcaggattgtgttgttttaactgttgttgaggaagctaataaataattaaattgta

SEQ ID NO: 197926 - DNA, 596 bp, Homo sapiens
  Payload ID: 19039
  Gene Name: UDP glucuronosyltransferase 2 family, polypeptide B4
  ENST ID: ENST00000510114
  CDS Start-End: 434-596
attctcctgcctcagactccggagtagctgggactacaggcgccggccaccaagcctggctaattttttgtatttttagtagagatggggtttcaccgtgttagccaggatggtctggatctcctgacctcttgatccacccgccttggcctcccaaagtgctgggattaacggtgtgagccacctcgcccagcctggagccctttctttaatataaacataaatgttagtcaacttgtttaaatataaacatgtgagctgcttgagcacagggactacatcataatgttttttgctctcttacatgtctcatcaacgaatggattagtgtaaaagttacattttaacttcttgactgatttatactggatgtcaccatgagaaatgacagaaaggagcagcaactggaaaacaagcattgcattgcatcaggatgtctatgaaatggacttcagctcttctgctgatacagctgagctgttactttagctctgggagttgtggaaaggtgctggtgtggcccacagaattcagccactggatgaatataaagacaatcctggatgaacttgtccagagaggtcatgaggtgactg

SEQ ID NO: 197927 - DNA, 1836 bp, Homo sapiens
  Payload ID: 19039
  Gene Name: UDP glucuronosyltransferase 2 family, polypeptide B4
  Uniprot ID: P06133
  ENST ID: ENST00000512583
  CDS Start-End: 1-1110
atgtctatgaaatggacttcagctcttctgctgatacagctgagctgttactttagctctgggagttgtggaaaggtgctggtgtggcccacagaattcagccactggatgaatataaagacaatcctggatgaacttgtccagagaggtcatgaggtgactgtattggcatcttcagcttccatttctttcgatcccaacagcccatctactcttaaatttgaagtttatcctgtatctttaactaaaactgagtttgaggatattatcaagcagctggttaagagatgggcagaacttccaaaagacacattttggtcatatttttcacaagtacaagaaatcatgtggacatttaatgacatacttagaaagttctgtaaggatatagtttcaaataagaaacttatgaagaaactacaggagtcaagatttgatgttgttcttgcagatgctgttttcccctttggtgagctgctggccgagttacttaaaataccctttgtctacagcctccgcttctctcctggctacgcaattgaaaagcatagtggaggacttctgttccctccttcctatgtgcctgttgttatgtcagaactaagtgaccaaatgactttcatagagagggtaaaaaatatgatctatgtgctttattttgaattttggttccaaatatttgacatgaagaagtgggatcagttctacagtgaagttctaggaagacccactacgttatctgagacaatggcaaaagctgacatatggcttattcgaaactactgggattttcaatttcctcacccactcttaccaaatgttgagttcgttggaggactccactgcaaacctgccaaacccctaccgaaggaaatggaagagtttgtccagagctctggagaaaatggtgttgtggtgttttctctggggtcgatggtcagtaacacgtcagaagaaagggccaatgtaattgcatcagcccttgccaagatcccacaaaaggttctgtggagatttgatgggaataaaccagatactttaggactcaatactcggctgtacaagtggataccccagaatgatcttcttgatataaagagaatgctatgaaattatcaagaattcatcatgatcaaccagtgaagccccttgatcgagcagtcttctggattgaatttgtcatgcgccataaaggagccaagcaccttcgggttgcagcccacgacctcacctggttccagtaccactctttggatgtgactgggttcctgctggcctgtgtggcaactgtgatattcatcatcacaaaatgtctgttttgtgtctggaagtttgttagaacaggaaagaaggggaaaagagattaattacgtctgaggctggaagctgggaaacccaataaatgaactcctttagtttattacaacaagaagacgttgtgatacaagagattcctttcttcttgtgacaaaacatctttcaaaacttaccttgtcaagtcaaaatttgttttagtacctgtttaaccattagaaatatttcatgtcaaggaggaaaacattagggaaaacaaaaatgatataaagccatatgaggttatattgaaatgtattgagcttatattgaaatttattgttccaattcacaggttacatgaaaaaaaatttactaagcttaactacatgtcacacattgtacatggaaacaagaacattaagaagtccactgacagtatcagtactgttttgcaaatactcagcatactttggatccatttcatgcaggattgtgttgttttaactgttgttgaggaagctaataaataattaaattgta

SEQ ID NO: 197928 - DNA, 1887 bp, Homo sapiens
  Payload ID: 19040
  Gene Name: UDP glucuronosyltransferase 2 family, polypeptide B7
  Uniprot ID: P16662
  ENST ID: ENST00000305231
  CDS Start-End: 47-1636
acagaaaggaacagcaactggaaaacaagcattgcattgcaccaggatgtctgtgaaatggacttcagtaattttgctaatacaactgagcttttgctttagctctgggaattgtggaaaggtgctggtgtgggcagcagaatacagccattggatgaatataaagacaatcctggatgagcttattcagagaggtcatgaggtgactgtactggcatcttcagcttccattctttttgatcccaacaactcatccgctcttaaaattgaaatttatcccacatctttaactaaaactgagttggagaatttcatcatgcaacagattaagagatggtcagaccttccaaaagatacattttggttatatttttcacaagtacaggaaatcatgtcaatatttggtgacataactagaaagttctgtaaagatgtagtttcaaataagaaatttatgaaaaaagtacaagagtcaagatttgacgtcatttttgcagatgctatttttccctgtagtgagctgctggctgagctatttaacataccctttgtgtacagtctcagcttctctcctggctacacttttgaaaagcatagtggaggatttattttccctccttcctacgtacctgttgttatgtcagaattaactgatcaaatgactttcatggagagggtaaaaaatatgatctatgtgctttactttgacttttggttcgaaatatttgacatgaagaagtgggatcagttttatagtgaagttctaggaagacccactacattatctgagacaatggggaaagctgacgtatggcttattcgaaactcctggaattttcagtttccatatccactcttaccaaatgttgattttgttggaggactccactgcaaacctgccaaacccctgcctaaggaaatggaagactttgtacagagctctggagaaaatggtgttgtggtgttttctctggggtcaatggtcagtaacatgacagaagaaagggccaacgtaattgcatcagccctggcccagatcccacaaaaggttctgtggagatttgatgggaataaaccagataccttaggtctcaatactcggctctacaagtggataccccagaatgaccttctaggtcatccaaagaccagagcttttataactcatggtggagccaatggcatctacgaggcaatctaccatgggatccctatggtggggattccattgtttgccgatcaacctgataacattgctcacatgaaggccaggggagcagctgttagagtggacttcaacacaatgtcgagtacagacttgctgaatgcattgaagagagtaattaatgatccttcatataaagagaatgttatgaaattatcaagaattcaacatgatcaaccagtgaagcccctggatcgagcagtcttctggattgaatttgtcatgcgccacaaaggagctaaacaccttcgggttgcagcccacgacctcacctggttccagtaccactctttggatgtgattgggttcctgctggtctgtgtggcaactgtgatatttatcgtcacaaaatgttgtctgttttgtttctggaagtttgctagaaaagcaaagaagggaaaaaatgattagttatatctgagatttgaagctggaaaacctgataggtgagactacttcagtttattccagcaagaaagattgtgatgcaagatttctttcttcctgagacaaaaaaaaaaaaagaaaaaaaaatcttttcaaaatttactttgtcaaataaaaatttgtttttcagagatttaccacccagttcatggttagaaatattttgtggcaatgaagaaaacactacggaaaataaaaaataagataaagcctta

SEQ ID NO: 197929 - DNA, 866 bp, Homo sapiens
  Payload ID: 19040
  Gene Name: UDP glucuronosyltransferase 2 family, polypeptide B7
  ENST ID: ENST00000502942
  CDS Start-End: 399-866
aacgtgactgacagacagctgaggcagccccttaggcaacttaagcctgccttgtggagtgcccctgtgggggactccagccagcctgagtgacatgatccaaagagccctcctgggtaggaaattgccccggtggaatccctcaccagagaagcaggtagcaggccctcgcagaggattaacacagtggctgaacaccaggaaggaactggcacttggagtccagacatctaaaatttggaaatgaaagcatttgtccagatctctggcaaagatggcactgtggtgttttctctggggccagttgtgcaaaaccttatagaagagaaggctgatctcattgcttcagacttggcccagattccacagaaggaagacccactacattatctgagacaatggggaaagctgacgtatggcttattcgaaactcctggaattttcagtttccatatccactcttaccaaatgttgattttgttggaggactccactgcaaacctgccaaacccctgcctaaggaaatggaagactttgtacagagctctggagaaaatggtgttgtggtgttttctctggggtcaatggtcagtaacatgacagaagaaagggccaacgtaattgcatcagccctggcccagatcccacaaaaggttctgtggagatttgatgggaataaaccagataccttaggtctcaatactcggctctacaagtggataccccagaatgaccttctaggtcatccaaagaccagagcttttataactcatggtggagccaatggcatctacgaggcaatctaccatgggatccctatggtggggattccattgtttgccgatcaacctgataacattgctcac

SEQ ID NO: 197930 - DNA, 1633 bp, Homo sapiens
  Payload ID: 19040
  Gene Name: UDP glucuronosyltransferase 2 family, polypeptide B7
  ENST ID: ENST00000508661
  CDS Start-End: 28-1137
ggaaaacaagcattgcattgcaccaggatgtctgtgaaatggacttcagtaattttgctaatacaactgagcttttgctttagctctgggaattgtggaaaggtgctggtgtgggcagcagaatacagccattggatgaatataaagacaatcctggatgagcttattcagagaggtcatgaggtgactgtactggcatcttcagcttccattctttttgatcccaacaactcatccgctcttaaaattgaaatttatcccacatctttaactaaaactgagttggagaatttcatcatgcaacagattaagagatggtcagaccttccaaaagatacattttggttatatttttcacaagtacaggaaatcatgtcaatatttggtgacataactagaaagttctgtaaagatgtagtttcaaataagaaatttatgaaaaaagtacaagagtcaagatttgacgtcatttttgcagatgctatttttccctgtagtgagctgctggctgagctatttaacataccctttgtgtacagtctcagcttctctcctggctacacttttgaaaagcatagtggaggatttattttccctccttcctacgtacctgttgttatgtcagaattaactgatcaaatgactttcatggagagggtaaaaaatatgatctatgtgctttactttgacttttggttcgaaatatttgacatgaagaagtgggatcagttttatagtgaagttctaggaagacccactacattatctgagacaatggggaaagctgacgtatggcttattcgaaactcctggaattttcagtttccatatccactcttaccaaatgttgattttgttggaggactccactgcaaacctgccaaacccctgcctaaggaaatggaagactttgtacagagctctggagaaaatggtgttgtggtgttttctctggggtcaatggtcagtaacatgacagaagaaagggccaacgtaattgcatcagccctggcccagatcccacaaaaggttctgtggagatttgatgggaataaaccagataccttaggtctcaatactcggctctacaagtggataccccagaatgaccttctagatataaagagaatgttatgaaattatcaagaattcaacatgatcaaccagtgaagcccctggatcgagcagtcttctggattgaatttgtcatgcgccacaaaggagctaaacaccttcgggttgcagcccacgacctcacctggttccagtaccactctttggatgtgattgggttcctgctggtctgtgtggcaactgtgatatttatcgtcacaaaatgttgtctgttttgtttctggaagtttgctagaaaagcaaagaagggaaaaaatgattagttatatctgagatttgaagctggaaaacctgataggtgagactacttcagtttattccagcaagaaagattgtgatgcaagatttctttcttcctgagacaaaaaaaaaaaaagaaaaaaaaatcttttcaaaatttactttgtcaaataaaaatttgtttttcagagatttaccacccagttcatggttagaaatattttgtggcaatgaagaaaacactacggaaaataaaaaa

SEQ ID NO: 197931 - DNA, 1532 bp, Homo sapiens
  Payload ID: 19040
  Gene Name: UDP glucuronosyltransferase 2 family, polypeptide B7
  ENST ID: ENST00000622664
  CDS Start-End: 3-1010
ggatgtctgtgaaatggacttcagtaattttgctaatacaactgagcttttgctttagctctgggaattgtggaaaggtgctggtgtgggcagcagaatacagccattggatgaatataaagacaatcctggatgagcttattcagagaggtcatgaggtgactgtactggcatcttcagcttccattctttttgatcccaacaactcatccgctcttaaaattgaaatttatcccacatctttaactaaaactgagttggagaatttcatcatgcaacagattaagagatggtcagaccttccaaaagatacattttggttatatttttcacaagtacaggaaatcatgtcaatatttggtgacataactagaaagttctgtaaagatgtagtttcaaataagaaatttatgaaaaaagtacaagagtcaagatttgacgtcatttttgcagatgctatttttccctgtagtgagctgctggctgagctatttaacataccctttgtgtacagtctcagcttctctcctggctacacttttgaaaagcatagtggaggatttattttccctccttcctacgtacctgttgttatgtcagaattaactgatcaaatgactttcatggagagggtaaaaaatatgatctatgtgctttactttgacttttggttcgaaatatttgacatgaagaagtgggatcagttttatagtgaagttctaggaagacccactacattatctgagacaatggggaaagctgacgtatggcttattcgaaactcctggaattttcagtttccatatccactcttaccaaatgttgattttgttggaggactccactgcaaacctgccaaacccctgcctaaggaaatggaagactttgtacagagctctggagaaaatggtgttgtggtgttttctctggggtcaatggtcagtaacatgacagaagaaagggccaacgtaattgcatcagccctggcccagatcccacaaaagatataaagagaatgttatgaaattatcaagaattcaacatgatcaaccagtgaagcccctggatcgagcagtcttctggattgaatttgtcatgcgccacaaaggagctaaacaccttcgggttgcagcccacgacctcacctggttccagtaccactctttggatgtgattgggttcctgctggtctgtgtggcaactgtgatatttatcgtcacaaaatgttgtctgttttgtttctggaagtttgctagaaaagcaaagaagggaaaaaatgattagttatatctgagatttgaagctggaaaacctgataggtgagactacttcagtttattccagcaagaaagattgtgatgcaagatttctttcttcctgagacaaaaaaaaaaaaagaaaaaaaaatcttttcaaaatttactttgtcaaataaaaatttgtttttcagagatttaccacccagttcatggttagaaatattttgtggcaatgaagaaaacactacggaaaataaaaaataagataaagcc

SEQ ID NO: 197932 - DNA, 5122 bp, Homo sapiens
  Payload ID: 19041
  Gene Name: UDP glycosyltransferase 3 family, polypeptide A1
  Uniprot ID: Q6NUS8
  ENST ID: ENST00000274278
  CDS Start-End: 359-1930
attaacgtgatttactgaggcccctgtcattcctggctcttagtaaggattttccagataggacagctgtgattacgcaggcagagaaaggttacagatcaggttaccaaccccctcctactgacttcaggtagtttgatagggtgagggcagattatcccatggagcatgcacccagggaggaggggcagcgggaaagagaacgaacagaagggcgagagaattggcaggatccgtctcctacctcttcctaggcccacagccagtgcctttggagtactgaggcgcgcacagagtccttagcccggcgcagggcgcgcagcccaggctgagatccgctgcttctgtggaagtgagcatggttgggcagcgggtgctgcttctagtggccttccttctttctggggtcctgctctcagaggctgccaaaatcctgacaatatctacactgggtggaagccattacctactgttggaccgggtgtctcagattcttcaagagcatggtcataatgtgactatgcttcatcagagtggaaagtttttgatcccagatattaaagaggaggaaaaatcataccaagttatcaggtggttttcacctgaagatcatcaaaaaagaattaagaagcattttgatagctacatagaaacagcattggatggcagaaaagaatctgaagcccttgtaaagctaatggaaatatttgggactcaatgtagttatttgctaagcagaaaggatataatggattccttaaagaatgagaactatgatctggtatttgttgaagcatttgatttctgttctttcctgattgctgagaagcttgtgaaaccatttgtggccattcttcccaccacattcggctctttggattttgggctaccaagccccttgtcttatgttccagtattcccttccttgctgactgatcacatggacttctggggccgagtgaagaattttctgatgttctttagtttctccaggagccaatgggacatgcagtctacatttgacaacaccatcaaggagcatttcccagaaggctctaggccagttttgtctcatcttctactgaaagcagagttgtggtttgttaactctgattttgcctttgattttgcccggcccctgcttcccaacactgtttatattggaggcttgatggaaaaacctattaaaccagtaccacaagacttggacaacttcattgccaactttggggatgcagggtttgtccttgtggcctttggctccatgttgaacacccatcagtcccaggaagtcctcaagaagatgcacaatgcctttgcccacctccctcaaggagtgatatggacatgtcagagttctcattggcccagagatgttcatttggccacaaatgtgaaaattgtggactggcttcctcagagtgacctcctggctcaccccagcatccgtctttttgtcactcatggtgggcagaacagcgtaatggaggccatccgtcatggtgtgcccatggtgggattaccagtcaatggagaccagcatggaaacatggtccgagtagtagccaaaaattatggtgtctctatccggttgaatcaggtcacagccgacacactgacacttacaatgaaacaagtcatagaagacaagaggtacaagtcggcagtggtggcagccagtgtcatcctgcactctcagcccctgagccccgcacagcggctggtgggctggatcgaccacatcctccagactgggggagcgacgcacctcaagccctatgccttccagcagccttggcatgagcagtacctcattgatgtctttgtgtttctgctggggctcactctgggcactatgtggctttgtgggaagctgctgggtgtggtggccaggtggctgcgtggggccaggaaggtgaagaagacatgaggctaggtgtagccttgggtgaggggagggcatccctggtcctttgaaggttctccccaccccagcacacgccacccctctgttctctcttcagctccacctgccactgatcctgcaacttgcttctttctattctctgcctctgtttagaaatcttcacgcaccactgaggcttcttgacttgccccttgtgacttgaaaccccagctcagatacaaattttcacctgccagccctgcctcctcctttctcccttttcctagacacaggactctgacaacttcatcctccttgtttagatgacttcccagtttccagtccccatttctccttctatcacttttcataaaaaaactcaggaaatatttgacatatcttccatttcaaattcttccattttatgcagatatcttgcccttcctataagctctcctcaaagctcaggaaacctggtctgctctcctgcatttagggaaggagaacccctgccaagacctttgctcactgcctgagaccccttccttagagagcacctcctttgctggtcagacatggagcctgcagttggtcacagatgatactgctttatttcagtttttacagttgtcttcttaagattcccgtcttataaatggagtacagggaacctcaagtagtgaagtggaaatccatgtgtaaggctttgtggcttcaggtaccagtggctaaggtagttttaaagactttgttgattttagaaaaagtccatcttccatccccgacatggcagttaatacccttctatatggtaaaaccttagagattaccttaatctgctaggaacagaagcaagaaaaaccatggcgtaaacacccccagagtttttgttcatttgtttcatctttcttgataaagcccgaaggtagcccattcagggctgttgtggttggttgctccatcatgtcatcaatagcccatatcttttcttttttatcttccttagtgtaacaccaaactacctctctgatagctggtgttcatgaaatattttaccttcaaatgattgtacctttttatttgctttagagttctgaaataaaatgaaattccactgtaataaaactgtcaaatgcatggtgtctgatgagttaaaaacacagagtagaaaacaggcatatggagaggccctggatgaaccatagttttagattgtttaattctagaattgtgaaacagatcttgaaacaattcagatcaaaagatgaaactgttacaaatgctcctgcagaaatagagaatgccccccaccaaaaactttgccaattccatgaaaggatttgcttgcgagtctgcagagctgagtgctggatgtctatccattttgtgagttctcatgacacaagagccagaagcatgaagcacgcagaagtacattagagtgtgtgtatctgtgtgcgtataatacaaggttttattgctgtaattcttatgaaaccacatgaattgattgatggccatactcccatgaagggcagacatggatgcttccctgtgttttctgttgaatcaacagccatgatttcattcccctcatgagcaacataaggtcttagggataagcctccctggccagtaactcccccctcaccccagaacatagcctttctctaacacttggtaattcattgaggtcaactttatgccacttgtataaacttgcatccctaaaatctgatcataagcagccaatgagccagaatgatgcttctaatcttgctctgtccaagcaccctccacagggctgcaagcatggctctgacaacctagaaatctggtgttatccctcactgtttaaaatctttgttcccattgtgtggaatataagggctctatgatttggtcctggctaccaatctaggcacacctggagcagttctcctcccactcttttccaaatgttcgctacaccccctcagaacacattttgctgtttttaacctctgaggtttgtctatgcccttccttctctcagaaataccatcctattcttgctggaatgagaaacttctgcttatctgtcagtatccagtgtcattgtgttcacattggtaagcctgtgcctgaccactacacctgaaatggagctcactgcattctcttttgaagcatttttcttactatatcgcaattatttattacaatatctgtttcctatttagaaaccataaggtcataaagacagggactggttcctatttatcttgttatagaacctggcatagtgcctggaacaaatactgctaggacaactggataatattgagaaaaaaggcaatatttgatccagacttcacactatatcaaaaactgaattcctatacaccagatatctaggtacaaaaaatgataccatgctgagtctaagagaaaaagtgaatttttccatagcctgtgtatagggagagactttctaaataggaagaaaaaatcctgatacaacaagagaagtgtaaattaatttgacacaaaaaactttggcatggcaaaaatcatggtaagaagattagcgatccaaattaaaaagttggagaaacatagctgcagcatatatcttacacatagacctaatatttctgataaactaagaactattaaaattgaagaaagaacctatgatacatatacatactgaaataatattcagctttaaactacaataaacaaaagcagaataagctaatatggagcaaattccaatatggttaagtaaaaaatagcaaagagtaagagtaactataggatgtatccttttttttataagaaaaaggaaagtatgtgtatgggggataatgaaaaaaatacatatctatgtgcattgccttgcaaaaacagtgcagagggaataaaccagagtgtgatagattatctatgagggtggtgtttgaatagggtggaaggatccatgtgtttatgtttttacatagtttggattttggaaacgttaatattttgcataccaagtatatgtttaaataaacaaggagagaaaagccaagaactgaaatacaaacggaaacaaatgaaatcaattttttccaaatgaaaatgtaactatactgtagtgaaaaaaattagcatcattaccttttaaacacagtacttttactatatactgtatacaatcaatcaacagaaaaaaaaaagaactccaaa

SEQ ID NO: 197933 - DNA, 1114 bp, Homo sapiens
  Payload ID: 19041
  Gene Name: UDP glycosyltransferase 3 family, polypeptide A1
  Uniprot ID: Q6NUS8
  ENST ID: ENST00000333811
  CDS Start-End: 356-1114
agcatgcacccagggaggaggggcagcgggaaagagaacgaacagaagggcgagagaattggcaggatccgtctcctacctcttcctaggcccacagccagtgcctttggagtactgaggcgcgcacagagtccttagcccggcgcagggcgcgcagcccaggctgagatccgctgcttctgtggaagtgagcatggttgggcagcgggtgctgcttctagtggccttccttctttctggggtcctgctctcagaggctgccaaaatcctgacaatatctacactgggtggaagccattacctactgttggaccgggtgtctcagattcttcaagagcatggtcataatgtgactatgcttcatcagagtggaaagtttttgatcccagatattaaagaggaggaaaaatcataccaagttatcaggtggttttcacctgaagatcatcaaaaaagaattaagaagcattttgatagctacatagaaacagcattggatggcagaaaagaatctgaagcccttgtaaagctaatggaaatatttgggactcaatgtagttatttgctaagcagaaaggatataatggattccttaaagaatgagaactatgatctggtatttgttgaagcatttgatttctgttctttcctgattgctgagaagcttgtgaaaccatttgtggccattcttcccaccacattcggctctttggattttgggctaccaagccccttgtcttatgttccagtattcccttccttgctgactgatcacatggacttctggggccgagtgaagaattttctgatgttctttagtttctccaggagccaatgggacatgcagtctacatttgacaacaccatcaaggagcatttcccagaaggctctaggccagttttgtctcatcttctactgaaagcagagttgtggtttgttaactctgattttgcctttgattttgcccggcccctgcttcccaacactgtttatattggaggcttgatggaaaaacctattaaaccagtaccacaaaatgggcaaccagctctcttcaccacccccagcttattctcctctggagtgtatcctgaaccactgagatggctttga

SEQ ID NO: 197934 - DNA, 1650 bp, Homo sapiens
  Payload ID: 19041
  Gene Name: UDP glycosyltransferase 3 family, polypeptide A1
  ENST ID: ENST00000507113
  CDS Start-End: 194-1402
agcatgcacccagggaggaggggcagcgggaaagagaacgaacagaagggcgagagaattggcaggatccgtctcctacctcttcctaggcccacagccagtgcctttggagtactgaggcgcgcacagagtccttagcccggcgcagggcgcgcagcccaggctgagatccgctgcttctgtggaagtgagcatggttgggcagcgggtgctgcttctagtggccttccttctttctggggtcctgctctcagaggctgccaaaatcctgacaatatctacactggatattaaagaggaggaaaaatcataccaagttatcaggtggttttcacctgaagatcatcaaaaaagaattaagaagcattttgatagctacatagaaacagcattggatggcagaaaagaatctgaagcccttgtaaagctaatggaaatatttgggactcaatgtagttatttgctaagcagaaaggatataatggattccttaaagaatgagaactatgatctggtatttgttgaagcatttgatttctgttctttcctgattgctgagaagcttgtgaaaccatttgtggccattcttcccaccacattcggctctttggattttgggctaccaagccccttgtcttatgttccagtattcccttccttgctgactgatcacatggacttctggggccgagtgaagaattttctgatgttctttagtttctccaggagccaatgggacatgcagtctacatttgacaacaccatcaaggagcatttcccagaaggctctaggccagttttgtctcatcttctactgaaagcagagttgtggtttgttaactctgattttgcctttgattttgcccggcccctgcttcccaacactgtttatattggaggcttgatggaaaaacctattaaaccagtaccacaagacttggacaacttcattgccaactttggggatgcagggtttgtccttgtggcctttggctccatgttgaacacccatcagtcccaggaagtcctcaagaagatgcacaatgcctttgcccacctccctcaaggagtgatatggacatgtcagagttctcattggcccagagatgttcatttggccacaaatgtgaaaattgtggactggcttcctcagagtgacctcctggctcaccccagcatccgtctttttgtcactcatggtgggcagaacagcgtaatggaggccatccgtcatggtgtgcccatggtgggattaccagtcaatggagaccagcatggaaacatggtccgagtagtagccaaaaattatggtgtctctatccggttgaatcaggtcacagccgacacactgacacttacaatgaaacaagtcatagaagacaagaggtatgtggctctctaagcatgtggtcactaaggctgaatgaagatagaaaacacaagggatactgtgtatgtatttttcacaataatagctgaaacttctgtgacatggaataacatgtgtgtgatgctaacagcccacctgttttctctggtaagtctctaggaagactaatttaggttagatgctgagaattactttcctaccttaaggctgtgatggcgacaaattatatacacatgatctctttgactgatcttatattt

SEQ ID NO: 197935 - DNA, 1902 bp, Homo sapiens
  Payload ID: 19041
  Gene Name: UDP glycosyltransferase 3 family, polypeptide A1
  ENST ID: ENST00000503189
  CDS Start-End: 158-1468
aacgaacagaagggcgagagaattggcaggatccgtctcctacctcttcctaggcccacagccagtgcctttggagtactgaggcgcgcacagagtccttagcccggcgcagggcgcgcagcccaggctgagatccgctgcttctgtggaagtgagcatggttgggcagcgggtgctgcttctagtggccttccttctttctggggtcctgctctcagaggctgccaaaatcctgacaatatctacactgggtggaagccattacctactgttggaccgggtgtctcagattcttcaagagcatggtcataatgtgactatgcttcatcagagtggaaagtttttgatcccagatattaaagaggaggaaaaatcataccaagttatcaggtggttttcacctgaagatcatcaaaaaagaattaagaagcattttgatagctacatagaaacagcattggatggcagaaaagaatctgaagcccttgtaaagctaatggaaatatttgggactcaatgtagttatttgctaagcagaaaggatataatggattccttaaagaatgagaactatgatctggtatttgttgaagcatttgatttctgttctttcctgattgctgagaagcttgtgaaaccatttgtggccattcttcccaccacattcggctctttggattttgggctaccaagccccttgtcttatgttccagtattcccttccttgctgactgatcacatggacttctggggccgagtgaagaattttctgatgttctttagtttctccaggagccaatgggacatgcagtctacatttgacaacaccatcaaggagcatttcccagaaggctctaggccagttttgtctcatcttctactgaaagcagagttgtggtttgttaactctgattttgcctttgattttgcccggcccctgcttcccaacactgtttatattggaggcttgatggaaaaacctattaaaccagtaccacaagacttggacaacttcattgccaactttggggatgcagggtttgtccttgtggcctttggctccatgttgaacacccatcagtcccaggaagtcctcaagaagatgcacaatgcctttgcccacctccctcaaggagtgatatggacatgtcagagttctcattggcccagagatgttcatttggccacaaatgtgaaaattgtggactggcttcctcagagtgacctcctggctcaccccagcatccgtctttttgtcactcatggtgggcagaacagcgtaatggaggccatccgtcatggtgtgcccatggtgggattaccagtcaatggagaccagcatggaaacatggtccgagtagtagccaaaaattatggtgtctctatccggttgaatcaggtcacagccgacacactgacacttacaatgaaacaagtcatagaagacaagaggtatgtggctctctaagcatgtggtcactaaggctgaatgaagatagaaaacacaagggatactgtgtatgtatttttcacaataatagctgaaacttctgtgacatggaataacatgtgtgtgatgctaacagcccacctgttttctctggtaagtctctaggaagactaatttaggttagatgctgagaattactttcctaccttaaggctgtgatggcgacaaattatatacacatgatctctttgactgatcttatatttgggagtccctctagtggaattccaactgaagcggggggtttctttgtgtgtttccccagtgtgcctgctcttctcacctctggcttcttcgtctgtgctgctccctagaacacccttcccttctcttcacaggactggctccttcatgacatttgggtctcttctccaatgtttcttccatagaca

SEQ ID NO: 197936 - DNA, 5002 bp, Homo sapiens
  Payload ID: 19041
  Gene Name: UDP glycosyltransferase 3 family, polypeptide A1
  ENST ID: ENST00000515801
  CDS Start-End: 366-539
agccttcattaacgtgatttactgaggcccctgtcattcctggctcttagtaaggattttccagataggacagctgtgattacgcaggcagagaaaggttacagatcaggttaccaaccccctcctactgacttcaggtagtttgatagggtgagggcagattatcccatggagcatgcacccagggaggaggggcagcgggaaagagaacgaacagaagggcgagagaattggcaggatccgtctcctacctcttcctaggcccacagccagtgcctttggagtactgaggcgcgcacagagtccttagcccggcgcagggcgcgcagcccaggctgagatccgctgcttctgtggaagtgagcatggttgggcagcgggtgctgcttctagtggccttccttctttctggggtcctgctctcagaggctgccaaaatcctgacaatatctacactgggtgagtgcttggccggagaattcccagacaggcgcgtcccggatccccgcactgccagggctccagcgaacggcgattgatcagagttatccaggcgattttccaggctgggcttgcggacctggctggaggagggagaagcccatctagccgtggggcagagaggggcctctattgctgaggtggaagccattacctactgttggaccgggtgtctcagattcttcaagagcatggtcataatgtgactatgcttcatcagagtggaaagtttttgatcccagatattaaagaggaggaaaaatcataccaagttatcaggtggttttcacctgaagatcatcaaaaaagaattaagaagcattttgatagctacatagaaacagcattggatggcagaaaagaatctgaagcccttgtaaagctaatggaaatatttgggactcaatgtagttatttgctaagcagaaaggatataatggattccttaaagaatgagaactatgatctggtatttgttgaagcatttgatttctgttctttcctgattgctgagaagcttgtgaaaccatttgtggccattcttcccaccacattcggctctttggattttgggctaccaagccccttgtcttatgttccagtattcccttccttgctgactgatcacatggacttctggggccgagtgaagaattttctgatgttctttagtttctccaggagccaatgggacatgcagtctacatttgacaacaccatcaaggagcatttcccagaaggctctaggccagttttgtctcatcttctactgaaagcagagttgtggtttgttaactctgattttgcctttgattttgcccggcccctgcttcccaacactgtttatattggaggcttgatggaaaaacctattaaaccagtaccacaaaatgggcaaccagctctcttcaccacccccagcttattctcctctggagtgtatcctgaaccactgagatggctttgaccctcagaatctggaggaaaaacacctcctagcctgtgtatcctgaaccactgagtctgctttgaccctcagaatctggaggaaaaacacctcctagccctcggaacaaaggtttggccaaattatgaaggactggcttggtctcaggaaggaaccattcattgtgataccatctggcagctggacattttctgtaggcgtgaggacgaatggcctgaggccccacatgtgcaggctttttataccttgcagggaaatctagatctttgctgacagtgtaggattgatccagccctcctgctttgtcatttcaggagaggctgcaaagggcaattccagggaactaaagaaacaaatcccagaggcactcccagcagagaagccagctccctccagctctgctcctctgggtccacctcaacctctctatccagcttcagtctctcgcttgcctaatcctagaaatcctcaccctagacaagccccagtctcactcctcctcttccaacagatgccaggtgaatttggccccagtaaggtgcaggtctccttccccctacaggacttaaagtacattaagggggatttttggcaagttttcacatgaccctgacagatagatagaggctttccagaatttaacccaggtatttgaactctcttggagagacattgtgttacttttgaatcagatcctgatgaacactgagaagcaggctgctctgcaagtagcagagagatttggggatgagctttgtttcacatatagtgtcaggaaagggggcaaactttatccgactggaagagaagcagtaccagtaaatgaccctggatgggatggatcccagtgttgaaatgggagactggaagaggagatactttcaggacttggacaacttcattgccaactttggggatgcagggtttgtccttgtggcctttggctccatgttgaacacccatcagtcccaggaagtcctcaagaagatgcacaatgcctttgcccacctccctcaaggagtgatatggacatgtcagagttctcattggcccagagatgttcatttggccacaaatgtgaaaattgtggactggcttcctcagagtgacctcctggctcaccccagcatccgtctttttgtcactcatggtgggcagaacagcgtaatggaggccatccgtcatggtgtgcccatggtgggattaccagtcaatggagaccagcatggaaacatggtccgagtagtagccaaaaattatggtgtctctatccggttgaatcaggtcacagccgacacactgacacttacaatgaaacaagtcatagaagacaagaggtatgtggctctctaagcatgtggtcactaaggctgaatgaagatagaaaacacaagggatactgtgtatgtatttttcacaataatagctgaaacttctgtgacatggaataacatgtgtgtgatgctaacagcccacctgttttctctggtaagtctctaggaagactaatttaggttagatgctgagaattactttcctaccttaaggctgtgatggcgacaaattatatacacatgatctctttgactgatcttatatttgggagtccctctagtggaattccaactgaagcggggggtttctttgtgtgtttccccagtgtgcctgctcttctcacctctggcttcttcgtctgtgctgctccctagaacacccttcccttctcttcacaggactggctccttcatgacatttgggtctcttctccaatgtttcttccatagacagggttgtgtctttgacaatcctaactagcctcctctcccactcagcctaatcataatatactatttccttcctaacacttttcaagatttgtaatgactccatttatttatgtttttattaattgtctggcccccaacacaaaagagtagagagtcagcttcataagtacagcaatgtctctctctttttttcaactctgttcccagtgcttactgcagagcctgccacaaaataagtttccatgaatttcagttaagtgaggaaataaaagcggcatagtgaccttcttggttactgcccatccagccaatgatcttataatcaagaaggactgaataccttattatggtttcagaaacacaaaccctgaatcaggtacaagtcggcagtggtggcagccagtgtcatcctgcactctcagcccctgagccccgcacagcggctggtgggctggatcgaccacatcctccagactgggggagcgacgcacctcaagccctatgccttccagcagccttggcatgagcagtacctcattgatgtctttgtgtttctgctggggctcactctgggcactatgtggctttgtgggaagctgctgggtgtggtggccaggtggctgcgtggggccaggaaggtgaagaagacatgaggctaggtgtagccttgggtgaggggagggcatccctggtcctttgaaggttctccccaccccagcacacgccacccctctgttctctcttcagctccacctgccactgatcctgcaacttgcttctttctattctctgcctctgtttagaaatcttcacgcaccactgaggcttcttgacttgccccttgtgacttgaaaccccagctcagatacaaattttcacctgccagccctgcctcctcctttctcccttttcctagacacaggactctgacaacttcatcctccttgtttagatgacttcccagtttccagtccccatttctccttctatcacttttcataaaaaaactcaggaaatatttgacatatcttccatttcaaattcttccattttatgcagatatcttgcccttcctataagctctcctcaaagctcaggaaacctggtctgctctcctgcatttagggaaggagaacccctgccaagacctttgctcactgcctgagaccccttccttagagagcacctcctttgctggtcagacatggagcctgcagttggtcacagatgatactgctttatttcagtttttacagttgtcttcttaagattcccgtcttataaatggagtacagggaacctcaagtagtgaagtggaaatccatgtgtaaggctttgtggcttcaggtaccagtggctaaggtagttttaaagactttgttgattttagaaaaagtccatcttccatccccgacatggcagttaatacccttctatatggtaaaaccttagagattaccttaatctgctaggaacagaagcaagaaaaaccatggcgtaaacacccccagagtttttgttcatttgtttcatctttcttgataaagcccgaaggtagcccattcagggctgttgtggttggttgctccatcatgtcatcaatagcccatatcttttcttttttatcttccttagtgtaacaccaaactacctctctgatagctggtgttcatgaaatattttaccttcaaatgattgtacctttttatttgctttagagttctgaaataaaatgaaattccactgt

SEQ ID NO: 197937 - DNA, 3097 bp, Homo sapiens
  Payload ID: 19041
  Gene Name: UDP glycosyltransferase 3 family, polypeptide A1
  Uniprot ID: Q6NUS8
  ENST ID: ENST00000625798
  CDS Start-End: 221-979
agggggatacccaccatggtagaccagagccactggaaagaggcatgagtccacatatccataaaggcaaatatccaaatattggctgtctggacctacaggaatactaaagaaggcactgcagagacccacaactgagaaatactggctgtgtggaagccattacctactgttggaccgggtgtctcagattcttcaagagcatggtcataatgtgactatgcttcatcagagtggaaagtttttgatcccagatattaaagaggaggaaaaatcataccaagttatcaggtggttttcacctgaagatcatcaaaaaagaattaagaagcattttgatagctacatagaaacagcattggatggcagaaaagaatctgaagcccttgtaaagctaatggaaatatttgggactcaatgtagttatttgctaagcagaaaggatataatggattccttaaagaatgagaactatgatctggtatttgttgaagcatttgatttctgttctttcctgattgctgagaagcttgtgaaaccatttgtggccattcttcccaccacattcggctctttggattttgggctaccaagccccttgtcttatgttccagtattcccttccttgctgactgatcacatggacttctggggccgagtgaagaattttctgatgttctttagtttctccaggagccaatgggacatgcagtctacatttgacaacaccatcaaggagcatttcccagaaggctctaggccagttttgtctcatcttctactgaaagcagagttgtggtttgttaactctgattttgcctttgattttgcccggcccctgcttcccaacactgtttatattggaggcttgatggaaaaacctattaaaccagtaccacaaaatgggcaaccagctctcttcaccacccccagcttattctcctctggagtgtatcctgaaccactgagatggctttgaccctcagaatctggaggaaaaacacctcctagcctgtgtatcctgaaccactgagtctgctttgaccctcagaatctggaggaaaaacacctcctagccctcggaacaaaggtttggccaaattatgaaggactggcttggtctcaggaaggaaccattcattgtgataccatctggcagctggacattttctgtaggcgtgaggacgaatggcctgaggccccacatgtgcaggctttttataccttgcagggaaatctagatctttgctgacagtgtaggattgatccagccctcctgctttgtcatttcaggagaggctgcaaagggcaattccagggaactaaagaaacaaatcccagaggcactcccagcagagaagccagctccctccagctctgctcctctgggtccacctcaacctctctatccagcttcagtctctcgcttgcctaatcctagaaatcctcaccctagacaagccccagtctcactcctcctcttccaacagatgccaggtgaatttggccccagtaaggtgcaggtctccttccccctacaggacttaaagtacattaagggggatttttggcaagttttcacatgaccctgacagatagatagaggctttccagaatttaacccaggtatttgaactctcttggagagacattgtgttacttttgaatcagatcctgatgaacactgagaagcaggctgctctgcaagtagcagagagatttggggatgagctttgtttcacatatagtgtcaggaaagggggcaaactttatccgactggaagagaagcagtaccagtaaatgaccctggatgggatggatcccagtgttgaaatgggagactggaagaggagatactttcaggtatgcatcatggagggattacgtaggactaagaccaagcctcttgattatagcaagctatctatgatagaccagggatttaatgaaaatcccactgccttcttggagaggctaagaggggccttggtaaagcatacccccgtatcttctgattcagtgaagggacaactaattctgaagaataaatttattactcagacagcccctgatatcaggaggaagttgcagaaatgggccctgggaccagataatactttagaggtctaactgaaagtggccatctttgccttttacaatagagatgggggacacaagaaagaggcagaagcattaatggtcaccatgcaagcccataaaccccagaattcccagggtacacttgttaattgctacagatgtggcaagaacagttgtctctcttctaaagttgaaccgcttctatacaaggtttaatttctttcaccagggtgaaacagctcaaagcagaatggttttagtattttcacttgttatttctgtgatctttggcactagattattttcttgtataatacacttgtttaacccatgcctacttaaccttataaaacttgttttttcctctcacttagaggccatcaaactccaaatggtcaggcaaccggagcctcggacaacggctcccttttgcaaggacccttagataaacctctgggaggaatctgactgctgttttctccaaaatagtgccacctgtcagcagaaattagctaagattggccatcgtccatattctaatggcagttagatttgcctctgcagagaggggagatgatacggctaggagacagagaaatactgggtagaagagggcagttccctggcaaaggtcccaatttcaagcctggaaacctctggccctaactgagaacatgcattcctgttttcacacacaaaagttgccttttggctctccacacgcccctctcctgtactcatataaatctgagacctcaggttccagaagcagatgaaaaggagatgaacagaagagcagaagaatggcataatggtgtggcagagagaagagaaggagagtctgaacaccaagaggagttcagctgggggcgattggagaggagatcagccactggatggctgaactccaggaagaccatcttcccattccgtctcctttccagctccccatgcatcccatccccaccactcaataaaacccccacattcaccatc

SEQ ID NO: 197938 - DNA, 2355 bp, Homo sapiens
  Payload ID: 19042
  Gene Name: UDP glycosyltransferase 3 family, polypeptide A2
  Uniprot ID: Q3SY77
  ENST ID: ENST00000282507
  CDS Start-End: 103-1674
cccacagccagtgcctttggcgcactgaggtgcacagggtcccttagccgggcgcagggcgcgcagcccaggctgagatccgcggcttccgtagaagtgagcatggctgggcagcgagtgcttcttctagtgggcttccttctccctggggtcctgctctcagaggctgccaaaatcctgacaatatctacagtaggtggaagccattatctactgatggaccgggtttctcagattcttcaagatcacggtcataatgtcaccatgcttaaccacaaaagaggtccttttatgccagattttaaaaaggaagaaaaatcatatcaagttatcagttggcttgcacctgaagatcatcaaagagaatttaaaaagagttttgatttctttctggaagaaactttaggtggcagaggaaaatttgaaaacttattaaatgttctagaatacttggcgttgcagtgcagtcattttttaaatagaaaggatatcatggattccttaaagaatgagaacttcgacatggtgatagttgaaacttttgactactgtcctttcctgattgctgagaagcttgggaagccatttgtggccattctttccacttcattcggctctttggaatttgggctaccaatccccttgtcttatgttccagtattccgttccttgctgactgatcacatggacttctggggccgagtgaagaattttctgatgttctttagtttctgcaggaggcaacagcacatgcagtctacatttgacaacaccatcaaggaacatttcacagaaggctctaggccagttttgtctcatcttctactgaaagcagagttgtggttcattaactctgactttgcctttgattttgctcgacctctgcttcccaacactgtttatgttggaggcttgatggaaaaacctattaaaccagtaccacaagacttggagaacttcattgccaagtttggggactctggttttgtccttgtgaccttgggctccatggtgaacacctgtcagaatccggaaatcttcaaggagatgaacaatgcctttgctcacctaccccaaggggtgatatggaagtgtcagtgttctcattggcccaaagatgtccacctggctgcaaatgtgaaaattgtggactggcttcctcagagtgacctcctggctcacccaagcatccgtctgtttgtcacccacggcgggcagaatagcataatggaggccatccagcatggtgtgcccatggtggggatccctctctttggagaccagcctgaaaacatggtccgagtagaagccaaaaagtttggtgtttctattcagttaaagaagctcaaggcagagacattggctcttaagatgaaacaaatcatggaagacaagagatacaagtccgcggcagtggctgccagtgtcatcctgcgctcccacccgctcagccccacacagcggctggtgggctggattgaccacgtcctccagacagggggcgcgacgcacctcaagccctatgtctttcagcagccctggcatgagcagtacctgctcgacgtttttgtgtttctgctggggctcactctggggactctatggctttgtgggaagctgctgggcatggctgtctggtggctgcgtggggccagaaaggtgaaggagacataaggccaggtgcagccttggcggggtctgtttggtgggcgatgtcaccatttctagggagcttcccactagttctggcagccccattctctagtccttctagttatctcctgttttcttgaagaacaggaaaaatggccaaaaatcatcctttccacttgctaattttgctacaaattcatccttactagctcctgcctgctagcagaattctttccagtcctcttgtcctcctttgtttgccatcagcaagggctatgctgtgattctgtctctgagtgacttggaccactgaccctcagatttccagccttaaaatccaccttccttctcatgcgcctctccgaatcacaccctgactcttccagcctccatgtccagacctagtcagcctctctcactcctgcccctactatctatcatggaataacatccaagaaagacaccttgcatattctttcagtttctgttttgttctcccacatattctcttcaatgctcaggaagcctgccctgtgcttgagagttcagggccggacacaggctcacaggtctccacattgggtccctgtctctggtgcccacagtgagctccttcttggctgagcaggcttggagactgtaggtttccagatttcctgaaaaataaaagtttacagcgttatctctccccaacctcactaa

SEQ ID NO: 197939 - DNA, 572 bp, Homo sapiens
  Payload ID: 19042
  Gene Name: UDP glycosyltransferase 3 family, polypeptide A2
  ENST ID: ENST00000515131
  CDS Start-End: 158-572
acatcagctcaagattttaagcaagtctctcaggaaatagatcgcggggctggcagtatgagccagtgcctttggcgcactgaggtgcacagggtcccttagccgggcgcagggcgcgcagcccaggctgagatccgcggcttccgtagaagtgagcatggctgggcagcgagtgcttcttctagtgggcttccttctccctggggtcctgctctcagaggctgccaaaatcctgacaatatctacagtaggtggaagccattatctactgatggaccgggtttctcagattcttcaagatcacggtcataatgtcaccatgcttaaccacaaaagaggtccttttatgccagattttaaaaaggaagaaaaatcatatcaagttatcagttggcttgcacctgaagatcatcaaagagaatttaaaaagagttttgatttctttctggaagaaactttaggtggcagaggaaaatttgaaaacttattaaatgttctagaatacttggcgttgcagtgcagtcattttttaaatagaaaggatatcatggattccttaaagaatgagaact

SEQ ID NO: 197940 - DNA, 1476 bp, Homo sapiens
  Payload ID: 19042
  Gene Name: UDP glycosyltransferase 3 family, polypeptide A2
  ENST ID: ENST00000504685
  CDS Start-End: 94-456
agtgcctttggcgcactgaggtgcacagggtcccttagccgggcgcagggcgcgcagcccaggctgagatccgcggcttccgtagaagtgagcatggctgggcagcgagtgcttcttctagtgggcttccttctccctggggtcctgctctcagaggctgccaaaatcctgacaatatctacagtaggtggaagccattatctactgatggaccgggtttctcagattcttcaagatcacggtcataatgtcaccatgcttaaccacaaaagaggtccttttatgccagattttaaaaaggaagaaaaatcatatcaagttatcagttggcttgcacctgaagatcatcaaagagaatttaaaaagagttttgatttctttctggaagaaactttaggtggcaggacttggagaacttcattgccaagtttggggactctggttttgtccttgtgaccttgggctccatggtgaacacctgtcagaatccggaaatcttcaaggagatgaacaatgcctttgctcacctaccccaaggggtgatatggaagtgtcagtgttctcattggcccaaagatgtccacctggctgcaaatgtgaaaattgtggactggcttcctcagagtgacctcctggctcacccaagcatccgtctgtttgtcacccacggcgggcagaatagcataatggaggccatccagcatggtgtgcccatggtggggatccctctctttggagaccagcctgaaaacatggtccgagtagaagccaaaaagtttggtgtttctattcagttaaagaagctcaaggcagagacattggctcttaagatgaaacaaatcatggaagacaagagatacaagtccgcggcagtggctgccagtgtcatcctgcgctcccacccgctcagccccacacagcggctggtgggctggattgaccacgtcctccagacagggggcgcgacgcacctcaagccctatgtctttcagcagccctggcatgagcagtacctgctcgacgtttttgtgtttctgctggggctcactctggggactctatggctttgtgggaagctgctgggcatggctgtctggtggctgcgtggggccagaaaggtgaaggagacataaggccaggtgcagccttggcggggtctgtttggtgggcgatgtcaccatttctagggagcttcccactagttctggcagccccattctctagtccttctagttatctcctgttttcttgaagaacaggaaaaatggccaaaaatcatcctttccacttgctaattttgctacaaattcatccttactagctcctgcctgctagcagaattctttccagtcctcttgtcctcctttgtttgccatcagcaagggctatgctgtgattctgtctctgagtgacttggaccactgaccctcagatttccagccttaaaatccaccttccttctcatgcgcctctccg

SEQ ID NO: 197941 - DNA, 1924 bp, Homo sapiens
  Payload ID: 19042
  Gene Name: UDP glycosyltransferase 3 family, polypeptide A2
  Uniprot ID: Q3SY77
  ENST ID: ENST00000513300
  CDS Start-End: 94-1563
agtgcctttggcgcactgaggtgcacagggtcccttagccgggcgcagggcgcgcagcccaggctgagatccgcggcttccgtagaagtgagcatggctgggcagcgagtgcttcttctagtgggcttccttctccctggggtcctgctctcagaggctgccaaaatcctgacaatatctacagtagattttaaaaaggaagaaaaatcatatcaagttatcagttggcttgcacctgaagatcatcaaagagaatttaaaaagagttttgatttctttctggaagaaactttaggtggcagaggaaaatttgaaaacttattaaatgttctagaatacttggcgttgcagtgcagtcattttttaaatagaaaggatatcatggattccttaaagaatgagaacttcgacatggtgatagttgaaacttttgactactgtcctttcctgattgctgagaagcttgggaagccatttgtggccattctttccacttcattcggctctttggaatttgggctaccaatccccttgtcttatgttccagtattccgttccttgctgactgatcacatggacttctggggccgagtgaagaattttctgatgttctttagtttctgcaggaggcaacagcacatgcagtctacatttgacaacaccatcaaggaacatttcacagaaggctctaggccagttttgtctcatcttctactgaaagcagagttgtggttcattaactctgactttgcctttgattttgctcgacctctgcttcccaacactgtttatgttggaggcttgatggaaaaacctattaaaccagtaccacaagacttggagaacttcattgccaagtttggggactctggttttgtccttgtgaccttgggctccatggtgaacacctgtcagaatccggaaatcttcaaggagatgaacaatgcctttgctcacctaccccaaggggtgatatggaagtgtcagtgttctcattggcccaaagatgtccacctggctgcaaatgtgaaaattgtggactggcttcctcagagtgacctcctggctcacccaagcatccgtctgtttgtcacccacggcgggcagaatagcataatggaggccatccagcatggtgtgcccatggtggggatccctctctttggagaccagcctgaaaacatggtccgagtagaagccaaaaagtttggtgtttctattcagttaaagaagctcaaggcagagacattggctcttaagatgaaacaaatcatggaagacaagagatacaagtccgcggcagtggctgccagtgtcatcctgcgctcccacccgctcagccccacacagcggctggtgggctggattgaccacgtcctccagacagggggcgcgacgcacctcaagccctatgtctttcagcagccctggcatgagcagtacctgctcgacgtttttgtgtttctgctggggctcactctggggactctatggctttgtgggaagctgctgggcatggctgtctggtggctgcgtggggccagaaaggtgaaggagacataaggccaggtgcagccttggcggggtctgtttggtgggcgatgtcaccatttctagggagcttcccactagttctggcagccccattctctagtccttctagttatctcctgttttcttgaagaacaggaaaaatggccaaaaatcatcctttccacttgctaattttgctacaaattcatccttactagctcctgcctgctagcagaattctttccagtcctcttgtcctcctttgtttgccatcagcaagggctatgctgtgattctgtctctgagtgacttggaccactgaccctcagatttccagccttaaaatccaccttccttctcatgcgcctctccgaatcacaccctgactctt

SEQ ID NO: 197942 - DNA, 4084 bp, Homo sapiens
  Payload ID: 19043
  Gene Name: UDP glycosyltransferase 8
  Uniprot ID: Q16880
  ENST ID: ENST00000310836
  CDS Start-End: 523-2148
aagccaacctcgctcagcggacgactggccggatcccaacgcgctgccccttgcccagcctgcgagcgcgtggtacgaaggcgcgtctgcatccatgccccagcccggggagctggaggcgctcgcagtcagaggcgagtgatgctaggctgagcgcgtggcggcccgtgtcgtgccccgctgagccaagtgcggaagggcagcggcgcgctccgactctgctcgccgcacgcagggcggggcgcggctggggggcggggggcctggccgcccgctgggagctgcggacgagcaggcgcgctgaggacccgagggaggacacggttaaagcattgctatcaactgtgaacccagagagccctccttagccaacacgctaactccgaagcctcccttacgcccccgaaccaccgaaggcggcgacacctgattcagcgcacaaacacaggtcccttctgtcccggatacaattacgcggcagacacacactcaaactcgcgcggggcagccaagagacgagctatgaagtcttacactccatatttcattctcctgtggagtgctgttgggatagcgaaggctgccaaaatcatcatcgtgccgccaattatgtttgaaagccatatgtacattttcaagacgctagcctcagccttgcacgagagaggccaccatacagtgttcctcctctctgaaggcagagacatcgccccatctaatcattacagcctccagcgctacccagggatctttaacagtaccacctcagatgctttcctacagtccaagatgcggaatattttctctgggagattgacagcaatcgaactgtttgacatactggatcactatactaagaactgtgacctgatggttggcaaccatgccctgatccagggtctgaagaaagaaaaatttgacctgctgctggtggaccctaatgatatgtgtggatttgtgatagctcatcttttaggggttaaatatgctgtattttcaactggcctttggtatcctgctgaagtgggtgctcctgctccattagcatacgtcccagagtttaactcactcctcacagaccgcatgaacttgctgcaaaggatgaaaaataccggtgtttacctcatttccagattaggggtcagctttctggttcttcccaaatatgaaaggataatgcagaagtacaacctgctgccagagaagtccatgtatgatttggttcatgggtccagcctgtggatgctgtgtactgacgtagcactggaattcccaagacccactctgcctaatgttgtttatgtaggaggaatcctaaccaaaccagccagcccactaccagaagatctccaaagatgggtaaatggtgctaatgaacatggctttgtcttggtgtcttttggagctggtgtcaagtatctgtcagaagacattgctaacaaactggcaggagctctggggagattgcctcaaaaagtgatttggaggttttctggacccaaaccaaagaatctaggaaacaacactaaactcatagaatggttaccacaaaatgacctgcttgggcattcaaagattaaagccttcctgagccatggtggtttgaacagtatttttgaaactatatatcatggtgtgcctgtagtgggaattccactctttggagaccattatgatactatgaccagagtacaggcaaaaggcatggggatattgctagaatggaagacagttactgaaaaagagctctatgaagcactagtgaaggttatcaataatcccagctaccgtcagagggctcagaagctttcggaaattcacaaggatcaacctggtcaccctgtcaatcgaactatctattggatagattatattattcgtcacaatggagcccatcacctacgtgccgctgtccatcagatctccttttgtcagtattttttactggatattgcctttgtgcttttgcttggtgctgccttgttatactttctcttgtcttgggtgacaaaatttatctacagaaaaatcaaaagtctgtggtctagaaataagcatagcacagttaatggacattaccacaatggaatcctcaatggcaagtacaaaagaaatggccatattaaacatgaaaagaaagtgaaatgagccaacagcccaggtgatagaaataaattggttcactcattgaatttttattgctattatttagtctaacagctactaaaagtaaaacatcagtaaacaattctaacatgcccttatgagatctactaatgaaattctgtggaattaagatggctgtaaaaagcacaaacctaaaatgcagaaatgtattttattcaaatactgatgtagagagttttggcactgaaccttttagaagccttaattatttaaatcaattcagtgactgtgtcagaccttagttttaaatcttgatatgtgcgtgtcccggatcaggaatggtttcatttttcttaataatgtgtgtgtgtgtatgtgtgtgtgtgtgtgtgtgtgtttgtgtgtgtgtgtgtgtgtcctaattaagagaatttttactggctgcttgttacatttgttgagggtacaacacactcaagaataaagtaaaaggatagtcaggatccagatgtttcttttctagcatttaatgtgtgtgaactcagaacactaccatgaaagaacacttccccccaaaactggatgcagaggaagaaaaaaaaaaaagaaatggcacagttttttgtatttttttttttagttattttttgttgttgttgtttgtattgtttttcttttctgatagagtatggccacttctgggggaaaaacatgtaattaagtaaatgtatacattggttttcacgttttacttttgttttcccactaccaataattttcctctggaagaattttatagttttttctatttcattttaatgagtaacaatatgttaaatgcataattaagacaaagcaatgaaattctgactttattcaaagtactgaagattattgcttctagggcatttttaaacagcaccattgtattgttgaatgtttatgtaactgatggcttttctataatgtaatttttgaatgttcaggtgttacatttccaaagtttaacttttaaaaaaccatcttctgatcccttttattgtctgggccatacaatctatattacataggtgccaacatttaattcttttaaatggaacatttgcagttttccatattggtacctgctttttctggagaggtttgagatcttgttaacaaatcagactttacactatatacagatgtgacagataaattgaaccacttgtttgtgaaaatgagttcctgtcatcttcctcattcactcagccctcaccccagcagccttttccggtcattgtagctgacatggagcagtgacagtattcatttgagaacagggatgcaagtcacagacatcataaaatcagggtctccctgctgaagcattcactagttggcaactatgaatttattccatgtcattctgtttacttagcacttgcactacccttgttggttgagtgtatgctttatttgtttctagtttgaaatcccacatctgatagctgagagtaggcaaatacaacatttacctaatgtcattcactaacatggaagagttgtgaaaattctagagtgctgtaaatccttggcatacactatgacaaacaacttcattactctcccaccaggagctgctctcctgcacttagaaataatgtcacaagtagttttctaatgtacaatgcagacaaatgtactgctctctgaatacttgaagaaatggtattatacatacatagaaacttattagttataccttttcacaatcttattacgatgttgccgttaaaagggaaaaaagacacaggcaatgaatggtgggatagtaagaggacttagagtgtatgaatgagttgattttacttttttggaatttgattaagttgacagtaggcactgattggatgattaaacataagttaatctccactgtgataaaaacttaaataataaacatgatttaaaatag

SEQ ID NO: 197943 - DNA, 2448 bp, Homo sapiens
  Payload ID: 19043
  Gene Name: UDP glycosyltransferase 8
  Uniprot ID: Q16880
  ENST ID: ENST00000394511
  CDS Start-End: 515-2140
gggttggttccaagtctttgctattgtgaatagtgccgcaataaacatacgtgtgcatgtgtctttatagcagcatgatttatagtcctttgggtatatacccagtaatgggatggctgggttctagatccctgaggaatcgccacattgacttgcacaatggttgaactagtttacagtcccaccaacagtgtaaaagtgttcctatttctccacatcctctccggcacctgttgtttcctgactttttaatgattgccattctaactggtgtgagatgatatctcattgtggttttgatttgcatttctctgatggccagtgatggtgagcattttttcatgtgttttttggctgcataaatgtcttcttttgagaagtgtctgttcatgattttttttttagacaaagtattagatcagatatttttggggaaaaatgctttgtgattgcttgttttgaatggtgagcattgtattttgttttaagttgttttctggttgttattacagctatgaagtcttacactccatatttcattctcctgtggagtgctgttgggatagcgaaggctgccaaaatcatcatcgtgccgccaattatgtttgaaagccatatgtacattttcaagacgctagcctcagccttgcacgagagaggccaccatacagtgttcctcctctctgaaggcagagacatcgccccatctaatcattacagcctccagcgctacccagggatctttaacagtaccacctcagatgctttcctacagtccaagatgcggaatattttctctgggagattgacagcaatcgaactgtttgacatactggatcactatactaagaactgtgacctgatggttggcaaccatgccctgatccagggtctgaagaaagaaaaatttgacctgctgctggtggaccctaatgatatgtgtggatttgtgatagctcatcttttaggggttaaatatgctgtattttcaactggcctttggtatcctgctgaagtgggtgctcctgctccattagcatacgtcccagagtttaactcactcctcacagaccgcatgaacttgctgcaaaggatgaaaaataccggtgtttacctcatttccagattaggggtcagctttctggttcttcccaaatatgaaaggataatgcagaagtacaacctgctgccagagaagtccatgtatgatttggttcatgggtccagcctgtggatgctgtgtactgacgtagcactggaattcccaagacccactctgcctaatgttgtttatgtaggaggaatcctaaccaaaccagccagcccactaccagaagatctccaaagatgggtaaatggtgctaatgaacatggctttgtcttggtgtcttttggagctggtgtcaagtatctgtcagaagacattgctaacaaactggcaggagctctggggagattgcctcaaaaagtgatttggaggttttctggacccaaaccaaagaatctaggaaacaacactaaactcatagaatggttaccacaaaatgacctgcttgggcattcaaagattaaagccttcctgagccatggtggtttgaacagtatttttgaaactatatatcatggtgtgcctgtagtgggaattccactctttggagaccattatgatactatgaccagagtacaggcaaaaggcatggggatattgctagaatggaagacagttactgaaaaagagctctatgaagcactagtgaaggttatcaataatcccagctaccgtcagagggctcagaagctttcggaaattcacaaggatcaacctggtcaccctgtcaatcgaactatctattggatagattatattattcgtcacaatggagcccatcacctacgtgccgctgtccatcagatctccttttgtcagtattttttactggatattgcctttgtgcttttgcttggtgctgccttgttatactttctcttgtcttgggtgacaaaatttatctacagaaaaatcaaaagtctgtggtctagaaataagcatagcacagttaatggacattaccacaatggaatcctcaatggcaagtacaaaagaaatggccatattaaacatgaaaagaaagtgaaatgagccaacagcccaggtgatagaaataaattggttcactcattgaatttttattgctattatttagtctaacagctactaaaagtaaaacatcagtaaacaattctaacatgcccttatgagatctactaatgaaattctgtggaattaagatggctgtaaaaagcacaaacctaaaatgcagaaatgtattttattcaaatactgatgtagagagttttggcactgaaccttttagaagccttaattatttaaatcaattcagtgactgtgtcagaccttagttttaaatcttgatatgtgcgtgtccc

SEQ ID NO: 197944 - DNA, 735 bp, Homo sapiens
  Payload ID: 19043
  Gene Name: UDP glycosyltransferase 8
  ENST ID: ENST00000507710
  CDS Start-End: 311-735
aggacacggttaaagcattgctatcaactgtgaacccagagagccctccttagccaacacgctaactccgaagcctcccttacgcccccgaaccaccgaaggcggcgacacctgattcagcgcacaaacacaggtcccttctgtcccggatacaattacgcggcagacacacactcaaactcgcgcggggcagccaagagacgagtgagagtaacacatgcgcactgtggattcctttgtgaatacataaaaggaaaagttaaaactcttataattcacactatccagagaaaaacaatactattttgctatgaagtcttacactccatatttcattctcctgtggagtgctgttgggatagcgaaggctgccaaaatcatcatcgtgccgccaattatgtttgaaagccatatgtacattttcaagacgctagcctcagccttgcacgagagaggccaccatacagtgttcctcctctctgaaggcagagacatcgccccatctaatcattacagcctccagcgctacccagggatctttaacagtaccacctcagatgctttcctacagtccaagatgcggaatattttctctgggagattgacagcaatcgaactgtttgacatactggatcactatactaagaactgtgacctgatggttggcaaccatgccctgatccagggtctgaagaaagaaaaatttgacctgctgctggtggaccctaatgatat

SEQ ID NO: 197945 - DNA, 2777 bp, Homo sapiens
  Payload ID: 19044
  Gene Name: UDP-Gal:betaGal beta 1,3-galactosyltransferase polypeptide 6
  Uniprot ID: Q96L58
  ENST ID: ENST00000379198
  CDS Start-End: 15-1004
ccggcgcgggcgccatgaagctgctgcggcgggcgtggcggcggcgggcggcgctaggcctgggcacgctggcgctgtgcggggcggcgctgctctacctggcgcgctgcgcggccgagcccggggaccccagggcgatgtcgggccgcagcccgcctccccccgcgcccgcgcgcgccgccgccttcctggcagtgctggtggccagcgcgccccgcgccgccgagcgccgcagcgtgatccgcagcacgtggcttgcgcggcgcggggccccgggcgacgtgtgggcgcgctttgccgtgggcacggccggcctgggcgccgaggagcggcgcgccctggagcgggagcaggcgcggcacggggacctgctgctgctgcccgcgctgcgcgacgcctacgaaaacctcacggccaaggtgctggccatgctggcctggctggacgagcacgtggccttcgagttcgtgctcaaggcggacgacgactccttcgcgcggctggacgcgctgctggccgagctgcgcgcccgcgagcccgcgcgccgccgccgcctctactggggcttcttctcgggccgcggccgcgtcaagccgggggggcgctggcgcgaggccgcctggcaactctgcgactactacctgccctacgcgctgggcggcggctacgtgctctcggccgacctggtgcactacctgcgcctcagccgcgactacctgcgcgcctggcacagcgaggacgtgtctctgggcgcctggctggcgccggtggacgtccagcgggagcacgacccgcgcttcgacaccgaataccggtcccgcggctgcagcaaccagtacctggtgacgcacaagcagagcctggaggacatgctggagaagcacgcgacgctggcgcgcgagggccgcctgtgcaagcgcgaggtgcagctgcgcctgtcctacgtgtacgactggtccgcgccgccctcgcagtgctgccagagaagggagggcatcccctgagccgccgcggcccggccctccgggacacctgcttcacccggcggcgccttggggcaggtgccgagcgggcgcactacgcccgggccccaaggcccccgtcccgcagccacgcttgtggtcgctgcgtcccggtctgcgtttgggagacccctgggggttgccggggcagcgcgccgtgtccaggtggaggtgcccgttcctggacctcagcgagcctgagccgggcccggccgcacgctgacccccgtgctgtccccgaccggctcacggggctgggctccgatcttccgtgtctcttatcagtggcgtttctcacgtctgcgtctcagatctaacgtggtttcacatcaatccgctttcatgggattttggtctctgtccagtgacttcgtggtaaatgtaactcagtgtttgcttgcgacttatttataaatattgtaagtttgtgtcgatgagtgtaagttggcagtgcgcacgtctcggtttttttacatgatttaaggaaagacttttatgtcagaacttggtgcctgtaccgtcaaccccgctgctgcccgtgtttaaacgcaggagaactttaaaactggccatctatcttttcagtgtacaagtcactgaacccattgtttctttctgaagagactttcctttcaaggcttcccatgggtccgcgccacacagggccggtgctgctttatttcagactctgccccaggttccaggaatccgaaccccggagtgctgacgcggttccccaacttccgccttaagaaaacaggaccagccggcaccaggcccgtctctcacgtactttaacacatccttgaaagcccctcgtttaatgagaaaagcgaacactgcggtccttgccaaagtaaaatgaagctgccccaggacaaggggttaccatgagctccctggagtccgacgcgggttttctctctgggggacctgggtggtccccgctgtggtctttgttgtcccactttgggaccgggtccagtctggggtctagtctcgagcatcagggtcaggctcggggcagggctgggttaggctccgggtcagtcttgccatgggtttgggagcaggtttgggttacttgcgtttgaaggcagcagtggtctcaggaggaagaaacgggggcgggagagagtggtgatctgtggtcagtgggtcagtgacctgcacggtgattctcccacctccaaaaggtaggggtgggactggaggcgtccctaggtcaggccgttgagttcgagctccgatgggccaccttgaatccaggactgaccgcccgtgtgtgcacagtttgttcttggacgaggactcgtgaggatcgagggctggggaccccggtgtgagcaggatggggccctgccctcccgtgggagttgtggactcgagcccaggggctgcccgtcacagcggtgtcccaggtccctgccatccgattttacctgggatgtcttctctggagtttggaattgcttgaggaaccctgcgtgtgcttggagaggccagagggcttgctgagaaccccatggacagtggagagcgggattcgaaccaagggctggactcccacacctctggcctgcgtcgcccagttctttgtggctctgaagaattggccgctgtggaaaagagcaaatgtccgagacccccaacaggaagagtctaaaaatccagtttgcaaccacttctgacctacaaaaaaatggaaatttagtgtttttcagcctaagacattaaatttcatatcagaacaaa

SEQ ID NO: 197946 - DNA, 5094 bp, Homo sapiens
  Payload ID: 19045
  Gene Name: UDP-Gal:betaGlcNAc beta 1,3-galactosyltransferase, polypeptide 1
  Uniprot ID: Q9Y5Z6
  ENST ID: ENST00000392690
  CDS Start-End: 93-1073
tattagtaatatgctgcctttggaagatgaaaacaaactagtgccaaggaggcgtattcttcaatatttggaatagacgtgttctcaagacaatggcttcaaaggtctcctgtttgtatgttttgacagttgtgtgctgggccagcgctctctggtacttgagtataactcgccctacttcttcttacactggctccaaaccattcagccacctaacagttgccaggaaaaacttcacctttggcaacataagaactcgacctatcaacccacattcttttgaatttcttatcaacgagcccaataaatgtgagaaaaacattccttttcttgttatcctcatcagcaccactcacaaggaatttgatgcccgtcaggcaatcagagagacgtggggggatgagaacaactttaaggggatcaagatagccaccctgttcctcctgggcaagaatgctgatcctgttctcaatcagatggtggagcaagagagccaaatcttccatgatatcatcgtggaggactttattgactcctaccataaccttaccctcaaaacattaatggggatgagatgggtggccactttttgttcaaaagccaagtatgtcatgaaaacagacagcgacatttttgtaaacatggacaatcttatttataaattactgaaaccctccaccaagccacgaagaaggtattttactggctatgtcattaatggaggaccgattcgggatgtccgcagtaagtggtatatgcccagggatttgtacccagacagtaactacccacctttctgttcggggactggctacatcttttcagccgatgtagctgaactcatttacaagacctcactccacacaaggctgcttcaccttgaagacgtatatgtgggactgtgtcttcgaaagctgggcatacatcctttccagaacagtggcttcaatcactggaaaatggcctacagtttgtgtaggtatcgccgagttatcactgtgcatcagatctctccagaagaaatgcacagaatctggaatgacatgtcaagcaagaaacatctcagatgttaggatttttaccaatgtaaatatgtttcttttctttttttaagaaatgggacctaaggtgttggtattttccaggtgtcgggggaaatgaactggtgaaggggttttgtaaagtttttgcttcctgctataagttcttttcttggattaccaatttatgaatgttagactctggtcatagaaacaataaatgagttagaagggccagatttcattctcagtcccagagcattgctatttatctcaaaaagtgacttccaaacaactcttaggattgacgtaccgtgcatctgagataaaaatttggttctgggaaactgaaactcacagtaatgtgtcatatcatccctgcaaaaattaatacacaaatagaaaccattttcaaaagcaattcagaaaggatgcacagtcaggaagacacactggatgtgattattaatatcgtgtgtgttgttacattatatttttacatatattcccatgtaatgtgtacagtctttgcagttccaccaagaaatgaacttggtacctgcagagtggctgcagttaaatagatgggagtttaaatttgagaatcaaacattctatgtgtttggaagacaactctgcttgctcatccaaggattaaatctggtcagcaggtggaatgtgtataaaatgctacttaacaaagtaaacaaaagattttttttttctttttttttctttcttttttgttttgctctttcagaacaaacattaaatggtgcctccaaggaaactttgccaaatataatctcacctgcttccttccagacagtgtcgctaagtgcatttcacagtttttggatctggcaggcatatgtctctatgtagaaaataagttggttggaggccagagaacaataaatcacattgagaaaatacaaatttaagtatgcattataattaacataagcttagcaatagtataagatgcccccacacacagacatttgcaaagcacatgagaaaatctttaagggtgtcaatattattgaaagacttggccctacttgctaacatctgaaaacaccagagcatgttcagcagcaatgctgttatgaggtattctgggggctctgtgattgaggaaggatggggaaggccaggttcgggtcccgttgatgccaccatacttattgggccatatgagtaggcatcgtaatcttgtgcttcaatgtgttcatttataaaaatggctgtaaaaaacacctacctcacaggtgctgtgagagcaaattgcatttgctaagtattttgagatccttagcttaaaaggtgctacgtaatgcaatgtatcatgtattatgctaaatgctaaaataattgcataattacaatgatggtcatcagtagcagtaatatcatcttaatataaaatctgctgaaataaagatcagctgtgaactatcactgcacctaattctaccaaggcttgacttttccttggctgtaatttaggtgtttgggaaggcttccatttctctgagatttcttctggtttcaatgaataagtgactaggtcagtgtgttgccttgatatcccaaggtgctgaaagtagaggcagctgcctttctttgggaaggaacctctggttggggtatattacagtaaatgaagcatatactttgcaaaatgcatcacgacaacttagatctcaggaaccactgaatctgaattctctctaagaaatttgagcgcaggtaaagctagttcacctctttcagaagcagcagaataggcagtcagcaaacctgcacattgcacatcttctaccatttattagaaaacacctgtttgttctcaaagaaagccccacagctgaaagagtgtaccttttttatttatttacttttttttttttttttttttttttttttgagacggagtctagctctgtggcccaggcgggagtgcagtggcacaatctcggctcactgcaagctccgcctcccgggttcacgccattctcctgcctcagcctcccgagtagctgggactacaggcgcccgccatcacgcccggctaatttttttgtatttttagtagagacggggtttcaccgtgttagccaggatggtctcgatctcctgacctcgtgatccgcccgcctcggcctcccaaagtgctgggattacaagcgtgagccaccgcgcccggccctatttacttattttttaacctgacccctggagccccccgtaggagttgatagcaaacagatagacacaatgaataagtggaagtcatggcttgtttctgcaaaacacgatctctcatcccccacccgaaaggacctgatatgagacaagacttcccatcccttaacacatcttcatcttatggtcagcaggactgctggttttgattagacaatagcaattaggtaacctggggagagatggatcagcacaaggtgaaccaccctccaacctgcagcctcaactgctgtgagttccaatcactgggaaagtctcacgacttcttacttggtttaccttcgagttgtgcagctgaatcaagcctctgtctcatactattgccttgcatctaccccatgctcagtcaaaccacctctggtgtcaagaaattacacattataaacatcatatatgtacacctatgaatcgttttatatgtgtgtgcatacattatgatacagccctgatctttaaaaggagcaaaaatcagagaatcgtatgtcttaaagaactatttccttacttttttatgctaggtaatgcccatgtgacaaacatgtaaatattcatcaaagaccacatgtatatattttaaaggcattttttcttctccccaactgtatgtatagctagaatctgcttgctgtgtaaccttttcttctgcatggagcttttggtgaagcaaggccatttgtccagtgtttcatagccttaagcatgtttgcccttcgttttttgaatgttcaaaaaatgtttaagtgatcaagaaaaagctctaactttcgacttttgttaattttatgacatgacactggccaaaatattgtttcaattactgttgagccattcttatcatttccctgacataaaatatgcaatgttttagacagtattctaccaagagtctctcagacaatttttacaaaaactctttttttccattatgcactggataataacagtatcagtgtctatgttcttaaagttcctttttttaatttactttttggaaaaacgtttctctttggtggctagtttcggtggcttggtgtcttcttatattggaacaagtgtccatttcaatatgtaatattgtatttttaaataaccagaatcaacaaagcgaagatcacttttaatttggattcaattcagaagaataaaacccctttgcgtgacacgatatggggaaaataaactatttacagaggagccaaggaagaagtttttcgatcaaatctcttctatcaaaagacaatggaatatttacctaaagcatctgggattcattttttacctttcctaatatgtgggtttagtgggagaattgattatgtcatttcttctgtaaaggtgaaaatcgtttttataaacaacaaagtaacttgtgaatgaaagaagtaatttactagaacaacgcttgttgatgataattgacatttaggtataacgtcatatatgaatgattgtatttatgtatttatttgtcaaaattgtacatactgtttcgccaaaagtaattgtctgtaaaagtgcactctccaggtttgtagtactatttagggttacatgggttgccaatcaagctgctaatcagaatactatttttttgtatcaatgttataaaactaaaaatgacagacactgaagatatcattacactttcttcaccttcctcttgaaatgtaaactgttgactgaaagcgcaatgcttatgtacaggcccatctgtcatgaggaagattatggttccataaagctgatttttttaaaccattgggacaaataaacagaaggagaa

SEQ ID NO: 197947 - DNA, 3274 bp, Homo sapiens
  Payload ID: 19046
  Gene Name: UDP-Gal:betaGlcNAc beta 1,3-galactosyltransferase, polypeptide 2
  Uniprot ID: O43825
  ENST ID: ENST00000367434
  CDS Start-End: 757-2025
cgttaaattctgctctgtcagagagagcatctgtcaagcccacatttaaactgctgcctgcctgtgcagcagctgaggaaccgtggatttcatattatagactaaaaccccattaaaactgctcaaaatccttcctgcagctgccaggcaacaacgaaagaagagaggtaaatcctattcttttccaatacaactgaagcactacattttagctctggctgctttacattgcagctcagtgttattagtagaaatatggatactgagacgagaacacagcactgcattgtccagccaggaaaatagcagatgtaaaaagcttcaatgcatcaactgtcgggaagagtcaacagtgctacaagcagaacgggcaactacagctcttttgtttaacgaaagagagaaaatgaaagaaagggaaaatttcagaagactaggacccatatgaacaaggagggtaactcgaagacaagcagacagatggacactttggatactgtgaaaagcaatcgcaggaggcagactgttgggggatgtgcgcatgttcgatagcatcttttttgctgaagtgatggcgtgccaaaagtattttcagtgggcataatcctcttcacataaatggcctgaccaaggaagaatgactacaagagagacaatgtgactgaattagaaaatgattgccaaagaatagtattaaggagaagaaaacatttttggtcaccaatctctcatataccactactggatatttacaacatgcttcagtggaggagaagacactgctgctttgcaaagatgacctggaatgccaaaaggtctctgttccgcactcatcttattggagtactttctctagtgtttctttttgctatgtttttgtttttcaatcatcatgactggctgccaggcagagctggattcaaagaaaaccctgtgacatacactttccgaggatttcggtcaacaaaaagtgagacaaaccacagctcccttcggaacatttggaaagaaacagtccctcaaaccctgaggcctcaaacagcaactaactctaataacacagacctgtcaccacaaggagttacaggcctggagaatacacttagtgccaatggaagtatttacaatgaaaaaggtactggacatccaaattcttaccatttcaaatatattattaatgagcctgaaaaatgccaagagaaaagtccttttttaatactactaatagctgcagagcctggacaaatagaagctagaagagctattcggcaaacttggggcaatgaaagtctagcacctggtattcaaatcacaagaatatttttgttgggcttaagtattaagctaaatggctaccttcaacgtgcaatactggaagaaagcagacaatatcatgatataattcaacaggaatacttagatacgtactataatttgaccattaaaacactaatgggcatgaactgggttgcaacatactgtccacatattccatatgttatgaaaactgacagtgacatgtttgtcaacactgaatatttaatcaataagttactgaagccagatctgcctcccagacataactatttcactggttacctaatgcgaggatatgcacccaatcgaaacaaagatagcaagtggtacatgccaccagacctctacccaagtgagcgttatcctgtcttctgttctggaactggttatgttttttctggagatctggcagaaaagatttttaaagtttctttaggtatccgccgtttgcacttggaagatgtatatgtagggatctgtcttgccaagttgagaattgatcctgtaccccctcccaatgagtttgtgttcaatcactggcgagtctcttattcgagctgtaaatacagccacctaattacctctcatcagttccagcctagtgaactgataaaatactggaaccatttacaacaaaataagcacaatgcctgtgccaacgcagcaaaagaaaaggcaggcaggtatcgccaccgtaaactacattagaaaagacaattttttttcaaatgtgcaatttgtaaatattgctaaaagcatgtatagttagaactgattacatccgtaggacaagttttagttaaaactcatcacataaagaaattcaagaagtatttttttaatttctgaagaagttaattcttaaaactataacattatataacaaaaaaggtttcccaaaacaatctatttaaaaaactgtataaggagattctgtgtattaacatgcaataacaagcatgcataaatcaatggttcaagtcttctgttaggggccaataaaatgtatctgcatatgttttccacataaattttaattcaagaaatgacagtcaaaagatccttcattttagattaagcttttcattttaatatataatttaatgtaaataaaacatcactatcaattttaaggaaactttttaattgtgcaaaggataaattttttgacctattttagggttctaaatgcaataagatttagttgagttattccacaaacacattataaagttcagatgtttcatcaatgcagttctcacgaaagtatttactttttaaaaataactgagatattattttaaatttcttttattaatactttcttttattaatatatgggggaaaattattttgacatgacgtggtaaaatgtgaaaaactaatgtgtctcaggctcaagtttttatagttattaaatgtttcaaaatagacaagttttgtttcctcattgatgttaagaaccaaactcctatttcaatgagttattggattagaccaattactgcactcttaaacagcaccaccatttaatttcatgtatatctaacttcgaatatatctgtaaagataatcgaagcaaaagtaatcacttaaaggcacaaataggatgtactgttgaaaaagataaagagtgcaggtgcagtttcattcaacacatttttaagatgcatgtctgccaaaatgcaacatacgggaagtttatttcctgacagcaggtgtacacatgccaacacttaatcattttatggcacctatttctttcttggagtgccaagtttgcaaacctgcagtttttaatttggtagatgacaaatattctgaatcaccaattaaaaacctttttgggagggatggggaaaactacaaacgtttgacaaacacaattctaggatgaacaatgtatacaatgcacttttatgaagtttttaaaaataaaggaaaacaaaaaacttta

SEQ ID NO: 197948 - DNA, 1694 bp, Homo sapiens
  Payload ID: 19047
  Gene Name: UDP-Gal:betaGlcNAc beta 1,3-galactosyltransferase, polypeptide 4
  Uniprot ID: O96024
  ENST ID: ENST00000383209
  CDS Start-End: 289-1425
gccggggcgaggcgggggaggggccgtgagtgccgcagtcggccagccatggagcggagcttgctggcggcgaggccgcggcgacaaggtagccacccccgcagcatgcctcgaccgcggtccgcagctgcaccgcctctccccgccccccagggtgcgctggtcccggtcgcgcgctcagacctccgcatcccgggcgtggtcggttaagtccccggccgtgacccaggcccggggagctagtctccgcccttcgctcttacggatcccctcggagtacgccgcaccatgcagctcaggctcttccggcgcctccttctcgccgctttgctgctggtgatcgtctggaccctcttcgggccttcggggttgggggaggagctgctgagcctctcactagcctccctgctcccagcccccgcctcaccggggccgcccctggccctgccccgcctcttgatccccaaccaggaagcttgcagtggtcccggggcccctcccttcctgctcatcctggtgtgcacggctccggagaacctgaaccagagaaacgccattcgggcttcgtggggcgggctgcgcgaggcccgggggctcagggtacagacgctattcttgctgggagagccgaacgcacagcaccccgtgtggggttcccaggggagtgacctggcctcggagtcagcagcccagggggatatcttgcaggccgccttccaggactcctaccgcaacctcaccctaaagaccctcagcgggctgaactgggctgagaaacactgccccatggcccgatacgtcctcaagacggacgatgatgtgtatgtcaacgtccctgaactggtatcagagctggtcttgcgagggggccgttgggggcaatgggagagaagcacggaaccccagagagaggctgagcaggaaggaggccaggttttgcacagcgaggaagtgcctcttctgtacttgggccgggtgcactggcgcgtgaacccctctcggacaccggggggcaggcaccgcgtatcagaggagcagtggcctcacacctggggcccctttccaccctatgcctcaggcacggggtatgtgctgtcagcgtctgctgtgcagctcattctcaaggtggccagccgggcaccccttctcccattagaggatgtctttgtgggggtaagtgcccgacgaggaggcctcgccccaacacagtgtgtcaagctggctggtgccacccactacccgctagaccggtgctgctatgggaaattcctgctgacgtcccacaggctggacccctggaagatgcaggaagcctggaagctggtgggtggctctgacggggaaaggactgcgcccttttgctcctggttccagggagtcctgggcatcctgcggtgtcgagcaatagcctggcttcagagctgagagtgcctggggccacaggaaaggcaggaacaggaccttctctctcccaggcccaacgcaggggccctcactggctgcagctgatctgtttccttataccagatcctcagtctcactaaagacagcgatatgggagacacccaggggcctggcccgccagcccaaaagatggtcatcgggaagaaaaaaagaaaaaaatgctgcagttgttctctcaagctagggcagaagaggggtgtcaagctcctcaataaacttgtctccacttc

SEQ ID NO: 197949 - DNA, 1694 bp, Homo sapiens
  Payload ID: 19047
  Gene Name: UDP-Gal:betaGlcNAc beta 1,3-galactosyltransferase, polypeptide 4
  Uniprot ID: O96024
  ENST ID: ENST00000451237
  CDS Start-End: 289-1425
gccggggcgaggcgggggaggggccgtgagtgccgcagtcggccagccatggagcggagcttgctggcggcgaggccgcggcgacaaggtagccacccccgcagcatgcctcgaccgcggtccgcagctgcaccgcctctccccgccccccagggtgcgctggtcccggtcgcgcgctcagacctccgcatcccgggcgtggtcggttaagtccccggccgtgacccaggcccggggagctagtctccgcccttcgctcttacggatcccctcggagtacgccgcaccatgcagctcaggctcttccggcgcctccttctcgccgctttgctgctggtgatcgtctggaccctcttcgggccttcggggttgggggaggagctgctgagcctctcactagcctccctgctcccagcccccgcctcaccggggccgcccctggccctgccccgcctcttgatccccaaccaggaagcttgcagtggtcccggggcccctcccttcctgctcatcctggtgtgcacggctccggagaacctgaaccagagaaacgccattcgggcttcgtggggcgggctgcgcgaggcccgggggctcagggtacagacgctattcttgctgggagagccgaacgcacagcaccccgtgtggggttcccaggggagtgacctggcctcggagtcagcagcccagggggatatcttgcaggccgccttccaggactcctaccgcaacctcaccctaaagaccctcagcgggctgaactgggctgagaaacactgccccatggcccgatacgtcctcaagacggacgatgatgtgtatgtcaacgtccctgaactggtatcagagctggtcttgcgagggggccgttgggggcaatgggagagaagcacggaaccccagagagaggctgagcaggaaggaggccaggttttgcacagcgaggaagtgcctcttctgtacttgggccgggtgcactggcgcgtgaacccctctcggacaccggggggcaggcaccgcgtatcagaggagcagtggcctcacacctggggcccctttccaccctatgcctcaggcacggggtatgtgctgtcagcgtctgctgtgcagctcattctcaaggtggccagccgggcaccccttctcccattagaggatgtctttgtgggggtaagtgcccgacgaggaggcctcgccccaacacagtgtgtcaagctggctggtgccacccactacccgctagaccggtgctgctatgggaaattcctgctgacgtcccacaggctggacccctggaagatgcaggaagcctggaagctggtgggtggctctgacggggaaaggactgcgcccttttgctcctggttccagggagtcctgggcatcctgcggtgtcgagcaatagcctggcttcagagctgagagtgcctggggccacaggaaaggcaggaacaggaccttctctctcccaggcccaacgcaggggccctcactggctgcagctgatctgtttccttataccagatcctcagtctcactaaagacagcgatatgggagacacccaggggcctggcccgccagcccaaaagatggtcatcgggaagagaaaaagaaaaaaatgctgcagttgttctctcaagctagggcagaagaggggtgtcaagctcctcaataaacttgtctccacttc

SEQ ID NO: 197950 - DNA, 1694 bp, Homo sapiens; identical to SEQ ID NO: 197949
  Payload ID: 19047
  Gene Name: UDP-Gal:betaGlcNAc beta 1,3-galactosyltransferase, polypeptide 4
  Uniprot ID: O96024
  ENST ID: ENST00000415322
  CDS Start-End: 289-1425

SEQ ID NO: 197951 - DNA, 1694 bp, Homo sapiens; identical to SEQ ID NO: 197949
  Payload ID: 19047
  Gene Name: UDP-Gal:betaGlcNAc beta 1,3-galactosyltransferase, polypeptide 4
  Uniprot ID: O96024
  ENST ID: ENST00000419471
  CDS Start-End: 289-1425

SEQ ID NO: 197952 - DNA, 1694 bp, Homo sapiens; identical to SEQ ID NO: 197949
  Payload ID: 19047
  Gene Name: UDP-Gal:betaGlcNAc beta 1,3-galactosyltransferase, polypeptide 4
  Uniprot ID: O96024
  ENST ID: ENST00000430971
  CDS Start-End: 289-1425

SEQ ID NO: 197953 - DNA, 2606 bp, Homo sapiens
  Payload ID: 19048
  Gene Name: UDP-Gal:betaGlcNAc beta 1,3-galactosyltransferase, polypeptide 5
  Uniprot ID: Q9Y2C3
  ENST ID: ENST00000343118
  CDS Start-End: 278-1210
ctctctagagaaccctgactaatacacctggagtgcagaatctgctggagaaactgccattccgttattgactggctggtcaggccatacagcctggtggtctagatgtgtttggagtgattcctgtcagaatcaccatttttggtaaacaaaccaagcccagaacctgataattatggagcattctacactgacagttctttgagacaaatttcctcttggcatttacactgtggctttagctttcaaaccagaggttcctcttacccagcaaaaaatggctttcccgaagatgagattgatgtatatttgccttctggttctgggggctctttgtttgtattttagcatgtacagtctaaatcctttcaaagaacagtcctttgtttacaagaaagacgggaacttccttaagctcccagatacagactgcaggcagacacctcccttcctcgtcctgctggtgacctcatcccacaaacagttggctgagcgcatggccatccggcagacgtgggggaaagagaggatggtgaagggaaagcagctgaagacattcttcctcctggggaccaccagcagtgcagcggaaacgaaagaggtggaccaggagagccagcgacacggggacattatccagaaggatttcctagacgtctattacaatctgaccctgaagaccatgatgggcatagaatgggtccatcgcttttgtcctcaggcggcgtttgtgatgaaaacagactcagacatgttcatcaatgttgactatctgactgaactgcttctgaagaaaaacagaacaaccaggtttttcactggcttcttgaaactcaatgagtttcccatcaggcagccattcagcaagtggtttgtcagtaaatctgaatatccgtgggacaggtacccaccattctgctccggcaccggctacgtgttttctggcgacgtggcgagtcaggtgtacaatgtctccaagagcgtcccatacattaaactggaagacgtgtttgtggggctctgcctcgaaaggctgaacatcagattggaggagctccactcccagccgaccttttttccagggggcttacgcttctccgtatgcctcttcaggaggatcgtggcctgccacttcatcaagcctcggactctcttggactactggcaggctctagagaattcccggggggaagattgtccgcctgtctgaggggagcccagaggcacatccggacaagtttcagataacccgtggggatagtttttgctagattttggaagagggggcgggacagaggatgctgttcttcagtgctgaaatccacgccagaatgtcggtgttcatgaagtcactgattagttcccacttggtgccccaggcaataataggcccgtctcttgggcacgcacactcttcatactaagtgtttgacatacacctggatttttgcatttcaggggtcagtatcctatgacatgatgggtgttaccatcctaattttacaggcaaggacacagcagctgcgagaggtacagaaacttgtcccaaggctcacagccagtaggcataggagcgggaatgaaaatcgagcactgtcagaatctggtgggcagcccctgacttgaaccactcccacgtgctgcctcccttaggaggggacactgatgatgaggtctcggagccggcatccttccatccctgtcgagtcccctccacctcagctcccagtccttgtgctttttggagctaagcctgggatgaccaaattcaccccagctccttcattcacagggctggatgtagctgggattgagtccatgttatcggctcggtactcaacacaacccaagtttcatccgaggaaatgtccccgcagtggatgcagctcacatgctgaggaacacccagctctggacagagttcttataaatgtataaattaggctcagaaaccactgcattctgacctgctgtacagactgcccacactgctgacctgcctagcgagcaggacatcccttctgagccatctgctgctctctcatttcatcaccccaactgtcccttgtttttgatcaatggggaccagccactgccccaggagcactttagggctctcagttcaaactgaaggacagttgaactcagatggggttcatgtgggattctgggagctttctgggaattcagttggagtcaagtcaggatgctctcaaggacccctcgggctcagagccctaaagtgggccctggtgaagcagggtggtcctgcgtccacttcccaagcctgagccaagctcatcttcattgaatgtctcatttggccgaggaacaactgaactttgtggtttgctgtttagccttcagtttgctccgctgcctcctacccagaggtttgtgcgagcctgtgttgcagggttgtataaaaccaaggtacttcgttagttttgcccattcagccatggtcacgtgacatgcaaagtaatcttgctcctaattatagaaatgatttttcttttaattttttactttaccagactttactttgtactcagagaagaggcctcacatggctgtgtcacatataaatgttggactaaactctt

SEQ ID NO: 197954 - DNA, 2763 bp, Homo sapiens
  Payload ID: 19048
  Gene Name: UDP-Gal:betaGlcNAc beta 1,3-galactosyltransferase, polypeptide 5
  Uniprot ID: Q9Y2C3
  ENST ID: ENST00000380618
  CDS Start-End: 434-1366
gggcccagatagaacaagaaggcagaagaaatgtgaattcctctttctctgctggagctgggatattcttcttctcctgcccttggacatcagagctgcaggctctctggcctttggacccgaggatttataccaagcaggtttctgggttctcaggcctttggccttggactgatagttacaccattggcatatctggttctgaggctcttggtcttggactgagccacactcctggcatcccagcgtctccagcttgcatggcctgtcacgtgattcctgtcagaatcaccatttttggtaaacaaaccaagcccagaacctgataattatggagcattctacactgacagttctttgagacaaatttcctcttggcatttacactgtggctttagctttcaaaccagaggttcctcttacccagcaaaaaatggctttcccgaagatgagattgatgtatatttgccttctggttctgggggctctttgtttgtattttagcatgtacagtctaaatcctttcaaagaacagtcctttgtttacaagaaagacgggaacttccttaagctcccagatacagactgcaggcagacacctcccttcctcgtcctgctggtgacctcatcccacaaacagttggctgagcgcatggccatccggcagacgtgggggaaagagaggatggtgaagggaaagcagctgaagacattcttcctcctggggaccaccagcagtgcagcggaaacgaaagaggtggaccaggagagccagcgacacggggacattatccagaaggatttcctagacgtctattacaatctgaccctgaagaccatgatgggcatagaatgggtccatcgcttttgtcctcaggcggcgtttgtgatgaaaacagactcagacatgttcatcaatgttgactatctgactgaactgcttctgaagaaaaacagaacaaccaggtttttcactggcttcttgaaactcaatgagtttcccatcaggcagccattcagcaagtggtttgtcagtaaatctgaatatccgtgggacaggtacccaccattctgctccggcaccggctacgtgttttctggcgacgtggcgagtcaggtgtacaatgtctccaagagcgtcccatacattaaactggaagacgtgtttgtggggctctgcctcgaaaggctgaacatcagattggaggagctccactcccagccgaccttttttccagggggcttacgcttctccgtatgcctcttcaggaggatcgtggcctgccacttcatcaagcctcggactctcttggactactggcaggctctagagaattcccggggggaagattgtccgcctgtctgaggggagcccagaggcacatccggacaagtttcagataacccgtggggatagtttttgctagattttggaagagggggcgggacagaggatgctgttcttcagtgctgaaatccacgccagaatgtcggtgttcatgaagtcactgattagttcccacttggtgccccaggcaataataggcccgtctcttgggcacgcacactcttcatactaagtgtttgacatacacctggatttttgcatttcaggggtcagtatcctatgacatgatgggtgttaccatcctaattttacaggcaaggacacagcagctgcgagaggtacagaaacttgtcccaaggctcacagccagtaggcataggagcgggaatgaaaatcgagcactgtcagaatctggtgggcagcccctgacttgaaccactcccacgtgctgcctcccttaggaggggacactgatgatgaggtctcggagccggcatccttccatccctgtcgagtcccctccacctcagctcccagtccttgtgctttttggagctaagcctgggatgaccaaattcaccccagctccttcattcacagggctggatgtagctgggattgagtccatgttatcggctcggtactcaacacaacccaagtttcatccgaggaaatgtccccgcagtggatgcagctcacatgctgaggaacacccagctctggacagagttcttataaatgtataaattaggctcagaaaccactgcattctgacctgctgtacagactgcccacactgctgacctgcctagcgagcaggacatcccttctgagccatctgctgctctctcatttcatcaccccaactgtcccttgtttttgatcaatggggaccagccactgccccaggagcactttagggctctcagttcaaactgaaggacagttgaactcagatggggttcatgtgggattctgggagctttctgggaattcagttggagtcaagtcaggatgctctcaaggacccctcgggctcagagccctaaagtgggccctggtgaagcagggtggtcctgcgtccacttcccaagcctgagccaagctcatcttcattgaatgtctcatttggccgaggaacaactgaactttgtggtttgctgtttagccttcagtttgctccgctgcctcctacccagaggtttgtgcgagcctgtgttgcagggttgtataaaaccaaggtacttcgttagttttgcccattcagccatggtcacgtgacatgcaaagtaatcttgctcctaattatagaaatgatttttcttttaattttttactttaccagactttactttgtactcagagaagaggcctcacatggctgtgtcacatataaatgttggactaaactctta

SEQ ID NO: 197955 - DNA, 13170 bp, Homo sapiens
  Payload ID: 19048
  Gene Name: UDP-Gal:betaGlcNAc beta 1,3-galactosyltransferase, polypeptide 5
  Uniprot ID: Q9Y2C3
  ENST ID: ENST00000380620
  CDS Start-End: 593-1525
acaggaaagccgctggttgtgatggtggctatgacaaaccttcagcctgaagacccgggagggaaaaatgaagctgacaagaagcacgttgctgagtgatcctgggttcccatcctccgcacccgtgcatccacgcgtgggcccagccagcaaggagaagtctaacaggcaggaggaggggagacacaaggagcccccgcatttcatctggaagagaggccattgaaaccaagcatttgtgttcaagtaagaaaatgtatccaagtcacaaagaaacataatttggcttttggagacatgagcagcttcatttctcatttgttcattcgaaagtctccactgggcttctgagtgccacatcctgtccagaatgatgaaagatacagaaaatggtgcctgctgaccttctggagttattggctagtaagaaagtgattcctgtcagaatcaccatttttggtaaacaaaccaagcccagaacctgataattatggagcattctacactgacagttctttgagacaaatttcctcttggcatttacactgtggctttagctttcaaaccagaggttcctcttacccagcaaaaaatggctttcccgaagatgagattgatgtatatttgccttctggttctgggggctctttgtttgtattttagcatgtacagtctaaatcctttcaaagaacagtcctttgtttacaagaaagacgggaacttccttaagctcccagatacagactgcaggcagacacctcccttcctcgtcctgctggtgacctcatcccacaaacagttggctgagcgcatggccatccggcagacgtgggggaaagagaggatggtgaagggaaagcagctgaagacattcttcctcctggggaccaccagcagtgcagcggaaacgaaagaggtggaccaggagagccagcgacacggggacattatccagaaggatttcctagacgtctattacaatctgaccctgaagaccatgatgggcatagaatgggtccatcgcttttgtcctcaggcggcgtttgtgatgaaaacagactcagacatgttcatcaatgttgactatctgactgaactgcttctgaagaaaaacagaacaaccaggtttttcactggcttcttgaaactcaatgagtttcccatcaggcagccattcagcaagtggtttgtcagtaaatctgaatatccgtgggacaggtacccaccattctgctccggcaccggctacgtgttttctggcgacgtggcgagtcaggtgtacaatgtctccaagagcgtcccatacattaaactggaagacgtgtttgtggggctctgcctcgaaaggctgaacatcagattggaggagctccactcccagccgaccttttttccagggggcttacgcttctccgtatgcctcttcaggaggatcgtggcctgccacttcatcaagcctcggactctcttggactactggcaggctctagagaattcccggggggaagattgtccgcctgtctgaggggagcccagaggcacatccggacaagtttcagataacccgtggggatagtttttgctagattttggaagagggggcgggacagaggatgctgttcttcagtgctgaaatccacgccagaatgtcggtgttcatgaagtcactgattagttcccacttggtgccccaggcaataataggcccgtctcttgggcacgcacactcttcatactaagtgtttgacatacacctggatttttgcatttcaggggtcagtatcctatgacatgatgggtgttaccatcctaattttacaggcaaggacacagcagctgcgagaggtacagaaacttgtcccaaggctcacagccagtaggcataggagcgggaatgaaaatcgagcactgtcagaatctggtgggcagcccctgacttgaaccactcccacgtgctgcctcccttaggaggggacactgatgatgaggtctcggagccggcatccttccatccctgtcgagtcccctccacctcagctcccagtccttgtgctttttggagctaagcctgggatgaccaaattcaccccagctccttcattcacagggctggatgtagctgggattgagtccatgttatcggctcggtactcaacacaacccaagtttcatccgaggaaatgtccccgcagtggatgcagctcacatgctgaggaacacccagctctggacagagttcttataaatgtataaattaggctcagaaaccactgcattctgacctgctgtacagactgcccacactgctgacctgcctagcgagcaggacatcccttctgagccatctgctgctctctcatttcatcaccccaactgtcccttgtttttgatcaatggggaccagccactgccccaggagcactttagggctctcagttcaaactgaaggacagttgaactcagatggggttcatgtgggattctgggagctttctgggaattcagttggagtcaagtcaggatgctctcaaggacccctcgggctcagagccctaaagtgggccctggtgaagcagggtggtcctgcgtccacttcccaagcctgagccaagctcatcttcattgaatgtctcatttggccgaggaacaactgaactttgtggtttgctgtttagccttcagtttgctccgctgcctcctacccagaggtttgtgcgagcctgtgttgcagggttgtataaaaccaaggtacttcgttagttttgcccattcagccatggtcacgtgacatgcaaagtaatcttgctcctaattatagaaatgatttttcttttaattttttactttaccagactttactttgtactcagagaagaggcctcacatggctgtgtcacatataaatgttggactaaactcttacttgaactcaggaaaagttacttgctgcaaaatggttttgaccatgttcaattgcaaaagtacgtctgatatcctattttgcataccatttcttgtgtttggattaagctgcttctttgtagatgtgtttcctcatcctggctgctctgaacgcactgggtcatgttcagaaaagcctccttctcaggtggaaaaaatcagggactgagcttgtcttttgaagcccaaatttaagagccacgcctctcggttccataggatgggccgcctctcattctgaagatgactgtgctttgagggagaagtcgtctgtttggcagtaggcctgcgtctgtgtttcgtggtctaccttgtcaggtgtgtgtctgtgtggccactggtctcagtcggcgaggccggtccagctgctgcctctgtgtgactggctttgggtctggccttcacagcatcagctcacagcccacagctccagggacaaatgaggacaggcgtgggctctccctactgcttctgtgtgttcttaaaggattttctttgagacccattgtttcccctcccctcccctcccctcccatccccttccctcttcttttcttttctttttttctgacagggtctcaccctgtcacccaagctggagcgtagtggcctgatctcgctgcagccttgaactcaacgagcctcaaacgagcctcctgcctcagccagtgggtagttgggattacaggtgtgtatttctttatacaatgaataattctttttcttgaggaaaaaacattatttcatgaatctagaacttgaaggaaccttagagctcattcaatcctgcctcctcttttatgtgggatgcaaacgaggctcagagagacgtaacaacttgcccaggaccttcccagcttgtttgttgcagaaggagggttccagctcagcgtgggtttcctggtgctgtcttgtctggatgtgagagtgagaaacaatgtgaaagcatgagtgaggaggccaagcagtgcttccccaggaacacccagcgctagctccagagtgggaatggagaggtccaggttggccgggccggggcttcaccgcaggcacccagagaggaaggattccgatgggcaggtgctgagctaggggctgtgtaggtattgcctcatctacatgctctcaatgagttttccgggggcagagacctgcagttgctcaggtttacagattaggaaactgaggcagagagagagagggtgaacaactcattcaaggttacataggtgaaaagtggtggaaacggggtgaccctaagctgccctgtggcctccccagccacctgctgacggagctgtgggagcacattgcattggctgctcccactgcctctctggggtgcctcctcagactcccccaaccatacacgcctacacccagcccccaaacctccgtactctgccttctactgtgactgtggcagaagccacttggcccccgtggtgccagaacccctggtattggactgactccagctcttcttccacagctcctgatgtggcctcactctcgtcctaccacctgctgtcccctctgctggatcaccccattagcacacagacacgctgccattttccacctgaccagaaatggccaccaccttccccgaccccttccctgacccccttccccgtcccgctgccccatcctgttgcgtttctggtggaaccccgcacgagagttttacttgtctgttgcctcgtcctaatccttcccttctttcccaaatgccgtctcatcagacttctgcacccccactccacccacatggcccttctcagggcacccaccaccccctgtggctgggtcctgtgggcagttcttgttctcctcctgcttgacgtggcgagtcctcatcaccagcttccaggacaccgggtgctcttggtctccctcctccttgctgctcgccttttccatctcccctgcttgctccttctctttgctctgacagtgtcgtgctggaggatcctgggctctgcgtggggccccctttcttccctggttatacccagtcctccgaggggcccaccttgtctcatggctttaaatatgttgatgatgtttccatttatctccagcctagaactctttcttgctcttcaatccactgcctacctgatttcccatagtgaacaatccaacactgaccttctggttaactgccccacatccagcccatctgcagccattcccgtctcaggtaatggccactccatcttcctgcagctcaagtgggaagccctggagccattccgactcctctcccatctggtgcatcaggaaagactgtgggaactaccttcaaattctctccaggagccaaccacctcctgcccctccactgcgaccacccttgttcaagcctgcattgcctctcacctgcattcgtgcagctacctccagaccctccctcagcttccattattgcatcctttggtctcttcccagcagcatccagagtgatcctttgaaaatctcatttctctgctcaaaaccctcctgaggtttcccatcaccaaggatattaaggataaaaaccacatccttcataccattgtctacctgtgattccctaatcgtgtccctttgctcactccctctggcctcttgctgttccctgaacagcagtctgttccagccacagcagcccctttgccctatgtgcccatccccgtcagccttggcactggctgtcctctctgctgggagtgccctttcttcagatgctctcatgcttcgcttctttgccttgttgacatttggtcaatgtcaccttctcagtgaggcctaccctgacctccctgtaggaaaatgcaactcacctcactcccatgccccgtaccttatattgttttccttgcacttaccaatttctaacaaagcatgtaatatctgtttattataacatatctatattttatggtttatgtttcacgcaacttgaatgtaacctttgtgtgggccgtgggtctttctctgtttccttcactgacgcaccttggattcttagcatggtcccagcacatagtagatgctcaataaacatttgttgagtggaactgaatgtattggtatggtaggtgggttttagaagggaatgggtgaaccaggactgaaaaaaaagaaatatttttcaaagtaagccaacactgtggtttcacttgagtcagtaagtaggaaatgggtgcgactctgtgacctgaaaacctagaaatgctccacagccatgctcttcaccccttttcttccaaaacggaaaacctcacacaatgcagggtggacagaatcacacggtgcagtctgtgcgcctgtcctccagcccgacacctggccagtcctgtctcatctacactgtcatgcaaactcttgtttttgtttgtttgtttttgagacagagtctcactctgtcacctaggctgaagtgcagtggtgcagtcttggatcactgcaacctccacctcctgggttcttgtgcctcagcctcccgagtagctaggattataggcatgcaccaccaaccagctaatttttgtattgttagtagagacggggtttcaccatgttggccaggctggtcttgagctcctgacctcaggtaatctacgtgcctcagcctcccagagtgctgggattataggtgtgagccaccacacccagccatgtttcaagaatttgtgcttcagctcagcacttagtggcagtgggaagaccagacctcctgacccttcagcctgctggcatccaccatgccttaaaaaacaaaacaaaaccctaaatgtatttaattcctgctcctcttcaaacacaccattgtaaccacataatacactgtgtgaaaagagaggaaagaaaaatccaagtcaacaataacttgccaggccttctttccttgagccccatatcccacgcccgctgtgctaacctctggcttgccgcccacacctgtctggattcatcccgactcgagccacctcctcctaactggtcccacgggcctgtccctgccactttccaatctgtcctccacttgacatttggagtaattttttaaaacagcaaatctgattaggaaactcagaggcccagggaagccagtgacttgccctctggcaccctgtcctgagggtagagcttcctggcacagggtcagtgagccccgaggccacctccctggaggctgcaggagggtgagcgtggtcaagagcagcaattttcattgtttcatgtgtcattgcctatttaacgagcttcgcagtgccctcaatttgctaagttaactttggccacgccgtccgtgagaggtcagactggtgatttccaactcccgccgggcaccgggtgctgcaccggttatcccaacaggctggcacagagggctgaaatggacttggaaagccaaataattaattttcatgcgagtttttgatccccttgagtgtggttatttttgtgcaaaaaattatcccgatgtttactttggtttcataagtaatttattaaaattccttcctaagctttaaatttcagctaacaaatatgagcatggcctctgggaatggtaagaacaaggaagcattgtgtgtgtgtgtgcacaccccaaggttgtgcagctagaagtgcagaatgtggattccgtccgctctttagggcacagctagccctgtgcacctgtagaaactgtactgacgtacagccttgcagagcctccagcttccatggtggcaggagccatggaaaatagagacccacccggtaaggaggtaactgggacaccaggttactgtctacctggtggggaagctggggaaaagggcccatgggaggatactaactggggaagaggagaccttgcttccagggctgggcgacccacttacggaggccccattccatttacatctccgctcaagcctccgcctccgggttccagccctggctctgcaatttgctagctgtggccccaggtggtcattctctctgcacctcagtctctgcatctctataaaatgggatgataatagtgttcacctcagaaggttgtcagaggtgtggaaattaagataattcacattgagttcttggcacggctgtgcctagcactgggtgcaggctgaatgcatgggctgctatcgcgatgttgtatctaatggcctgcagtggttgcttagcagcaatgggtttgcttggttatttcctgatttggggtaaatagatccagagaccaaggctccatgttatccccagcaccgggctgaccccaagtaccagagaggtctccatggccccaggctgcagaggacccaggttacaacttgctcaagtagacccaggatctaggcttatcctagtagatcttggtaccaggccagcctctgtgacctgagactccaagaccaccattgcagacccaggctctaagctagcctctgcaaactcaggatatatattccaaatatccctgatttggggggcaaggtctgtgtgtgatttgcagagtaacgatatgaagaaggaggtcttgttaagatggcgtggtgtggagtgcccaggtgtgaaatggttgtctcaatggaagttgtagcctcctcctcccatgacatcatcctcacacgtgctcagtgttaggcattttttccccctcctgctctgaatcaatgcgagtgagatatgcatgcgggagggacaagcttgcatggcacccagctgtggtacatttagaactcggcctcagccctccagtgtgaccttgggcatacccttcacccccgggctctgttcgctggggcagggtctgcgctctggagtcaggctgcctgggtttgaattttaccttcctcgccaagtcccttgagtggcaagttacttatcttctcattgtctccgttttgttatctgaagaatgggaccatagtagttcccgcctcatgggatgatcatgtgggttaaatgagaggatgagtataaactgctcaacatcccatggtaggtgctcagtaaatgcaggtgcttatgattatagtcagtgtttgggctgtgaattttggtggattctatggtggtgtatacagcactatctatcagtgtacctgtcagtgtctggtgatctctgtgcaaatcaaaaactcttcagattgagtctgtagggctttgtttcagctcttgttctttttcttcatttgaatctttcctggaactcttggagaagttcttctgttcgtgacattcttcacaatcagagcactgtgttcttgaccctcttaattcagaatatgtgaaaatctgaatgaggtaaaagaagttggagctggaagatgccttagaaattatctacagtatttttttttttaagataaaaccttttacagttaggaaagccaaagctcagaaaaatggagtgactttgccaggtccttcagcgagtggcacatccaggattaaaagctggcatcagaaatcccatgtcagacattcattcgtttatttattcatctgttgagtgctcagtgctttgaccgggcatcctgaatgagggtcaagctgaggttcgaggccgtgggttttgcatacagagctttcactgggtaaatacacaatgctgagaagattatcaggggcacctgatcccttgacagctgaataaagaagcgttccagtgccttctctgtgggcatcgtaagccatgtccatccatacctgctgtttcactgaaaccccacagcagcctctggagggcaccattcttataattatgcccctggatttaagaggaggaaactgaggggcaggtgactcagtgacttccccgggggctcagacgtggtggagacacaggccctcggcctccaaatgctgcctcccgcgagcagccttgcttttctccacttggcacagtggtgagtcctccgatgtatctgctttcataggaagcttgggaccagccctgcccaaggagtgtgccacctgaccccttttcctgtcttctgtcacttttttttttccaagtgttgatatgagtttcagtctgccccttcctgggcctgtttgacctcctgggattcggcacttagttatctgtgtcattcccaaggacctcccgtttagctggatcccctgacctgtcctgccctggccagccctctcttgaggttactcaagtgtccaatggcagcccaaacaaatgtctggcttcagaaaataaactcttcagtccagcccactttccctgtctccctatctaatgcccttgcaaaacaagcccgggggcgccacactcagactgtgtgtgtgtgtgtgtgtgtgtgtatctatgagagagagagagacagacagacagatctgaggctctaattagagataccatgctcagtggaagctggttctgaacaatgttaactgccccacccgtgtccatgaagggcagtggaagagcaaggggcggtttaattacctgggatgtaaaacagcaggcacccccactgccctcctcagctgttggggtggcagggtggagttgagggcctcactcgttttcacctttgcacaatcagtcacacatttgttatatgacagctatgtgccacacacccatgttcagtaaggtggaagccagctgcaggcgtggtccacagttccagacatctctgaaggatgtgacaccaactttcaggcagaacatttagaaagagtgaaataaagtgaaacagatcaaccagcctattgagtatctacgtgttttttttacaggcaagaactgaggaggcaatactatttagaatccttgataaacagttccaaaagaaaaaaaaaaacaggctttggtgactctcatgggccctccgtgccaagagtctatggctctgtgatatattaaatcaggcttgttaattatttaatctaacagctgccatgcaccctcattttaaaaacagatgaggcaatgtttacattttctccatgtcctccatttggaagtgtcttagtttgttttgtgttgctgtaacagaataccacagactgggcgatttatagacaatagaaattaatctggctcatggttctagaggctaggaagtccaagagcttggcactggcctctggtgagggccttcatgctgtgtcattgtgggcaaaagagcaaaacttgctttgataaaatcactcttggcaataactgaccctcctcttataataacattaattcattcatgacagcagaaccctcctgacccagtcacctcttaaaaggtcccacctctcaacgctgttgcactggggattaagtttccttacacatgcactttgggggacacattcaaactgtagcaggaattatttgctttctcataacatttttttaattaattaattttcagcgtttgttatatcagaatggacattatagcaatttccatggctgtgtcgctcctggcagattttaaagttcttccagcctgattcctctctctgtttgggtctctggcatggtgcctgctggagagtagatacttgataattatctattgggttctcaggggatctctcaaaggtggtattcaggcacccacaaggcaactcccatcacaagaaagaatggtggcctgggagtgagctgtaaggttccttcaaacatcagttcctgaagcctcttttattcattattgttgggacttgtttttatttctgtttcgttctacgtgaccccaaaatctgtatgtgaacactaggaactttatcatgggctgaggtgtatttgaagtaaactcttaactatgtctctgggatatgaaaggtgcttacattctctgttgggaatgtagagagaaggatttgcagtgtgtggcccctgggaatgtagaggcatgaatttctgtctgttttcctgctgttgaaatctgagtgctaggaacggacctcttgctctcagattggccttgaagctgaagggaacctgtccaccctctgcacagggcaagagccacgccaacaggaggaagttggagtgcatcctggcacctgccaatcggaagactgacaaacaaaaaattagtttttaattaatttaaaaaatgatcttcctacttatcagacacaatcacttttaaatatgagcagaaaaacgaactccatagccaaatgcaacattttgtgtcatactgctttacatcatctattctacctccattcactggtcaaagaagcgcagagttaagttggccagtgtggcgtggacacagccaggcgcagaccctcctgccagcgaagccagcgtgaggtctgttggctcaggggtccagtccctgggtccccgaagaggtaagccaaagacatagtgatacttggttcaattcggctccagagagtatcagatgggaaatagatgacttgttttacctggtcaaataagacatcactaaaatctaccatgactggaaattacttaatgcaaccagaggagacttcgcagtcaaattttgcttttcctaaaagacacgaaattaaatttacatgtcactgaatgctatttgaaactgtcatttccttgtatattagggggatctgctagactcttatgtcattgtattttggaaatgggtatatgtccttattattggttaataatcatatttatttttaatgaaaattaaattatgaaaataatgcacttaactaggtgagttttaggttgtcgattgatgtgataattcactcttcccgaaaaattggcaaggtaatggtctgaatcggacaatccttttgtttttacattgatgttttctatatttattttgtacctggaaaaatatttttacaatttattttgattttatatgtgtagaaaaatgtactgaacaatgttgacatgcttatttttgtaagagatgggtacttcttgttccccttggatttcggaagcaaagcaatgggaccctacgcttcagagtcttaatggggtggggcagtgtccattgaggtgtcctgtcgggaatgacaagtccagggcagattatgaggcaggcatcctttggagttcttctctcaggtatattttaactaaaagctatcatttaagttgaagaaatcaagtcttgtgaattgatacgattgtacttctagagtctttgatgataagttgtctttgcggtacagattggctcctcgatctttcaaagtgtcatttaaatggaaataaatgtctgaaacaga

SEQ ID NO: 197956 - DNA, 2341 bp, Homo sapiens
  Payload ID: 19048
  Gene Name: UDP-Gal:betaGlcNAc beta 1,3-galactosyltransferase, polypeptide 5
  ENST ID: ENST00000398714
  CDS Start-End: 1-945
atgtgtttggagatggctttcccgaagatgagattgatgtatatttgccttctggttctgggggctctttgtttgtattttagcatgtacagtctaaatcctttcaaagaacagtcctttgtttacaagaaagacgggaacttccttaagctcccagatacagactgcaggcagacacctcccttcctcgtcctgctggtgacctcatcccacaaacagttggctgagcgcatggccatccggcagacgtgggggaaagagaggatggtgaagggaaagcagctgaagacattcttcctcctggggaccaccagcagtgcagcggaaacgaaagaggtggaccaggagagccagcgacacggggacattatccagaaggatttcctagacgtctattacaatctgaccctgaagaccatgatgggcatagaatgggtccatcgcttttgtcctcaggcggcgtttgtgatgaaaacagactcagacatgttcatcaatgttgactatctgactgaactgcttctgaagaaaaacagaacaaccaggtttttcactggcttcttgaaactcaatgagtttcccatcaggcagccattcagcaagtggtttgtcagtaaatctgaatatccgtgggacaggtacccaccattctgctccggcaccggctacgtgttttctggcgacgtggcgagtcaggtgtacaatgtctccaagagcgtcccatacattaaactggaagacgtgtttgtggggctctgcctcgaaaggctgaacatcagattggaggagctccactcccagccgaccttttttccagggggcttacgcttctccgtatgcctcttcaggaggatcgtggcctgccacttcatcaagcctcggactctcttggactactggcaggctctagagaattcccggggggaagattgtccgcctgtctgaggggagcccagaggcacatccggacaagtttcagataacccgtggggatagtttttgctagattttggaagagggggcgggacagaggatgctgttcttcagtgctgaaatccacgccagaatgtcggtgttcatgaagtcactgattagttcccacttggtgccccaggcaataataggcccgtctcttgggcacgcacactcttcatactaagtgtttgacatacacctggatttttgcatttcaggggtcagtatcctatgacatgatgggtgttaccatcctaattttacaggcaaggacacagcagctgcgagaggtacagaaacttgtcccaaggctcacagccagtaggcataggagcgggaatgaaaatcgagcactgtcagaatctggtgggcagcccctgacttgaaccactcccacgtgctgcctcccttaggaggggacactgatgatgaggtctcggagccggcatccttccatccctgtcgagtcccctccacctcagctcccagtccttgtgctttttggagctaagcctgggatgaccaaattcaccccagctccttcattcacagggctggatgtagctgggattgagtccatgttatcggctcggtactcaacacaacccaagtttcatccgaggaaatgtccccgcagtggatgcagctcacatgctgaggaacacccagctctggacagagttcttataaatgtataaattaggctcagaaaccactgcattctgacctgctgtacagactgcccacactgctgacctgcctagcgagcaggacatcccttctgagccatctgctgctctctcatttcatcaccccaactgtcccttgtttttgatcaatggggaccagccactgccccaggagcactttagggctctcagttcaaactgaaggacagttgaactcagatggggttcatgtgggattctgggagctttctgggaattcagttggagtcaagtcaggatgctctcaaggacccctcgggctcagagccctaaagtgggccctggtgaagcagggtggtcctgcgtccacttcccaagcctgagccaagctcatcttcattgaatgtctcatttggccgaggaacaactgaactttgtggtttgctgtttagccttcagtttgctccgctgcctcctacccagaggtttgtgcgagcctgtgttgcagggttgtataaaaccaaggtacttcgttagttttgcccattcagccatggtcacgtgacatgcaaagtaatcttgctcctaattatagaaatgatttttcttttaattttttactttaccagactttactttgtactcagagaagaggcctcacatggctgtgtcacatataaatgttggactaaactctt

SEQ ID NO: 197957 - DNA, 2617 bp, Homo sapiens
  Payload ID: 19048
  Gene Name: UDP-Gal:betaGlcNAc beta 1,3-galactosyltransferase, polypeptide 5
  Uniprot ID: Q9Y2C3
  ENST ID: ENST00000615480
  CDS Start-End: 289-1221
atcctcggcctggacccagcgcctccggggaccggccgcgcgccccctgcgtccgcgggccgggatgcggctctgagccagcggcggcttccagcccgactgggcctgccggggctgccccgcgcacgtgattcctgtcagaatcaccatttttggtaaacaaaccaagcccagaacctgataattatggagcattctacactgacagttctttgagacaaatttcctcttggcatttacactgtggctttagctttcaaaccagaggttcctcttacccagcaaaaaatggctttcccgaagatgagattgatgtatatttgccttctggttctgggggctctttgtttgtattttagcatgtacagtctaaatcctttcaaagaacagtcctttgtttacaagaaagacgggaacttccttaagctcccagatacagactgcaggcagacacctcccttcctcgtcctgctggtgacctcatcccacaaacagttggctgagcgcatggccatccggcagacgtgggggaaagagaggatggtgaagggaaagcagctgaagacattcttcctcctggggaccaccagcagtgcagcggaaacgaaagaggtggaccaggagagccagcgacacggggacattatccagaaggatttcctagacgtctattacaatctgaccctgaagaccatgatgggcatagaatgggtccatcgcttttgtcctcaggcggcgtttgtgatgaaaacagactcagacatgttcatcaatgttgactatctgactgaactgcttctgaagaaaaacagaacaaccaggtttttcactggcttcttgaaactcaatgagtttcccatcaggcagccattcagcaagtggtttgtcagtaaatctgaatatccgtgggacaggtacccaccattctgctccggcaccggctacgtgttttctggcgacgtggcgagtcaggtgtacaatgtctccaagagcgtcccatacattaaactggaagacgtgtttgtggggctctgcctcgaaaggctgaacatcagattggaggagctccactcccagccgaccttttttccagggggcttacgcttctccgtatgcctcttcaggaggatcgtggcctgccacttcatcaagcctcggactctcttggactactggcaggctctagagaattcccggggggaagattgtccgcctgtctgaggggagcccagaggcacatccggacaagtttcagataacccgtggggatagtttttgctagattttggaagagggggcgggacagaggatgctgttcttcagtgctgaaatccacgccagaatgtcggtgttcatgaagtcactgattagttcccacttggtgccccaggcaataataggcccgtctcttgggcacgcacactcttcatactaagtgtttgacatacacctggatttttgcatttcaggggtcagtatcctatgacatgatgggtgttaccatcctaattttacaggcaaggacacagcagctgcgagaggtacagaaacttgtcccaaggctcacagccagtaggcataggagcgggaatgaaaatcgagcactgtcagaatctggtgggcagcccctgacttgaaccactcccacgtgctgcctcccttaggaggggacactgatgatgaggtctcggagccggcatccttccatccctgtcgagtcccctccacctcagctcccagtccttgtgctttttggagctaagcctgggatgaccaaattcaccccagctccttcattcacagggctggatgtagctgggattgagtccatgttatcggctcggtactcaacacaacccaagtttcatccgaggaaatgtccccgcagtggatgcagctcacatgctgaggaacacccagctctggacagagttcttataaatgtataaattaggctcagaaaccactgcattctgacctgctgtacagactgcccacactgctgacctgcctagcgagcaggacatcccttctgagccatctgctgctctctcatttcatcaccccaactgtcccttgtttttgatcaatggggaccagccactgccccaggagcactttagggctctcagttcaaactgaaggacagttgaactcagatggggttcatgtgggattctgggagctttctgggaattcagttggagtcaagtcaggatgctctcaaggacccctcgggctcagagccctaaagtgggccctggtgaagcagggtggtcctgcgtccacttcccaagcctgagccaagctcatcttcattgaatgtctcatttggccgaggaacaactgaactttgtggtttgctgtttagccttcagtttgctccgctgcctcctacccagaggtttgtgcgagcctgtgttgcagggttgtataaaaccaaggtacttcgttagttttgcccattcagccatggtcacgtgacatgcaaagtaatcttgctcctaattatagaaatgatttttcttttaattttttactttaccagactttactttgtactcagagaagaggcctcacatggctgtgtcacatataaatgttggactaaactctt

SEQ ID NO: 197958 - DNA, 4201 bp, Homo sapiens
  Payload ID: 19049
  Gene Name: UDP-Gal:betaGlcNAc beta 1,4- galactosyltransferase, polypeptide 1
  Uniprot ID: P15291
  ENST ID: ENST00000379731
  CDS Start-End: 188-1384
gcctcgggcggcttctcgccgctcccaggtctggctggctggaggagtctcagctctcagccgctcgcccgcccccgctccgggccctcccctagtcgccgctgtggggcagcgcctggcgggcggcccgcgggcgggtcgcctcccctcctgtagcccacacccttcttaaagcggcggcgggaagatgaggcttcgggagccgctcctgagcggcagcgccgcgatgccaggcgcgtccctacagcgggcctgccgcctgctcgtggccgtctgcgctctgcaccttggcgtcaccctcgtttactacctggctggccgcgacctgagccgcctgccccaactggtcggagtctccacaccgctgcagggcggctcgaacagtgccgccgccatcgggcagtcctccggggagctccggaccggaggggcccggccgccgcctcctctaggcgcctcctcccagccgcgcccgggtggcgactccagcccagtcgtggattctggccctggccccgctagcaacttgacctcggtcccagtgccccacaccaccgcactgtcgctgcccgcctgccctgaggagtccccgctgcttgtgggccccatgctgattgagtttaacatgcctgtggacctggagctcgtggcaaagcagaacccaaatgtgaagatgggcggccgctatgcccccagggactgcgtctctcctcacaaggtggccatcatcattccattccgcaaccggcaggagcacctcaagtactggctatattatttgcacccagtcctgcagcgccagcagctggactatggcatctatgttatcaaccaggcgggagacactatattcaatcgtgctaagctcctcaatgttggctttcaagaagccttgaaggactatgactacacctgctttgtgtttagtgacgtggacctcattccaatgaatgaccataatgcgtacaggtgtttttcacagccacggcacatttccgttgcaatggataagtttggattcagcctaccttatgttcagtattttggaggtgtctctgctctaagtaaacaacagtttctaaccatcaatggatttcctaataattattggggctggggaggagaagatgatgacatttttaacagattagtttttagaggcatgtctatatctcgcccaaatgctgtggtcgggaggtgtcgcatgatccgccactcaagagacaagaaaaatgaacccaatcctcagaggtttgaccgaattgcacacacaaaggagacaatgctctctgatggtttgaactcactcacctaccaggtgctggatgtacagagatacccattgtatacccaaatcacagtggacatcgggacaccgagctagcgttttggtacacggataagagacctgaaattagccagggacctctgctgtgtgtctctgccaatctgctgggctggtccctctcatttttaccagtctgagtgacaggtccccttcgctcatcattcagatggctttccagatgaccaggacgagtgggatattttgcccccaacttggctcggcatgtgaattcttagctctgcaaggtgtttatgcctttgcgggtttcttgatgtgttcgcagtgtcaccccagagtcagaactgtacacatcccaaaatttggtggccgtggaacacattcccggtgatagaattgctaaattgtcgtgaaataggttagaatttttctttaaattatggttttcttattcgtgaaaattcggagagtgctgctaaaattggattggtgtgatctttttggtagttgtaatttaacagaaaaacacaaaatttcaaccattcttaatgttacgtcctccccccacccccttctttcagtggtatgcaaccactgcaatcactgtgcatatgtcttttcttagcaaaaggattttaaaacttgagccctggaccttttgtcctatgtgtgtggattccagggcaactctagcatcagagcaaaagccttgggtttctcgcattcagtggcctatctccagattgtctgatttctgaatgtaaagttgttgtgtttttttttaaatagtagtttgtagtattttaaagaaagaacagatcgagttctaattatgatctagcttgattttgtgttgatccaaatttgcatagctgtttaatgttaagtcatgacaatttatttttcttggcatgctatgtaaacttgaatttcctatgtatttttattgtggtgttttaaatatggggaggggtattgagcattttttagggagaaaaataaatatatgctgtagtggccacaaataggcctatgatttagctggcaggccaggttttctcaagagcaaaatcaccctctggccccttggcaggtaaggcctcccggtcagcattatcctgccagacctcggggaggatacctgggagacagaagcctctgcacctactgtgcagaactctccacttccccaaccctccccaggtgggcagggcggagggagcctcagcctccttagactgacccctcaggcccctaggctggggggttgtaaataacagcagtcaggttgtttaccagccctttgcacctccccaggcagagggagcctctgttctggtgggggccacctccctcagaggctctgctagccacactccgtggcccaccctttgttaccagttcttcctccttcctcttttcccctgcctttctcattccttccttcgtctccctttttgttcctttgcctcttgcctgtcccctaaaacttgactgtggcactcagggtcaaacagactatccattccccagcatgaatgtgccttttaattagtgatctagaaagaagttcagccgaacccacaccccaactccctcccaagaacttcggtgcctaaagcctcctgttccacctcaggttttcacaggtgctcccaccccagttgaggctcccacccacagggctgtctgtcacaaacccacctctgttgggagctattgagccacctgggatgagatgacacaaggcactcctaccactgagcgcctttgccaggtccagcctgggctcaggttccaagactcagctgcctaatcccagggttgagccttgtgctcgtggcggaccccaaaccactgccctcctgggtaccagccctcagtgtggaggctgagctggtgcctggccccagtcttatctgtgcctttactgctttgcgcatctcagatgctaacttggttctttttccagaagcctttgtattggttaaaaattattttccattgcagaagcagctggactatgcaaaaagtatttctctgtcagttccccactctataccaaggatattattaaaactagaaatgactgcattgagagggagttgtgggaaataagaagaatgaaagcctctctttctgtccgcagatcctgacttttccaaagtgccttaaaagaaatcagacaaatgccctgagtggtaacttctgtgttattttactcttaaaaccaaactctaccttttcttgttgttttttttttttttttttttttttttttggttaccttctcattcatgtcaagtatgtggttcattcttagaaccaagggaaatactgctccccccatttgctgacgtagtgctctcatgggctcacctgggcccaaggcacagccagggcacagttaggcctggatgtttgcctggtccgtgagatgccgcgggtcctgtttccttactggggatttcagggctgggggttcagggagcatttccttttcctgggagttatgaccgcgaagttgtcatgtgccgtgcccttttctgtttctgtgtatcctattgctggtgactctgtgtgaactggcctttgggaaagatcagagagggcagaggtggcacaggacagtaaaggagatgctgtgctggccttcagcctggacagggtctctgctgactgccaggggcgggggctctgcatagccaggatgacggctttcatgtcccagagacctgttgtgctgtgtattttgatttcctgtgtatgcaaatgtgtgtatttaccattgtgtagggggctgtgtctgatcttggtgttcaaaacagaactgtatttttgcctttaaaattaaataatataacgtgaataaatgaccctatctttgtaactgca

SEQ ID NO: 197959 - DNA, 1535 bp, Homo sapiens
  Payload ID: 19049
  Gene Name: UDP-Gal:betaGlcNAc beta 1,4- galactosyltransferase, polypeptide 1
  ENST ID: ENST00000535206
  CDS Start-End: 188-865
gcctcgggcggcttctcgccgctcccaggtctggctggctggaggagtctcagctctcagccgctcgcccgcccccgctccgggccctcccctagtcgccgctgtggggcagcgcctggcgggcggcccgcgggcgggtcgcctcccctcctgtagcccacacccttcttaaagcggcggcgggaagatgaggcttcgggagccgctcctgagcggcagcgccgcgatgccaggcgcgtccctacagcgggcctgccgcctgctcgtggccgtctgcgctctgcaccttggcgtcaccctcgtttactacctggctggccgcgacctgagccgcctgccccaactggtcggagtctccacaccgctgcagggcggctcgaacagtgccgccgccatcgggcagtcctccggggagctccggaccggaggggcccggccgccgcctcctctaggcgcctcctcccagccgcgcccgggtggcgactccagcccagtcgtggattctggccctggccccgctagcaacttgacctcggtcccagtgccccacaccaccgcactgtcgctgcccgcctgccctgaggagtccccgctgcttgtgggccccatgctgattgagtttaacatgcctgtggacctggagctcgtggcaaagcagaacccaaatgtgaagatgggcggccgctatgcccccagggactgcgtctctcctcacaaggtggccatcatcattccattccgcaaccggcaggagcacctcaagtactggctatattatttgcacccagtcctgcagcgccagcagctggactatggcatctatgttatcaaccagtatgaaaaaataagaagactcctgtggtgaaggcttcgcctggtctgttctgctctggaggtggcagcgcatggtggttagtcccagcatcttcctggagatttgagcgtgagacgtgctggctgtgtgggctgtgccacctgaggaggattggccagtcataaggactcagcctggttgctgaatccagctggggaccttgaccccagtgactggcttttcagcggctacctgttctcgagacaaatgctgtcctcccctaaggagtctgggctgtggcaaagctatgacataggtacaaccgtccttttgccaggtggggcttaggtggagaagttgaagcctggactcagtcaagatctcaggactgggagcaaggagcctcttactcccagggtgcccacttggttcccactgactgttggtggaaactaggggctgagctggaggctttttagaggaagaaatgacaagctgggggctggattatccctgggggtgaaaatggagtcagctagataggttatgtcttgaaggagaggagggtcccctggtgtcaggaagcagagcctgaactccatgttagaccctggattggagagtgggcaggacacttgggagagacaggacttggtactggcgagggtactaccacacccattctgggagtggactatagagaaataaatcctaaaagtgg

SEQ ID NO: 197960 - DNA, 2004 bp, Homo sapiens
  Payload ID: 19050
  Gene Name: UDP-Gal:betaGlcNAc beta 1,4- galactosyltransferase, polypeptide 2
  Uniprot ID: O60909
  ENST ID: ENST00000309519
  CDS Start-End: 77-1282
agaacccctgcgccggagggagggtgggaatgtctgcacgtgggtctgggtgtgagctgtctgagagtctggatgtatggctgtggaagtccaggagcagtggccttgtttgccagcagccggatgcccgggcccactgggcgggccagtggccgcctgcgggatgagcagactgctgggggggacgctggagcgcgtctgcaaggctgtgctccttctctgcctgctgcacttcctcgtggccgtcatcctctactttgacgtctacgcccagcacctggccttcttcagccgcttcagtgcccgaggccctgcccatgccctccacccagctgctagcagcagcagcagcagcagcaactgctcccggcccaacgccaccgcctctagctccgggctccctgaggtccccagtgccctgcccggtcccacggctcccacgctgccaccctgtcctgactcgccacctggtcttgtgggcagactgctgatcgagttcacctcacccatgcccctggagcgggtgcagagggagaacccaggcgtgctcatgggcggccgatacacaccgcccgactgcaccccagcccagacggtggcggtcatcatcccctttagacaccgggaacaccacctgcgctactggctccactatctacaccccatcttgaggcggcagcggctgcgctacggcgtctatgtcatcaaccagcatggtgaggacaccttcaaccgggccaagctgcttaacgtgggcttcctagaggcgctgaaggaggatgccgcctatgactgcttcatcttcagcgatgtggacctggtccccatggatgaccgcaacctataccgctgcggcgaccaaccccgccactttgccattgccatggacaagtttggcttccggcttccctatgctggctactttggaggtgtgtcaggcctgagtaaggctcagtttctgagaatcaatggcttccccaatgagtactggggctggggtggcgaggatgatgacatcttcaaccggatctccctgactgggatgaagatctcacgcccagacatccgaatcggccgctaccgcatgatcaagcacgaccgcgacaagcataacgaacctaaccctcagaggtttaccaagattcaaaacacgaagctgaccatgaagcgggacggcattgggtcagtgcggtaccaggtcttggaggtgtctcggcaaccactcttcaccaatatcacagtggacattgggcggcctccgtcgtggccccctcggggctgacactaatggacagaggctctcggtgccgaagattgcctgccagaggactgaccacagcctggctggcagctgctctgtggaggacctccaggactgagactgggctctgttttccaagggtcttcactaggccccctagctacacctggaagtttcagaacccactttggggggcctcctgcctgggcaggctcttcaagtgtggccctctttggagtcaaccctccttcccgaccccctccccctagcccagccccagtcactgtcagggtcgggccagcccctgcactgcctcgcagagtggcctgggctaggtcactccacctctctgtgcctcagtttcccccccttgagtcccctagggcctggaagggtgggaggtatgtctagggggcagtgtctcttccagggggaattctcagctcttgggaacccccttgctcccaggggaggggaaacctttttcattcaacattgtagggggcaagctttggtgcgccccctgctgaggagcagccccaggaggggaccagaggggatgctgtgtcgctgcctgggatcttggggttggcctttgcatgggaggcaggtggggcttggatcagtaagtctggttcccgcctccctgtctgagagaggaggcaggagccccagggccggcttgtgtttgtacattgcacagaaacttgtgtgggtgctttagtaaaaaacgtgaatggagc

SEQ ID NO: 197961 - DNA, 2629 bp, Homo sapiens
  Payload ID: 19050
  Gene Name: UDP-Gal:betaGlcNAc beta 1,4- galactosyltransferase, polypeptide 2
  Uniprot ID: O60909
  ENST ID: ENST00000356836
  CDS Start-End: 791-1909
gtgttcagcctgccagccccgcccaaacgcacccctcagcctggccgccagcctgacccagaacccctgcgccggagggagggtgggaatgtctgcacgtgggtctgggtgtgagctgtctgagagtctggatgtatggctgtggaagtccaggagcagtggccttgtttgtgagtgtgggacttagtgtgttactgtcacccgggtgtgtctgtgactgtagttctctgtgtgtctgagtgtgggtgaccagctgggaccagggtgtccctgtgattctgtgtgcctgtgagactcaccctgctccctgaagcactgccagaagtggctgccgctctcttggaaccacagctggagccatcgcccaggcaagacccccttcctgccatgcccagtgctgtgcccatctccaggcccaagcatcccgttccgggaatcagaaccagctgtgctgggcaggacccagagtcttggtcccagtcccaaggggctggctttgaggtcttaagtgaggggtgtcccctgccttgccccgtattttgacgttttgctccagtgggaagggattctgtaaacatccagtctgtatttgggccccccggatgctgagggcaacttcccagcctggtcccagttggcctggcctgcttgtcgctgggatctgaatgaccaaaccacttcccaccatggctcctggaaggactaaatgaagtcatgagtataaagtgctcctgcatggccagcagccggatgcccgggcccactgggcgggccagtggccgcctgcgggatgagcagactgctgggggggacgctggagcgcgtctgcaaggctgtgctccttctctgcctgctgcacttcctcgtggccgtcatcctctactttgacgtctacgcccagcacctggccttcttcagccgcttcagtgcccgaggccctgcccatgccctccacccagctgctagcagcagcagcagcagcagcaactgctcccggcccaacgccaccgcctctagctccgggctccctgaggtccccagtgccctgcccggtcccacggctcccacgctgccaccctgtcctgactcgccacctggtcttgtgggcagactgctgatcgagttcacctcacccatgcccctggagcgggtgcagagggagaacccaggcgtgctcatgggcggccgatacacaccgcccgactgcaccccagcccagacggtggcggtcatcatcccctttagacaccgggaacaccacctgcgctactggctccactatctacaccccatcttgaggcggcagcggctgcgctacggcgtctatgtcatcaaccagcatggtgaggacaccttcaaccgggccaagctgcttaacgtgggcttcctagaggcgctgaaggaggatgccgcctatgactgcttcatcttcagcgatgtggacctggtccccatggatgaccgcaacctataccgctgcggcgaccaaccccgccactttgccattgccatggacaagtttggcttccggcttccctatgctggctactttggaggtgtgtcaggcctgagtaaggctcagtttctgagaatcaatggcttccccaatgagtactggggctggggtggcgaggatgatgacatcttcaaccggatctccctgactgggatgaagatctcacgcccagacatccgaatcggccgctaccgcatgatcaagcacgaccgcgacaagcataacgaacctaaccctcagaggtttaccaagattcaaaacacgaagctgaccatgaagcgggacggcattgggtcagtgcggtaccaggtcttggaggtgtctcggcaaccactcttcaccaatatcacagtggacattgggcggcctccgtcgtggccccctcggggctgacactaatggacagaggctctcggtgccgaagattgcctgccagaggactgaccacagcctggctggcagctgctctgtggaggacctccaggactgagactgggctctgttttccaagggtcttcactaggccccctagctacacctggaagtttcagaacccactttggggggcctcctgcctgggcaggctcttcaagtgtggccctctttggagtcaaccctccttcccgaccccctccccctagcccagccccagtcactgtcagggtcgggccagcccctgcactgcctcgcagagtggcctgggctaggtcactccacctctctgtgcctcagtttcccccccttgagtcccctagggcctggaagggtgggaggtatgtctagggggcagtgtctcttccagggggaattctcagctcttgggaacccccttgctcccaggggaggggaaacctttttcattcaacattgtagggggcaagctttggtgcgccccctgctgaggagcagccccaggaggggaccagaggggatgctgtgtcgctgcctgggatcttggggttggcctttgcatgggaggcaggtggggcttggatcagtaagtctggttcccgcctccctgtctgagagaggaggcaggagccccagggccggcttgtgtttgtacattgcacagaaacttgtgtgggtgctttagtaaaaaacgtgaatgga

SEQ ID NO: 197962 - DNA, 2203 bp, Homo sapiens
  Payload ID: 19050
  Gene Name: UDP-Gal:betaGlcNAc beta 1,4- galactosyltransferase, polypeptide 2
  Uniprot ID: O60909
  ENST ID: ENST00000372324
  CDS Start-End: 363-1481
ccgggcctgcccctccgaggcgccgtagcgcgggagggaggcggcggcgctgtggtccgtgggtccgccggtccgtgggtctgcccggccgcccggccccgccctgccccccggggcggctcggctccatggcccgcggcggcggcggcggcggcggcggcgggaggcgacccgggggccgcggtggccgctgaccgggcggcgggaggcggcggggccgggccatgggggacggaaccgtccgcagccgccggagccgggagccctgcccaagtcggagcggcgtcccctgctgagccccgagcgccgggccagcagccggatgcccgggcccactgggcgggccagtggccgcctgcgggatgagcagactgctgggggggacgctggagcgcgtctgcaaggctgtgctccttctctgcctgctgcacttcctcgtggccgtcatcctctactttgacgtctacgcccagcacctggccttcttcagccgcttcagtgcccgaggccctgcccatgccctccacccagctgctagcagcagcagcagcagcagcaactgctcccggcccaacgccaccgcctctagctccgggctccctgaggtccccagtgccctgcccggtcccacggctcccacgctgccaccctgtcctgactcgccacctggtcttgtgggcagactgctgatcgagttcacctcacccatgcccctggagcgggtgcagagggagaacccaggcgtgctcatgggcggccgatacacaccgcccgactgcaccccagcccagacggtggcggtcatcatcccctttagacaccgggaacaccacctgcgctactggctccactatctacaccccatcttgaggcggcagcggctgcgctacggcgtctatgtcatcaaccagcatggtgaggacaccttcaaccgggccaagctgcttaacgtgggcttcctagaggcgctgaaggaggatgccgcctatgactgcttcatcttcagcgatgtggacctggtccccatggatgaccgcaacctataccgctgcggcgaccaaccccgccactttgccattgccatggacaagtttggcttccggcttccctatgctggctactttggaggtgtgtcaggcctgagtaaggctcagtttctgagaatcaatggcttccccaatgagtactggggctggggtggcgaggatgatgacatcttcaaccggatctccctgactgggatgaagatctcacgcccagacatccgaatcggccgctaccgcatgatcaagcacgaccgcgacaagcataacgaacctaaccctcagaggtttaccaagattcaaaacacgaagctgaccatgaagcgggacggcattgggtcagtgcggtaccaggtcttggaggtgtctcggcaaccactcttcaccaatatcacagtggacattgggcggcctccgtcgtggccccctcggggctgacactaatggacagaggctctcggtgccgaagattgcctgccagaggactgaccacagcctggctggcagctgctctgtggaggacctccaggactgagactgggctctgttttccaagggtcttcactaggccccctagctacacctggaagtttcagaacccactttggggggcctcctgcctgggcaggctcttcaagtgtggccctctttggagtcaaccctccttcccgaccccctccccctagcccagccccagtcactgtcagggtcgggccagcccctgcactgcctcgcagagtggcctgggctaggtcactccacctctctgtgcctcagtttcccccccttgagtcccctagggcctggaagggtgggaggtatgtctagggggcagtgtctcttccagggggaattctcagctcttgggaacccccttgctcccaggggaggggaaacctttttcattcaacattgtagggggcaagctttggtgcgccccctgctgaggagcagccccaggaggggaccagaggggatgctgtgtcgctgcctgggatcttggggttggcctttgcatgggaggcaggtggggcttggatcagtaagtctggttcccgcctccctgtctgagagaggaggcaggagccccagggccggcttgtgtttgtacattgcacagaaacttgtgtgggtgctttagtaaaaaacgtgaatggagc

SEQ ID NO: 197963 - DNA, 1923 bp, Homo sapiens
  Payload ID: 19050
  Gene Name: UDP-Gal:betaGlcNAc beta 1,4- galactosyltransferase, polypeptide 2
  Uniprot ID: O60909
  ENST ID: ENST00000434555
  CDS Start-End: 283-1203
gaaccgtccgcagccgccggagccgggagccctgcccaagtcggagcggcgtcccctgctgagccccgagcgccgggccagcagccggatgcccgggcccactgggcgggccagtggccgcctgcgggatgagcagactgctgggggggacgctggagcgcgtctgcaaggctgtgctccttctctgcctgctgcacttcctcgtggccgtcatcctctactttgacgtctacgcccagcacctggccttcttcagccgcttcagtgcccgaggccctgcccatgccctccacccagctgctagcagcagcagcagcagcagcaactgctcccggcccaacgccaccgcctctagctccgggctccctgaggtccccagtgccctgcccggtcccacggctcccacgctgccaccctgtcctgactcgccacctggtcttgcgggtgcagagggagaacccaggcgtgctcatgggcggccgatacacaccgcccgactgcaccccagcccagacggtggcggtcatcatcccctttagacaccgggaacaccacctgcgctactggctccactatctacaccccatcttgaggcggcagcggctgcgctacggcgtctatgtcatcaaccagcatggtgaggacaccttcaaccgggccaagctgcttaacgtgggcttcctagaggcgctgaaggaggatgccgcctatgactgcttcatcttcagcgatgtggacctggtccccatggatgaccgcaacctataccgctgcggcgaccaaccccgccactttgccattgccatggacaagtttggcttccggcttccctatgctggctactttggaggtgtgtcaggcctgagtaaggctcagtttctgagaatcaatggcttccccaatgagtactggggctggggtggcgaggatgatgacatcttcaaccggatctccctgactgggatgaagatctcacgcccagacatccgaatcggccgctaccgcatgatcaagcacgaccgcgacaagcataacgaacctaaccctcagaggtttaccaagattcaaaacacgaagctgaccatgaagcgggacggcattgggtcagtgcggtaccaggtcttggaggtgtctcggcaaccactcttcaccaatatcacagtggacattgggcggcctccgtcgtggccccctcggggctgacactaatggacagaggctctcggtgccgaagattgcctgccagaggactgaccacagcctggctggcagctgctctgtggaggacctccaggactgagactgggctctgttttccaagggtcttcactaggccccctagctacacctggaagtttcagaacccactttggggggcctcctgcctgggcaggctcttcaagtgtggccctctttggagtcaaccctccttcccgaccccctccccctagcccagccccagtcactgtcagggtcgggccagcccctgcactgcctcgcagagtggcctgggctaggtcactccacctctctgtgcctcagtttcccccccttgagtcccctagggcctggaagggtgggaggtatgtctagggggcagtgtctcttccagggggaattctcagctcttgggaacccccttgctcccaggggaggggaaacctttttcattcaacattgtagggggcaagctttggtgcgccccctgctgaggagcagccccaggaggggaccagaggggatgctgtgtcgctgcctgggatcttggggttggcctttgcatgggaggcaggtggggcttggatcagtaagtctggttcccgcctccctgtctgagagaggaggcaggagccccagggccggcttgtgtttgtacattgcacagaaacttgtgtgggtgctttagtaaaaaacgtgaatgga

SEQ ID NO: 197964 - DNA, 1911 bp, Homo sapiens
  Payload ID: 19051
  Gene Name: UDP-Gal:betaGlcNAc beta 1,4- galactosyltransferase, polypeptide 3
  Uniprot ID: O60512
  ENST ID: ENST00000319769
  CDS Start-End: 224-1405
atggcggcagcgatgcctgcccggctgttggggtggcggtgacgacaggcagcaaaagaccagctggtcccagattcgctgctggagtgctggatggagcctttctctgccctctgtgacatttccaattttagataatgcctcacatctctgtccccccgggaccccctggagcccccatgatccctaagaagacagcttgaacctagatctcacccccaggatgttgcggaggctgctggagcggccttgcacgctggccctgcttgtgggctcccagctggctgtcatgatgtacctgtcactggggggcttccgaagtctcagtgccctatttggccgagatcagggaccgacatttgactattctcaccctcgtgatgtctacagtaacctcagtcacctgcctggggccccagggggtcctccagctcctcaaggtctgccctactgtccagaacgatctcctctcttagtgggtcctgtgtcggtgtcctttagcccagtgccatcactggcagagattgtggagcggaatccccgggtagaaccagggggccggtaccgccctgcaggttgtgagccccgctcccgaacagccatcattgtgcctcatcgtgcccgggagcaccacctgcgcctgctgctctaccacctgcaccccttcttgcagcgccagcagcttgcttatggcatctatgtcatccaccaggctggaaatggaacatttaacagggcaaaactgttgaacgttggggtgcgagaggccctgcgtgatgaagagtgggactgcctgttcttgcacgatgtggacctcttgccagaaaatgaccacaatctgtatgtgtgtgacccccggggaccccgccatgttgccgttgctatgaacaagtttggatacagcctcccgtacccccagtacttcggaggagtctcagcacttactcctgaccagtacctgaagatgaatggcttccccaatgaatactggggctggggtggtgaggatgacgacattgctaccagggtgcgcctggctgggatgaagatctctcggccccccacatctgtaggacactataagatggtgaagcaccgaggagataagggcaatgaggaaaatccccacagatttgacctcctggtccgtacccagaattcctggacgcaagatgggatgaactcactgacataccagttgctggctcgagagctggggcctctttataccaacatcacagcagacattgggactgaccctcggggtcctcgggctccttctgggccacgttacccacctggttcctcccaagccttccgtcaagagatgctgcaacgccggcccccagccaggcctgggcctctatctactgccaaccacacagccctccgaggttcacactgactcctccttcctgtctaccttaatcatgaaaccgaattcatggggttgtattctccccaccctcagctcctcactgttctcagagggatgtgagggaactgaactctggtgccgtgctagggggtaggggcctctccctcactgctggactggagctgggctcctgtagacctgaggggtccctctctctagggtctcctgtagggcttatgactgtgaatccttgatgtcatgattttatgtgacgattcctaggagtccctgcccctagagtaggagcagggctggaccccaagcccctccctcttccatggagagaagagtgatctggcttctcctcggacctctgtgaatatttattctatttatggttcccgggaagttgtttggtgaaggaagcccctccctgggcattttctgcctatgctggaatagctccctcttctggtcctggctcagggggctgggattttgatatattttctaataaaggactttgtctcgca

SEQ ID NO: 197965 - DNA, 1871 bp, Homo sapiens
  Payload ID: 19051
  Gene Name: UDP-Gal:betaGlcNAc beta 1,4- galactosyltransferase, polypeptide 3
  Uniprot ID: O60512
  ENST ID: ENST00000367998
  CDS Start-End: 186-1367
cccgcttccaagatggcggcagcgatgcctgcccggctgttggggtggcggtgacgacaggcagcaaaagaccagataatgcctcacatctctgtccccccgggaccccctggagcccccatgatccctaagaagacagcttgaacctagaattcccctctccctccctagatctcacccccaggatgttgcggaggctgctggagcggccttgcacgctggccctgcttgtgggctcccagctggctgtcatgatgtacctgtcactggggggcttccgaagtctcagtgccctatttggccgagatcagggaccgacatttgactattctcaccctcgtgatgtctacagtaacctcagtcacctgcctggggccccagggggtcctccagctcctcaaggtctgccctactgtccagaacgatctcctctcttagtgggtcctgtgtcggtgtcctttagcccagtgccatcactggcagagattgtggagcggaatccccgggtagaaccagggggccggtaccgccctgcaggttgtgagccccgctcccgaacagccatcattgtgcctcatcgtgcccgggagcaccacctgcgcctgctgctctaccacctgcaccccttcttgcagcgccagcagcttgcttatggcatctatgtcatccaccaggctggaaatggaacatttaacagggcaaaactgttgaacgttggggtgcgagaggccctgcgtgatgaagagtgggactgcctgttcttgcacgatgtggacctcttgccagaaaatgaccacaatctgtatgtgtgtgacccccggggaccccgccatgttgccgttgctatgaacaagtttggatacagcctcccgtacccccagtacttcggaggagtctcagcacttactcctgaccagtacctgaagatgaatggcttccccaatgaatactggggctggggtggtgaggatgacgacattgctaccagggtgcgcctggctgggatgaagatctctcggccccccacatctgtaggacactataagatggtgaagcaccgaggagataagggcaatgaggaaaatccccacagatttgacctcctggtccgtacccagaattcctggacgcaagatgggatgaactcactgacataccagttgctggctcgagagctggggcctctttataccaacatcacagcagacattgggactgaccctcggggtcctcgggctccttctgggccacgttacccacctggttcctcccaagccttccgtcaagagatgctgcaacgccggcccccagccaggcctgggcctctatctactgccaaccacacagccctccgaggttcacactgactcctccttcctgtctaccttaatcatgaaaccgaattcatggggttgtattctccccaccctcagctcctcactgttctcagagggatgtgagggaactgaactctggtgccgtgctagggggtaggggcctctccctcactgctggactggagctgggctcctgtagacctgaggggtccctctctctagggtctcctgtagggcttatgactgtgaatccttgatgtcatgattttatgtgacgattcctaggagtccctgcccctagagtaggagcagggctggaccccaagcccctccctcttccatggagagaagagtgatctggcttctcctcggacctctgtgaatatttattctatttatggttcccgggaagttgtttggtgaaggaagcccctccctgggcattttctgcctatgctggaatagctccctcttctggtcctggctcagggggctgggattttgatatattttctaataaaggactttgtctcg

SEQ ID NO: 197966 - DNA, 2414 bp, Homo sapiens
  Payload ID: 19051
  Gene Name: UDP-Gal:betaGlcNAc beta 1,4- galactosyltransferase, polypeptide 3
  Uniprot ID: O60512
  ENST ID: ENST00000622395
  CDS Start-End: 728-1909
gcctgcgggatacaacgggaatacaaaaatgcgctagagcggtccgcaacgctgtagcctgcgtaaggaacaattgatactaagtggcactaggctgcagggggtgccactgacacactgggagagggctcagccaaccacaaggtgataacgaggtcagcggagcaccagaaaccggctcactagcctcctgatcagtctcggcccagaggaaaatgaagggcttgagcttctgcttttacaaatctgaggggcaggaaatgaaatcccactagcagtctgcgtagtggagttgaaccctagcacccgctccccagggggtcgcctacaacgcgttccaggtgggcaggctcaggcgctgctccctcacaagcccccggccacgcggtgtctgggaccgggtgcctagtcagcccgggtggctccgccccgaggccccgccccatgacgcgagaccccgcccccgcagcgcccgcttccaagatggcggcagcgatgcctgcccggctgttggggtggcggtgacgacaggcagcaaaagaccagctggtcccagattcgctgctggagtgctggatggagcctttctctgccctctgtgacatttccaattttagataatgcctcacatctctgtccccccgggaccccctggagcccccatgatccctaagaagacagcttgaacctagaattcccctctccctccctagatctcacccccaggatgttgcggaggctgctggagcggccttgcacgctggccctgcttgtgggctcccagctggctgtcatgatgtacctgtcactggggggcttccgaagtctcagtgccctatttggccgagatcagggaccgacatttgactattctcaccctcgtgatgtctacagtaacctcagtcacctgcctggggccccagggggtcctccagctcctcaaggtctgccctactgtccagaacgatctcctctcttagtgggtcctgtgtcggtgtcctttagcccagtgccatcactggcagagattgtggagcggaatccccgggtagaaccagggggccggtaccgccctgcaggttgtgagccccgctcccgaacagccatcattgtgcctcatcgtgcccgggagcaccacctgcgcctgctgctctaccacctgcaccccttcttgcagcgccagcagcttgcttatggcatctatgtcatccaccaggctggaaatggaacatttaacagggcaaaactgttgaacgttggggtgcgagaggccctgcgtgatgaagagtgggactgcctgttcttgcacgatgtggacctcttgccagaaaatgaccacaatctgtatgtgtgtgacccccggggaccccgccatgttgccgttgctatgaacaagtttggatacagcctcccgtacccccagtacttcggaggagtctcagcacttactcctgaccagtacctgaagatgaatggcttccccaatgaatactggggctggggtggtgaggatgacgacattgctaccagggtgcgcctggctgggatgaagatctctcggccccccacatctgtaggacactataagatggtgaagcaccgaggagataagggcaatgaggaaaatccccacagatttgacctcctggtccgtacccagaattcctggacgcaagatgggatgaactcactgacataccagttgctggctcgagagctggggcctctttataccaacatcacagcagacattgggactgaccctcggggtcctcgggctccttctgggccacgttacccacctggttcctcccaagccttccgtcaagagatgctgcaacgccggcccccagccaggcctgggcctctatctactgccaaccacacagccctccgaggttcacactgactcctccttcctgtctaccttaatcatgaaaccgaattcatggggttgtattctccccaccctcagctcctcactgttctcagagggatgtgagggaactgaactctggtgccgtgctagggggtaggggcctctccctcactgctggactggagctgggctcctgtagacctgaggggtccctctctctagggtctcctgtagggcttatgactgtgaatccttgatgtcatgattttatgtgacgattcctaggagtccctgcccctagagtaggagcagggctggaccccaagcccctccctcttccatggagagaagagtgatctggcttctcctcggacctctgtgaatatttattctatttatggttcccgggaagttgtttggtgaaggaagcccctccctgggcattttctgcctatgctggaatagctccctcttctggtcctggctcagggggctgggattttgatatattttctaataaaggactttgtctcgc

SEQ ID NO: 197967 - DNA, 2385 bp, Homo sapiens
  Payload ID: 19052
  Gene Name: UDP-Gal:betaGlcNAc beta 1,4- galactosyltransferase, polypeptide 4
  Uniprot ID: O60513
  ENST ID: ENST00000359213
  CDS Start-End: 544-1578
aagagccgcctcccgggcggctggggcggtccccgagctgctttccgcgttctcccctctccgcgggcagtgctagctcgccgcggccgcctccggggaccacctggcttcatgtgtggatttccacggctcttgcccagaggcgggtacactgtgttccaatgtgccacggaactcacgcagtggcactttgtggcttcatgaaggaagaggcaggccacgcaacacttcctccccaagccaaggagaagtatcacttttagaggcagaggagcggaaggcagtgggtgtgaccaaaagtgccatttgttaaagcttatcttccttgccagattttaaaaactattatggaaaatctcaagcattcacaaaagtagagagaaagaaaggactctcagactgttggagcagaactactgagaaaaaccaggcattgtatcttcagttgtcatcaagttcgcaatcagattggaaaagctcaacttgaagctttcttgcctgcagtgaagcagagagatagatattattcacgtaataaaaaacatgggcttcaacctgactttccacctttcctacaaattccgattactgttgctgttgactttgtgcctgacagtggttgggtgggccaccagtaactacttcgtgggtgccattcaagagattcctaaagcaaaggagttcatggctaatttccataagaccctcattttggggaagggaaaaactctgactaatgaagcatccacgaagaaggtagaacttgacaactgcccttctgtgtctccttacctcagaggccagagcaagctcattttcaaaccagatctcactttggaagaggtacaggcagaaaatcccaaagtgtccagaggccggtatcgccctcaggaatgtaaagctttacagagggtcgccatcctcgttccccaccggaacagagagaaacacctgatgtacctgctggaacatctgcatcccttcctgcagaggcagcagctggattatggcatctacgtcatccaccaggctgaaggtaaaaagtttaatcgagccaaactcttgaatgtgggctatctagaagccctcaaggaagaaaattgggactgctttatattccacgatgtggacctggtacccgagaatgactttaacctttacaagtgtgaggagcatcccaagcatctggtggttggcaggaacagcactgggtacaggttacgttacagtggatattttgggggtgttactgccctaagcagagagcagtttttcaaggtgaatggattctctaacaactactggggatggggaggcgaagacgatgacctcagactcagggttgagctccaaagaatgaaaatttcccggcccctgcctgaagtgggtaaatatacaatggtcttccacactagagacaaaggcaatgaggtgaacgcagaacggatgaagctcttacaccaagtgtcacgagtctggagaacagatgggttgagtagttgttcttataaattagtatctgtggaacacaatcctttatatatcaacatcacagtggatttctggtttggtgcatgaccctgggtcttttggtgatgtttggaagaactgattctttgtttgcaataattttggcctagagacttcaaatagtagcacacattaagaacctgttacagctcattgttgagctgaatttttcctttttgtattttcttagcagagctcctggtgatgtagagtataaaacagttgtaacaagacagctttcttagtcattttgatcatgagggttaaatattgtaatatggatacttgaaggactttatataaaaggatgactcaaaggataaaatgaacgctatttgaggactctggttgaaggagatttatttaaatttgaagtaatatattatgggataaaaggccacaggaaataagactgctgaatgtctgagagaaccagagttgttctcgtccaaggtagaaaggtacgaagatacaatactgttattcatttatcctgtacaatcatctgtgaagtggtggtgtcaggtgagaaggcgtccacaaaagaggggagaaaaggcgacgaatcaggacacagtgaacttgggaatgaagaggtagcaggagggtggagtgtcggctgcaaaggcagcagtagctgagctggttgcagctgctgatagccttcaggggaggacctgcccaggtatgccttccagtgatgcccaccagagaatacattctctattagtttttaaagagtttttgtaaaatgattttgtacaagtaggatatgaattagcagtttacaagtttacatattaactaataataaatatgtctatcaaatacctctgtagtaaaatgtgaaaaagc

SEQ ID NO: 197968 - DNA, 2459 bp, Homo sapiens
  Payload ID: 19052
  Gene Name: UDP-Gal:betaGlcNAc beta 1,4- galactosyltransferase, polypeptide 4
  Uniprot ID: O60513
  ENST ID: ENST00000393765
  CDS Start-End: 618-1652
aaagccacccagaggccgaggcgtcaaccctccgtttccctcccggtgctccttccagcgcccggtgtggtcgatttggcgggggtggagcgccaggcgcgtgcagagccgggcggaccagcctctccggccaaggcgggaggcggagctcgtactcaagagccgcctcccgggcggctggggcggtccccgagctgctttccgcgttctcccctctccgcgggcagtgctagctcgccgcggccgcctccggggaccacctggcttcatgtgtggatttccacggctcttgcccagaggcgggtacactgtgttccaatgtgccacggaactcacgcagtggcactttgtggcttcatgaaggaagaggcaggccacgcaacacttcctccccaagccaaggagaagtatcacttttagaggcagaggagcggaaggcagtgggtgtgaccaaaagtgccatttgttaaagactgttggagcagaactactgagaaaaaccaggcattgtatcttcagttgtcatcaagttcgcaatcagattggaaaagctcaacttgaagctttcttgcctgcagtgaagcagagagatagatattattcacgtaataaaaaacatgggcttcaacctgactttccacctttcctacaaattccgattactgttgctgttgactttgtgcctgacagtggttgggtgggccaccagtaactacttcgtgggtgccattcaagagattcctaaagcaaaggagttcatggctaatttccataagaccctcattttggggaagggaaaaactctgactaatgaagcatccacgaagaaggtagaacttgacaactgcccttctgtgtctccttacctcagaggccagagcaagctcattttcaaaccagatctcactttggaagaggtacaggcagaaaatcccaaagtgtccagaggccggtatcgccctcaggaatgtaaagctttacagagggtcgccatcctcgttccccaccggaacagagagaaacacctgatgtacctgctggaacatctgcatcccttcctgcagaggcagcagctggattatggcatctacgtcatccaccaggctgaaggtaaaaagtttaatcgagccaaactcttgaatgtgggctatctagaagccctcaaggaagaaaattgggactgctttatattccacgatgtggacctggtacccgagaatgactttaacctttacaagtgtgaggagcatcccaagcatctggtggttggcaggaacagcactgggtacaggttacgttacagtggatattttgggggtgttactgccctaagcagagagcagtttttcaaggtgaatggattctctaacaactactggggatggggaggcgaagacgatgacctcagactcagggttgagctccaaagaatgaaaatttcccggcccctgcctgaagtgggtaaatatacaatggtcttccacactagagacaaaggcaatgaggtgaacgcagaacggatgaagctcttacaccaagtgtcacgagtctggagaacagatgggttgagtagttgttcttataaattagtatctgtggaacacaatcctttatatatcaacatcacagtggatttctggtttggtgcatgaccctgggtcttttggtgatgtttggaagaactgattctttgtttgcaataattttggcctagagacttcaaatagtagcacacattaagaacctgttacagctcattgttgagctgaatttttcctttttgtattttcttagcagagctcctggtgatgtagagtataaaacagttgtaacaagacagctttcttagtcattttgatcatgagggttaaatattgtaatatggatacttgaaggactttatataaaaggatgactcaaaggataaaatgaacgctatttgaggactctggttgaaggagatttatttaaatttgaagtaatatattatgggataaaaggccacaggaaataagactgctgaatgtctgagagaaccagagttgttctcgtccaaggtagaaaggtacgaagatacaatactgttattcatttatcctgtacaatcatctgtgaagtggtggtgtcaggtgagaaggcgtccacaaaagaggggagaaaaggcgacgaatcaggacacagtgaacttgggaatgaagaggtagcaggagggtggagtgtcggctgcaaaggcagcagtagctgagctggttgcagctgctgatagccttcaggggaggacctgcccaggtatgccttccagtgatgcccaccagagaatacattctctattagtttttaaagagtttttgtaaaatgattttgtacaagtaggatatgaattagcagtttacaagtttacatattaactaataataaatatgtctatcaaatacctctgtagtaaaatgtgaaaaagc

SEQ ID NO: 197969 - DNA, 884 bp, Homo sapiens
  Payload ID: 19052
  Gene Name: UDP-Gal:betaGlcNAc beta 1,4- galactosyltransferase, polypeptide 4
  ENST ID: ENST00000475803
  CDS Start-End: 476-884
agtgctagctcgccgcggccgcctccggggaccacctggcttcatgtgtggatttccacggctcttgcccagaggcgggtacactgtgttccaatgtgccacggaactcacgcagtggcactttgtggcttcatgaaggaagaggcaggccacgcaacacttcctccccaagccaaggagaagtatcacttttagaggcagaggagcggaaggcagtgggtgtgaccaaaagtgccatttgttaaagcttatcttccttgccagattttaaaaactattatggaaaatctcaagcattcacaaaagtagagagaaagaaaggactctcagactgttggagcagaactactgagaaaaaccaggcattgtatcttcagttgtcatcaagttcgcaatcagattggaaaagctcaacttgaagctttcttgcctgcagtgaagcagagagatagatattattcacgtaataaaaaacatgggcttcaacctgactttccacctttcctacaaattccgattactgttgctgttgactttgtgcctgacagtggttgggtgggccaccagtaactacttcgtgggtgccattcaagagattcctaaagcaaaggagttcatggctaatttccataagaccctcattttggggaagggaaaaactctgactaatgaagcatccacgaagaaggtagaacttgacaactgcccttctgtgtctccttacctcagaggccagagcaagctcattttcaaaccagatctcactttggaagaggtacaggcagaaaatcccaaagtgtccagaggccggtatcgccctcaggaatgtaaagctttacagagggtcgccatcctcgttccccaccggaacagagagaaacacc

SEQ ID NO: 197970 - DNA, 5794 bp, Homo sapiens
  Payload ID: 19052
  Gene Name: UDP-Gal:betaGlcNAc beta 1,4- galactosyltransferase, polypeptide 4
  ENST ID: ENST00000467604
  CDS Start-End: 393-1298
agtgctagctcgccgcggccgcctccggggaccacctggcttcatgtgtggatttccacggctcttgcccagaggcgggtacactgtgttccaatgtgccacggaactcacgcagtggcactttgtggcttcatgaaggaagaggcaggccacgcaacacttcctccccaagccaaggagaagtatcacttttagaggcagaggagcggaaggcagtgggtgtgaccaaaagtgccatttgttaaagactgttggagcagaactactgagaaaaaccaggcattgtatcttcagttgtcatcaagttcgcaatcagattggaaaagctcaacttgaagctttcttgcctgcagtgaagcagagagatagatattattcacgtaataaaaaacatgggcttcaacctgactttccacctttcctacaaattccgattactgttgctgttgactttgtgcctgacagtggttgggtgggccaccagtaactacttcgtgggtgccattcaagagattcctaaagcaaaggagttcatggctaatttccataagaccctcattttggggaagggaaaaactctgactaatgaagcatccacgaagaaggtagaacttgacaactgcccttctgtgtctccttacctcagaggccagagcaagctcattttcaaaccagatctcactttggaagaggtacaggcagaaaatcccaaagtgtccagaggccggtatcgccctcaggaatgtaaagctttacagagggtcgccatcctcgttccccaccggaacagagagaaacacctgatgtacctgctggaacatctgcatcccttcctgcagaggcagcagctggattatggcatctacgtcatccaccaggctgaaggtaaaaagtttaatcgagccaaactcttgaatgtgggctatctagaagccctcaaggaagaaaattgggactgctttatattccacgatgtggacctggtacccgagaatgactttaacctttacaagtgtgaggagcatcccaagcatctggtggttggcaggaacagcactgggtacaggttacgttacagtggatattttgggggtgttactgccctaagcagagagcagtttttcaaggtgaatggattctctaacaactactggggatggggaggcgaagacgatgacctcagactcagggttgagctccaaagaatgaaaatttcccggcccctgcctgaagtgggtaaatatacaatggtcttccacactagagacaaaggcaatgaggtgaacgcagaacggtaagtcctggcttcacctgcctagcaggctacctccctagtctgttctgtcaataaggactatgttgaattcgatcagatttgagccagttcattgtgttaaaagatttttattaagcaaattttcaaacagacacaaaaggagagaaagtggtgcactgaaccctcacgtctacagttctcaactcatggcctctcttctttccctcagtttttttcttaccccactggatttagaaatgtgtcacagatgtcatagcatttcatgtgtaactgcttcagtatgtattcttaaaatataagcaattttaaaaaaggaatcagaataccattatcatacctagaataaaattaacaatatctccttaatgtcatcaaatgtctagtcagtgttaagtacttttttatttttaaaaccagttgatcagatcagtgtctaaacaaggtccacattgcatttgaatgatctcttttaatatgtaggttccctctccctttctttatgtgttccttgatatttatttgtggaacaagccagattatttgtccaatagaattccttgcattatggatttttccaattgcatcctggtagtataacttaatatgtcctcctgacctctattttctcataaactggttgtattagtcagggttctctagagggacagaacgaacaggatagatgtatatatgaaggggagtttattaaggagtattgactcacactatcccaagatgaagtccacaataggccgcctgcaagctgaggaacgaggaagccagcccgggtcccaaaacctcaaaagtagggaagccaacagggcagccttcagtctgtggccaaaggcccgagagtccctggcaaaccactggtgtaggtccaagagtccagaagctgaagaacttggagtctgatgttcagggtcaggaagcccaggagaaagatgaaggccagaagactcagcaagttggcttctcccttcttctgcctgctttattttagcctcgctagcagttgattagatggtgcccacccacatggagggtagatctgcccctcccagtccactgactcaaatgttaatttcctttggcaacaccctcacagacacacccaggaacaatacttcacatccttcaatccaatcaagttgacactcagtattaaccatcacactgggatttctctgcatttctggagacttgaacagaatcttatttttgggcaagaattttcatttatggtgttgtgtacttcctccagtgtcacaacaggaggatgtaatgtctggttgtgtcattttgtgatgttaggattgatctgtgagtttcgatattgccagtctaatctatgcattgtgagattcctcatcagttttttacctaatgacttcagcagtcattgatgcttgatttctaaatttattatttaattaggagttgcaaaattgtaatattctaattctattgttccttctgcatttattagatttttctacaaagtactttcccttttcatgtatttgggtactctggggtatagtttttataggaaaggcagaataaagagaaaagagtcaagcactgattaaaaatttttcagactaatgacttggtgtttcctagcatccttcaggatgtagttcttgtactttttggtactcatattgtctcatctttggccaatgggatcttcttcaagctgggtcctgaatcccagtagtcctcgagagcttccctccctgtgctctgctgtgatgaaatgttctaggctcttcttgtacttttcctgccttgggaattggcctattcacaaggaatcctggcagataagccagttcttatgaggctttgattgaagaatctgtatttctttgttctgatttttccccttaaattttcaaacagtcttaaggggtttttagtgcttttgttatagtctacattttaaaacaatattaaagtgcttttagcctgatattaaacagtcctgttaaagttcatttatttttttctgaggcagggtctcgctcccaagctggagtgcagtggcgtgaccatggctcactacagcctcgatctctcaggctcaagcaatcctccaagctcagcctcccaagtagctgggaccacaggcatgtgtcaccatgcttggctaatttttttttattttttgtaaagacagggtcttcctgtgttgccaaaggctggtcttaaactcctgggctcaagcagtcctcctgcctcagcctcccaaagttctaggattacagcatgagctaccatgcctggcctaaagtttatattttaaagcattattaaatggcttttcacccttttggtagagtcaaccactccaacaaaatagctatttctattttctatgtttttctagtcattgtccataggtatgcatttttctctttatgttaaaaaaattaattattgagtagatacaaaagagtattcctaaattgtatgaaaagtatgaagattcttgatgccatgaacactgctgatatctcctacccccactttgagtgcatgacctgtgtggtcctccctaattctgtagtctcctccttcacatctcccctatccacctacccaagtaacacttctctgaatttttgtgataagtatttgtgataatgatagttatttctgctgtttcttggttttcttgttttcccatatgtttgtatccctaaacaaaagattgcttagttctgcatgtttttcaactttatgtaaatgaaatcacactgcatttattcttctctgactttatttagctgaacattatgcatctgatccccatccatattgtcatgggtaactagcatttattgtcttcactgctgaacaagtagaacctattcagttcactgcccacttgtcttcccagattccatggttctggccacactagtgacttctttaaatgcatcctgctcttttgcgtctgtgcatcttgcccagggtggtctctctgcctggagtgctttttccttcaccttcttcacttggtggatttctctctttcagcgttactgaaattttccttctccctgacacctcacccgacttcctcatgaagttaggtctcccttcattcatcctcatctacatacattctaatttttttggaggctcgtgaaagctatgtacccacctacagacaaactttccttataacataggaagattcagagatcccctgaagctcagccaaggatcagttagcaatggttggtacatatcctgtagtatctgtattccttgcacatccttctgtcctgtagactgggggctcactgagtgcagtgacacttttcatcatgggtccccgggttctcacgtggagtctgacacatgaatacatggctatcatgtctgtcaccttcaatggggcaaacaaactttgtaatggtaggaaacacaacaggtacaataatttacaaaaatatgtttgccacatttcagggcaaggcaaaatgcagtggagacatatgttaaattcttatcattcacatttgttctttttatctttaggatgaagctcttacaccaagtgtcacgagtctggagaacagatgggttgagtagttgttcttataaattagtatctgtggaacacaatcctttatatatcaacatcacagtggatttctggtttggtgcatgaccctgggtcttttggtgatgtttggaagaactgattctttgtttgcaataattttggcctagagacttcaaatagtagcacacattaagaacctgttacagctcattgttgagctgaatttttcctttttgtattttcttagcagagctcctggtgatgtagagtataaaacagttgtaacaagacagctttcttagtcattttgatcatgagggttaaatattgtaatatggatacttgaaggactttatataaaaggatgactcaaaggataaaatgaacgctatttgaggactctggttgaaggagatttatttaaatttgaagtaatatattatgggataaaaggccacaggaaataagactgctgaatgtctgagagaaccagagttgttctcgtccaaggtagaaaggtacgaagatacaatactgttattcatttatcctgtacaatcatctgtgaagtggtggtgtcaggtgagaaggcgtccacaaaagaggggagaaaaggcgacgaatcaggacacagtgaacttgggaatgaagaggtagcaggagggtggagtgtcggctgcaaaggcagcagtagctgagctggttgcagctgctgatagccttcaggggaggacctgcccaggtatgccttccagtgatgcccaccagagaatacattctctattagtttttaaagagtttttgtaaaatgattttgtacaagtaggatatgaattagcagtttacaagtttacatattaactaataataaatatgtctatcaaatacctctgtagtaaaatgtgaaaaagctt

SEQ ID NO: 197971 - DNA, 712 bp, Homo sapiens
  Payload ID: 19052
  Gene Name: UDP-Gal:betaGlcNAc beta 1,4- galactosyltransferase, polypeptide 4
  ENST ID: ENST00000471675
  CDS Start-End: 96-284
tgttgctgttgactttgtgcctgacagtggttgggtgggccaccagtaactacttcgtgggtgccattcaagagattcctaaagcaaaggagttcatggctaatttccataagaccctcattttggggaagggaaaaactctgactaatgaagcatccacgaagaaggtagaacttgacaactgcccttctgtgtctccttacctcagaggccagagcaagctcattttcaaaccagatctcactttggaagaggtacaggaaataagactgctgaatgtctgagagaaccagagttgttctcgtccaaggtagaaaggtacgaagatacaatactgttattcatttatcctgtacaatcatctgtgaagtggtggtgtcaggtgagaaggcgtccacaaaagaggggagaaaaggcgacgaatcaggacacagtgaacttgggaatgaagaggtagcaggagggtggagtgtcggctgcaaaggcagcagtagctgagctggttgcagctgctgatagccttcaggggaggacctgcccaggtatgccttccagtgatgcccaccagagaatacattctctattagtttttaaagagtttttgtaaaatgattttgtacaagtaggatatgaattagcagtttacaagtttacatattaactaataataaatatgtctatcaaatacctctgtagtaaaatgtgaaaaagc

SEQ ID NO: 197972 - DNA, 615 bp, Homo sapiens
  Payload ID: 19052
  Gene Name: UDP-Gal:betaGlcNAc beta 1,4- galactosyltransferase, polypeptide 4
  ENST ID: ENST00000479150
  CDS Start-End: 260-615
agtgctagctcgccgcggccgcctccggggtgagtacgctggctccgccggcgcccgggaaatgcagttccctggacacgggcgccgtgcgagggtagccgggcgacggccgggactgttggagcagaactactgagaaaaaccaggcattgtatcttcagttgtcatcaagttcgcaatcagattggaaaagctcaacttgaagctttcttgcctgcagtgaagcagagagatagatattattcacgtaataaaaaacatgggcttcaacctgactttccacctttcctacaaattccgattactgttgctgttgactttgtgcctgacagtggttgggtgggccaccagtaactacttcgtgggtgccattcaagagattcctaaagcaaaggagttcatggctaatttccataagaccctcattttggggaagggaaaaactctgactaatgaagcatccacgaagaaggtagaacttgacaactgcccttctgtgtctccttacctcagaggccagagcaagctcattttcaaaccagatctcactttggaagaggtacaggcagaaaatcccaaagtgtccagaggccggtatcgccctcaggaatgtaa

SEQ ID NO: 197973 - DNA, 582 bp, Homo sapiens
  Payload ID: 19052
  Gene Name: UDP-Gal:betaGlcNAc beta 1,4- galactosyltransferase, polypeptide 4
  ENST ID: ENST00000459820
  CDS Start-End: 575-582
agtgctagctcgccgcggccgcctccggggaccacctggcttcatgtgtggatttccacggctcttgcccagaggcgggtacactgtgttccaatgtgccacggaactcacgcagtggcactttgtggcttcatgaaggaagaggcaggccacgcaacacttcctccccaagccaaggagaagtatcacttttagaggcagaggagcggaaggcagtgggtgtgaccaaaagtgccatttgttaaagtctcctccaatctgaaatagttcctcagtttttcctcgtctttcatgattttgattcttcgaagagtaccagttaggtatatcgtggaatgaacttgtgcttatcttccttgccagattttaaaaactattatggaaaatctcaagcattcacaaaagtagagagaaagaaaggactctcagactgttggagcagaactactgagaaaaaccaggcattgtatcttcagttgtcatcaagttcgcaatcagattggaaaagctcaacttgaagctttcttgcctgcagtgaagcagagagatagatattattcacgtaataaaaaacatgggctt

SEQ ID NO: 197974 - DNA, 588 bp, Homo sapiens
  Payload ID: 19052
  Gene Name: UDP-Gal:betaGlcNAc beta 1,4- galactosyltransferase, polypeptide 4
  ENST ID: ENST00000493932
  CDS Start-End: 464-588
acggaggccgagcctggcgggaggcaccggctcaggtgctggcgttccgcgcggcgccgcctctgctgcgggccgggggagccagacgaggtgctgccgggaccacctggcttcatgtgtggatttccacggctcttgcccagaggcgggtacactgtgttccaatgtgccacggaactcacgcagtggcactttgtggcttcatgaaggaagaggcaggccacgcaacacttcctccccaagccaaggagaagtatcacttttagaggcagaggagcggaaggcagtgggtgtgaccaaaagtgccatttgttaaagactgttggagcagaactactgagaaaaaccaggcattgtatcttcagttgtcatcaagttcgcaatcagattggaaaagctcaacttgaagctttcttgcctgcagtgaagcagagagatagatattattcacgtaataaaaaacatgggcttcaacctgactttccacctttcctacaaattccgattactgttgctgttgactttgtgcctgacagtggttgggtgggccaccagtaactacttcgtgggtgccattcaagagattcc

SEQ ID NO: 197975 - DNA, 611 bp, Homo sapiens
  Payload ID: 19052
  Gene Name: UDP-Gal:betaGlcNAc beta 1,4- galactosyltransferase, polypeptide 4
  ENST ID: ENST00000459778
  CDS Start-End: 592-611
gctttccgcgttctcccctctccgcgggcagtgctagctcgccgcggccgcctccggggtcacgattccggggtcgcccccagcacttctccgccgggtgcatcaacctgaaaaagccccttcttcctggaaaccctccttctccagcgtttcaacggggaaactgatcagctgacaccagccccagtcctgcgaggggccggcgacctttgacctttctccaaaggggaccacctggcttcatgtgtggatttccacggctcttgcccagaggcgggtacactgtgttccaatgtgccacggaactcacgcagtggcactttgtggcttcatgaaggaagaggcaggccacgcaacacttcctccccaagccaaggagaagtatcacttttagaggcagaggagcggaaggcagtgggtgtgaccaaaagtgccatttgttaaagactgttggagcagaactactgagaaaaaccaggcattgtatcttcagttgtcatcaagttcgcaatcagattggaaaagctcaacttgaagctttcttgcctgcagtgaagcagagagatagatattattcacgtaataaaaaacatgggcttcaacctgacttt

SEQ ID NO: 197976 - DNA, 560 bp, Homo sapiens
  Payload ID: 19052
  Gene Name: UDP-Gal:betaGlcNAc beta 1,4- galactosyltransferase, polypeptide 4
  ENST ID: ENST00000473887
  CDS Start-End: 496-560
gtgcacactgttgcaaagtgttccagagtgggtgagggatggggacgtggcggtggtgagggtactggtagacctcctcagccgtttggtgatgaaaaggaggaaaaagaaaatggtaatctgagcgtggaggaccacctggcttcatgtgtggatttccacggctcttgcccagaggcgggtacactgtgttccaatgtgccacggaactcacgcagtggcactttgtggcttcatgaaggaagaggcaggccacgcaacacttcctccccaagccaaggagaagtatcacttttagaggcagaggagcggaaggcagtgggtgtgaccaaaagtgccatttgttaaagactgttggagcagaactactgagaaaaaccaggcattgtatcttcagttgtcatcaagttcgcaatcagattggaaaagctcaacttgaagctttcttgcctgcagtgaagcagagagatagatattattcacgtaataaaaaacatgggcttcaacctgactttccacctttcctacaaattccgattactgttgctgttgactttgtg

SEQ ID NO: 197977 - DNA, 563 bp, Homo sapiens
  Payload ID: 19052
  Gene Name: UDP-Gal:betaGlcNAc beta 1,4- galactosyltransferase, polypeptide 4
  ENST ID: ENST00000491906
  CDS Start-End: 489-563
agtgctagctcgccgcggccgcctccggggaccacctggcttcatgtgtggatttccacggctcttgcccagaggcgggtacactgtgttccaatgtgccacggaactcacgcagtggcactttgtggcttcatgaaggaagaggcaggccacgcaacacttcctccccaagccaaggagaagtatcacttttagaggcagaggagcggaaggcagtgggtgtgaccaaaagtgccatttgttaaagcttatcttccttgccagattttaaaaactattatggaaaatctcaagcattcacaaaagtagagagaaagaaaggactctcaggaggccagagcaagctcattttcaaaccagatctcactttggaagaggtacaggcagaaaatcccaaagtgtccagaggccggtatcgccctcaggaatgtaaagctttacagagggtcgccatcctcgttccccaccggaacagagagaaacacctgatgtacctgctggaacatctgcatcccttcctgcagaggcagcagctggattatggcatctacgtcatccaccag

SEQ ID NO: 197978 - DNA, 2494 bp, Homo sapiens
  Payload ID: 19052
  Gene Name: UDP-Gal:betaGlcNAc beta 1,4- galactosyltransferase, polypeptide 4
  Uniprot ID: O60513
  ENST ID: ENST00000483209
  CDS Start-End: 643-1677
accggctcaggtgctggcgttccgcgcggcgccgcctctgctgcgggccgggggagccagacgaggtgctgccgggtaggaaaaaatccagggctcattcataccccaggtcacgattccggggtcgcccccagcacttctccgccgggtgcatcaacctgaaaaagccccttcttcctggaaaccctccttctccagcgtttcaacggggaaactgatcagctgacaccagccccagtcctgcgaggggccggcgacctttgacctttctccaaaggggaccacctggcttcatgtgtggatttccacggctcttgcccagaggcgggtacactgtgttccaatgtgccacggaactcacgcagtggcactttgtggcttcatgaaggaagaggcaggccacgcaacacttcctccccaagccaaggagaagtatcacttttagaggcagaggagcggaaggcagtgggtgtgaccaaaagtgccatttgttaaagactgttggagcagaactactgagaaaaaccaggcattgtatcttcagttgtcatcaagttcgcaatcagattggaaaagctcaacttgaagctttcttgcctgcagtgaagcagagagatagatattattcacgtaataaaaaacatgggcttcaacctgactttccacctttcctacaaattccgattactgttgctgttgactttgtgcctgacagtggttgggtgggccaccagtaactacttcgtgggtgccattcaagagattcctaaagcaaaggagttcatggctaatttccataagaccctcattttggggaagggaaaaactctgactaatgaagcatccacgaagaaggtagaacttgacaactgcccttctgtgtctccttacctcagaggccagagcaagctcattttcaaaccagatctcactttggaagaggtacaggcagaaaatcccaaagtgtccagaggccggtatcgccctcaggaatgtaaagctttacagagggtcgccatcctcgttccccaccggaacagagagaaacacctgatgtacctgctggaacatctgcatcccttcctgcagaggcagcagctggattatggcatctacgtcatccaccaggctgaaggtaaaaagtttaatcgagccaaactcttgaatgtgggctatctagaagccctcaaggaagaaaattgggactgctttatattccacgatgtggacctggtacccgagaatgactttaacctttacaagtgtgaggagcatcccaagcatctggtggttggcaggaacagcactgggtacaggttacgttacagtggatattttgggggtgttactgccctaagcagagagcagtttttcaaggtgaatggattctctaacaactactggggatggggaggcgaagacgatgacctcagactcagggttgagctccaaagaatgaaaatttcccggcccctgcctgaagtgggtaaatatacaatggtcttccacactagagacaaaggcaatgaggtgaacgcagaacggatgaagctcttacaccaagtgtcacgagtctggagaacagatgggttgagtagttgttcttataaattagtatctgtggaacacaatcctttatatatcaacatcacagtggatttctggtttggtgcatgaccctgggtcttttggtgatgtttggaagaactgattctttgtttgcaataattttggcctagagacttcaaatagtagcacacattaagaacctgttacagctcattgttgagctgaatttttcctttttgtattttcttagcagagctcctggtgatgtagagtataaaacagttgtaacaagacagctttcttagtcattttgatcatgagggttaaatattgtaatatggatacttgaaggactttatataaaaggatgactcaaaggataaaatgaacgctatttgaggactctggttgaaggagatttatttaaatttgaagtaatatattatgggataaaaggccacaggaaataagactgctgaatgtctgagagaaccagagttgttctcgtccaaggtagaaaggtacgaagatacaatactgttattcatttatcctgtacaatcatctgtgaagtggtggtgtcaggtgagaaggcgtccacaaaagaggggagaaaaggcgacgaatcaggacacagtgaacttgggaatgaagaggtagcaggagggtggagtgtcggctgcaaaggcagcagtagctgagctggttgcagctgctgatagccttcaggggaggacctgcccaggtatgccttccagtgatgcccaccagagaatacattctctattagtttttaaagagtttttgtaaaatgattttgtacaagtaggatatgaattagcagtttacaagtttacatattaactaataataaatatgtctatcaaatacctctgtagtaaaatgtgaaaaagctttgagtgtt

SEQ ID NO: 197979 - DNA, 641 bp, Homo sapiens
  Payload ID: 19052
  Gene Name: UDP-Gal:betaGlcNAc beta 1,4- galactosyltransferase, polypeptide 4
  ENST ID: ENST00000470111
  CDS Start-End: 478-641
agtgctagctcgccgcggccgcctccggggtgagtacgctggctccgccggcgcccgggaaatgcagttccctggacacgggcgccgtgcgagggtagccgggcgacggccggggaccacctggcttcatgtgtggatttccacggctcttgcccagaggcgggtacactgtgttccaatgtgccacggaactcacgcagtggcactttgtggcttcatgaaggaagaggcaggccacgcaacacttcctccccaagccaaggagaagtatcacttttagaggcagaggagcggaaggcagtgggtgtgaccaaaagtgccatttgttaaagactgttggagcagaactactgagaaaaaccaggcattgtatcttcagttgtcatcaagttcgcaatcagattggaaaagctcaacttgaagctttcttgcctgcagtgaagcagagagatagatattattcacgtaataaaaaacatgggcttcaacctgactttccacctttcctacaaattccgattactgttgctgttgactttgtgcctgacagtggttgggtgggccaccagtaactacttcgtgggtgccattcaagagattcctaaagcaaaggagttcatggctaatttccataagaccct

SEQ ID NO: 197980 - DNA, 2107 bp, Homo sapiens
  Payload ID: 19052
  Gene Name: UDP-Gal:betaGlcNAc beta 1,4- galactosyltransferase, polypeptide 4
  ENST ID: ENST00000480814
  CDS Start-End: 365-1105
ggaccacctggcttcatgtgtggatttccacggctcttgcccagaggcgggtacactgtgttccaatgtgccacggaactcacgcagtggcactttgtggcttcatgaaggaagaggcaggccacgcaacacttcctccccaagccaaggagaagtatcacttttagaggcagaggagcggaaggcagtgggtgtgaccaaaagtgccatttgttaaagactgttggagcagaactactgagaaaaaccaggcattgtatcttcagttgtcatcaagttcgcaatcagattggaaaagctcaacttgaagctttcttgcctgcagtgaagcagagagatagatattattcacgtaataaaaaacatgggcttcaacctgactttccacctttcctacaaattccgattactgttgctgttgactttgtgcctgacagtggttgggtgggccaccagtaactacttcgtgggtgccattcaagagattcctaaagcaaaggagttcatggctaatttccataagaccctcattttggggaagggaaaaactctgactaatgaagcatccacgaagaaggtagaacttgacaactgcccttctgtgtctccttacctcagaggccagagcaagctcattttcaaaccagatctcactttggaagaggtacaggcagaaaatcccaaagtgtccagaggccggtatcgccctcaggaatgtaaagctttacagagggtcgccatcctcgttccccaccggaacagagagaaacacctgatgtacctgctggaacatctgcatcccttcctgcagaggcagcagctggattatggcatctacgtcatccaccaggctgaaggtaaaaagtttaatcgagccaaactcttgaatgtgggctatctagaagccctcaaggaagaaaattgggactgctttatattccacgatgtggacctggtacccgagaatgactttaacctttacaagtgtgaggagcatcccaagcatctggtggttggcaggaacagcactgggtacaggttacgttacagtggatattttgggggtgttactgccctaagcagagagcagtttttcaagggttgagctccaaagaatgaaaatttcccggcccctgcctgaagtgggtaaatatacaatggtcttccacactagagacaaaggcaatgaggtgaacgcagaacggatgaagctcttacaccaagtgtcacgagtctggagaacagatgggttgagtagttgttcttataaattagtatctgtggaacacaatcctttatatatcaacatcacagtggatttctggtttggtgcatgaccctgggtcttttggtgatgtttggaagaactgattctttgtttgcaataattttggcctagagacttcaaatagtagcacacattaagaacctgttacagctcattgttgagctgaatttttcctttttgtattttcttagcagagctcctggtgatgtagagtataaaacagttgtaacaagacagctttcttagtcattttgatcatgagggttaaatattgtaatatggatacttgaaggactttatataaaaggatgactcaaaggataaaatgaacgctatttgaggactctggttgaaggagatttatttaaatttgaagtaatatattatgggataaaaggccacaggaaataagactgctgaatgtctgagagaaccagagttgttctcgtccaaggtagaaaggtacgaagatacaatactgttattcatttatcctgtacaatcatctgtgaagtggtggtgtcaggtgagaaggcgtccacaaaagaggggagaaaaggcgacgaatcaggacacagtgaacttgggaatgaagaggtagcaggagggtggagtgtcggctgcaaaggcagcagtagctgagctggttgcagctgctgatagccttcaggggaggacctgcccaggtatgccttccagtgatgcccaccagagaatacattctctattagtttttaaagagtttttgtaaaatgattttgtacaagtaggatatgaattagcagtttacaagtttacatattaactaataataaatat

SEQ ID NO: 197981 - DNA, 4722 bp, Homo sapiens
  Payload ID: 19053
  Gene Name: UDP-Gal:betaGlcNAc beta 1,4- galactosyltransferase, polypeptide 5
  Uniprot ID: O43286
  ENST ID: ENST00000371711
  CDS Start-End: 189-1355
atgtggcccggcccgcgacggccggcggctgggagcggcgaggcggcggcggcggcgagtggcggcccgcgaggcccgggaggcggtggccgaggcccaggcggtggcggcggcggcccaggaggcggcggacggggagctgcgggagcaggcccggcctggctctctagcggccgcctggctgcagcatgcgcgcccgccgggggctgctgcggctgccgcgccgctcgctgctcgccgcgctcttcttcttttctctctcgtcctcgctgctgtacttcgtctatgtggcgcccggcatagtgaacacctacctcttcatgatgcaagcccaaggcattctgatccgggacaacgtgagaacaatcggtgctcaggtttatgagcaggtgcttcggagtgcttatgccaagaggaacagcagtgtaaatgactcagattatcctcttgacttgaaccacagtgaaaccttcctgcaaactacaacatttcttcctgaagacttcacctactttgcaaaccatacctgccctgaaagactcccttccatgaagggcccaatagacataaacatgagtgaaattggaatggattacattcatgaactcttctccaaagacccaaccatcaagctcggaggtcactggaagccttctgattgcatgcctcggtggaaggtggcgatccttatccccttccggaaccgccacgagcacctcccagtcctgttcagacacctgcttcccatgctccagcgccagcgcttgcagtttgcattttatgtggttgaacaagttggtacccaaccctttaatcgagccatgcttttcaacgttggctttcaagaggcaatgaaagacttggattgggactgtttgatttttcatgatgtagatcacataccggaaagtgatcgcaactattatggatgtggacagatgccgaggcattttgcaaccaaattggataagtatatgtatctgcttccttataccgagttctttggcggagtgagtggcttaacagtggaacaatttcggaaaatcaatggctttcctaatgctttctggggttggggtggagaagatgacgacctctggaacagagtacagaatgcaggctattctgtgagccggccagagggtgacacaggaaagtacaagtccattcctcatcaccatcgaggagaagtccagtttcttggaaggtatgctctgctgaggaagtcaaaagaacggcaagggctggatggcctcaacaacctgaactactttgcaaacatcacatacgacgccttgtataaaaacataactgtcaacctgacacccgagctggctcaggtgaacgagtactgagaggagagaatgtacgtttgctttacccaccgccaccaagaaagcagtccgatgagatttttttttggaggggggagggtctacacagcaagagaacagaaatactgtgtctcatgaaggatcacagagttcagggggaaaatgtgacagcacacgcacaaacgccttcactggatcagccgctggaactgagggagtgagcttggggacttccttcgtcagcactggctttctgttttcacaagacagacgtctgtcccgctgctctctccccatctcctaccccacatcctgtcttagccgcagtctccagaacccatgatgaactgtgatctgccgtggtcctgccgtggtcctgccgtggagcctgtccctacacatgaccttggagcctcttggccttcagagcagaggcaaacccaccacagggcagctgcgttttaggaagagcaaatgaaactccacaccattcttctagatctctggtgttctctttggtttcatttttttaaaaaattaccttctttgggtggggattgagggtggaggggagggtgtttgggaaagataaatagacataaatatataacaatcacttcttgaagaagtataattgtaaataagccatgtaaaatgcctttttaaaatttaattttctagctggctccaattcaaattgaggatttatgtattaggccacttacttggttggcaagtgcaggaactcagttaaaatgcagttgaagaatgtcatctcccgaattgctgtcactttggcgagggagtggatatagggcatgtcacaaaagaacaaaataacccgacctttattgctgggagctggcttctgtccctttcttcccccccccacgagtcttgcccttgacttctgctctggattcactcttccctgtcggccgcgcatgtgctcatcccactctccgctaagcgggaggctgctgttagagcaggctgcttcctgcctaaagcaggcccttcggggctcgctgcacacacatctctggctctccaggcttcgtgttctgtcttttcatcagcatggcggggcggggggcggggggcgggggtgtgtatgggaatccctccccctcttactttttctcttgtggaacttggccacagtttctgaacaatgtgcctacattaccagctggcttcagtgattcctctgtgtccctttttggtttctggaaagattctttgtcaacattagtaactgatacatagaaccaaggagcactcaaatagggagccaggagccagggagctggtgacacttgtgtgctgtggggcagctgggatccaggtaagaccggattgaagctttgaaattagactaacaaagctccagacagcaagagcccaggtgcactgctcacacccccacctgcattttgaagtcatattattttttgttttgttttttaagacggtctggctctgtcgcctaagctggagtgtggtggcacgatcacagctcactgcagcctccatctcctaggctcaagccattttcccacctcagcctcccgagtagctgggactacaggtgcacaccaccacacctggctaattttttgtatttttagtagagacaggggtttcttccatgttgcccaggctggtctcgaactcctggactcaagcaatccgcccaccttgacttcccaaagtgctgggattatgggcgggtgtgagccattgcgcccagccttgaagtcatgttctaaattgtatttgaatttgtgcctctttgtttttccccaaaccaaagccctcaaattgtagtctctgtcggcttctgcagaattctggaaaatgccagttttcctcccccgcccttgttttccataaaacatatttatatattgtgatgaggagtactttctgaagagtacttcgtatttttttttaattgccttgtttgccttcaacttccttgattttcatagtttacatgggtgtgtgtaggggtgtgtgtgtgtatgtgtgtgggttagggcttttttcgttgcatgtgatggttctgtggacatatgatccccacaaactgtgggagtgattggccaggccttgttttgtttgtttgtttgtttgtgtttttgttcttttgaagaatagagtggtatttagaaaataaattgcattgcaaagctcttatcggctcatatgagagagcaggttcctgcccttgaaaatgccggtaagctatagcatatgttttttaagacttaagcatttcatgctttaaaataccttcacaagtgaacattacacacagaagttcatttggttttcctttgttttatggtgcatatagcaataaagacccccctccaccctgcaacccccatcccccaccgggcctttgtccctgccttggcttttctccccttctcattctcctctcccctttcctcactgaaggctgtgagttgctttcaatgtgacaacactatgatgtcatttggaaggatttgccaggacagactgattctgagtcctgggtgccgtatgtgtatgcggcagtgttgtcaggcgatcttgtttgaagctctatgttgccataattaccatcaagtacacactgttggcaaaaggctaacacctgactttagaaaatgctgatttgagaacaaaaggaaaggtcttttttcactgcttaaagtggggtcactttgatacctttgcggtcatgtctgtgtctgatgagtgtagaatctctggatgtgcactgtcagtcatgtgtccaccaggcctcgaatatcatatgggaaatgtcatagttaaaaacgtacagccaggcccgtgtgctgttaatagtgtgaaattgtcatgttaaaaaaaaaaacaggaaccaaatgtgaccttgtgcatatattggtagctgaaaatcttcaaggctactgatgggtggccccttaatcttgtctttgattgctgtgtgcagggaaaggtgtccccgtttgttcatgctgttttggggggtgggggggtatttgcaagaatactcattttgacataataggtcctcttgtcagagatcctctaccacagacattaatagctgagcaggagccacatggattgattgtatccactcaccattgacgatggcattgagcgtagctagcttatttccatcactacgtgtttttgagcttgctcttacgttttaagaggtgccaggggtacatttttgcactgaaatctaaagatgttttaaaaaacacttttcacaaaaatagtcctttgtcattacattatttactcatgtgtttgtacatttttgtatgttaatttatgaatgattttttcagtaaaaaatacatattcaagaaccaaa

SEQ ID NO: 197982 - DNA, 2128 bp, Homo sapiens
  Payload ID: 19054
  Gene Name: UDP-Gal:betaGlcNAc beta 1,4- galactosyltransferase, polypeptide 6
  ENST ID: ENST00000237019
  CDS Start-End: 146-1177
ctcgggccctctccccagagcctccccgcgcggaccccgctgcagtctcggggttctcagcacatttatggaagtttagggcctggacagtggccccgagtccggcctgagagcgcagcctgggctgctggcagggaagaggaagatgtctgtgctcaggcggatgatgcgggtttccaatcgctctctcctcgccttcatcttcttcttctccctctcttcgtcctgtctgtacttcatctatgtggccccaggcatcgattatcccgaaggcaataattcaagtgattatcttgttcaaacaacaacgtatctcccggaaaacttcacatactcaccatacctcccctgtccagaaaagctgccttatatgcgaggattcctcaatgtcaatgtaagcgaagtcagttttgatgaaattcatcaactcttctccaaggatttagatattgagccagggggtcattggaggccaaaagactgtaaacccagatggaaggtggcagttctcattcctttccgtaatcgccatgaacatcttccaatttttttcttacatctgattccaatgctccagaagcagcggctggaatttgcgttttatgtcattgaacagactggcacacaaccttttaaccgtgcgatgcttttcaatgtgggcttcaaagaggccatgaaagacagtgtctgggactgtgtaatcttccacgatgtggatcatctacctgaaaatgaccggaactattacggatgtggagaaatgccacgtcattttgctgcaaagctggataaatacatgtatattcttccatataaagaattttttggtggtgtaagtgggctgacagtggaacaatttagaaagatcaatggttttcctaatgccttctggggatggggaggagaagatgatgacctttggaacagagttcactatgctggatataatgtaaccagaccagagggagacttaggaaaatacaagtcaattcctcatcaccatagaggtgaagtccagtttttaggacggtataaattactaaggtattccaaggagcgtcagtacatcgatggactgaacaatttaatatataggccaaaaatactggttgataggttgtatacaaacatatctgtaaacctcatgccagagttagctccaatcgaagactattaaaagaagtggctgtcgtggcaaggtagaccacaatgctggatcataaacttggagcgcgctcttagtggaggtcagtgattggctgtgtcacagtgcccttttctctgagaagagccagcagtccacagtgtttacagagtgggactatatacagtcacccttctctcacccgtcctccctgctctgagacacacccctgtggcgagcaccgcagaaacgggaagccactacttaagatcggaagttaagagagctccctccgaagagaaaatttttatactaaaatctataatttaattcaagagaatgcttttatttccgtttaaacatattttgtatatatgtgatataaattaatgtgtgcaaattgtttaaaaattagatgtgttgcagttttgcatgtaatcggttatacctttattggacttttatagacattttttatttgcatgaaaaaaactcactaaatttacatcactaaacaaaggttaacccttgtgtgaaatgaaggaactgtcaataattgacagccaactaatacagtaaactgttatactagttttgagctttagacctcagccttttgtgtggaagaagtcacagctttcttaggctttaaaggaaaagaaggaaggacttaaatagcttttcttcctaccgggattacctatgtttttccttgcttgcaatctcatctgattttgctagaaatcacaaccatattgtttatgcatattgcatgagtattaccaagaaaaatcttaaaagttgtgatgtgacatgatataaaggatctctttatgttaaatgtctttccatgtacctctggtgtgtcagggattttgtgcctcaaaaaatgtttccaaggttgtgtgtttatactgtgtattttttttaaattcacggtgaacagcacttttattatttccagttcagaagagccaaaaaaaa

SEQ ID NO: 197983 - DNA, 3891 bp, Homo sapiens
  Payload ID: 19054
  Gene Name: UDP-Gal:betaGlcNAc beta 1,4- galactosyltransferase, polypeptide 6
  Uniprot ID: Q9UBX8
  ENST ID: ENST00000306851
  CDS Start-End: 298-1446
ccggctttcttccgtcctgccgtccccgggcccctagcccccagtcccctctcccccctccacctcttgtccctcggcctccgcgcctcccctcccccgactctctggcctcccattcattccgtccgctccctcccatttcctcttttccgctcgggccctctccccagagcctccccgcgcggaccccgctgcagtctcggggttctcagcacatttatggaagtttagggcctggacagtggccccgagtccggcctgagagcgcagcctgggctgctggcagggaagaggaagatgtctgtgctcaggcggatgatgcgggtttccaatcgctctctcctcgccttcatcttcttcttctccctctcttcgtcctgtctgtacttcatctatgtggccccaggcatcgccaacacatatctctttatggtacaagctcgaggtataatgttgagagaaaatgtgaaaacaataggtcatatgatcaggctgtacacaaataaaaacagtacgctcaacggtacagattatcccgaaggcaataattcaagtgattatcttgttcaaacaacaacgtatctcccggaaaacttcacatactcaccatacctcccctgtccagaaaagctgccttatatgcgaggattcctcaatgtcaatgtaagcgaagtcagttttgatgaaattcatcaactcttctccaaggatttagatattgagccagggggtcattggaggccaaaagactgtaaacccagatggaaggtggcagttctcattcctttccgtaatcgccatgaacatcttccaatttttttcttacatctgattccaatgctccagaagcagcggctggaatttgcgttttatgtcattgaacagactggcacacaaccttttaaccgtgcgatgcttttcaatgtgggcttcaaagaggccatgaaagacagtgtctgggactgtgtaatcttccacgatgtggatcatctacctgaaaatgaccggaactattacggatgtggagaaatgccacgtcattttgctgcaaagctggataaatacatgtatattcttccatataaagaattttttggtggtgtaagtgggctgacagtggaacaatttagaaagatcaatggttttcctaatgccttctggggatggggaggagaagatgatgacctttggaacagagttcactatgctggatataatgtaaccagaccagagggagacttaggaaaatacaagtcaattcctcatcaccatagaggtgaagtccagtttttaggacggtataaattactaaggtattccaaggagcgtcagtacatcgatggactgaacaatttaatatataggccaaaaatactggttgataggttgtatacaaacatatctgtaaacctcatgccagagttagctccaatcgaagactattaaaagaagtggctgtcgtggcaaggtagaccacaatgctggatcataaacttggagcgcgctcttagtggaggtcagtgattggctgtgtcacagtgcccttttctctgagaagagccagcagtccacagtgtttacagagtgggactatatacagtcacccttctctcacccgtcctccctgctctgagacacacccctgtggcgagcaccgcagaaacgggaagccactacttaagatcggaagttaagagagctccctccgaagagaaaatttttatactaaaatctataatttaattcaagagaatgcttttatttccgtttaaacatattttgtatatatgtgatataaattaatgtgtgcaaattgtttaaaaattagatgtgttgcagttttgcatgtaatcggttatacctttattggacttttatagacattttttatttgcatgaaaaaaactcactaaatttacatcactaaacaaaggttaacccttgtgtgaaatgaaggaactgtcaataattgacagccaactaatacagtaaactgttatactagttttgagctttagacctcagccttttgtgtggaagaagtcacagctttcttaggctttaaaggaaaagaaggaaggacttaaatagcttttcttcctaccgggattacctatgtttttccttgcttgcaatctcatctgattttgctagaaatcacaaccatattgtttatgcatattgcatgagtattaccaagaaaaatcttaaaagttgtgatgtgacatgatataaaggatctctttatgttaaatgtctttccatgtacctctggtgtgtcagggattttgtgcctcaaaaaatgtttccaaggttgtgtgtttatactgtgtattttttttaaattcacggtgaacagcacttttattatttccagttcagaagagccaaaaaaaagtatcttcatttaaaaagaaatcaagtcagtttttttaaaagaatgatctatggaagaaaacccaatagtacttataatatacaaatgaattatactattagataagaattaaatattctatttttataaagataaatacttagtagataaaaacaaattttaagtttagttttcagacatagaatttcacttttggaggggacccttgaatgttagtttcattcaaactatattttgtttttttcacttttaagagattatatctctggtgttaattactaaaattttctttctaaaagtataatttaatagaattatcttaaaatacatgatcagtattcagtgcgctgatattataatgtcttctatatgtagtatctaaaagcataatttaatagcattgtcttaaaatacgtgatgagttatttggtgcactgatgccataatgtcttctatatgtaatatcttacatgtttgcatgagtgtcagggctttgtccagttatcttcatatgactgttctctgaaaaaaggtcttactacctgatatcaagtacatatcttaattttggatgaatttttccacagtaaagccgaacagtattcttttttgaaaattagcaattataaagattgtttaaaatatcttgatattttcacaaattttaaacaaaaaattaaatatctataaagtgaatgttcaacaacaatgatgagcaatagaaatctatatatgagaaacgtttggataatatttgcctcaaggattgtttacctaaaacagaactatggttatttatctcagattgtaagttttattttgaagtgtcatttttatggcaatattgataacacaaatgaccacaaactaaatcataaaataattgaatccttacactttgagaaaatggatagcttctgtgttatgataccaaacaaaatattttcatatttatttcttagaactatttccaaaatatttatatttcagtttttttatggtactcgaaaaatcaaaccttctgaaaattatgatatttgtacttcatttgtgtattagttcattttctgtttctattacatagtttttaaagtcaatgaaagagattgagaatgttaacatttgttgatcaatgtggagctgtccacattcggtatcttttcatttttatatatattttacagtttcaagaaaacttagtactactagtatctgccttattttcttaagtctgatgttaatttttgtttcaggagtgagatataaacattttgctttttttcagttttgaaatatagtttgtcatcctgtgaaaaccacctcgtttgctttttgtttgtttgttttgcttttttagtgtagacctaaaattatttttgcctataaacagtgaacttaatatgtttctgtgagagtgacagagctgtgcccgtttatcttcattgtattaattattacataaagattaacaaatacattgcaaatgcaaatta

SEQ ID NO: 197984 - DNA, 1239 bp, Homo sapiens
  Payload ID: 19054
  Gene Name: UDP-Gal:betaGlcNAc beta 1,4- galactosyltransferase, polypeptide 6
  Uniprot ID: Q9UBX8
  ENST ID: ENST00000383131
  CDS Start-End: 79-1110
atggaagtttagggcctggacagtggccccgagtccggcctgagagcgcagcctgggctgctggcagggaagaggaagatgtctgtgctcaggcggatgatgcgggtttccaatcgctctctcctcgccttcatcttcttcttctccctctcttcgtcctgtctgtacttcatctatgtggccccaggcatcgccaacacatatctctttatggtacaagctcgaggtataatgttgagagaaaatgtgaaaacaataggtcatatgatcaggctgtacacaaataaaaacagtacgctcaacggtacagattatcccgaaggcaataattcaagtgattatcttgttcaaacaacaacgtatctcccggaaaacttcacatactcaccatacctcccctgtccagaaaagctgccttatatgcgaggattcctcaatgtcaatgtaagcgaagtcagttttgatgaaattcatcaactcttctccaaggatttagatattgagccagggggtcattggaggccaaaagactgtaaacccagatggaagactggcacacaaccttttaaccgtgcgatgcttttcaatgtgggcttcaaagaggccatgaaagacagtgtctgggactgtgtaatcttccacgatgtggatcatctacctgaaaatgaccggaactattacggatgtggagaaatgccacgtcattttgctgcaaagctggataaatacatgtatattcttccatataaagaattttttggtggtgtaagtgggctgacagtggaacaatttagaaagatcaatggttttcctaatgccttctggggatggggaggagaagatgatgacctttggaacagagttcactatgctggatataatgtaaccagaccagagggagacttaggaaaatacaagtcaattcctcatcaccatagaggtgaagtccagtttttaggacggtataaattactaaggtattccaaggagcgtcagtacatcgatggactgaacaatttaatatataggccaaaaatactggttgataggttgtatacaaacatatctgtaaacctcatgccagagttagctccaatcgaagactattaaaagaagtggctgtcgtggcaaggtagaccacaatgctggatcataaacttggagcgcgctcttagtggaggtcagtgattggctgtgtcacagtgcccttttctctgagaagagccagcagtccacagt

SEQ ID NO: 197985 - DNA, 339 bp, Homo sapiens
  Payload ID: 19054
  Gene Name: UDP-Gal:betaGlcNAc beta 1,4- galactosyltransferase, polypeptide 6
  ENST ID: ENST00000579372
  CDS Start-End: 125-339
aggggggattcattaatccaggtcggaaatacaccttgttcctcgaggattttggaaggaaattccacccgcgaagtccccttttggagatgcccttttcctttcagccaacacatatctctttatggtacaagctcgaggtataatgttgagagaaaatgtgaaaacaataggtcatatgatcaggctgtacacaaataaaaacagtacgctcaacggtacagattatcccgaaggcaataattcaagtgattatcttgttcaaacaacaacgtatctcccggaaaacttcacatactcaccatacctcccctgtccagaaaagctgccttatatgcg

SEQ ID NO: 197986 - DNA, 1488 bp, Homo sapiens
  Payload ID: 19055
  Gene Name: UDP-galactose-4-epimerase
  Uniprot ID: Q14376
  ENST ID: ENST00000374497
  CDS Start-End: 93-1139
gcgacggctgagcaaggactctccagtcctcagtcaccttggacaaagaagtgtggatcctcagattccatcttttccaactccaaggtgccatggcagagaaggtgctggtaacaggtggggctggctacattggcagccacacggtgctggagctgctggaggctggctacttgcctgtggtcatcgataacttccataatgccttccgtggagggggctccctgcctgagagcctgcggcgggtccaggagctgacaggccgctctgtggagtttgaggagatggacattttggaccagggagccctacagcgtctcttcaaaaagtacagctttatggcggtcatccactttgcggggctcaaggccgtgggcgagtcggtgcagaagcctctggattattacagagttaacctgaccgggaccatccagcttctggagatcatgaaggcccacggggtgaagaacctggtgttcagcagctcagccactgtgtacgggaacccccagtacctgccccttgatgaggcccaccccacgggtggttgtaccaacccttacggcaagtccaagttcttcatcgaggaaatgatccgggacctgtgccaggcagacaagacttggaacgcagtgctgctgcgctatttcaaccccacaggtgcccatgcctctggctgcattggtgaggatccccagggcatacccaacaacctcatgccttatgtctcccaggtggcgatcgggcgacgggaggccctgaatgtctttggcaatgactatgacacagaggatggcacaggtgtccgggattacatccatgtcgtggatctggccaagggccacattgcagccttaaggaagctgaaagaacagtgtggctgccggatctacaacctgggcacgggcacaggctattcagtgctgcagatggtccaggctatggagaaggcctctgggaagaagatcccgtacaaggtggtggcacggcgggaaggtgatgtggcagcctgttacgccaaccccagcctggcccaagaggagctggggtggacagcagccttagggctggacaggatgtgtgaggatctctggcgctggcagaagcagaatccttcaggctttggcacgcaagcctgaggaccctcccctaccaaggaccaggaaaagcagcagctgcctgctctccagcctctggcaggaactcagggccctggagctgctggggccaagccaaggcctcccctacctcaaaccccagctgggcccgcttagcccaccaggcatgaggccaagggctccactgaccaggaggccgaggtctctaactcttatcttccacagggtccaagagttcatcaggacccccaagagtgagtgagggggcaaggctctggcacaaaacctcctcctcccaggcactcatttatattgctctgaaagagctttccaaagtatttaaaaataaaaacaagttttcttacactgg

SEQ ID NO: 197987 - DNA, 876 bp, Homo sapiens
  Payload ID: 19055
  Gene Name: UDP-galactose-4-epimerase
  ENST ID: ENST00000425913
  CDS Start-End: 293-876
actcctagctcggccccgctccgcgctacagcccaaagcccagcctgagacccagccgccctcgtatgcccacggcctagctccccttccctccaacagacagactgggaaaaccgagtgggcgacggctgagcaaggtcactccgctgtcgggggcgcagccggcctcagaccagctttcgtgcttcccagggcctctctgcgaccactttcggggactctccagtcctcagtcaccttggacaaagaagtgtggatcctcagattccatcttttccaactccaaggtgccatggcagagaaggtgctggtaacaggtggggctggctacattggcagccacacggtgctggagctgctggaggctggctacttgcctgtggtcatcgataacttccataatgccttccgtggagggggctccctgcctgagagcctgcggcgggtccaggagctgacaggccgctctgtggagtttgaggagatggacattttggaccagggagccctacagcgtctcttcaaaaagtacagctttatggcggtcatccactttgcggggctcaaggccgtgggcgagtcggtgcagaagcctctggattattacagagttaacctgaccgggaccatccagcttctggagatcatgaaggcccacggggtgaagaacctggtgttcagcagctcagccactgtgtacgggaacccccagtacctgccccttgatgaggcccaccccacgggtggttgtaccaacccttacggcaagtccaagttcttcatcgaggaaatgatccgggacctgtgccaggcagacaagacttggaacgcagtgctgctgcgctatttcaaccccacaggtgcccatgcctctgg

SEQ ID NO: 197988 - DNA, 672 bp, Homo sapiens
  Payload ID: 19055
  Gene Name: UDP-galactose-4-epimerase
  ENST ID: ENST00000456977
  CDS Start-End: 1-327
gtggcgatcgggcgacgggaggccctgaatgtctttggcaatgactatgacacagaggatggcacaggtgtccgggattacatccatgtcgtggatctggccaagggccacattgcagccttaaggaagctgaaagaacagtgtggctgccggatcccgtacaaggtggtggcacggcgggaaggtgatgtggcagcctgttacgccaaccccagcctggcccaagaggagctggggtggacagcagccttagggctggacaggatgtgtgaggatctctggcgctggcagaagcagaatccttcaggctttggcacgcaagcctgaggaccctcccctaccaaggaccaggaaaagcagcagctgcctgctctccagcctctggcaggaactcagggccctggagctgctggggccaagccaaggcctcccctacctcaaaccccagctgggcccgcttagcccaccaggcatgaggccaagggctccactgaccaggaggccgaggtctctaactcttatcttccacagggtccaagagttcatcaggacccccaagagtgagtgagggggcaaggctctggcacaaaacctcctcctcccaggcactcatttatattgctctgaaagagctttccaaagtatttaaaaataaaaacaagttttcttaca

SEQ ID NO: 197989 - DNA, 792 bp, Homo sapiens
  Payload ID: 19055
  Gene Name: UDP-galactose-4-epimerase
  ENST ID: ENST00000445705
  CDS Start-End: 211-792
attagtcactgcgcccaggagccagtttacacctagcgaaggcggaggcattggacaagcctgggtctgagcagacagaaccccttcctgcgaccctggagtcccaatcgtgctgccattttccttctgcccaggactctccagtcctcagtcaccttggacaaagaagtgtggatcctcagattccatcttttccaactccaaggtgccatggcagagaaggtgctggtaacaggtggggctggctacattggcagccacacggtgctggagctgctggaggctggctacttgcctgtggtcatcgataacttccataatgccttccgtggagggggctccctgcctgagagcctgcggcgggtccaggagctgacaggccgctctgtggagtttgaggagatggacattttggaccagggagccctacagcgtctcttcaaaaagtacagctttatggcggtcatccactttgcggggctcaaggccgtgggcgagtcggtgcagaagcctctggattattacagagttaacctgaccgggaccatccagcttctggagatcatgaaggcccacggggtgaagaacctggtgttcagcagctcagccactgtgtacgggaacccccagtacctgccccttgatgaggcccaccccacgggtggttgtaccaacccttacggcaagtccaagttcttcatcgaggaaatgatccgggacctgtgccaggcagacaagacttggaacgcagtgctgctgcgctatttcaaccccacaggtgcccatgcctct

SEQ ID NO: 197990 - DNA, 957 bp, Homo sapiens
  Payload ID: 19055
  Gene Name: UDP-galactose-4-epimerase
  ENST ID: ENST00000429356
  CDS Start-End: 240-957
gaaggcggaggcattggacaagcctgggtctgagcagacagaaccccttcctgcgaccctggagtcccaatcgtgctgccattttccttctgcccaggactctccagtcctcagtcaccttggacaaagaagtgtggatcctcagattccatcttttccaactccaaggagggggctccctgcctgagagcctgcggcgggtccaggagctgacaggccgctctgtggagtttgaggagatggacattttggaccagggagccctacagcgtctcttcaaaaagtacagctttatggcggtcatccactttgcggggctcaaggccgtgggcgagtcggtgcagaagcctctggattattacagagttaacctgaccgggaccatccagcttctggagatcatgaaggcccacggggtgaagaacctggtgttcagcagctcagccactgtgtacgggaacccccagtacctgccccttgatgaggcccaccccacgggtggttgtaccaacccttacggcaagtccaagttcttcatcgaggaaatgatccgggacctgtgccaggcagacaagacttggaacgcagtgctgctgcgctatttcaaccccacaggtgcccatgcctctggctgcattggtgaggatccccagggcatacccaacaacctcatgccttatgtctcccaggtggcgatcgggcgacgggaggccctgaatgtctttggcaatgactatgacacagaggatggcacaggtgtccgggattacatccatgtcgtggatctggccaagggccacattgcagccttaaggaagctgaaagaacagtgtggctgccggatcccgtacaaggtggtggcacggcgggaaggtgatgtggcagcctgttacgccaaccccagcctggcccaagaggagctggggtggacagcagccttagggctggacaggatgt

SEQ ID NO: 197991 - DNA, 882 bp, Homo sapiens
  Payload ID: 19055
  Gene Name: UDP-galactose-4-epimerase
  ENST ID: ENST00000418277
  CDS Start-End: 202-882
ggctcgggcgtaggaggcggtgcctctgcagcaagcgtggggcgcgggaacccgagcaggactctccagtcctcagtcaccttggacaaagaagtgtggatcctcagattccatcttttccaactccaaggagggggctccctgcctgagagcctgcggcgggtccaggagctgacaggccgctctgtggagtttgaggagatggacattttggaccagggagccctacagcgtctcttcaaaaagtacagctttatggcggtcatccactttgcggggctcaaggccgtgggcgagtcggtgcagaagcctctggattattacagagttaacctgaccgggaccatccagcttctggagatcatgaaggcccacggggtgaagaacctggtgttcagcagctcagccactgtgtacgggaacccccagtacctgccccttgatgaggcccaccccacgggtggttgtaccaacccttacggcaagtccaagttcttcatcgaggaaatgatccgggacctgtgccaggcagacaagacttggaacgcagtgctgctgcgctatttcaaccccacaggtgcccatgcctctggctgcattggtgaggatccccagggcatacccaacaacctcatgccttatgtctcccaggtggcgatcgggcgacgggaggccctgaatgtctttggcaatgactatgacacagaggatggcacaggtgtccgggattacatccatgtcgtggatctggccaagggccacattgcagccttaaggaagctgaaagaacagtgtggctgccggatctacaacctgggcacgggcacaggctattcagtgctgcagatggtccaggctatggagaaggcctctgggaagaag

SEQ ID NO: 197992 - DNA, 1566 bp, Homo sapiens
  Payload ID: 19055
  Gene Name: UDP-galactose-4-epimerase
  Uniprot ID: Q14376
  ENST ID: ENST00000617979
  CDS Start-End: 170-1216
gccggagtgggccgtcagcacttaaagggcccgcggctcgggcgtaggaggcggtgcctctgcagcaagcgtggggcgcgggaacccgagcaggactctccagtcctcagtcaccttggacaaagaagtgtggatcctcagattccatcttttccaactccaaggtgccatggcagagaaggtgctggtaacaggtggggctggctacattggcagccacacggtgctggagctgctggaggctggctacttgcctgtggtcatcgataacttccataatgccttccgtggagggggctccctgcctgagagcctgcggcgggtccaggagctgacaggccgctctgtggagtttgaggagatggacattttggaccagggagccctacagcgtctcttcaaaaagtacagctttatggcggtcatccactttgcggggctcaaggccgtgggcgagtcggtgcagaagcctctggattattacagagttaacctgaccgggaccatccagcttctggagatcatgaaggcccacggggtgaagaacctggtgttcagcagctcagccactgtgtacgggaacccccagtacctgccccttgatgaggcccaccccacgggtggttgtaccaacccttacggcaagtccaagttcttcatcgaggaaatgatccgggacctgtgccaggcagacaagacttggaacgcagtgctgctgcgctatttcaaccccacaggtgcccatgcctctggctgcattggtgaggatccccagggcatacccaacaacctcatgccttatgtctcccaggtggcgatcgggcgacgggaggccctgaatgtctttggcaatgactatgacacagaggatggcacaggtgtccgggattacatccatgtcgtggatctggccaagggccacattgcagccttaaggaagctgaaagaacagtgtggctgccggatctacaacctgggcacgggcacaggctattcagtgctgcagatggtccaggctatggagaaggcctctgggaagaagatcccgtacaaggtggtggcacggcgggaaggtgatgtggcagcctgttacgccaaccccagcctggcccaagaggagctggggtggacagcagccttagggctggacaggatgtgtgaggatctctggcgctggcagaagcagaatccttcaggctttggcacgcaagcctgaggaccctcccctaccaaggaccaggaaaagcagcagctgcctgctctccagcctctggcaggaactcagggccctggagctgctggggccaagccaaggcctcccctacctcaaaccccagctgggcccgcttagcccaccaggcatgaggccaagggctccactgaccaggaggccgaggtctctaactcttatcttccacagggtccaagagttcatcaggacccccaagagtgagtgagggggcaaggctctggcacaaaacctcctcctcccaggcactcatttatattgctctgaaagagctttccaaagtatttaaaaataaaaacaagttttcttacactggg

SEQ ID NO: 197993 - DNA, 2763 bp, Homo sapiens
  Payload ID: 19056
  Gene Name: UDP-GlcNAc:betaGal beta-1, 3-N-acetylglucosaminyltransferase 2
  Uniprot ID: Q9NY97
  ENST ID: ENST00000301998
  CDS Start-End: 253-1446
ggagcctggagtgaggcgcagcggcagcggcagcagcggcaacaagtgccggaggctagcagagccaagccggagcagtccctgccgccgacaccgccgggccgcccgtccggggcgccgcgcatggagcgtgagctgcggcggtcgccgggctgagccgcgcggagcggccgggacgtggatgtggccgcgatctcccgcccttgcccccgccccgccgagctggagctgctcccggacaagatatgagaaatgagtgttggacgtcgaagaataaagttgttgggtatcctgatgatggcaaatgtcttcatttattttattatggaagtctccaaaagcagtagccaagaaaaaaatggaaaaggggaagtaataatacccaaagagaagttctggaagatatctacccctcccgaggcatactggaaccgagagcaagagaagctgaaccggcagtacaaccccatcctgagcatgctgaccaaccagacgggggaggcgggcaggctctccaatataagccatctgaactactgcgaacctgacctgagggtcacgtcggtggttacgggttttaacaacttgccggacagatttaaagactttctgctgtatttgagatgccgcaattattcactgcttatagatcagccggataagtgtgcaaagaaacctttcttgttgctggcgattaagtccctcactccacattttgccagaaggcaagcaatccgggaatcctggggccaagaaagcaacgcagggaaccaaacggtggtgcgagtcttcctgctgggccagacacccccagaggacaaccaccccgacctttcagatatgctgaaatttgagagtgagaagcaccaagacattcttatgtggaactacagagacactttcttcaacttgtctctgaaggaagtgctgtttctcaggtgggtaagtacttcctgcccagacactgagtttgttttcaagggcgatgacgatgtttttgtgaacacccatcacatcctgaattacttgaatagtttatccaagaccaaagccaaagatctcttcataggtgatgtgatccacaatgctggacctcatcgggataagaagctgaagtactacatcccagaagttgtttactctggcctctacccaccctatgcagggggaggggggttcctctactccggccacctggccctgaggctgtaccatatcactgaccaggtccatctctaccccattgatgacgtttatactggaatgtgccttcagaaactcggcctcgttccagagaaacacaaaggcttcaggacatttgatatcgaggagaaaaacaaaaataacatctgctcctatgtagatctgatgttagtacatagtagaaaacctcaagagatgattgatatttggtctcagttgcagagtgctcatttaaaatgctaaaatagatacaaactcaattttgcatagaaaggtgtattttgaatagttcccatgttgtgttctcacattagagtaatttctatattaaaccatgaaaattgcctttatgagtgatacccatttgagggcctctaaacccttcaatttggtactcacgtgaagagggaaagcggaagatggtaatttttttttatggatgatatggcaggatgattggttctgatcttaccggctagtggtcatttttaaaaaacttgtaccctcttatctgaaatcctgtttctggaatttggccattttaagtgattttgtttgccctcttctataatattcctacttcccataataatgactgatttatttgtaattcaggtatttataaacctattggctacaaagactttgttaaacattatccagtggttttcgtgaaatggaattatgtttatttttatgggatttgggtaaattttaaattgtctagaaaactgaaatttcagttgtcagttgtggaattcagtttttcaattgtggaaatttcctgccaccccaacagtatttttgtgtgttaattaattttgcaaaatgagaatcatggtgtgacactcatctaatttatcttgttgtgatgttatggtcataataaggagaaagagggtttaatttttcttgtatttggtttcctggtggtatcatagtgtaattttagtatttgaaaatcagtgtgattccttaatggccaactgaagattgaattgccgctaacaaccatatcgtgttagtgaattttcaatatggaccaggaaggcatatgtattttgaacttgagtgaaaaggttgaagttacagacttttgcatagatggtttgtcaatttaaaattccagaatttattattgccatattttcacatgctgcttatacaagattattattgagtagtaactgcttccctgtctatgtagaagtgcctgtgtttttatttattgttcagatcaaagaccaaaacattttcttaaatatattttatgtaatattttatttgtatacagtgttgttgatgaaatatttaactagagcatgatattttaaatgttaaggtgtaacatatgttaaataaaactgttatttttgaattttaaaatttgttttttgggggtatgaactactagagtttaaaattctgccaaactattacttatatgtactattgtgtaacatactttcttgaaatatttttgtttatagaattgaaggttcttatcagatgggatactggggactataaacaatggaaataaagccactgtatttttaa

SEQ ID NO: 197994 - DNA, 2436 bp, Homo sapiens
  Payload ID: 19056
  Gene Name: UDP-GlcNAc:betaGal beta-1, 3-N-acetylglucosaminyltransferase 2
  Uniprot ID: Q9NY97
  ENST ID: ENST00000405767
  CDS Start-End: 108-1301
agagccatttagctgcaaactgtctctgtctctgtttatccgagcagaacctggaaggggctggcaaggactaggcaacagatgggacagccagagagatatgagaaatgagtgttggacgtcgaagaataaagttgttgggtatcctgatgatggcaaatgtcttcatttattttattatggaagtctccaaaagcagtagccaagaaaaaaatggaaaaggggaagtaataatacccaaagagaagttctggaagatatctacccctcccgaggcatactggaaccgagagcaagagaagctgaaccggcagtacaaccccatcctgagcatgctgaccaaccagacgggggaggcgggcaggctctccaatataagccatctgaactactgcgaacctgacctgagggtcacgtcggtggttacgggttttaacaacttgccggacagatttaaagactttctgctgtatttgagatgccgcaattattcactgcttatagatcagccggataagtgtgcaaagaaacctttcttgttgctggcgattaagtccctcactccacattttgccagaaggcaagcaatccgggaatcctggggccaagaaagcaacgcagggaaccaaacggtggtgcgagtcttcctgctgggccagacacccccagaggacaaccaccccgacctttcagatatgctgaaatttgagagtgagaagcaccaagacattcttatgtggaactacagagacactttcttcaacttgtctctgaaggaagtgctgtttctcaggtgggtaagtacttcctgcccagacactgagtttgttttcaagggcgatgacgatgtttttgtgaacacccatcacatcctgaattacttgaatagtttatccaagaccaaagccaaagatctcttcataggtgatgtgatccacaatgctggacctcatcgggataagaagctgaagtactacatcccagaagttgtttactctggcctctacccaccctatgcagggggaggggggttcctctactccggccacctggccctgaggctgtaccatatcactgaccaggtccatctctaccccattgatgacgtttatactggaatgtgccttcagaaactcggcctcgttccagagaaacacaaaggcttcaggacatttgatatcgaggagaaaaacaaaaataacatctgctcctatgtagatctgatgttagtacatagtagaaaacctcaagagatgattgatatttggtctcagttgcagagtgctcatttaaaatgctaaaatagatacaaactcaattttgcatagaaaggtgtattttgaatagttcccatgttgtgttctcacattagagtaatttctatattaaaccatgaaaattgcctttatgagtgatacccatttgagggcctctaaacccttcaatttggtactcacgtgaagagggaaagcggaagatggtaatttttttttatggatgatatggcaggatgattggttctgatcttaccggctagtggtcatttttaaaaaacttgtaccctcttatctgaaatcctgtttctggaatttggccattttaagtgattttgtttgccctcttctataatattcctacttcccataataatgactgatttatttgtaattcaggtatttataaacctattggctacaaagactttgttaaacattatccagtggttttcgtgaaatggaattatgtttatttttatgggatttgggtaaattttaaattgtctagaaaactgaaatttcagttgtcagttgtggaattcagtttttcaattgtggaaatttcctgccaccccaacagtatttttgtgtgttaattaattttgcaaaatgagaatcatggtgtgacactcatctaatttatcttgttgtgatgttatggtcataataaggagaaagagggtttaatttttcttgtatttggtttcctggtggtatcatagtgtaattttagtatttgaaaatcagtgtgattccttaatggccaactgaagattgaattgccgctaacaaccatatcgtgttagtgaattttcaatatggaccaggaaggcatatgtattttgaacttgagtgaaaaggttgaagttacagacttttgcatagatggtttgtcaatttaaaattccagaatttattattgccatattttcacatgctgcttatacaagattattattgagtagtaactgcttccctgtctatgtagaagtgcctgtgtttttatttattgttcagatcaaagaccaaaacattttcttaaatatattttatgtaatattttatttgtatacagtgttgttgatgaaatatttaactagagcatgatattttaaatgttaaggtgtaacatatgttaaataaaactgttatttttgaa

SEQ ID NO: 197995 - DNA, 2226 bp, Homo sapiens
  Payload ID: 19057
  Gene Name: UDP-GlcNAc:betaGal beta-1, 3-N-acetylglucosaminyltransferase 3
  Uniprot ID: Q9Y2A9
  ENST ID: ENST00000318683
  CDS Start-End: 148-1266
agaggggcgggagctctggctcaggtaaaaactctttcttcggctcgcgagctgagaggagcaggtagaggggcagaggcgggactgtcgtctgggggagccgcccaggaggctcctcaggccgaccccagaccctggctggccaggatgaagtatctccggcaccggcggcccaatgccaccctcattctggccatcggcgctttcaccctcctcctcttcagtctgctagtgtcaccacccacctgcaaggtccaggagcagccaccggcgatccccgaggccctggcctggcccactccacccacccgcccagccccggccccgtgccatgccaacacctctatggtcacccacccggacttcgccacgcagccgcagcacgttcagaacttcctcctgtacagacactgccgccactttcccctgctgcaggacgtgcccccctctaagtgcgcgcagccggtcttcctgctgctggtgatcaagtcctcccctagcaactatgtgcgccgcgagctgctgcggcgcacgtggggccgcgagcgcaaggtacggggtttgcagctgcgcctcctcttcctggtgggcacagcctccaacccgcacgaggcccgcaaggtcaaccggctgctggagctggaggcacagactcacggagacatcctgcagtgggacttccacgactccttcttcaacctcacgctcaagcaggtcctgttcttacagtggcaggagacaaggtgcgccaacgccagcttcgtgctcaacggggatgatgacgtctttgcacacacagacaacatggtcttctacctgcaggaccatgaccctggccgccacctcttcgtggggcaactgatccaaaacgtgggccccatccgggctttttggagcaagtactatgtgccagaggtggtgactcagaatgagcggtacccaccctattgtgggggtggtggcttcttgctgtcccgcttcacggccgctgccctgcgccgtgctgcccatgtcttggacatcttccccattgatgatgtcttcctgggtatgtgtctggagcttgagggactgaagcctgcctcccacagcggcatccgcacgtctggcgtgcgggctccatcgcaacgcctgtcctcctttgacccctgcttctaccgagacctgctgctggtgcaccgcttcctaccttatgagatgctgctcatgtgggatgcgctgaaccagcccaacctcacctgcggcaatcagacacagatctactgagtcagcatcagggtccccagcctctgggctcctgtttccataggaaggggcgacaccttcctcccaggaagctgagacctttgtggtctgagcataagggagtgccagggaaggtttgaggtttgatgagtgaatattctggctggcgaactcctacacatccttcaaaacccacctggtactgttccagcatcttccctggatggctggaggaactccagaaaatatccatcttctttttgtggctgctaatggcagaagtgcctgtgctagagttccaactgtggatgcatccgtcccgtttgagtcaaagtcttacttccctgctctcacctactcacagacgggatgctaagcagtgcacctgcagtggtttaatggcagataagctccgtctgcagttccaggccagccagaaactcctgtgtccacatagagctgacgtgagaaatatctttcagcccaggagagaggggtcctgatcttaaccctttcctgggtctcagacaactcagaaggttggggggataccagagaggtggtggaataggaccgccccctccttacttgtgggatcaaatgctgtaatggtggaggtgtgggcagaggagggaggcaagtgtcctttgaaagttgtgagagctcagagtttctggggtcctcattaggagcccccatccctgtgttccccaagaattcagagaacagcactggggctggaatgatctttaatgggcccaaggccaacaggcatatgcctcactactgcctggagaagggagagattcaggtcctccagcagcctccctcacccagtatgttttacagattacggggggaccgggtgagccagtgaccccctgtagcccccagcttcaggcctcagtgtctgccagtcaagcttcacaggcattgtgatggggcagccttggggaatataaaattttgtgaagacttgga

SEQ ID NO: 197996 - DNA, 470 bp, Homo sapiens
  Payload ID: 19057
  Gene Name: UDP-GlcNAc:betaGal beta-1, 3-N-acetylglucosaminyltransferase 3
  ENST ID: ENST00000600777
  CDS Start-End: 89-470
aaaaactctttcttcggctcgcgagctgagaggagcaggagccgcccaggaggctcctcaggccgaccccagaccctggctggccaggatgaagtatctccggcaccggcggcccaatgccaccctcattctggccatcggcgctttcaccctcctcctcttcagtctgctagtgtcaccacccacctgcaaggtccaggagcagccaccggcgatccccgaggccctggcctggcccactccacccacccgcccagccccggccccgtgccatgccaacacctctatggtcacccacccggacttcgccacgcagccgcagcacgttcagaacttcctcctgtacagacactgccgccactttcccctgctgcaggacgtgcccccctctaagtgcgcgcagccggtcttcctgctgctggtgatcaagtcctcccctagcaactatgtgcgccgcgagctgctgcggc

SEQ ID NO: 197997 - DNA, 856 bp, Homo sapiens
  Payload ID: 19057
  Gene Name: UDP-GlcNAc:betaGal beta-1, 3-N-acetylglucosaminyltransferase 3
  ENST ID: ENST00000599265
  CDS Start-End: 107-856
gcttgttcatctccagccacggggagctcattccctagcagcgggccagacccaaggagccgcccaggaggctcctcaggccgaccccagaccctggctggccaggatgaagtatctccggcaccggcggcccaatgccaccctcattctggccatcggcgctttcaccctcctcctcttcagtctgctagtgtcaccacccacctgcaaggtccaggagcagccaccggcgatccccgaggccctggcctggcccactccacccacccgcccagccccggccccgtgccatgccaacacctctatggtcacccacccggacttcgccacgcagccgcagcacgttcagaacttcctcctgtacagacactgccgccactttcccctgctgcaggacgtgcccccctctaagtgcgcgcagccggtcttcctgctgctggtgatcaagtcctcccctagcaactatgtgcgccgcgagctgctgcggcgcacgtggggccgcgagcgcaaggtacggggtttgcagctgcgcctcctcttcctggtgggcacagcctccaacccgcacgaggcccgcaaggtcaaccggctgctggagctggaggcacagactcacggagacatcctgcagtgggacttccacgactccttcttcaacctcacgctcaagcaggtcctgttcttacagtggcaggagacaaggtgcgccaacgccagcttcgtgctcaacggggatgatgacgtctttgcacacacagacaacatggtcttctacctgcaggaccatgaccctggccgccacctcttcgtggggcaactgatccaaaacgtgggccccatccgggctttttggagc

SEQ ID NO: 197998 - DNA, 1349 bp, Homo sapiens
  Payload ID: 19057
  Gene Name: UDP-GlcNAc:betaGal beta-1, 3-N-acetylglucosaminyltransferase 3
  Uniprot ID: Q9Y2A9
  ENST ID: ENST00000595387
  CDS Start-End: 120-1238
cgagctgagaggagcaggtagaggggcagaggcgggactgtcgtctggggtgagttttgttttccacaggagccgcccaggaggctcctcaggccgaccccagaccctggctggccaggatgaagtatctccggcaccggcggcccaatgccaccctcattctggccatcggcgctttcaccctcctcctcttcagtctgctagtgtcaccacccacctgcaaggtccaggagcagccaccggcgatccccgaggccctggcctggcccactccacccacccgcccagccccggccccgtgccatgccaacacctctatggtcacccacccggacttcgccacgcagccgcagcacgttcagaacttcctcctgtacagacactgccgccactttcccctgctgcaggacgtgcccccctctaagtgcgcgcagccggtcttcctgctgctggtgatcaagtcctcccctagcaactatgtgcgccgcgagctgctgcggcgcacgtggggccgcgagcgcaaggtacggggtttgcagctgcgcctcctcttcctggtgggcacagcctccaacccgcacgaggcccgcaaggtcaaccggctgctggagctggaggcacagactcacggagacatcctgcagtgggacttccacgactccttcttcaacctcacgctcaagcaggtcctgttcttacagtggcaggagacaaggtgcgccaacgccagcttcgtgctcaacggggatgatgacgtctttgcacacacagacaacatggtcttctacctgcaggaccatgaccctggccgccacctcttcgtggggcaactgatccaaaacgtgggccccatccgggctttttggagcaagtactatgtgccagaggtggtgactcagaatgagcggtacccaccctattgtgggggtggtggcttcttgctgtcccgcttcacggccgctgccctgcgccgtgctgcccatgtcttggacatcttccccattgatgatgtcttcctgggtatgtgtctggagcttgagggactgaagcctgcctcccacagcggcatccgcacgtctggcgtgcgggctccatcgcaacgcctgtcctcctttgacccctgcttctaccgagacctgctgctggtgcaccgcttcctaccttatgagatgctgctcatgtgggatgcgctgaaccagcccaacctcacctgcggcaatcagacacagatctactgagtcagcatcagggtccccagcctctgggctcctgtttccataggaaggggcgacaccttcctcccaggaagctgagacctttgtggtctgagcataagggagtgccaggga

SEQ ID NO: 197999 - DNA, 1642 bp, Homo sapiens
  Payload ID: 19058
  Gene Name: UDP-GlcNAc:betaGal beta-1, 3-N-acetylglucosaminyltransferase 4
  Uniprot ID: Q9C0J1
  ENST ID: ENST00000324189
  CDS Start-End: 357-1493
agcagcctctgcccgacccggctcgtgcggaccccaggaccgggcgcgggacgcgtgcgtccagcctccggcgctgcggagacccgcggctgggtccggggaggccccaaacccgcccccgccagaaccccgccccaaattcccacctcctccagaagccccgcccactcccgagccccgagagctccgcgcacctgggcgccatccgccctggctccgctgcacgagctccacgcccgtaccccggcgtcacgctcagcccgcggtgctcgcacacctgagactcatctcgcttcgaccccgccgccgccgccgcccggcatcctgagcacggagacagtctccagctgccgttcatgcttcctccccagccttccgcagcccaccagggaaggggcggtaggagtggccttttaccaaagggaccggcgatgctctgcaggctgtgctggctggtctcgtacagcttggctgtgctgttgctcggctgcctgctcttcctgaggaaggcggccaagcccgcaggagaccccacggcccaccagcctttctgggctcccccaacaccccgtcacagccggtgtccacccaaccacacagtgtctagcgcctctctgtccctgcctagccgtcaccgtctcttcttgacctatcgtcactgccgaaatttctctatcttgctggagccttcaggctgttccaaggataccttcttgctcctggccatcaagtcacagcctggtcacgtggagcgacgtgcggctatccgcagcacgtggggcagggtggggggatgggctaggggccggcagctgaagctggtgttcctcctaggggtggcaggatccgctcccccagcccagctgctggcctatgagagtagggagtttgatgacatcctccagtgggacttcactgaggacttcttcaacctgacgctcaaggagctgcacctgcagcgctgggtggtggctgcctgcccccaggcccatttcatgctaaagggagatgacgatgtctttgtccacgtccccaacgtgttagagttcctggatggctgggacccagcccaggacctcctggtgggagatgtcatccgccaagccctgcccaacaggaacactaaggtcaaatacttcatcccaccctcaatgtacagggccacccactacccaccctatgctggtgggggaggatatgtcatgtccagagccacagtgcggcgcctccaggctatcatggaagatgctgaactcttccccattgatgatgtctttgtgggtatgtgcctgaggcggctggggctgagccctatgcaccatgctggcttcaagacatttggaatccggcggcccctggaccccttagacccctgcctgtatagggggctcctgctggttcaccgcctcagccccctcgagatgtggaccatgtgggcactggtgacagatgaggggctcaagtgtgcagctggccccataccccagcgctgaagggtgggttgggcaacagcctgagagtggactcagtgttgattctctatcgtgatgcgaaattgatgcctgctgctctacagaaaatgccaacttggttttttaactcctctcaccctgttagctctgattaaaaacactgcaaccca

SEQ ID NO: 198000 - DNA, 2749 bp, Homo sapiens
  Payload ID: 19058
  Gene Name: UDP-GlcNAc:betaGal beta-1, 3-N-acetylglucosaminyltransferase 4
  Uniprot ID: Q9C0J1
  ENST ID: ENST00000546192
  CDS Start-End: 131-1192
attcccacctcctccagaagccccgcccactcccgagccccgagagctccgcgcacctgggcgccatccgccctggctccgctgcacgagctccacgcccgtaccccggcgtcacgctcagggaccggcgatgctctgcaggctgtgctggctggtctcgtacagcttggctgtgctgttgctcggctgcctgctcttcctgaggaaggcggccaagcccgcaggagaccccacggcccaccagcctttctgggctcccccaacaccccgtcacagccggtgtccacccaaccacacagtgtctagcgcctctctgtccctgcctagccgtcaccgtctcttcttgacctatcgtcactgccgaaatttctctatcttgctggagccttcaggctgttccaaggataccttcttgctcctggccatcaagtcacagcctggtcacgtggagcgacgtgcggctatccgcagcacgtggggcagggtggggggatgggctaggggccggcagctgaagctggtgttcctcctaggggtggcaggatccgctcccccagcccagctgctggcctatgagagtagggagtttgatgacatcctccagtgggacttcactgaggacttcttcaacctgacgctcaaggagctgcacctgcagcgctgggtggtggctgcctgcccccaggcccatttcatgctaaagggagatgacgatgtctttgtccacgtccccaacgtgttagagttcctggatggctgggacccagcccaggacctcctggtgggagatgtcatccgccaagccctgcccaacaggaacactaaggtcaaatacttcatcccaccctcaatgtacagggccacccactacccaccctatgctggtgggggaggatatgtcatgtccagagccacagtgcggcgcctccaggctatcatggaagatgctgaactcttccccattgatgatgtctttgtgggtatgtgcctgaggcggctggggctgagccctatgcaccatgctggcttcaagacatttggaatccggcggcccctggaccccttagacccctgcctgtatagggggctcctgctggttcaccgcctcagccccctcgagatgtggaccatgtgggcactggtgacagatgaggggctcaagtgtgcagctggccccataccccagcgctgaagggtgggttgggcaacagcctgagagtggactcagtgttgattctctatcgtgatgcgaaattgatgcctgctgctctacagaaaatgccaacttggttttttaactcctctcaccctgttagctctgattaaaaacactgcaacccagctaacttgtccagcatatgttgaatgggagccaaagtgtagcaaatgctgccaggaacctgtcggggcattccgggcgctgcctggggcgctgcagtctgggacctcaaggaaggaggctgcataggaccccaggagagacgcattttctctttcagatgcaaacaaaatcttacactcttctcctttggatacaatagagaaacggaaagaaaggaaggaacaagaggcctgtgttaagtcctgttgatgttaagtcctgttgagagcaccaggtaaacactctgcaccccttctcttagtagtaataggtttttcactccttggcctcagctgtcctcacaggacagtgggggcagatcagagaacacatcagaaatacatacaaagaaatcgtacaaactggacaggttcccctccccctgccacaactggcatcccaacagagggaacaagtactaaatcatttttgacgacgtaaataagactgaaaacaggttaaacagttgctgaacttaagggcatgacaaaaaggactcctctctctgacccaggtaggcaaaatgctttgggtgtgaggtaaaaaaaatgggtaagagcagctgtacagagtggggtgaaatgttaaacagggtgcagtgcccaagggctaagaaccaggtccagcgcaagcctgagaccacaggaggcactcacagctcacaaaggcgtctcgcctgattggccagggcaggatctgccgcctcttctcggtgcacagacagtcatgccaaccctgggcagggtggcatctgcccctgctttccccactgagtggggagacagggcagtgtgctcaggccctcaatcctcacgcaggtaggcctcctgctccgactcagcccgctcctccccttcctcctgtgttttctgacggagctcttctatctgtgcttctgccagcttggtttctgctttccgggagagctggtgcacctcttccacctgcagtttcaccagctgaatgtgattcctggcggttatagaggcctgatctgcgcctgccaaaagatgggacaatcgggttgagcagccgtgcagggcgcggaaggctcatgtggacgttggcctgggggtgctgtggctgtcatctgaacccctcttggggtcactttccttgacctccctgtcttctctctctgcaaagaaacttccacctctatgttcaggtctggatttaactgacactctgtcaaaaacagcatttttcttcagctgtcagcggccaacatcacaattattaaatgcaactctcacaatcatctttatagctacagagcttttagtacagacctttgattaatttttttaactacacatcttccatttctttttgacaaagagatcatgaataaaattgtcaaagatc

SEQ ID NO: 198001 - DNA, 2938 bp, Homo sapiens
  Payload ID: 19058
  Gene Name: UDP-GlcNAc:betaGal beta-1, 3-N-acetylglucosaminyltransferase 4
  Uniprot ID: Q9C0J1
  ENST ID: ENST00000535274
  CDS Start-End: 1728-2789
cagtctccagctgccgttcatgcttcctccccagccttccgcagcccaccagggaaggggcggtaggagtggccttttaccaaaggtcagattctttcaccgcctctgccagacccccttgtcccccacccccgcatagatctccagggggctcagaaaactctggccggtggctcacgcctgtagtcccaacgctttgggaggccaaggcgggaggatcgcttgaggccaggagttccagaccagcccaggcaacaaaagataccacatctctacaaaaaataaattagccgggccctgcacgcctgtagtcccagctactggggaggccgaggccggaggatcgcttgaacccaggagttccaggctgcagtgagctataattgtgccactgcactagagtctgggtgacagagacactgtctcaaaaaaaaccaacaaaacccttagctctttcactagccgggctggcctcttcctactgtaaacctgctgggcccccgtctcccttctttctcccctctctcctgccctggagctgcctgactctgcccacggcctgcagagaccccaggtcttcacgcaaggtgccattcctcactcagttcttgctcaaacgtccctccatcaaggagggctttttagctacccttggctatgggatccgtcctccgcgtcagccaattctctgcattagactgtaacttctcaacatacctggttcctatgcgttttgtgctcccctctgagagggcagcgaccctgtcttgcttgccactgcatccctagcacctagcagttgcttttctggtgacggcggctgtggcagtggccaatgcggcagactggtcagaagtgaagggacaggatgacttggcagtggaggtcaaggggaggggactggggcagagggagacaccagagggacaaaaatgagaaactgaagacaggctttgctacgtggagctcgggcaggccacactggtggattctgtctcctcatccttcttttcaggtccctgggagaaatcagcacttagaacgtggtgggaaggcggggcggggtgcctcggaagccatccctgatacaagtccccagctttcctgcttcccctcttgtggtgtgtggctttgtctccctccctccctcctggaagccccgacctctgaggcaggtgtaaagggtgtgtgctttggtggccacggccaccctgtggtgctggttctcctccgagggaagcagtgcactcctggtcatcttggagacgcccaacacaggaccccacaggcaccaagctttttttgggaaatggtttcacttcccacttgaaaagccctgaatgtcagttccacacttagtgaatttgatccaagctaaactgagtctgtgcctaaaactcatcaggtgctcgagtttcctggaagaatggctgggaacgtttatggtgtcagctgtaaagtggctgcaagtccttttgggaaaaacagacccaggagtcctcagatgatggcagaggagggcaagggctggcaaagcagctgtgcttagcccatcctcaggggagggaggactctggaaagagcctgaggatacgctgagaataaaaagtccagaggccagcagggacttagcggctggggtgcaggttaactcctgcccaactcttggggacagggacccggggctgggccctgctcaggtggctctctccttgcagggaccggcgatgctctgcaggctgtgctggctggtctcgtacagcttggctgtgctgttgctcggctgcctgctcttcctgaggaaggcggccaagcccgcaggagaccccacggcccaccagcctttctgggctcccccaacaccccgtcacagccggtgtccacccaaccacacagtgtctagcgcctctctgtccctgcctagccgtcaccgtctcttcttgacctatcgtcactgccgaaatttctctatcttgctggagccttcaggctgttccaaggataccttcttgctcctggccatcaagtcacagcctggtcacgtggagcgacgtgcggctatccgcagcacgtggggcagggtggggggatgggctaggggccggcagctgaagctggtgttcctcctaggggtggcaggatccgctcccccagcccagctgctggcctatgagagtagggagtttgatgacatcctccagtgggacttcactgaggacttcttcaacctgacgctcaaggagctgcacctgcagcgctgggtggtggctgcctgcccccaggcccatttcatgctaaagggagatgacgatgtctttgtccacgtccccaacgtgttagagttcctggatggctgggacccagcccaggacctcctggtgggagatgtcatccgccaagccctgcccaacaggaacactaaggtcaaatacttcatcccaccctcaatgtacagggccacccactacccaccctatgctggtgggggaggatatgtcatgtccagagccacagtgcggcgcctccaggctatcatggaagatgctgaactcttccccattgatgatgtctttgtgggtatgtgcctgaggcggctggggctgagccctatgcaccatgctggcttcaagacatttggaatccggcggcccctggaccccttagacccctgcctgtatagggggctcctgctggttcaccgcctcagccccctcgagatgtggaccatgtgggcactggtgacagatgaggggctcaagtgtgcagctggccccataccccagcgctgaagggtgggttgggcaacagcctgagagtggactcagtgttgattctctatcgtgatgcgaaattgatgcctgctgctctacagaaaatgccaacttggttttttaactcctctcaccctgttagctctgattaaaaacactgcaaccca

SEQ ID NO: 198002 - DNA, 4123 bp, Homo sapiens
  Payload ID: 19059
  Gene Name: UDP-GlcNAc:betaGal beta-1, 3-N-acetylglucosaminyltransferase 5
  Uniprot ID: Q9BYG0
  ENST ID: ENST00000326505
  CDS Start-End: 531-1667
atcccgcccgcatacagcccgcatcccgccggggaagcgagcccagtccagcgctgcccgtccagtcctcgcccaagatttaaagcccgcaagttttgttcttgagaccagcgactttagctccgatgcgggaaggaaagccgacctccgatttggacatttaaagagctgggcttgaacttcgtgagtttcgctctaaactgcccttgaaatgaagctggacttggaggtggcatggaatattcacatgggagagccgcatgaggccgcccaccacgcttcctgaaggatgcccgtgtggaagaattttgacgtgccagtgtcctcgttctacagggtgttccattcttccgcaatctcagaaaaatgggactaaaagaaactattttgtaaaataagaagacttccatttttaatgaccaacatgtattaagatggacacctactctacgaaacacgaagttctatggtctcgaagaagcccgtgcctgtttaaaactgatcctaactaaaaacagacttgagtggatatgagaatgttggttagtggcagaagagtcaaaaaatggcagttaattattcagttatttgctacttgttttttagcgagcctcatgtttttttgggaaccaatcgataatcacattgtgagccatatgaagtcatattcttacagatacctcataaatagctatgactttgtgaatgataccctgtctcttaagcacacctcagcggggcctcgctaccaatacttgattaaccacaaggaaaagtgtcaagctcaagacgtcctccttttactgtttgtaaaaactgctcctgaaaactatgatcgacgttccggaattagaaggacgtggggcaatgaaaattatgttcggtctcagctgaatgccaacatcaaaactctgtttgccttaggaactcctaatccactggagggagaagaactacaaagaaaactggcttgggaagatcaaaggtacaatgatataattcagcaagactttgttgattctttctacaatcttactctgaaattacttatgcagttcagttgggcaaatacctattgtccacatgccaaatttcttatgactgctgatgatgacatatttattcacatgccaaatctgattgagtaccttcaaagtttagaacaaattggtgttcaagacttttggattggtcgtgttcatcgtggtgcccctcccattagagataaaagcagcaaatactacgtgtcctatgaaatgtaccagtggccagcttaccctgactacacagccggagctgcctatgtaatctccggtgatgtagctgccaaagtctatgaggcatcacagacactaaattcaagtctttacatagacgatgtgttcatgggcctctgtgccaataaaatagggatagtaccgcaggaccatgtgtttttttctggagagggtaaaactccttatcatccctgcatctatgaaaaaatgatgacatctcatggacacttagaagatctccaggacctttggaagaatgctacagatcctaaagtaaaaaccatttccaaaggtttttttggtcaaatatactgcagattaatgaagataattctcctttgtaaaattagctatgtggacacatacccttgtagggctgcgtttatctaatagtacttgaatgttgtatgttttcactgtcactgagtcaaacctggatgaaaaaaacctttaaatgttcgtctataccctaagtaaaatgaggacgaaagacaaatattttgaaagcctagtccatcagaatgtttctttgattctagaagctgtttaatatcacttatctacttcattgcctaagttcatttcaaagaatttgtatttagaaaaggtttatattattagtgaaaacaaaactaaagggaagttcaagttctcatgtaatgccacatatatacttgaggtgtagagatgttattaagaagttttgatgttagaataattgcttttggaaaataccaaatgaacgtacagtacaacatttcaaggaaatgaatatattgttagaccaggtaagcaagtttatttttgttaaagagcacttggtggaggtagtaggggcagggaaaggtcagcataggagagaaagttcatgaatctggtaaaacagtctcttgttcttaagaggagatgtagaaaaatgtgtacaatgttattataaacagacaaatcacgtcttaccacatccatgtagctactggtgttagagtcattaaaatacctttttttgcatcttttttcaaagtttaatgtgaacttttagaaaagtgattaatgttgccctaatactttatatgtttttaatggatttttttttaagtattagaaaatgacacataacacgggcagctggttgctcatagggtccttctctagggagaaaccattgttaattcaaataagctgattttaatgacgttttcaactggtttttaaatattcaatattggtctgtgtttaagtttgttatttgaatgtaatttacatagaggaatataataatggagagacttcaaatggaaagacagaacattacaagcctaatgtctccataattttataaaatgaaatcttagtgtctaaatccttgtactgattactaaaattaacccactcctccccaacaaggtcttataaaccacagcactttgttccaagttcagagttttaaattgagagcattaaacatcaaagttataatatctaaaacaatttatttttcatcaataactgtcagaggtgatctttattttctaaatatttcaaacttgaaaacagagtaaaaaagtgatagaaaagttgccagtttggggttaaagcatttttaaagctgcatgttccttgtaatcaaagagatgtgtctgagatctaatagagtaagttacatttattttacaaagcaggataaaaatgtggctataatacacactacctcccttcactacagaaagaactaggtggtgtctactgctagggagattatatgaaggccaaaataatgacttcagcaagagtgactgaactcactctaaggcctttgactgcagaggcacctgttagggaaaatcagatgtctcatataataaggtgatgtcggaaacacgcaaaacaaaacgaaaaaagatttctcagtatacacaactgaatgatgatacttacaatttttagcaggtagctttttaatgtttacagaaattttaatttttttctattttgaaatttgaggcttgtttacattgcttagataatttagaatttttaactaatgtcaaaactacagtgtcaaacattctaggttgtagttactttcagagtagatacagggttttagatcattacagtttaagttttctgaccaattaaaaaaacatagagaacaaaagcatatttgaccaagcaacaagcttataattaatttttattagttgattgattaatgatgtattgccttttgcccatatataccctgtgtatctatacttggaagtgtttaaggttgccattggttgaaaacataagtgtctctggccatcaaagtgatcttgtttacagcagtgcttttgtgaaacaattatttatttgctgaaagagctcttctgaactgtgtccttttaatttttgcttagaatagaatggaacaagtttaaatttcaaggaaatatgaaggcacttcctttttttctaagaaggaagttgctagatgattccttcatcacacttacttaaagtactgagaagagtatctgtaaataaaagggttccaaccttttaaaaaagaaggaaaaaactttttggtgctccagtgtagggctatctttttaaaaaatgtcaacaaagggaaaataaactatcagcttggatggtcacttgaatagaagatggttatacacagtgttattgttaaaatttttttaccttttggttggtttgcatcttttttccatattgttaattttataccaaaatgttaaatatttgtattacttgaattttgctcttgtatggcaaaataattagtgagtttaaaaaaaatctatagtttccaataaacaactgaaaaattatcatga

SEQ ID NO: 198003 - DNA, 614 bp, Homo sapiens
  Payload ID: 19059
  Gene Name: UDP-GlcNAc:betaGal beta-1, 3-N-acetylglucosaminyltransferase 5
  ENST ID: ENST00000481531
  CDS Start-End: 465-614
attcggcattgggcttgctttgtttcctgccaggcccagcattttcttctaccagatcggcaggcttgtgggcttcttcctaggtccctcccctgcactctgaataggaaagctggaagctgtgctttagagaagctttaagacgccgaaagaaaccagaagagtggcatggaatattcacatgggagagccgcatgaggccgcccaccacgcttcctgaaggatgcccgtgtggaagaattttgacgtgccagtgtcctcgttctacagggtgttccattcttccgcaatctcagaaaaatgggactaaaagaaactattttgtaaaataagaagacttccatttttaatgaccaacatgtattaagatggacacctactctacgaaacacgaagttctatggtctcgaagaagcccgtgcctgtttaaaactgatcctaactaaaaacagacttgagtggatatgagaatgttggttagtggcagaagagtcaaaaaatggcagttaattattcagttatttgctacttgttttttagcgagcctcatgtttttttgggaaccaatcgataatcacattgtgagccatatgaagtcatattcttacagatac

SEQ ID NO: 198004 - DNA, 1766 bp, Homo sapiens
  Payload ID: 19059
  Gene Name: UDP-GlcNAc:betaGal beta-1, 3-N-acetylglucosaminyltransferase 5
  Uniprot ID: Q9BYG0
  ENST ID: ENST00000465010
  CDS Start-End: 524-1660
tgcacccacagcagtctgttgtggatggttgctgagctgcgcattcggcattgggcttgctttgtttcctgccaggcccagcattttcttctaccagatcggcaggcttgtgggcttcttcctaggtccctcccctgcactctgaataggaaagctggaagctgtgctttagagaagctttaagacgccgaaagaaaccagaagagtgagcgccagttgtatgtggcatggaatattcacatgggagagccgcatgaggccgcccaccacgcttcctgaaggatgcccgtgtggaagaattttgacgtgccagtgtcctcgttctacagggtgttccattcttccgcaatctcagaaaaatgggactaaaagaaactattttgtaaaataagaagacttccatttttaatgaccaacatgtattaagatggacacctactctacgaaacacgaagttctatggtctcgaagaagcccgtgcctgtttaaaactgatcctaactaaaaacagacttgagtggatatgagaatgttggttagtggcagaagagtcaaaaaatggcagttaattattcagttatttgctacttgttttttagcgagcctcatgtttttttgggaaccaatcgataatcacattgtgagccatatgaagtcatattcttacagatacctcataaatagctatgactttgtgaatgataccctgtctcttaagcacacctcagcggggcctcgctaccaatacttgattaaccacaaggaaaagtgtcaagctcaagacgtcctccttttactgtttgtaaaaactgctcctgaaaactatgatcgacgttccggaattagaaggacgtggggcaatgaaaattatgttcggtctcagctgaatgccaacatcaaaactctgtttgccttaggaactcctaatccactggagggagaagaactacaaagaaaactggcttgggaagatcaaaggtacaatgatataattcagcaagactttgttgattctttctacaatcttactctgaaattacttatgcagttcagttgggcaaatacctattgtccacatgccaaatttcttatgactgctgatgatgacatatttattcacatgccaaatctgattgagtaccttcaaagtttagaacaaattggtgttcaagacttttggattggtcgtgttcatcgtggtgcccctcccattagagataaaagcagcaaatactacgtgtcctatgaaatgtaccagtggccagcttaccctgactacacagccggagctgcctatgtaatctccggtgatgtagctgccaaagtctatgaggcatcacagacactaaattcaagtctttacatagacgatgtgttcatgggcctctgtgccaataaaatagggatagtaccgcaggaccatgtgtttttttctggagagggtaaaactccttatcatccctgcatctatgaaaaaatgatgacatctcatggacacttagaagatctccaggacctttggaagaatgctacagatcctaaagtaaaaaccatttccaaaggtttttttggtcaaatatactgcagattaatgaagataattctcctttgtaaaattagctatgtggacacatacccttgtagggctgcgtttatctaatagtacttgaatgttgtatgttttcactgtcactgagtcaaacctggatgaaaaaaacctttaaatgttcgtctataccctaagtaaaatgaggacgaaagacaaa

SEQ ID NO: 198005 - DNA, 684 bp, Homo sapiens
  Payload ID: 19059
  Gene Name: UDP-GlcNAc:betaGal beta-1, 3-N-acetylglucosaminyltransferase 5
  ENST ID: ENST00000464923
  CDS Start-End: 441-684
gaacgccgcgcccaccaattcggttgccggccgggggccccaggcttgcggccacccgcctccggctggagggctgaattcgagtcgaaagcccgtgtcgggctggaaagaagaaaccgccaacctgagaacgctttcggtggcatggaatattcacatgggagagccgcatgaggccgcccaccacgcttcctgaaggatgcccgtgtggaagaattttgacgtgccagtgtcctcgttctacagggtgttccattcttccgcaatctcagaaaaatgggactaaaagaaactattttgtaaaataagaagacttccatttttaatgaccaacatgtattaagatggacacctactctacgaaacacgaagttctatggtctcgaagaagcccgtgcctgtttaaaactgatcctaactaaaaacagacttgagtggatatgagaatgttggttagtggcagaagagtcaaaaaatggcagttaattattcagttatttgctacttgttttttagcgagcctcatgtttttttgggaaccaatcgataatcacattgtgagccatatgaagtcatattcttacagatacctcataaatagctatgactttgtgaatgataccctgtctcttaagcacacctcagcggggcctcgctaccaatacttgattaaccacaaggaaa

SEQ ID NO: 198006 - DNA, 608 bp, Homo sapiens
  Payload ID: 19059
  Gene Name: UDP-GlcNAc:betaGal beta-1, 3-N-acetylglucosaminyltransferase 5
  ENST ID: ENST00000464191
  CDS Start-End: 423-608
agtttgctgtaagtttccttactttgttactgaggcccccagagctccacgcataagtggtgtgaccagaaaccttttaacaagacccgcctgagcctgcgttagagctcccgctcggaaagtggcatggaatattcacatgggagagccgcatgaggccgcccaccacgcttcctgaaggatgcccgtgtggaagaattttgacgtgccagtgtcctcgttctacagggtgttccattcttccgcaatctcagaaaaatgggactaaaagaaactattttgtaaaataagaagacttccatttttaatgaccaacatgtattaagatggacacctactctacgaaacacgaagttctatggtctcgaagaagcccgtgcctgtttaaaactgatcctaactaaaaacagacttgagtggatatgagaatgttggttagtggcagaagagtcaaaaaatggcagttaattattcagttatttgctacttgttttttagcgagcctcatgtttttttgggaaccaatcgataatcacattgtgagccatatgaagtcatattcttacagatacctcataaatagctatgactttgtgaatgataccctg

SEQ ID NO: 198007 - DNA, 3368 bp, Homo sapiens
  Payload ID: 19059
  Gene Name: UDP-GlcNAc:betaGal beta-1, 3-N-acetylglucosaminyltransferase 5
  Uniprot ID: Q9BYG0
  ENST ID: ENST00000460419
  CDS Start-End: 741-1877
ctgggccggtggttccgcgcggagttagtctgtggtcagttacgtggtgaaaacacggctgtgccgcggccgcatctttccgcggccgaggcctctctgggtgggagtgttggcttcctttccggatcgctaaatggggaaagttctggccgctcggcgggatacgtctccaggccacggatggttcgttctccgtgccgcggccccgagctgggctccctgggtctccagcgcgggctcccggcattgggggctgcgggccggcccctccgccccgcccccgccccgccgcgcctcctcggccgagcggctcgcggtctccggcgcgggaggctccgagtctgcccactccgggccgagcgaggtctctggaggagaagagtggcgaggaggtgagggcacgccggccctcgcccggcgggtggcgccaggacttcaggtggcatggaatattcacatgggagagccgcatgaggccgcccaccacgcttcctgaaggatgcccgtgtggaagaattttgacgtgccagtgtcctcgttctacagggtgttccattcttccgcaatctcagaaaaatgggactaaaagaaactattttgtaaaataagaagacttccatttttaatgaccaacatgtattaagatggacacctactctacgaaacacgaagttctatggtctcgaagaagcccgtgcctgtttaaaactgatcctaactaaaaacagacttgagtggatatgagaatgttggttagtggcagaagagtcaaaaaatggcagttaattattcagttatttgctacttgttttttagcgagcctcatgtttttttgggaaccaatcgataatcacattgtgagccatatgaagtcatattcttacagatacctcataaatagctatgactttgtgaatgataccctgtctcttaagcacacctcagcggggcctcgctaccaatacttgattaaccacaaggaaaagtgtcaagctcaagacgtcctccttttactgtttgtaaaaactgctcctgaaaactatgatcgacgttccggaattagaaggacgtggggcaatgaaaattatgttcggtctcagctgaatgccaacatcaaaactctgtttgccttaggaactcctaatccactggagggagaagaactacaaagaaaactggcttgggaagatcaaaggtacaatgatataattcagcaagactttgttgattctttctacaatcttactctgaaattacttatgcagttcagttgggcaaatacctattgtccacatgccaaatttcttatgactgctgatgatgacatatttattcacatgccaaatctgattgagtaccttcaaagtttagaacaaattggtgttcaagacttttggattggtcgtgttcatcgtggtgcccctcccattagagataaaagcagcaaatactacgtgtcctatgaaatgtaccagtggccagcttaccctgactacacagccggagctgcctatgtaatctccggtgatgtagctgccaaagtctatgaggcatcacagacactaaattcaagtctttacatagacgatgtgttcatgggcctctgtgccaataaaatagggatagtaccgcaggaccatgtgtttttttctggagagggtaaaactccttatcatccctgcatctatgaaaaaatgatgacatctcatggacacttagaagatctccaggacctttggaagaatgctacagatcctaaagtaaaaaccatttccaaaggtttttttggtcaaatatactgcagattaatgaagataattctcctttgtaaaattagctatgtggacacatacccttgtagggctgcgtttatctaatagtacttgaatgttgtatgttttcactgtcactgagtcaaacctggatgaaaaaaacctttaaatgttcgtctataccctaagtaaaatgaggacgaaagacaaatattttgaaagcctagtccatcagaatgtttctttgattctagaagctgtttaatatcacttatctacttcattgcctaagttcatttcaaagaatttgtatttagaaaaggtttatattattagtgaaaacaaaactaaagggaagttcaagttctcatgtaatgccacatatatacttgaggtgtagagatgttattaagaagttttgatgttagaataattgcttttggaaaataccaaatgaacgtacagtacaacatttcaaggaaatgaatatattgttagaccaggtaagcaagtttatttttgttaaagagcacttggtggaggtagtaggggcagggaaaggtcagcataggagagaaagttcatgaatctggtaaaacagtctcttgttcttaagaggagatgtagaaaaatgtgtacaatgttattataaacagacaaatcacgtcttaccacatccatgtagctactggtgttagagtcattaaaatacctttttttgcatcttttttcaaagtttaatgtgaacttttagaaaagtgattaatgttgccctaatactttatatgtttttaatggatttttttttaagtattagaaaatgacacataacacgggcagctggttgctcatagggtccttctctagggagaaaccattgttaattcaaataagctgattttaatgacgttttcaactggtttttaaatattcaatattggtctgtgtttaagtttgttatttgaatgtaatttacatagaggaatataataatggagagacttcaaatggaaagacagaacattacaagcctaatgtctccataattttataaaatgaaatcttagtgtctaaatccttgtactgattactaaaattaacccactcctccccaacaaggtcttataaaccacagcactttgttccaagttcagagttttaaattgagagcattaaacatcaaagttataatatctaaaacaatttatttttcatcaataactgtcagaggtgatctttattttctaaatatttcaaacttgaaaacagagtaaaaaagtgatagaaaagttgccagtttggggttaaagcatttttaaagctgcatgttccttgtaatcaaagagatgtgtctgagatctaatagagtaagttacatttattttacaaagcaggataaaaatgtggctataatacacactacctcccttcactacagaaagaactaggtggtgtctactgctagggagattatatgaaggccaaaataatgacttcagcaagagtgactgaactcactctaaggcctttgactgcagaggcacctgttagggaaaatcagatgtctcatataataaggtgatgtcggaaacacgc

SEQ ID NO: 198008 - DNA, 568 bp, Homo sapiens
  Payload ID: 19060
  Gene Name: UDP-GlcNAc:betaGal beta-1, 3-N-acetylglucosaminyltransferase 6
  ENST ID: ENST00000528622
  CDS Start-End: 205-568
agtgtgtgaagtaaagggattaaaggctagtctcaggctggggatggctcctgtctatttcttctctctcagagactgcagctgcgggaggggagaggtcggccgagagcaagatggtgtgtagagacaccaagcaggacgctacttcatgtgaggcgggaatgttagtttggatcaacctgttgatagagggaatgaaagcagatggcttttccctgccgcaggtccctgactgccaagactctggcctgcctcctggtgggcgtgagtttcttagcactgcagcagtggttcctccaggcgccaaggtccccgcgggaggagaggtccccgcaggaggagacgccagagggtcccaccgacgctcccgcggctgacgagccgccctcggagctcgtccccgggcccccgtgcgtggcgaacgcctcggcgaacgccacggccgacttcgagcagctgcccgcgcgcatccaggacttcctgcggtaccgccactgccgccacttcccgctgctttgggacgcaccggccaagtgcgccggcggccgaggcgtgttcctgctcctgg

SEQ ID NO: 198009 - DNA, 2503 bp, Homo sapiens
  Payload ID: 19060
  Gene Name: UDP-GlcNAc:betaGal beta-1, 3-N-acetylglucosaminyltransferase 6
  Uniprot ID: Q6ZMB0
  ENST ID: ENST00000622824
  CDS Start-End: 82-1236
agtgtgtgaagtaaagggattaaaggctagtctcaggctggggatggctcctgtctatttcttctctctcagagactgcagatggcttttccctgccgcaggtccctgactgccaagactctggcctgcctcctggtgggcgtgagtttcttagcactgcagcagtggttcctccaggcgccaaggtccccgcgggaggagaggtccccgcaggaggagacgccagagggtcccaccgacgctcccgcggctgacgagccgccctcggagctcgtccccgggcccccgtgcgtggcgaacgcctcggcgaacgccacggccgacttcgagcagctgcccgcgcgcatccaggacttcctgcggtaccgccactgccgccacttcccgctgctttgggacgcaccggccaagtgcgccggcggccgaggcgtgttcctgctcctggcggtgaagtcggcgcctgagcactacgagcgacgcgagctcatccggcgcacgtgggggcaagagcgcagctacggcgggcggccagtgcgccgcctctttctattgggcaccccgggccccgaggacgaggcgcgcgcggagcggctggcggagctggtggcgctggaggcgcgcgagcacggcgacgtgctgcagtgggccttcgcggacaccttcctcaacctcacgctcaagcacctgcacttgctcgactggctggctgcacgctgcccgcacgcgcgctttctgctcagcggcgacgacgacgtgttcgtgcacaccgccaacgtagtccgcttcctgcaggcgcagccacccggccgccacctgttctccggccagctcatggagggctccgtgcccatccgcgacagctggagcaagtacttcgtgccgccgcagctcttccccgggtccgcttacccggtgtactgcagcggcggcggcttcctcctgtccggccccacggcccgggccctgcgcgcggccgcccgccacaccccgctcttccccatcgacgacgcctacatgggcatgtgtctggagcgcgccggcctggcgcccagcggccacgagggcatccgacccttcggcgtgcagctgcctggcgcacagcagtcctccttcgacccctgcatgtaccgcgagttgctgctagtgcaccgcttcgcgccctacgagatgctgctcatgtggaaggcgctgcacagccccgcgctcagctgtgaccggggacaccgggtctcctgaggccagttgggcggcttcagccccgggcctccaaccatgtccatgctgagaaggcagctttcccgctctgggtaccttacgtcctgcccagctctgtgcacctgaaccccagctgcgcactgaaatcagctggggtggggggtgtggaaaatgcctacatcctggctccatctcccgaagtttcgatttgattagtctggggtggacccagacatgttaagtattttttaagttcctccagtgatgcgaatgtgcagctaggcctgaggaccactcggctagactatctcttcatcctcgcaaagccagctccaccgccctctctgcaagaattccgggcccctcgctcccacactcgggtcctcttgagcagtggagcaagggagacctgggagcgtgggagccaggatcagcgccccctgccatgtgcctacaaatgtcagttgtgatttccactgtttacaagtgagtggagctggagctgggctgacagtatcaggtggatcccgcttccccctcccccaagaagtcagccaacacgcagctgaggcgcatgtggtggccttcttcccaccactaccccagtacaccgtgaggtagaaatcttcaccgtgcaaagtggaaaccagaggcccggtcagacagtgactaatccagggccgtggcattcccagacagcacaccactgtggtcccctccacactcaccccaaccaaagctaatggcctagttgggtcctgcccgccaataatcacccccacgggtcagagacaggctccttgccggggtctgggcctcaggctcagtgggccttggacaacccagcagggagttccggggagtccgaagtggagaaaggctggtgggaacatggaggccagtgttggggagcctgtggaggcaggtgtgtagaattgtgttcgggaggtgggggatctgagaccgaagtggacagtggttaagattgtggggccgggcgaggtggctcacgcctgtaatcccagcactttgggaggctgaggaggtcggatcatgaggtcaagagttcgagaccagcctggccaatatggtgaaaccccgtctctattgggagtacaaaaattagccggccatagtggctcgtgcctgtaatctcagctatttgggaggctgaggcaggagaatcacttgaacctgggaggcggaggttgcagtgagccgagatcgtgccactgcactccagcctgggcgacagagcaagactgcatctcaaaaaaaaaaaaaaaaa

SEQ ID NO: 198010 - DNA, 3706 bp, Homo sapiens
  Payload ID: 19061
  Gene Name: UDP-GlcNAc:betaGal beta-1, 3-N-acetylglucosaminyltransferase 7
  Uniprot ID: Q8NFL0
  ENST ID: ENST00000287590
  CDS Start-End: 262-1467
gcttggggagcctaggggccgtctcggagaaatggggtggtccccgccaggcggcggcggggcgggccctgggcgccgaaggggttaaggcacctgggccaccgcccctgccggcccctcctcccgcggccgggaagaggaaagtcgcggcgggggcgcggcccggtctccgtccccacccgcccgccgtcccgccggcccgagccgtggcgcccagagctgcgagccgctcgcccctccgccgctccggcccgggccgccatgtcgctgtggaagaaaaccgtctaccggagtctgtgcctggccctggccctgctcgtggccgtgacggtgttccaacgcagtctcacccctggtcagtttctgcaggagcctccgccacccaccctggagccacagaaggcccagaagccaaatggacagctggtgaaccccaacaacttctggaagaacccgaaagatgtggctgcgcccacgcccatggcctctcaggggccccaggcctgggacgtgaccaccactaactgctcagccaatatcaacttgacccaccagccctggttccaggtcctggagccgcagttccggcagtttctcttctaccgccactgccgctacttccccatgctgctgaaccacccggagaagtgcaggggcgatgtctacctgctggtggttgtcaagtcggtcatcacgcagcacgaccgccgcgaggccatccgccagacctggggccgcgagcggcagtccgcgggtgggggccgaggcgccgtgcgcaccctcttcctgctgggcacggcctccaagcaggaggagcgcacgcactaccagcagctgctggcctacgaagaccgcctctacggcgacatcctgcagtggggctttctcgacaccttcttcaacctgaccctcaaggagatccacttcctcaagtggctggacatctactgcccccacgtccccttcattttcaaaggcgacgatgacgtcttcgtcaaccccaccaacctgctagaatttctggctgaccggcagccacaggaaaacctgttcgtgggcgatgtcctgcagcacgctcggcccattcgcaggaaagacaacaaatactacatcccgggggccctgtacggcaaggccagctatccgccgtatgcaggcggcggtggcttcctcatggccggcagcctggcccggcgcctgcaccatgcctgcgacaccctggagctctacccgatcgacgacgtctttctgggcatgtgcctggaggtgctgggcgtgcagcccacggcccacgagggcttcaagactttcggcatctcccggaaccgcaacagccgcatgaacaaggagccgtgctttttccgcgccatgctcgtggtgcacaagctgctgccccctgagctgctcgccatgtgggggctggtgcacagcaatctcacctgctcccgcaagctccaggtgctctgaccccagccgggctactaggacaggccagggcacttgctcctgagcccccatggtattggggctggagccacagtgcccaggcctagcctttggtccccaaggggaggtggagggttgaggcctacgtgccactgggtgtggtggggtgcaggtagccagaaagggacctccctgtgtggataattctaggaaactgaggcccaggaacggttggagctgcccagtctggaggccctctctgaggagcgaggcgccaggccctggcagccctcctgacctgggtccgttgctggccccctcagatgtggtgggaggtcctggtgacctctggaggaacgctgtgctcaggtacctgggctaggcctggcctgatgggtctgtggccgcccctcgtcttcacagggaagagtcttctgtgaaatgcctcagtctccccagaggccgggcggccctggcaggagaaactcaaccctgtgcgggctcacaggcaccccccagtccacaccctggtctcctgggagagagggcccagccggctctccgcagccccaggcctgcctggagacgggccgcctctgccacagggcctccactcctggctgtgtcctgtaaggtctggaagggcgaccgctctgactacctcagcgcccctcagaatctccctggggctgcagccctaccccaccccgacacagggcagaagagcagcgctcctggccccccgaagtcccagagctgctgacccccaccccaggcaagtctctcccgcagcccccacacccccaggcctggctccctggctggaaagcagccggtttggccctggaagtggacattcctctattactgtgaagttttatttatgaagaatttggagggagaaggctccaggcttcaggagggggtggtgtcctccctggccctcctcccttccctcccctcattccagctgcctgccctcagcacccccaggcccctcacagcccagccccctccagagccctgccccaccgcaccctgcttctccagggcctagcagaccagcatctgccccggtgaagggatggatcagctgtgggggtgggtgcagaaggttgccacctcctacctcagcgggagtcacctaggaaagatggagggattgacactattttctcaataaaatgggacttttttttttttttttttttttttttggtgtgaaacttcctgttcccagctgcatcagagagcctgtctggggccaaggttgccagagatttctgaagacacagcttgttccttgttcttggctggtgggtgcacaaggacttctggaagggatttagacggggctgagtgctaggattaaagtggggatgggagtacggcaacagaaaaacctgggagctagcaatgcacccagcccttgactgtgccctggtggacagccgagctgtggctctagcgtgagccagtgccttcctgtccctgccaagggtgaggccagagttggccccgaggctaatgtttcagtgggtgagattaggtcggccgtacagaggccggtgggctccctgacatcccttccaggcaacctgaaagcactgaaatagcttatggccctgtgccagggaccttggcccaagctgctgacctccagggtggggagggagctacccccaggagaagagtcactcagacagcagtatgagcaagccagccagcagctccgtgcctgcacccagctcaggggaatcccagggggttcagatgcccaggaaggaaaaggggacagcgctactgctatggaatgagaccaccacttctcctgttgtccttcccagcttctccccaacctccccttttccctagtttataagacaggagaaaagggagaaagcaaaaagctggaaagaaacagaagtaagataaatagctagacgaccttggcgccaccacctggccctggtggttaaaatgataataatattaacccctgaccaaaacgactggtgttatctgtaaatcccagacattgtgtgagaaagcaccgtaaaactttttgtcctattagctgatgtgtgtagcccccagtcacgttcctcacgcttacttgatctattatgaccctttcacgtggaccccttagagttgtaagctcttaaaagggctaggaatttctttttcggggagctcggctcttaagacgcgagtctgccgacgctcccggccgaataaaaacctcttccttctttaa

SEQ ID NO: 198011 - DNA, 1874 bp, Homo sapiens
  Payload ID: 19062
  Gene Name: UDP-GlcNAc:betaGal beta-1, 3-N-acetylglucosaminyltransferase 8
  Uniprot ID: Q7Z7M8
  ENST ID: ENST00000321702
  CDS Start-End: 455-1648
tcttcctccagctgttcccacaggctccattattcaaactttgggggaggaaatcagggctggacagatcatcaactgctgctgctgacagactgtgttcctgccatgatggggacaggcctgccccaaaccaggctgtctcaccagaaaccagccctaacacgccagagccccatctctcaggtcggcctcctgccctcctccctccctccctccctccctctctcctgcctcagccccgccccggcccctggggccctccctgctcccgctccactcccctccccgcccctctggactggctgggcagggctgggccccgccggtcgacaacacaggggctggggcaggcagatcagagggagctgagggaggcctgacctgaggccggcacccggagctggcgggagccagacccagagctcccgcggccgccccttccctgggccgggtcatgcgctgccccaagtgccttctctgcctgtcagcactgctcacactcctgggcctcaaagtgtacatcgagtggacatccgagtcccggctcagcaaggcctaccccagccctcggggcaccccgccaagccccacgccagccaaccctgagcccaccctacctgccaacctctccacccgcctgggccagactatcccgctgccctttgcttactggaaccagcagcagtggcggctggggtccctgcccagtggggacagcactgaaacggggggctgccaggcttggggggccgccgccgccaccgagatccctgacttcgcctcctaccccaaggacctccgccgcttcttgctgtcagcagcctgccggagcttcccacagtggctgcctggaggtggtggcagccaagtctccagctgctcagatactgatgtcccctacctgctgttggccgtcaagtcagaaccagggcgctttgcagaacgacaggccgtgagagagacgtggggcagtccagctccagggatccggctgctcttcctgctagggtctccggtgggtgaggcggggcctgacctagactcactagtggcctgggagagccgtcgctacagtgacctgctgctctgggacttcctcgacgtcccattcaaccagacgctcaaagacctgctgctgctggcctggctgggccgccactgccccaccgtgagttttgtcttgcgagctcaggacgatgcctttgtacacacccctgccctgctggctcacctgcgggccctgccacctgcctcggcccgaagcctctacctgggtgaggtctttacccaggccatgcctctccggaagccaggaggacccttctatgtgcccgagtccttcttcgaaggtggctacccagcctatgcaagcgggggtggctacgtcattgccgggcgcctggcaccctggctgctgcgggcggcagcccgtgtggcacccttcccctttgaggacgtctacactggcctttgcatccgagccctgggcctggtgccccaggcccacccaggcttcctcacagcctggccagcagaccgcactgcggaccactgtgctttccgcaacctgctgctggtacggcccctgggcccccaggccagcattcggctctggaaacaactgcaagacccaaggctccagtgctgactctcattggggagggcggaggtgctgacctggcctgggcctctggggccggcccctggctcagcccctccttccaggtcttgatgggagggaggagggcccagaagctggacaacttaagccactccttggcctcccccagccaggggcctgggcaggaaagatggggtggtggactgtttttgcctactttttgtttttgaaaaacatgcactccccactctga

SEQ ID NO: 198012 - DNA, 2917 bp, Homo sapiens
  Payload ID: 19063
  Gene Name: UDP-GlcNAc:betaGal beta-1, 3-N-acetylglucosaminyltransferase 9
  Uniprot ID: Q6UX72
  ENST ID: ENST00000449549
  CDS Start-End: 537-1745
ggatagttgggggagctaaccaggggagttgatgcttcttcccaatccccagaaaggcgaatttggggtgtgagcacccagaccagcccttcccagagggactgagagtgaggaggctccctctcagggattagtccccactctgaggccggagtgctcctggcgccggggcggagctgagctccagaagtctgggcgcgcacagctggagggtcacgtggcacggcaccggtcccccttcctgccaacgctgcatttggctcgggcccggtccatggcggcccctcggaccctgcgctgagccccggaggccagggcgtccggggctgcgccacttccgagggccgagcgctgccggtcccggcggtgcgacacggccgggaggaggagaacaacgcaaggggctcaaccgtcggtcgctggagccccccccggggcgtggcctcccgccccctcagctggggagggcggggctcgctgccccctgctgccgactgcgacccttacaggggagggagggcgcaggccgcgcggagatgaggaggaggctgcgcctacgcagggacgcattgctcacgctgctccttggcgcctccctgggcctcttactctatgcgcagcgcgacggcgcggccccgacggcgagcgcgccgcgagggcgagggagggcggcaccgaggcccacccccggaccccgcgcgttccagttacccgacgcgggtgcagccccgccggcctacgaaggggacacaccggcgccgcccacgcctacgggaccctttgacttcgcccgctatttgcgcgccaaggaccagcggcggtttccactgctcattaaccagccgcacaagtgccgcggcgacggcgcacccggtggccgcccggacctgcttattgctgtcaagtcggtggcagaggacttcgagcggcgccaagccgtgcgccagacgtggggcgcggagggtcgcgtgcagggggcgctggtgcgccgcgtgttcttgctgggcgtgcccaggggcgcaggctcgggcggggccgacgaagttggggagggcgcgcgaacccactggcgcgccctgctgcgggccgagagccttgcgtatgcggacatcctgctctgggccttcgacgacaccttttttaacctaacgctcaaggagatccactttctagcctgggcctcagctttctgccccgacgtgcgcttcgtttttaagggcgacgcagatgtgttcgtgaacgtgggaaatctcctggagttcctggcgccgcgggacccggcgcaagacctgcttgctggtgacgtaattgtgcatgcgcggcccatccgcacgcgggctagcaagtactacatccccgaggccgtgtacggcctgcccgcctatccggcctacgcgggcggcggtggctttgtgctttccggggccacgctgcaccgcctggctggcgcctgtgcgcaggtcgagctcttccccatcgacgacgtctttctgggcatgtgtctgcagcgcctgcggctcacgcccgagcctcaccctgccttccgcacctttggcatcccccagccttcagccgcgccgcatttgagcaccttcgacccctgcttttaccgtgagctggttgtagtgcacgggctctcggccgctgacatctggcttatgtggcgcctgctgcacgggccgcatgggccagcctgtgcgcatccacagcctgtcgctgcaggccccttccaatgggactcctagctccccactacagccccaagctcctaactcagacccagaatggagccggtttcccagattattgccgtgtatgtggttcttccctgatcaccaggtgcctgtctccacaggatcccaggggatgggggttaagcttggctcctggcggtccaccctgctggaaccagttgaaacccgtgtaatggtgaccctttgagcgagccaaggctgggtggtagatgaccatctcttgtccaacaggtcccagagcagtggatatgtctggtcctcctagtagcacagaggtgtgttctggtgtggtggcagggacttagggaatcctaccactctgctggatttggaaccccctaggctgacgcggacgtatgcagaggctctcaaggccaggccccacagggaggtggaggggctccggccgccacagcctgaattcatgaacctggcaggcactttgccatagctcatctgaaaacagatattatgcttcccacaacctctcctgggcccaggtgtggctgagcaccagggatggagccacacataagggacaaatgagtgcacggtcctacctagtctttcctcacctcctgaactcacacaacaatgccagtctcccactggaggctgtatcccctcagaggagccaaggaatgtcttcccctgagatgccaccactattaatttccccatatgcttcaaccacccccttgctcaaaaaaccaatacccacacttaccttaatacaaacatcccagcaacagcacatggcaggccattgctgagggcacaggtgctttattggagaggggatgtgggcaggggataaggaaggttcccccattccaggaggatgggaacagtcctggctgcccctgacagtggggatatgcaaggggctctggccaggccacagtccaaatgggaagacaccagtcagtcacaaaagtcgggagcgccacacaaacctggctataaggcccaggaaccatataggagcctgagacaggtcccctgcacattcatcattaaactatacaggatgaggctgtacatgagttaattacaaaagagtcatatttacaaaaatctgtacacacatttgaaaaactcacaaaattgtcatctatgtatcacaagttgctagaccaaaatattaaaaatgggataaaatt

SEQ ID NO: 198013 - DNA, 1383 bp, Homo sapiens
  Payload ID: 19064
  Gene Name: UDP-GlcNAc:betaGal beta-1, 3-N-acetylglucosaminyltransferase-like 1
  Uniprot ID: Q67FW5
  ENST ID: ENST00000320865
  CDS Start-End: 15-1100
gccgaagcggcgggatgagcggagccggcgtgggcggggcgtccgaggagagccaggccatgcaggcccacgtgtctattatcctcccagtccacaacgctgaaccgtggctggacgaatgtttgaggtctgttttgcaacaggactttgaaggtaccatggagctgtctgttttcaatgatgccagtaaggacaagtctggggctatcattgaaaaatggagagtgaagctggaagattctggtgtccacgtgatcattggggggcacgattctccctctcctagaggcgtcggatacgctaaaaatcaagcagttgcccagagctcagggtcttacctttgctttttggattcggatgacgtcatgatgccccagcgggtgaggctgcaacacgaggctgccgttcagcacccgtcgagcatcattggttgcagagtgaggagagatccccctaactccaccgaacgatacacacgttggatcaaccagctgacgccggagcagctcctaacccaggttttcacctcaaatggccccacggtgatcatgcccacctggttctgctcgcgagcgtggttctcccacgtgggcccctttaacgagggaggtcagggcgtcccggaggacctgctgttcttctacgagcacctcaggaagggcggcggcgtcatccgcgtggaccagagtctcctgctgtatcgccaccacccacaggcggccacgcactgcgtcctcgagacgaccatctggacccaccgcgtccgcttcctggaagagcaggccctgccccgctgggcggccttcaccatctggaacgctggcaagcaggggcgccggctgtaccgcagcttgactgccggcagccagcgcaaggtggtggcattctgtgacgtggacgagaacaagatcaggaaaggcttctattgccacgaggactctcaggaaagacccaagccccgaatccccatcctgcacttccgagccgcccggccacccttcgtcatctgcgtgaagctggacctcacagggggcgcctttgaggacaacctgaggtcactgcacttgcaggagggccaggacttccttcacttcagctgacggacccatggcagctgctcccagtgcatcccaggccagcaggagctttgtgagctgcaggcatggcgatggtgcgcctgttccacacccagcaggcgcaaccagagtctcgtgtgtgccgaccacaggagccaagccttttccactgtgtggactcatgtggccaaggctaggcctggtcacccaggaccctcaccacgtgaccccagccaatcgggacagttcaaggaggaggagacccctattacacaggttggaataaaatatttaaatctcgtaaaaa

SEQ ID NO: 198014 - DNA, 459 bp, Homo sapiens
  Payload ID: 19064
  Gene Name: UDP-GlcNAc:betaGal beta-1, 3-N-acetylglucosaminyltransferase-like 1
  ENST ID: ENST00000571218
  CDS Start-End: 14-175
ccgaagcggcgggatgagcggagccggcgtgggcggggcgtccgaggagagccaggccatgcaggcccacgtgtctattatcctcccagtccacaacgctgaaccgtggctggacgaatgtttgaggtctgttttgcaacaggactttgaaggacaagtctggggctatcattgaaaaatggagagtgaagctggaagattctggtgtccacgtgatcattggggggcacgattctccctctcctagaggcgtcggatacgctaaaaatcaagcagttgcccagagctcagggtcttacctttgctttttggattcgggttcccagggtggagagcctctgccaccctcctgtcccccgactcccgtcttcactggggaaccggccgcatggctgtccacgtgcacaggaagccacatggccttcccggaaccgccccgaggcctctgaactggggcct

SEQ ID NO: 198015 - DNA, 2446 bp, Homo sapiens
  Payload ID: 19064
  Gene Name: UDP-GlcNAc:betaGal beta-1, 3-N-acetylglucosaminyltransferase-like 1
  ENST ID: ENST00000572977
  CDS Start-End: 1135-1686
agtgctggcgagaggcagagaagctggatcctcatgcatcactgagggtgagagacggcgcaaccactctggagactgtttggaagttcctgtaaaaactaaacatgtaactgttctgtgacccggcagttgctctcctgggcatttatcccagtggattgaagacgctgttcacagacaaacctgaacttgaatgttcgggatcgccagcacaggacctgactactgttacatgcagtgactggaagcctgtcctgggagccgaggagcagtgcgaaagccgggcacagaaggccgcctcctgcacgttcccggatcatgctctggagagcacagccacggcgtcgggatagcacagccacggcgtcgggatagcacagcggctgccgttgaggggctgccagtggctgtaaggggcgcctcgggtgctcgtgccctgggacatctggatctggactccatcatgtccctctcctggtgcggcgttgaccttgggtcctcgtgatgttaccaccagaggaagtggtgaagggcacagagggtctctctacagttgtttcttacagctgcaatgtgaattcacaattttctcaaagtaagtttaattaaaaaacaacaacaacaacaaatgcaaacagaagcctcccccaagcacgtcattaactgcattggtagaaaagaatcactcactacgcgtaaacgctacacaagttggagacagatccaggggcctcagatgcctcggtgtgacttcatcgcttcagagttaggagactggctcactgataccactctttggaccacagttacattttcactattgtctccttgttggtcttgggtgagacggaatcagctgcgtccgctgggacttgtgacctggggcctgtgctgtgagaacgtctactcgggaggctctgctggccctgggccctcacttggggtgggtgctgtttcctacggacgcgcccaggtgccctctctccagccagctcctcccactgcaagatcattggttgcagagtgaggagagatccccctaactccaccgaacgatacacacgttggatcaaccagctgacgccggagcagctcctaacccaggttttcacctcaaatggccccacggtgatcatgcccacctggttctgctcgcgagcgtggttctcccacgtgggcccctttaacgagggaggtcagggcgtcccggaggacctgctgttcttctacgagcacctcaggaagggcggcggcgtcatccgcgtggaccagagtctcctgctgtatcgccaccacccacaggcggccacgcactgcgtcctcgagacgaccatctggacccaccgcgtccgcttcctggaagagcaggccctgccccgctgggcggccttcaccatctggaacgctggcaagcaggggcgccggctgtaccgcagcttgactgccggcagccagcgcaaggtggtggcattctgtgacgtggacgagaacaagatcaggaaaggcttctattgccacgaggactctcaggaaagacccaagccccgaatccccatcctgcacttccgagccgcccggccacccttcgtcatctgcgtgaagctggacctcacagggggcgcctttgaggacaacctgaggtcactgcacttgcaggagggccaggacttccttcacttcagctgacggacccatggcagctgctcccagtgcatcccaggccagcaggagctttgtgagctgcaggcatggcgatggtgcgcctgttccacacccagcaggcgcaaccagagtctcgtgtgtgccgaccacaggagccaagccttttccactgtgtggactcatgtggccaaggctaggcctggtcacccaggaccctcaccacgtgaccccagccaatcgggacagttcaaggaggaggagacccctattacacagtgaaggcagaggcgtccaccccaagtcaccagagcgcaggtgcagagaggaaaagctgtcagctagtgccagcctccaagggccagcgctacccttcaacagctggaggcaccactgtgcgaggctttccacaccggcctccctcaggaacaagacatcctcaccaggcaggggtgaggtatgggctccaggactggcttcagcaggcaccaggctgaagaagagacaagacaagctcaggctggtcagctccaacacacaccattcccagccaggggaccctcacccctctgggccctgtgtggggactgacacggttcctgcaggaaaccatttgtgccgtttcccacacacccggcagcctgagctatgtggctgacaggtgctcatgactaacgtgtcctcggaagggcaccccatctggggagcgggaagggaggttcactgcactgctcttaacctgcattcacacgtttgaaatttttcctaataaaaatgtaaaaagcac

SEQ ID NO: 198016 - DNA, 1787 bp, Homo sapiens
  Payload ID: 19064
  Gene Name: UDP-GlcNAc:betaGal beta-1, 3-N-acetylglucosaminyltransferase-like 1
  ENST ID: ENST00000576599
  CDS Start-End: 752-1504
attctcccgcctcagcttcccgagtagctgggactacaggagcctgccaccacgcctggctaattttttgtatttttagtagagatggggtttcaccatgttagccaggatggtctcaatctcctgaccttgtaatccacccacctcggcctcccaaagtcctttcagtttttttttcactttcaaaaacatgtagaaggcagttcagggaaagctaagacgtaaagaatcttacaagcatgttaagagcctggagaaaaggagtggacaccttttgtttgtcacggcatatgtgcgggtggtgaaggggaggtaaattagagccatggaaagggaactaagttttcacacttctgttaatccatttcttttgaattccagtctattatcctcccagtccacaacgctgaaccgtggctggacgaatgtttgaggtctgttttgcaacaggactttgaaggtaccatggagctgtctgttttcaatgatgccagtaaggacaagtctggggctatcattgaaaaatggagagtgaagctggaagattctggtgtccacgtgatcattggggggcacgattctccctctcctagaggcgtcggatacgctaaaaatcaagcagttgcccagagctcagggtcttacctttgctttttggattcggatgacgtcatgatgccccagcgggtgaggctgcaacacgaggctgccgttcagcacccgtcgagcggacgctgctttcctgagctgaatggagcaggttcagacgggcggcctgcggacaggcagcggtttcctcacatccactttgcatgtgattcaagaaatcattggttgcagagtgaggagagatccccctaactccaccgaacgatacacacgttggatcaaccagctgacgccggagcagctcctaacccaggttttcacctcaaatggccccacggtgatcatgcccacctggttctgctcgcgagcgtggttctcccacgtgggcccctttaacgagggaggtcagggcgtcccggaggacctgctgttcttctacgagcacctcaggaagggcggcggcgtcatccgcgtggaccagagtctcctgctgtatcgccaccacccacaggcggccacgcactgcgtcctcgagacgaccatctggacccaccgcgtccgcttcctggaagagcaggccctgccccgctgggcggccttcaccatctggaacgctggcaagcaggggcgccggctgtaccgcagcttgactgccggcagccagcgcaaggtggtggcattctgtgacgtggacgagaacaagatcaggaaaggcttctattgccacgaggactctcaggaaagacccaagccccgaatccccatcctgcacttccgagccgcccggccacccttcgtcatctgcgtgaagctggacctcacagggggcgcctttgaggacaacctgaggtcactgcacttgcaggagggccaggacttccttcacttcagctgacggacccatggcagctgctcccagtgcatcccaggccagcaggagctttgtgagctgcaggcatggcgatggtgcgcctgttccacacccagcaggcgcaaccagagtctcgtgtgtgccgaccacaggagccaagccttttccactgtgtggactcatgtggccaaggctaggcctggtcacccaggaccctcaccacgtgaccccagccaatcgggacagttcaaggaggaggagacccctattacacaggttggaataaaatatttaaatctcgtaaaaa

SEQ ID NO: 198017 - DNA, 1383 bp, Homo sapiens
  Payload ID: 19064
  Gene Name: UDP-GlcNAc:betaGal beta-1, 3-N-acetylglucosaminyltransferase-like 1
  Uniprot ID: Q67FW5
  ENST ID: ENST00000621596
  CDS Start-End: 15-1100
gccgaagcggcgggatgagcggagccggcgtgggcggggcgtccgaggagagccaggccatgcaggcccacgtgtctattatcctcccagtccacaacgctgaaccatggctggacgaatgtttgaggtctgttttgcaacaggactttgaaggtaccatggagctgtctgttttcaatgatgccagtaaggacaagtctggggctatcattgaaaaatggagagtgaagctggaagattctggtgtccacgtgatcattggggggcacgattctccctctcctagaggcgtcggatacgctaaaaatcaagcagttgcccagagctcagggtcgtacctttgctttttggattcggatgacgtcatgatgccccagcgggtgaggctgcaacacgaggctgccgttcagcacccgtcgagcatcattggttgcagagtgaggagagatccccctaactccaccgaacgatacacacgttggatcaaccagctgacgccggagcagctcctaacccaggttttcacctcaaatggccccacggtgatcatgcccacctggttctgctcgcgagcgtggttctcccacgtgggcccctttaacgagggaggtcagggcgtcccggaggacctgctgttcttctacgagcacctcaggaagggcggcggcgtcatccgcgtggaccagagtctcctgctgtatcgccaccacccacaggcggccacgcactgcgtcctcgagacgaccatctggacccaccgcgtccgcttcctggaagagcaggccctgccccgctgggcggccttcaccatctggaacgctggcaagcaggggcgccggctgtaccgcagcttgactgccggcagccagcgcaaggtggtggcattctgtgacgtggacgagaacaagatcaggaaaggcttctattgccacgaggactctcaggaaagacccaagccccgaatccccatcctgcacttccgagccgcccggccacccttcgtcatctgcgtgaagctggacctcacagggggcgcctttgaggacaacctgaggtcactgcacttgcaggagggccaggacttccttcacttcagctgacggacccatggcagctgctcccagtgcatcccaggccagcaggagctttgtgagctgcaggcatggcgatggtgcgcctgttccacacccagcaggcgcaaccagagtctcatgtgtgccgaccacaggagccaagccttttccactgtgtggactcatgtggccaaggctaggcctggtcacccaggaccctcaccacgtgaccccagccaatcgggacagttcaaggaggaggagacccctattacacaggttggaataaaatatttaaatctcgtaaaaa

SEQ ID NO: 198018 - DNA, 459 bp, Homo sapiens
  Payload ID: 19064
  Gene Name: UDP-GlcNAc:betaGal beta-1, 3-N-acetylglucosaminyltransferase-like 1
  ENST ID: ENST00000632715
  CDS Start-End: 14-175
ccgaagcggcgggatgagcggagccggcgtgggcggggcgtccgaggagagccaggccatgcaggcccacgtgtctattatcctcccagtccacaacgctgaaccatggctggacgaatgtttgaggtctgttttgcaacaggactttgaaggacaagtctggggctatcattgaaaaatggagagtgaagctggaagattctggtgtccacgtgatcattggggggcacgattctccctctcctagaggcgtcggatacgctaaaaatcaagcagttgcccagagctcagggtcgtacctttgctttttggattcgggttcccagggtggagagcctctgccaccctcctgtcccccgactcccgtcttcactggggaaccggccgcatggctgtccacgtgcacaggaagccacatggccttcccggaaccgccccgaggcctctgaactggggcct

SEQ ID NO: 198019 - DNA, 2446 bp, Homo sapiens
  Payload ID: 19064
  Gene Name: UDP-GlcNAc:betaGal beta-1, 3-N-acetylglucosaminyltransferase-like 1
  ENST ID: ENST00000632023
  CDS Start-End: 1135-1686
agtgctggcgagaggcagagaagctggatcctcatgcatcactgagggtgagagacggcgcaaccactctggagactgtttggaagttcctgtaaaaactaaacatgtaactgttctgtgacccggcagttgctctcctgggcatttatcccagtggattgaagacgctgttcacagacaaacctgaacttgaatgttcgggatcgccagcacaggacctgactactgttacatgcagtgactggaagcctgtcctgggagccgaggagcagtgcgaaagccgggcacagaaggccgcctcctgcacgttcccggatcatgctctggagagcacagccacggcgtcgggatagcacagccacggcgtcgggatagcacagcggctgccgttgaggggctgccagtggctgtaaggggcgcctcgggtgctcgtgccctgggacatctggatctggactccatcatgtccctctcctggtgcggcgttgaccttgggtcctcgtgatgttaccaccagaggaagtggtgaagggcacagagggtctctctacagttgtttcttacagctgcaatgtgaattcacaattttctcaaagtaagtttaattaaaaaacaacaacaacaacaaatgcaaacagaagcctcccccaagcacgtcattaactgcattggtagaaaagaatcactcactacgcgtaaacgctacacaagttggagacagatccaggggcctcagatgcctcggtgtgacttcatcgcttccgagttaggagactggctcactgataccactctttggaccacagttacattttcactattgtctccttgttggtcttgggtgagacggaatcagctgcgtccgctgggacttgtgacctggggcctgtgctgtgagaacgtctactcgggaggctctgctggccctgggccctcacttggggtgggtgctgtttcctacggacgcgcccaggtgccctctctccagccagctcctcccactgcaagatcattggttgcagagtgaggagagatccccctaactccaccgaacgatacacacgttggatcaaccagctgacgccggagcagctcctaacccaggttttcacctcaaatggccccacggtgatcatgcccacctggttctgctcgcgagcgtggttctcccacgtgggcccctttaacgagggaggtcagggcgtcccggaggacctgctgttcttctacgagcacctcaggaagggcggcggcgtcatccgcgtggaccagagtctcctgctgtatcgccaccacccacaggcggccacgcactgcgtcctcgagacgaccatctggacccaccgcgtccgcttcctggaagagcaggccctgccccgctgggcggccttcaccatctggaacgctggcaagcaggggcgccggctgtaccgcagcttgactgccggcagccagcgcaaggtggtggcattctgtgacgtggacgagaacaagatcaggaaaggcttctattgccacgaggactctcaggaaagacccaagccccgaatccccatcctgcacttccgagccgcccggccacccttcgtcatctgcgtgaagctggacctcacagggggcgcctttgaggacaacctgaggtcactgcacttgcaggagggccaggacttccttcacttcagctgacggacccatggcagctgctcccagtgcatcccaggccagcaggagctttgtgagctgcaggcatggcgatggtgcgcctgttccacacccagcaggcgcaaccagagtctcatgtgtgccgaccacaggagccaagccttttccactgtgtggactcatgtggccaaggctaggcctggtcacccaggaccctcaccacgtgaccccagccaatcgggacagttcaaggaggaggagacccctattacacagtgaaggcagaggcgtccaccccaagtcaccagagcgcaggtgcagagaggaaaagctgtcagctagtgccagcctccaagggccagcgctacccttcaacagctggaggcaccactgtgcgaggctttccacaccggcctccctcaggaacaagacatcctcaccaggcaggggtgaggtatgggctccaggactggcttcagcaggcaccaggctgaagaagagacaagacaagctcaggctggtcagctccaacacacaccattcccagccaggggaccctcacccctctgggccctgtgtggggactgacacggttcctgcaggaaaccatttgtgccgtttcccacacacccggcagcctgagctatgtggctgacaggtgctcatgactaacgtgtcctcggaagggcaccccatctggggagcgggaagggaggttcactgcactgctcttaacctgcattcacacgtttgaaatttttcctaataaaaatgtaaaaagcac

SEQ ID NO: 198020 - DNA, 1787 bp, Homo sapiens
  Payload ID: 19064
  Gene Name: UDP-GlcNAc:betaGal beta-1, 3-N-acetylglucosaminyltransferase-like 1
  ENST ID: ENST00000633139
  CDS Start-End: 752-1504
attctcccgcctcagcttcccgagtagctgggactacaggagcctgccaccacgcctggctaattttttgtatttttagtagagatggggtttcaccatgttagccaggatggtctcaatctcctgaccttgtaatccacccacctcggcctcccaaagtcctttcagtttttttttcactttcaaaaacatgtagaaggcagttcagggaaagctaagacgtaaagaatcttacaagcatgttaagagcctggagaaaaggagtggacaccttttgtttgtcacggcatatgtgcgggtggtgaaggggaggtaaattagagccatggaaagggaactaagttttcacacttctgttaatccatttcttttgaattccagtctattatcctcccagtccacaacgctgaaccatggctggacgaatgtttgaggtctgttttgcaacaggactttgaaggtaccatggagctgtctgttttcaatgatgccagtaaggacaagtctggggctatcattgaaaaatggagagtgaagctggaagattctggtgtccacgtgatcattggggggcacgattctccctctcctagaggcgtcggatacgctaaaaatcaagcagttgcccagagctcagggtcgtacctttgctttttggattcggatgacgtcatgatgccccagcgggtgaggctgcaacacgaggctgccgttcagcacccgtcgagcggacgctgctttcctgagctgaatggagcaggttcagacgggcggcctgcggacaggcagcggtttcctcacatccactttgcatgtgattcaagaaatcattggttgcagagtgaggagagatccccctaactccaccgaacgatacacacgttggatcaaccagctgacgccggagcagctcctaacccaggttttcacctcaaatggccccacggtgatcatgcccacctggttctgctcgcgagcgtggttctcccacgtgggcccctttaacgagggaggtcagggcgtcccggaggacctgctgttcttctacgagcacctcaggaagggcggcggcgtcatccgcgtggaccagagtctcctgctgtatcgccaccacccacaggcggccacgcactgcgtcctcgagacgaccatctggacccaccgcgtccgcttcctggaagagcaggccctgccccgctgggcggccttcaccatctggaacgctggcaagcaggggcgccggctgtaccgcagcttgactgccggcagccagcgcaaggtggtggcattctgtgacgtggacgagaacaagatcaggaaaggcttctattgccacgaggactctcaggaaagacccaagccccgaatccccatcctgcacttccgagccgcccggccacccttcgtcatctgcgtgaagctggacctcacagggggcgcctttgaggacaacctgaggtcactgcacttgcaggagggccaggacttccttcacttcagctgacggacccatggcagctgctcccagtgcatcccaggccagcaggagctttgtgagctgcaggcatggcgatggtgcgcctgttccacacccagcaggcgcaaccagagtctcatgtgtgccgaccacaggagccaagccttttccactgtgtggactcatgtggccaaggctaggcctggtcacccaggaccctcaccacgtgaccccagccaatcgggacagttcaaggaggaggagacccctattacacaggttggaataaaatatttaaatctcgtaaaaa

SEQ ID NO: 198021 - DNA, 3216 bp, Homo sapiens
  Payload ID: 19065
  Gene Name: UDP-glucose 6-dehydrogenase
  Uniprot ID: O60701
  ENST ID: ENST00000316423
  CDS Start-End: 344-1828
agtctccccgcccctgagccgtgaaggaaatagggacctggccctgggccttgtgtagcgggagggggagctaggaagcagctgagggcagaatccaggagggcctggctgcgggggaatgaagcctccgccttcgcaggcaaaagcctttaaatacgggctcaggcccgggactcagagtgtaacgcgtggcagcctgagggaggggcgtgcgccgagagggagctcagatcgagcggggcgcgggtggagaagctgcggcggcgcggcccgtaggaaggtgctgtccgaacgatcgggataggagcggtccctgcgcttgctgctgggaagtggtacaatcatgtttgaaattaagaagatctgttgcatcggtgcaggctatgttggaggacccacatgtagtgtcattgctcatatgtgtcctgaaatcagggtaacggttgttgatgtcaatgaatcaagaatcaatgcgtggaattctcctacacttcctatttatgagccaggactaaaagaagtggtagaatcctgtcgaggaaaaaatctttttttttctaccaatattgatgatgccatcaaagaagctgatcttgtatttatttctgtgaatactccaacaaaaacctatggaatggggaaaggccgggcagcagatctgaagtatattgaagcttgtgctagacgcattgtgcaaaactcaaatgggtacaaaattgtgactgagaaaagcacagttccagtgcgggcagcagaaagtatccgtcgcatatttgatgcaaacacaaaacccaacttgaatttacaggtgctgtccaaccctgagtttctggcagagggaacagccatcaaggacctaaagaacccagacagagtactgattggaggggatgaaactccagagggccagagagctgtgcaggccctgtgtgctgtatatgagcactgggttcccagagaaaagatcctcaccactaatacttggtcttcagagctttccaaactggcagcaaatgcttttcttgcccagagaataagcagcattaactccataagtgctctgtgtgaagcaacaggagctgatgtagaagaggtagcaacagcgattggaatggaccagagaattggaaacaagtttctaaaagccagtgttgggtttggtgggagctgtttccaaaaggatgttctgaatttggtttatctctgtgaggctctgaatttgccagaagtagctcgttattggcagcaggtcatagacatgaatgactaccagaggaggaggtttgcttcccggatcatagatagtctgtttaatacagtaactgataagaagatagctattttgggatttgcattcaaaaaggacactggtgatacaagagaatcttctagtatatatattagcaaatatttgatggatgaaggtgcacatctacatatatatgatccaaaagtacctagggaacaaatagttgtggatctttctcatccaggtgtttcagaggatgaccaagtgtcccggctcgtgaccatttccaaggatccatatgaagcatgtgatggtgcccatgctgttgttatttgcactgagtgggacatgtttaaggaattggattatgaacgcattcataaaaaaatgctaaagccagcctttatcttcgatggacggcgtgtcctggatgggctccacaatgaactacaaaccattggcttccagattgaaacaattggcaaaaaggtgtcttcaaagagaattccatatgctccttctggtgaaattccgaagtttagtcttcaagatccacctaacaagaaacctaaagtgtagagattgccatttttatttgtgattttttttttttttttttggtacttcaggatagcaaatatctatctgctattaaatggtaaatgaaccaagtgtttttttttgttttttttttgagacagagtctcactgttgcccaggctggagtgcagtggtgcaatctcggctcactgcaagctctgcttcccaggttcacgccattctcctggctcagcctcccaagtagctgggactacaggcacccgccacagtgcctggctaattttttgtatttttagtagagacagggtttcaccatgtgagccaggatggtctcaatctcctgaccttgtgaaccacccgtctcggcctcccaaagtgctgggattacaggtgtgagccaccacgcctggcccatgaaccaagtgtttttaaggaaacaaaactatttttttaatcatcagatttatactagctatatggatattagcatatctggtaattatgaatctagaatttttttacatatttttataatactgttagctcagttattggatgagtgaaagataatcatgttggttttaatagtgtcaatttttgtaaaataaaaattaaacttcaaactctttactttataaattgtccataggccacactttaatatcacattataaagggaaggacagtcttcattcctcctggttattggtttgtttgtcattaaagatatattttgaatccatgaaattgctatgctaaacagcctttacatgtatggtctggttaaagttcctttgttccttttgttttaataaaatgtgtcactgattttttagctcaaaatcatcactgttaatttccagtcaccccaaatatggttaaaagattttttttttaatcatgaagagaaaattagtagcatttctttctctccccattatttattggttttcctcactaatctttttttttttagtccaaaagccaaaaatatttatcttggttttacattttaatttccattcttaattgtaatttttttctttaaataaggaaaccaatataatctcatgtataaaaacttaaatattttacaagttacatatagcatcattctaaaataagaattttttttgttttctgtctgcttttttcttatgtctcttgttgagttttatattttcagtggttatttttgcttgtgttagatcattattaaaatatatccaatgtccctttgatacttgtgctctgctgagaatgtacagtttgcattaaacatcccaggtctcatccttcaggaattttgcagttcaatgagaagagggagacaaatataaagatgaggacagaagcatctctacagatgaaaattacataaataaaacattctccatcaacaacta

SEQ ID NO: 198022 - DNA, 3021 bp, Homo sapiens
  Payload ID: 19065
  Gene Name: UDP-glucose 6-dehydrogenase
  Uniprot ID: O60701
  ENST ID: ENST00000506179
  CDS Start-End: 182-1666
atacagagcagtagctgtctatcgacagacctcaaagacacagtgagcctttgagtttcttcaaatcccttaagaaatggagaacagtagtctttcttcaggggggttctggaaatgaaagagctgactgtctgctctgagatgtgcttattagtggccaggatccagtttaagtacaatcatgtttgaaattaagaagatctgttgcatcggtgcaggctatgttggaggacccacatgtagtgtcattgctcatatgtgtcctgaaatcagggtaacggttgttgatgtcaatgaatcaagaatcaatgcgtggaattctcctacacttcctatttatgagccaggactaaaagaagtggtagaatcctgtcgaggaaaaaatctttttttttctaccaatattgatgatgccatcaaagaagctgatcttgtatttatttctgtgaatactccaacaaaaacctatggaatggggaaaggccgggcagcagatctgaagtatattgaagcttgtgctagacgcattgtgcaaaactcaaatgggtacaaaattgtgactgagaaaagcacagttccagtgcgggcagcagaaagtatccgtcgcatatttgatgcaaacacaaaacccaacttgaatttacaggtgctgtccaaccctgagtttctggcagagggaacagccatcaaggacctaaagaacccagacagagtactgattggaggggatgaaactccagagggccagagagctgtgcaggccctgtgtgctgtatatgagcactgggttcccagagaaaagatcctcaccactaatacttggtcttcagagctttccaaactggcagcaaatgcttttcttgcccagagaataagcagcattaactccataagtgctctgtgtgaagcaacaggagctgatgtagaagaggtagcaacagcgattggaatggaccagagaattggaaacaagtttctaaaagccagtgttgggtttggtgggagctgtttccaaaaggatgttctgaatttggtttatctctgtgaggctctgaatttgccagaagtagctcgttattggcagcaggtcatagacatgaatgactaccagaggaggaggtttgcttcccggatcatagatagtctgtttaatacagtaactgataagaagatagctattttgggatttgcattcaaaaaggacactggtgatacaagagaatcttctagtatatatattagcaaatatttgatggatgaaggtgcacatctacatatatatgatccaaaagtacctagggaacaaatagttgtggatctttctcatccaggtgtttcagaggatgaccaagtgtcccggctcgtgaccatttccaaggatccatatgaagcatgtgatggtgcccatgctgttgttatttgcactgagtgggacatgtttaaggaattggattatgaacgcattcataaaaaaatgctaaagccagcctttatcttcgatggacggcgtgtcctggatgggctccacaatgaactacaaaccattggcttccagattgaaacaattggcaaaaaggtgtcttcaaagagaattccatatgctccttctggtgaaattccgaagtttagtcttcaagatccacctaacaagaaacctaaagtgtagagattgccatttttatttgtgattttttttttttttttttggtacttcaggatagcaaatatctatctgctattaaatggtaaatgaaccaagtgtttttttttgttttttttttgagacagagtctcactgttgcccaggctggagtgcagtggtgcaatctcggctcactgcaagctctgcttcccaggttcacgccattctcctggctcagcctcccaagtagctgggactacaggcacccgccacagtgcctggctaattttttgtatttttagtagagacagggtttcaccatgtgagccaggatggtctcaatctcctgaccttgtgaaccacccgtctcggcctcccaaagtgctgggattacaggtgtgagccaccacgcctggcccatgaaccaagtgtttttaaggaaacaaaactatttttttaatcatcagatttatactagctatatggatattagcatatctggtaattatgaatctagaatttttttacatatttttataatactgttagctcagttattggatgagtgaaagataatcatgttggttttaatagtgtcaatttttgtaaaataaaaattaaacttcaaactctttactttataaattgtccataggccacactttaatatcacattataaagggaaggacagtcttcattcctcctggttattggtttgtttgtcattaaagatatattttgaatccatgaaattgctatgctaaacagcctttacatgtatggtctggttaaagttcctttgttccttttgttttaataaaatgtgtcactgattttttagctcaaaatcatcactgttaatttccagtcaccccaaatatggttaaaagattttttttttaatcatgaagagaaaattagtagcatttctttctctccccattatttattggttttcctcactaatctttttttttttagtccaaaagccaaaaatatttatcttggttttacattttaatttccattcttaattgtaatttttttctttaaataaggaaaccaatataatctcatgtataaaaacttaaatattttacaagttacatatagcatcattctaaaataagaattttttttgttttctgtctgcttttttcttatgtctcttgttgagttttatattttcagtggttatttttgcttgtgttagatcattattaaaatatatccaatgtccctttgatacttgtgctctgctgagaatgtacagtttgcattaaacatcccaggtctcatccttcaggaattttgcagttcaatgagaagagggagacaaatataaagatgaggacagaagcatctctacagatgaaaa

SEQ ID NO: 198023 - DNA, 861 bp, Homo sapiens
  Payload ID: 19065
  Gene Name: UDP-glucose 6-dehydrogenase
  ENST ID: ENST00000515021
  CDS Start-End: 318-861
gtagcgggagggggagctaggaagcagctgagggcagaatccaggagggcctggctgcgggggaatgaagcctccgccttcgcaggcaaaagcctttaaatacgggctcaggcccgggactcagagtgtaacgcgtggcagcctgagggaggggcgtgcgccgagagggagctcagatcgagcggggcgcgggtggagaagctgcggcggcgcggcccgtaggaaggtgctgtccgaacgatcgggataggagcggtccctgcgcttgctgctgggaagtggggcgggaaccgcattttggaactgctgtcctggggatgtggtcgtctgggcttcttattcaagactctacaatcatgtttgaaattaagaagatctgttgcatcggtgcaggctatgttggaggacccacatgtagtgtcattgctcatatgtgtcctgaaatcagggtaacggttgttgatgtcaatgaatcaagaatcaatgcgtggaattctcctacacttcctatttatgagccaggactaaaagaagtggtagaatcctgtcgaggaaaaaatctttttttttctaccaatattgatgatgccatcaaagaagctgatcttgtatttatttctgtgaatactccaacaaaaacctatggaatggggaaaggccgggcagcagatctgaagtatattgaagcttgtgctagacgcattgtgcaaaactcaaatgggtacaaaattgtgactgagaaaagcacagttccagtgcgggcagcagaaagtatccgtcgcatatttgatgcaaacacaaaacccaacttgaatttacaggtgctgtccaaccctgagtttctggcagagggaacagcca

SEQ ID NO: 198024 - DNA, 433 bp, Homo sapiens
  Payload ID: 19065
  Gene Name: UDP-glucose 6-dehydrogenase
  ENST ID: ENST00000505698
  CDS Start-End: 180-433
cgcacagacatcccaaatcccggattgggcctgaggaacatctctgcaaagagcgccaggagggcgtgggggtcccgcctctctcgccagggaccagggagtggacactcactggtccagtcatgaggaactcagcatcctcctgacgggaggcgcctctttcccagaagcgtacaatcatgtttgaaattaagaagatctgttgcatcggtgcaggctatgttggaggacccacatgtagtgtcattgctcatatgtgtcctgaaatcagggtaacggttgttgatgtcaatgaatcaagaatcaatgcgtggaattctcctacacttcctatttatgagccaggactaaaagaagtggtagaatcctgtcgaggaaaaaatctttttttttctaccaatattgatgatgccatcaaagaagctgatcttgt

SEQ ID NO: 198025 - DNA, 577 bp, Homo sapiens
  Payload ID: 19065
  Gene Name: UDP-glucose 6-dehydrogenase
  ENST ID: ENST00000509391
  CDS Start-End: 188-577
gtaacgcgtggcagcctgagggaggggcgtgcgccgagagggagctcagatcgagcggggcgcgggtggagaagctgcggcggcgcggcccgtaggaaggtgctgtccgaacgatcgggataggagcggtccctgcgcttgctgctgggaagtggaacagtcttactgttttccttctagtacaatcatgtttgaaattaagaagatctgttgcatcggtgcaggctatgttggaggacccacatgtagtgtcattgctcatatgtgtcctgaaatcagggtaacggttgttgatgtcaatgaatcaagaatcaatgcgtggaattctcctacacttcctatttatgagccaggactaaaagaagtggtagaatcctgtcgaggaaaaaatctttttttttctaccaatattgatgatgccatcaaagaagctgatcttgtatttatttctgtgaatactccaacaaaaacctatggaatggggaaaggccgggcagcagatctgaagtatattgaagcttgtgctagacgcattgtgcaaaactcaaatgggtacaaaattgtgactgagaaaagc

SEQ ID NO: 198026 - DNA, 2826 bp, Homo sapiens
  Payload ID: 19065
  Gene Name: UDP-glucose 6-dehydrogenase
  Uniprot ID: O60701
  ENST ID: ENST00000501493
  CDS Start-End: 163-1446
gtaacgcgtggcagcctgagggaggggcgtgcgccgagagggagctcagatcgagcggggcgcgggtggagaagctgcggcggcgcggcccgtaggaaggtgctgtccgaacgatcgggataggagcggtccctgcgcttgctgctgggaagtggtacaatcatgtttgaaattaagaagatctgttgcatcggtgcaggctatgttggaggacccacatgtagtgtcattgctcatatgtgtcctgaaatcagggtaacggttgttgatgtcaatgaatcaagaatcaatgcgtggaattctcctacacttcctatttatgagccaggactaaaagaagtggtagaatcctgtcgaggaaaaaatctttttttttctaccaatattgatgatgccatcaaagaagctgatcttgtatttatttctgtgctgtccaaccctgagtttctggcagagggaacagccatcaaggacctaaagaacccagacagagtactgattggaggggatgaaactccagagggccagagagctgtgcaggccctgtgtgctgtatatgagcactgggttcccagagaaaagatcctcaccactaatacttggtcttcagagctttccaaactggcagcaaatgcttttcttgcccagagaataagcagcattaactccataagtgctctgtgtgaagcaacaggagctgatgtagaagaggtagcaacagcgattggaatggaccagagaattggaaacaagtttctaaaagccagtgttgggtttggtgggagctgtttccaaaaggatgttctgaatttggtttatctctgtgaggctctgaatttgccagaagtagctcgttattggcagcaggtcatagacatgaatgactaccagaggaggaggtttgcttcccggatcatagatagtctgtttaatacagtaactgataagaagatagctattttgggatttgcattcaaaaaggacactggtgatacaagagaatcttctagtatatatattagcaaatatttgatggatgaaggtgcacatctacatatatatgatccaaaagtacctagggaacaaatagttgtggatctttctcatccaggtgtttcagaggatgaccaagtgtcccggctcgtgaccatttccaaggatccatatgaagcatgtgatggtgcccatgctgttgttatttgcactgagtgggacatgtttaaggaattggattatgaacgcattcataaaaaaatgctaaagccagcctttatcttcgatggacggcgtgtcctggatgggctccacaatgaactacaaaccattggcttccagattgaaacaattggcaaaaaggtgtcttcaaagagaattccatatgctccttctggtgaaattccgaagtttagtcttcaagatccacctaacaagaaacctaaagtgtagagattgccatttttatttgtgattttttttttttttttttggtacttcaggatagcaaatatctatctgctattaaatggtaaatgaaccaagtgtttttttttgttttttttttgagacagagtctcactgttgcccaggctggagtgcagtggtgcaatctcggctcactgcaagctctgcttcccaggttcacgccattctcctggctcagcctcccaagtagctgggactacaggcacccgccacagtgcctggctaattttttgtatttttagtagagacagggtttcaccatgtgagccaggatggtctcaatctcctgaccttgtgaaccacccgtctcggcctcccaaagtgctgggattacaggtgtgagccaccacgcctggcccatgaaccaagtgtttttaaggaaacaaaactatttttttaatcatcagatttatactagctatatggatattagcatatctggtaattatgaatctagaatttttttacatatttttataatactgttagctcagttattggatgagtgaaagataatcatgttggttttaatagtgtcaatttttgtaaaataaaaattaaacttcaaactctttactttataaattgtccataggccacactttaatatcacattataaagggaaggacagtcttcattcctcctggttattggtttgtttgtcattaaagatatattttgaatccatgaaattgctatgctaaacagcctttacatgtatggtctggttaaagttcctttgttccttttgttttaataaaatgtgtcactgattttttagctcaaaatcatcactgttaatttccagtcaccccaaatatggttaaaagattttttttttaatcatgaagagaaaattagtagcatttctttctctccccattatttattggttttcctcactaatctttttttttttagtccaaaagccaaaaatatttatcttggttttacattttaatttccattcttaattgtaatttttttctttaaataaggaaaccaatataatctcatgtataaaaacttaaatattttacaagttacatatagcatcattctaaaataagaattttttttgttttctgtctgcttttttcttatgtctcttgttgagttttatattttcagtggttatttttgcttgtgttagatcattattaaaatatatccaatgtccctttgatacttgtgctctgctgagaatgtacagtttgcattaaacatcccaggtctcatccttcaggaattttgcagttcaatgagaagagggagacaaatataaagatgaggacagaagcatctctacagatgaaaattacataaataaaacattctccatc

SEQ ID NO: 198027 - DNA, 549 bp, Homo sapiens
  Payload ID: 19065
  Gene Name: UDP-glucose 6-dehydrogenase
  ENST ID: ENST00000510881
  CDS Start-End: 125-292
gccctaaagcctggcagacgcggagcgcacgcggcctttgcctcggccaggacagggcagcggggagagggctgctagacaacaattcttgacccctcctcgacccacgaccgccagtacaatcatgtttgaaattaagaagatctgttgcatcggtgcaggctatgttggaggacccacatgtagtgtcattgctcatatgtgtcctgaaatcagggtaacggttgttgatgtcaatgaatcaagaatcaatgcgtggaattctcctacacttcctatttatgaggactaaaagaagtggtagaatcctgtcgaggaaaaaatctttttttttctaccaatattgatgatgccatcaaagaagctgatcttgtatttatttctgtgaatactccaacaaaaacctatggaatggggaaaggccgggcagcagatctgaagtatattgaagcttgtgctagacgcattgtgcaaaactcaaatgggtacaaaattgtgactgagaaaagcacagttccagtgcgggcagcagaaagtatccgtcgcata

SEQ ID NO: 198028 - DNA, 575 bp, Homo sapiens
  Payload ID: 19065
  Gene Name: UDP-glucose 6-dehydrogenase
  ENST ID: ENST00000503779
  CDS Start-End: 163-330
gtaacgcgtggcagcctgagggaggggcgtgcgccgagagggagctcagatcgagcggggcgcgggtggagaagctgcggcggcgcggcccgtaggaaggtgctgtccgaacgatcgggataggagcggtccctgcgcttgctgctgggaagtggtacaatcatgtttgaaattaagaagatctgttgcatcggtgcaggctatgttggaggacccacatgtagtgtcattgctcatatgtgtcctgaaatcagggtaacggttgttgatgtcaatgaatcaagaatcaatgcgtggaattctcctacacttcctatttatgaggactaaaagaagtggtagaatcctgtcgaggaaaaaatctttttttttctaccaatattgatgatgccatcaaagaagctgatcttgtatttatttctgtgaatactccaacaaaaacctatggaatggggaaaggccgggcagcagatctgaagtatattgaagcttgtgctagacgcattgtgcaaaactcaaatgggtacaaaattgtgactgagaaaagcacagttccagtgcgggcagcagaaagt

SEQ ID NO: 198029 - DNA, 568 bp, Homo sapiens
  Payload ID: 19065
  Gene Name: UDP-glucose 6-dehydrogenase
  ENST ID: ENST00000514106
  CDS Start-End: 110-568
agacgcggagcgcacgcggcctttgcctcggccaggacagggcagcggggagagggctgctagacaacaattcttgacccctcctcgacccacgaccgccagtacaatcatgtttgaaattaagaagatctgttgcatcggtgcaggctatgttggaggacccacatgtagtgtcattgctcatatgtgtcctgaaatcagggtaacggttgttgatgtcaatgaatcaagaatcaatgcgtggaattctcctacacttcctatttatgagccaggactaaaagaagtggtagaatcctgtcgaggaaaaaatctttttttttctaccaatattgatgatgccatcaaagaagctgatcttgtatttatttctgtgaatactccaacaaaaacctatggaatggggaaaggccgggcagcagatctgaagtatattgaagcttgtgctagacgcattgtgcaaaactcaaatgggtacaaaattgtgactgagaaaagcacagttccagtgcgggcagcagaaagtatccgtcgcatatttgatgcaaacacaaaacccaacttgaat

SEQ ID NO: 198030 - DNA, 1712 bp, Homo sapiens
  Payload ID: 19065
  Gene Name: UDP-glucose 6-dehydrogenase
  Uniprot ID: O60701
  ENST ID: ENST00000507089
  CDS Start-End: 287-1480
gtgtaacgcgtggcagcctgagggaggggcgtgcgccgagagggagctcagatcgagcggggcgcgggtggagaagctgcggcggcgcggcccgtaggaaggtgctgtccgaacgatcgggataggagcggtccctgcgcttgctgctgggaagtggccaggactaaaagaagtggtagaatcctgtcgaggaaaaaatctttttttttctaccaatattgatgatgccatcaaagaagctgatcttgtatttatttctgtgaatactccaacaaaaacctatggaatggggaaaggccgggcagcagatctgaagtatattgaagcttgtgctagacgcattgtgcaaaactcaaatgggtacaaaattgtgactgagaaaagcacagttccagtgcgggcagcagaaagtatccgtcgcatatttgatgcaaacacaaaacccaacttgaatttacaggtgctgtccaaccctgagtttctggcagagggaacagccatcaaggacctaaagaacccagacagagtactgattggaggggatgaaactccagagggccagagagctgtgcaggccctgtgtgctgtatatgagcactgggttcccagagaaaagatcctcaccactaatacttggtcttcagagctttccaaactggcagcaaatgcttttcttgcccagagaataagcagcattaactccataagtgctctgtgtgaagcaacaggagctgatgtagaagaggtagcaacagcgattggaatggaccagagaattggaaacaagtttctaaaagccagtgttgggtttggtgggagctgtttccaaaaggatgttctgaatttggtttatctctgtgaggctctgaatttgccagaagtagctcgttattggcagcaggtcatagacatgaatgactaccagaggaggaggtttgcttcccggatcatagatagtctgtttaatacagtaactgataagaagatagctattttgggatttgcattcaaaaaggacactggtgatacaagagaatcttctagtatatatattagcaaatatttgatggatgaaggtgcacatctacatatatatgatccaaaagtacctagggaacaaatagttgtggatctttctcatccaggtgtttcagaggatgaccaagtgtcccggctcgtgaccatttccaaggatccatatgaagcatgtgatggtgcccatgctgttgttatttgcactgagtgggacatgtttaaggaattggattatgaacgcattcataaaaaaatgctaaagccagcctttatcttcgatggacggcgtgtcctggatgggctccacaatgaactacaaaccattggcttccagattgaaacaattggcaaaaaggtgtcttcaaagagaattccatatgctccttctggtgaaattccgaagtttagtcttcaagatccacctaacaagaaacctaaagtgtagagattgccatttttatttgtgattttttttttttttttttggtacttcaggatagcaaatatctatctgctattaaatggtaaatgaaccaagtgtttttttttgttttttttttgagacagagtctcactgttgcccaggctggagtgcagtggtgcaatctcggctcactgcaagctctgcttcccaggttcacgccattctcctggctcagcctcccaagtagctggga

SEQ ID NO: 198031 - DNA, 534 bp, Homo sapiens
  Payload ID: 19065
  Gene Name: UDP-glucose 6-dehydrogenase
  ENST ID: ENST00000510490
  CDS Start-End: 374-534
gtgaaggaaatagggacctggccctgggccttgtgtagcgggagggggagctaggaagcagctgagggcagaatccaggagggcctggctgcgggggaatgaagcctccgccttcgcaggcaaaagcctttaaatacgggctcaggcccgggactcagagtgtaacgcgtggcagcctgagggaggggcgtgcgccgagagggagctcagatcgagcggggcgcgggtggagaagctgcggcggcgcggcccgtaggaaggtgctgtccgaacgatcgggataggagcggtccctgcgcttgctgctgggaagtgggtaagcgccgctcccaggctggccccgccgcccgggcgggatgctcccagtacaatcatgtttgaaattaagaagatctgttgcatcggtgcaggctatgttggaggacccacatgtagtgtcattgctcatatgtgtcctgaaatcagggtaacggttgttgatgtcaatgaatcaagaatcaatgcgtggaattctcctacacttcctatttatga

SEQ ID NO: 198032 - DNA, 4007 bp, Homo sapiens
  Payload ID: 19066
  Gene Name: UDP-glucose ceramide glucosyltransferase
  Uniprot ID: Q16739
  ENST ID: ENST00000374279
  CDS Start-End: 451-1635
gggggcgggacgcgccgaggagtggggcgcgagccgccggttttgattagtgcgcggagctgcggcggtggagctgctcggccgggagcccggcggcgagacggagaggcggcggaggtgcccgcgcgcagggtctggtgggcggccgcgaggctcgggagaggcgaaccggagcgcgggaccgcggtcgccccgaccagagccgggagaccgcagcacccgcagccgcccgcgagcgcgccgaagacagcgcgcaggcgagagcgcgcgggcgggggcgcgcaggccctgcccgccccttccgtccccacccccctccgccctttcctctccccaccttcctctcgcctcccgcgcccccgcaccgggcgcccaccctgtcctcctcctgcgggagcgttgtccgtgttggcggccgcagcgggccgggccggtccggcgggccgggggatggcgctgctggacctggccttggagggaatggccgtcttcgggttcgtcctcttcttggtgctgtggctgatgcatttcatggctatcatctacacccgattacacctcaacaagaaggcaactgacaaacagccttatagcaagctcccaggtgtctctcttctgaaaccactgaaaggggtagatcctaacttaatcaacaacctggaaacattctttgaattggattatcccaaatatgaagtgctcctttgtgtacaagatcatgatgatccagccattgatgtatgtaagaagcttcttggaaaatatccaaatgttgatgctagattgtttataggtggcaaaaaagttggcattaatcctaaaattaataatttaatgccaggatatgaagttgcaaagtatgatcttatatggatttgtgatagtggaataagagtaattccagatacgcttactgacatggtgaatcaaatgacagaaaaagtaggcttggttcacgggctgccttacgtagcagacagacagggctttgctgccaccttagagcaggtatattttggaacttcacatccaagatactatatctctgccaatgtaactggtttcaaatgtgtgacaggaatgtcttgtttaatgagaaaagatgtgttggatcaagcaggaggacttatagcttttgctcagtacattgccgaagattactttatggccaaagcgatagctgaccgaggttggaggtttgcaatgtccactcaagttgcaatgcaaaactctggctcatattcaatttctcagtttcaatccagaatgatcaggtggaccaaactacgaattaacatgcttcctgctacaataatttgtgagccaatttcagaatgctttgttgccagtttaattattggatgggcagcccaccatgtgttcagatgggatattatggtatttttcatgtgtcattgcctggcatggtttatatttgactacattcaactcaggggtgtccagggtggcacactgtgtttttcaaaacttgattatgcagtcgcctggttcatccgcgaatccatgacaatatacatttttttgtctgcattatgggacccaactataagctggagaactggtcgctacagattacgctgtgggggtacagcagaggaaatcctagatgtataactacagctttgtgactgtatataaaggaaaaaagagaagtattataaattatgtttatataaatgcttttaaaaatctaccttctgtagttttatcacatgtatgttttggtatctgttctttaatttatttttgcatggcacttgcatctgtgaaaaaaaaaaaaaacacatctgtagtcttggccaaatgatacactttattttgtggaagtagagaatcaagagaattggttctaggaacctgggttcgttcatcattgttgtttatttttttaaaataaataaataaatatatatatagatgctctgcaacaaactctgtgacagtatccttcagtagagaaagtttcttacttgtgagtacactcttttagaacatttacgggtggcagcagctttgctttagagtttagaagataatagaaggaatgactattcatgtccaaagtgaatggttttgtgcagtgaacaacacatggcgaggtactaactgagaaactttttcatgctttatgcctacctcttgtagttgttgcagagcaaatataaattgtaataagatagctaggccttgcagaaacaaacagaaaaacttaaaaaaaaatgatataagagctggagtctagtatttatatgaatctgtgagagataatttttttggtctcactgcaatgaaccaaaagcggctgagtttggtttttaattgtagccatgtattgaaggcatctttttgaccaactcttgttggttctgtcttgaaccattgttaatcactgtgctgtaattagtatagctaaatcttttccttccttgctcctcccccagcccaccccgtcttcccttaacattttttcagggggggttgggagtggtttcattttagtgtgagtggatgttttgatagttgtaaggaaaaaatgcatttcagacacatttcacacatgagctattttcttacacagtatgtcttattgttaataagaatgtaatttcatgatacaagtatttaataccttttttaagtcagtaaatattctagccatcaataaattgcagtagagtattaagaggggacaggatgagtttactcttaaaattaatcagtatcaaactaagtctactgtgtgtgttttttttttttgttttttgtttttgtttgtttactattatagtaagtctagtcttatttaaattggatttttgtattcaagtttatatgacaaaatagactagatcagcgctggttgtaaatgcatgctgtacctcactgttttctccccatcatgccgctaaacttgctcgccaggttgtgcttaacttgtggtgaactggacttgattctgttttgttttgtttttttaaaaaaaaaaaacaaaaatgtaagggacagtgcataagccttttctttgttaagtagtggtgttttgctttttcttcaggattggatggcatgttgtccacaggaatgcctactgcagggctaacactggcaatatggcagctttaaattctgagttactacagtctccatgtcaaagcataatgtgtagcatatcagcaataactacatatttatagaaaacactttttcactttactgagccaattcatttaattgtcaaatgtctatatccatggtttaaatggcaacatatctataagtatgtatacacattatatttaagcttttctctgggccaaactgcttcatccttttttctttctttttttttttttttagccttatgatgaatttgtttgaagggcattttctttatgaacaaaggcttggatgcatattcctttctttctgtgaatgggtattattccctgaggaaagttgcacagtgaaaaccagtctggttgtgacccactacatgttttgtttttaatcactattacctgagttgaactttgctcaccatgtttgtacttgttggtctgtttaatgaagtttggttgatgccatcctttgcactgccgaagcgtaatcttgtgtattacttagctctctgctgatctcagtatggacagtgtaacaacaaaaccaaaatggctggacagacttcttgtgttttgtaaatataaactaggacagttctgtaggtttgttcagtgtgctagtggagtatttccttaatgtaaaacttcacttaacagagagattctttgtttagcaagcttggagtgatgataaaatggtaagaaataatataaatgttgaagaaagcatcacaacagaactataggagtctaaatttaataaatctttaaaaaaaaccagtgtctagaatatataccatgttttattatttaaaatcattgtcttaaatttttgttcaaaaaataaaaatttgaatacaatcaaaa

SEQ ID NO: 198033 - DNA, 10650 bp, Homo sapiens
  Payload ID: 19067
  Gene Name: UDP-glucose glycoprotein glucosyltransferase 1
  Uniprot ID: Q9NYU2
  ENST ID: ENST00000259253
  CDS Start-End: 48-4715
ccctggcgttgtctctggcactgtggcggactgaccacggcccgggcatgggctgcaagggagacgcgagcggtgcgtgtgccgcgggtgcgctgccggtgacaggagtttgctataaaatgggagttctggttgtactcactgttctgtggctgttctcctcagtaaaggccgactcaaaagccattacaacctctcttacaacaaaatggttttccactccattgttgttagaagccagtgagtttttagcagaagacagtcaagagaaattttggaattttgtagaagccagtcaaaatattggatcatcagatcatgacggtaccgattattcctactatcatgcaatattggaggctgcatttcagtttctgtcacccctccagcagaatttgtttaaattttgtctgtcccttcgttcttactcagctacaatccaagccttccagcagatagcagctgatgaacctccaccagaaggatgtaattcgtttttttcagtgcatggaaagaagacttgtgaatctgatacccttgaggctcttctactgacagcctctgaaagacccaaacctttattgttcaaaggagatcacagatatccctcgtctaatcctgaaagccctgtggtgattttctactctgagattggctctgaggaattttccaattttcaccgccagcttatatcaaaaagcaatgcaggcaaaatcaattatgtattcagacattatatatttaatcccaggaaggagcctgtttacctctctggctatggcgtggaattggccattaagagcactgagtacaaggccaaggatgatactcaggtgaaaggaactgaggtaaacaccacagtgattggtgaaaatgatcctattgatgaggttcaggggttcctctttggaaaattaagagatctgcaccccgacctggagggacagttgaaagaactcagaaagcatcttgtagagagcaccaatgaaatggcacctttaaaggtttggcagttgcaagatctcagtttccagactgctgctcgaatcttggcttctcctgttgagttggctttggttgtcatgaaggatcttagtcagaattttcctaccaaagccagagcaataacaaaaacagctgtgagctcagaacttagaaccgaagtggaagagaatcagaagtatttcaagggaactttaggattacaacctggagattcagccctcttcatcaatggacttcacatggatttagatacacaggatatattcagtctgtttgatgtgttgaggaatgaagctcgggtaatggagggtctgcatagattgggaatagaaggcctttctctgcataatgttttgaagctgaacatccagccctctgaggcagactatgccgtagacatccggagtcctgctatttcatgggtcaacaacctggaggttgatagcagatataattcgtggccttctagtttacaagagttgcttcgacccacctttcctggtgttattcggcagatcaggaaaaacttacataatatggttttcatagttgatcctgcacatgagaccacagcagagttgatgaacacagctgagatgttccttagtaatcatataccactaagaattggttttatctttgtggttaatgactctgaagatgttgatgggatgcaagatgctggagtggctgttcttagagcatataattatgttgcccaagaagtggatgattatcatgccttccagactctgacacatatctataacaaggtgaggactggagaaaaagtgaaagttgaacatgtggtcagtgtcctggagaagaaatatccgtatgtagaagtgaatagcattttggggattgattctgcttatgatcggaatcggaaggaagcaagaggctactatgagcagactggagttggacctctgcccgttgtgctgttcaatggaatgccctttgaaagggaacagctagaccctgatgagttagaaaccatcacaatgcataaaatcctggagaccaccaccttcttccaaagagcggtgtacttgggtgaactgccccatgatcaagatgtggtagagtatatcatgaatcagccaaatgttgttccacgaatcaattctaggattttgacagctgaacgagactacctggatttaacagcgagtaataacttctttgtggatgattatgctagatttactatcttggattcccaaggcaagactgctgctgtagccaatagtatgaactatctgacaaagaaaggaatgtcctccaaggaaatctatgatgattcttttattaggccagtaactttttggattgttggggattttgatagcccttctggacggcagttactgtatgatgccatcaaacatcagaaatccagtaacaatgttagaataagcatgatcaataatcctgccaaagagataagctatgagaacactcagatctccagagcaatctgggcagctctccaaactcagacttccaacgctgctaagaacttcatcaccaaaatggccaaggagggggctgcagaggccctggctgcaggagctgacattgcggagttctctgttgggggaatggatttcagtctttttaaagaggtctttgagtcttccaaaatggatttcattttgtctcatgccgtgtactgcagggatgttctgaagctgaagaagggacagagggcagtgatcagcaatggaaggatcattgggccactggaggatagtgagctctttaatcaagacgatttccacctcctcgaaaatatcatcttaaaaacctcaggacagaaaataaaatctcatattcaacagcttcgggtagaagaagatgtggcaagcgacttggtaatgaaggtggatgctcttctgtcagcgcaaccaaaaggagatccaagaatcgagtaccagttttttgaagacagacacagtgcaatcaaactgaggccgaaggaaggggagacatactttgatgttgtggctgtcgttgaccctgtcaccagagaagcacagagacttgctcctttgctcttggttttggctcagctgataaacatgaatctgagagtatttatgaactgccaatccaaactttctgacatgcctttaaaaagcttttaccgttatgtcttagaaccagagatttctttcacttcagacaatagttttgctaagggtccaatcgcaaaatttttggatatgcctcagtctccactgttcactctgaatttgaacacacctgagagctggatggtagaatctgtcagaacaccatatgatcttgataatatttatttagaagaggtggacagtgtagtggctgctgagtatgagctggaatacctgttactggaaggtcattgctacgacatcaccacaggccagcctccacggggactacagtttaccttaggaacttcagccaacccggtcattgtggacaccattgttatggccaatctgggctactttcagctgaaagccaacccaggagcttggatcctcagacttaggaagggacgctctgaagatatttatagaatttacagccacgatggcactgattctccccctgatgctgatgaggtggttatcgtcctcaacaacttcaaaagcaaaattattaaagtgaaggttcagaagaaggcagatatggtgaacgaagacttgctgagtgatggaacgagtgagaatgaatctggattttgggattccttcaaatggggctttacaggacagaagactgaggaagtgaagcaagataaagatgacataattaatattttctccgttgcatctggtcatctctacgaaagatttcttcgcataatgatgctatccgtgctgaagaataccaagactcctgtgaaattctggttcttgaagaattacttgtcccccacatttaaggagtttataccttacatggcaaatgaatacaatttccagtatgagcttgttcagtacaaatggccccggtggcttcatcaacaaactgaaaaacagcgtatcatctggggttacaagatcctcttcctggatgtacttttcccactagttgttgacaagttcctgtttgtggatgctgatcagattgtacgaacagatctgaaagagttaagagatttcaatttggatggtgctccttatggttacactcctttctgtgacagccgaagagaaatggacggctacaggttctggaagtcagggtactgggccagtcatttagccgggcgaaagtatcatatcagtgcactatatgttgtggatctgaagaagtttaggaaaatagctgctggtgacagactcaggggacagtaccaaggtctgagtcaggaccctaacagcctttcaaatcttgatcaagatctgcccaataacatgattcatcaggtgccaattaaatccctccctcaagaatggctttggtgtgaaacgtggtgtgatgacgcctctaagaaaagggcaaaaaccattgatttgtgtaataatccgatgaccaaagagccgaaactggaagcagctgtgcggattgtcccggagtggcaggactacgaccaagagatcaaacagctacagatccgctttcagaaggagaaagaaacgggagcactgtacaaagagaagacaaaagaaccaagccgagaaggtcctcagaaacgtgaagaattatgatctctggagaaggacaggaaatcaccccatttgaaaaacagtttttataataaatgctagttttttctgatctgtctatacaactgctgataagccggctgggcaggagtgccacaccttttgattctgagcatttgattctgacttctgtactctggtggccactggatctttgggattaaagctctgttggatttgtacctcagaggaagaccaagtggctgatcctttggactctgtaaagagcattcttctagtcagagggtggaatggcagcagcaactggaagaaaatgagttttttggtgcccacacccaagagcacacacatgctgcactgtctcggaaagcagggccagctagagccaccatgttcttccttacctcagtttacctgcggcctgcgctgcactgcagatgcccaccctgccctgggtctggccggcggaagctctgtccaaggtccacacacctccaggtttacgccaacatccttgtgccctccccaccttctcttccaacgcattaggtgcattgtttaattgaaatccaaccaacaattgtgtgtcaaggctggtttggtgcagtggctgggcaaattaattttgggccaggatgggggtgggttgcagtgagggtagggaaaatgtcaggagtaggaaggttcgggggttaagggaagggaaggaagaccagaactggccatcctcttttataatccattagtagcaccatggctcatttgaaatgaaaatattacacttattccccacccaaccgcagtgaactttctaggtaattgttttgaaaacaatttttgtatctgtgaaagtctttgctttttctttccaccttctagaaaagtctgctaccagtttccttactgaatacagccatactcagcccctctcgcatccagcccgtcagggtcagggtcagggtcaggctccctcaagacgagcaccgcattgtctgccctcttttgcgtaggatttttctctcagacccaggggacattgccttggacttttctctacaaatgccctcagatgtaagaccagaaatgattctgcttgtggaactcgtggctttctgtcctattttccttttatgtgagccctgcaggttgcctttggcgcccacaccagttctgtcttcatgtcgctgcatcgtgaagccccatttgcctttagtccctgctttgtgtgtcttcacttccacagccagtgttgcccctcagggcatactttgctggtgaacgggctgtagagtcttgagtatgttattggcctaagtgggcatgaggccccagcatccgactccatctgccaggctgcagggcacagcagcactggcatagacaggcacgctctgtcttccaacgtgcaccagccttttcttacatattttgcctgtttttaaaaaatacgaggagagggtgcagatggatactgtgccctcaccctcctaagccaggtaatatattgatgtgcagacttttaagaaatcttagtcttatcacaaatatcaagtaatttattttttccattttcaaatgcaaaagttagcctaggaagcctcccagtcatcctgaaggaccttttgactttgcttttataattctgttaaaaattgaggaggggattaatgagtacaatgaaaacaaaacaaaacaaaaaattaagaagaggaaagctcaaaagaggataagagactgaaaaggcacctcagaatggctgctgtgggcagagtctgtgacatgactttccccgccctgcccctctgttcagagcagctggaaagatgggatcagtaagattaaaaaacttttgttcggccaggcgtggtggctcacacctgtaatcccagcactttgggaggctgaggcggacggatcatgaggtcaggagttcaagaccagcctggccaatatggtgaaaccccgtctctactaaaaatacaaaaattagccgggtgttgtggctcaccctctattcccagctactcgggaggcagagacaggagaatcgcctgaacccaggaggcagaggttgcagtgagctgagatcgtgccactgcactccagcctgggtgacagagcgagactccatctcagaaaacaaacaaacaaaaagaaacttttgttcaagctgcatcttcacattgaatgaaagcattcagacgggtgactgctgctgtccacaactgtgggcggaagtgtgccttttcccagtttctcgtccaggaggttgcatagcaaatactcaagtcactgggatatatgctttccaaatgctggcccccatagcacctttccccatgtctttctaccaagcctcttatgtttaatctgtgcagggaagacaagagtagaccatattctctgtgtgctgtgcatgtcctggtgtcactcattgcctcttatctgtcgccattctaatataagtcagcttaatagttgactctgaataatgcaaaacccagcttgcttccagaatggcctaggaccctcctcctcctgccagtttttttttttttttttggttcatgtggcataatcatctttcaaaattaaccaaatgccccagaaaatgatgttaccactaaaatattttctccaagaaggcatactgtaacagaaaagataggtaagatatttttttcccaagaagtaagaattgattgtgctgaatgttcaaactctggaaactgttcacagtatgttgttcttagctgttatttatataaagtgaattattttctctctcaatcatgccatagtggagacttttgtttgtgagtaagtgacagagtaatatgaaataatgtgatatgtcagagtgacatgcagcatcctgagcctgtttttatgttctgtgtacagtggcatttgattgagatcaaagcctgtcacagcctgctgctgggggtgtggggatatgccagagtcctgtgtttggttttagaagtttactgaatgtttcccacatggagaataatggatggcatgttagtttctttaagagtggtaaagttgtacatctgtcattgttgcatttcgaattgaacacatagatgcttgcctgtctgcttgggtgaatgcctcttgggagagcgaagattacgtgcatgatgtatgttaagaaacagtttccggtcaggcacagtggcttacacctgtaatcccagcactttgggaagccgaggcgggcggattatgaggtcaagagatagagaccatcctggccaacacggtgaaaccccgtctctactaaaaatacaaaaattagctgggcatggtggcacacacctgtagtcccagctactcgggaggctgaggcaggagaatcacttgaacccgggaggtggaggttgcagtgagccgagatcatgccactgcactccagcctggcaatagagcgagactccgtctcaaaaaaaaaaaaaaaaaaaaaaaaaaaattaaaacagtttccataaatggagcttaatttgctctgctgtccttaagccctcgtgggtttttttttaagagagtctcattctgtcacccaggctggagtgcagtggtgcgatcttggctcacttcaacctctgcctcccaagttcaaacaattctcctgcctcagcctcctgagtagctgggattacaggcgcctgccaccatgcctggttaatttttgtatttttagtagagatggggttttaccatgttggttggccaggctgatctcaaactcctgacctcaggtggtgatctgcccacctcggcctcccaaagtgctgggattacaggcgtgagccactatgtccggtcaagccctcgtgttctgaaccttgtcaaggctctgcctgaatgagttttcatctgattgtggggaccaagtccctgagtagagggccaagagctagggacagggggaagagactggcccaggtggtagggaggaaagaactcccagagtttcctttagccaggaaacctgctctactgaccccgtgacttggacagtcagacatcaccctgagagtgacaagtgtaaaatgactcccttcctcccccgccctccggaagtatatttagatacttgaaagcagtccttttctaaaatggccttacctatgtggcctgaacgattaaaagaaagaactcagagttacaagggaaaaagaaaaagagttacaagggaattgtagtctttttctgaatagaatattagtactgtggtattgcatttcatgggaatggaaatgtattggtaaagctacctgatggaagctttctcttggtaacaaaaatggagggtgtattatgtgcagttatttaaatatatgtattccattgttgcgtggtttttttcccccctcaagacagagatttgctcttgttgcccagggtggagtacaatggtgtgaccttggctcactgcaacctctgcctcctgggttcaggtgattctcctgcctcagccttccgagtagctgggattacaggtgtgcgccaccacacccggctaatttttgctttttttttttttgagacagaatctcgctctgttgctcaggctggagtggagtgcagtggcacaatctcagctcactgcagcctctgcctcccgggttcaagagattctcctgactcaacctcctgagtagctgggattacaggtgcctgccactatgcctagctaatttttgtatttttagtagagacggggttttgccatgttggccagggtggtctcgaactcctgacctcaagtgatccacccgcatcggccccccaaagtgctgggattataggcgtgaaccaccgcgcctgtcccattgttgtgtaattttaataattagttttttaagtacttgattttatgggcacatttttgtgggatgattggagttaatcaaataaagcttgtcatgtgtgtagtttggtaagataacttctttaaattcatgttttctctgccttgaggtagtgagggaaagatcttaatcagtattttggtaattaactgattgaattcaagcaaatgagacatcatgaacttcagtggttattgatatttcagggtatatacctgaaatgcctagaggatacagatttctcatttcattctttggtctttcatttctctatatacagaaatgaaatgacacttctgggaggcagtagaagcaggaagtcaatgaattgagtagagggtcccattccctcaggctgtcattgatcagtgacaatttataaaaacaaactgcaaagtctgtggcaagtggctgcctgcttcctagaaggagcccatgaaggttaaactctgtggtcggtatttgcaagcgccgggcgtggtggctcacgcctgtaatcctagcaccttgggaggccaaggcaggcggatcacccgaggtcaggagtttgaggatttgcaagcaaaaggtcctctcctgagtctttcccagatacccagcagtgcagaggctagctgtggaaggttgcagtgggacaggaatgtattgtatgccttgccttacttgtcaccattgagatttccagagaaatgggcataacgtctcttaacaacaacagcagaaagcaaaatacattaacttaaggttgacaacaaaagattatcaagtaccatgttttccaaccaaccagttattcgtggtaataataaaataaaggtgggaaaatgttataatttttaaggaaactgtgtactttaaaaatcttctttatgaatatccaatgttactgtaatcctgctccattaaatgcagcattgttgtcaggtgctgcctcttgcttgggaacagcattgggcttttaaatgtctgcagaatctctgcgttcgaagggaattgagaatgaacttcctggtactgtaatgaaaataaggtctgctcaacacagtaaacgtttcctctcttctttaaaa

SEQ ID NO: 198034 - DNA, 6682 bp, Homo sapiens
  Payload ID: 19067
  Gene Name: UDP-glucose glycoprotein glucosyltransferase 1
  ENST ID: ENST00000376723
  CDS Start-End: 148-288
tgctttgcgaggctgggtgttgagtcgagccgcgggaaaggcgcgtgtcggcctctcactggcgcagcctgcactgccgctgccgcctcgccccgccctgccctggcgttgtctctggcactgtggcggactgaccacggcccgggcatgggctgcaagggagacgcgagcggtgcgtgtgccgcgggtgcgctgccggtgacaggtacccaggggtggcgtgaggaggcctcgtggacaaagagagggtttggggcacaaggcgaccctgtgcccctgtcacattgagcttccgcctctaccgtgactcagtttaccctctggtgtcctatcccttcccctattcgcgagcgccccgagttgccctcagtggtcttcttggcaaggagtttgctataaaatgggagttctggttgtactcactgttctgtggctgttctcctcagtaaaggccgactcaaaagccattacaacctctcttacaacaaaatggttttccactccattgttgttagaagccagtgagtttttagcagaagacagtcaagagaaattttggaattttgtagaagccagtcaaaatattggatcatcagatcatgacggtaccgattattcctactatcatgcaatattggaggctgcatttcagtttctgtcacccctccagcagaatttgtttaaattttgtctgtcccttcgttcttactcagctacaatccaagccttccagcagatagcagctgatgaacctccaccagaaggatgtaattcgtttttttcagtgcatggaaagaagacttgtgaatctgatacccttgaggctcttctactgacagcctctgaaagacccaaacctttattgttcaaaggagatcacagatatccctcgtctaatcctgaaagccctgtggtgattttctactctgagattggctctgaggaattttccaattttcaccgccagcttatatcaaaaagcaatgcaggcaaaatcaattatgtattcagacattatatatttaatcccaggaaggagcctgtttacctctctggctatggcgtggaattggccattaagagcactgagtacaaggccaaggatgatactcaggtgaaaggaactgaggtaaacaccacagtgattggtgaaaatgatcctattgatgaggttcaggggttcctctttggaaaattaagagatctgcaccccgacctggagggacagttgaaagaactcagaaagcatcttgtagagagcaccaatgaaatggcacctttaaaggtttggcagttgcaagatctcagtttccagactgctgctcgaatcttggcttctcctgttgagttggctttggttgtcatgaaggatcttagtcagaattttcctaccaaagccagagcaataacaaaaacagctgtgagctcagaacttagaaccgaagtggaagagaatcagaagtatttcaagggaactttaggattacaacctggagattcagccctcttcatcaatggacttcacatggatttagatacacaggatatattcagtctgtttgatgtgttgaggaatgaagctcgggtaatggagggtctgcatagattgggaatagaaggcctttctctgcataatgttttgaagctgaacatccagccctctgaggcagactatgccgtagacatccggagtcctgctatttcatgggtcaacaacctggaggttgatagcagatataattcgtggccttctagtttacaagagttgcttcgacccacctttcctggtgttattcggcagatcaggaaaaacttacataatatggttttcatagttgatcctgcacatgagaccacagcagagttgatgaacacagctgagatgttccttagtaatcatataccactaagaattggttttatctttgtggttaatgactctgaagatgttgatgggatgcaagatgctggagtggctgttcttagagcatataattatgttgcccaagaagtggatgattatcatgccttccagactctgacacatatctataacaaggtgaggactggagaaaaagtgaaagttgaacatgtggtcagtgtcctggagaagaaatatccgtatgtagaagtgaatagcattttggggattgattctgcttatgatcggaatcggaaggaagcaagaggctactatgagcagactggagttggacctctgcccgttgtgctgttcaatggaatgccctttgaaagggaacagctagaccctgatgagttagaaaccatcacaatgcataaaatcctggagaccaccaccttcttccaaagagcggtgtacttgggtgaactgccccatgatcaagatgtggtagagtatatcatgaatcagccaaatgttgttccacgaatcaattctaggattttgacagctgaacgagactacctggatttaacagcgagtaataacttctttgtggatgattatgctagatttactatcttggattcccaaggcaagactgctgctgtagccaatagtatgaactatctgacaaagaaaggaatgtcctccaaggaaatctatgatgattcttttattaggccagtaactttttggattgttggggattttgatagcccttctggacggcagttactgtatgatgccatcaaacatcagaaatccagtaacaatgttagaataagcatgatcaataatcctgccaaagagataagctatgagaacactcagatctccagagcaatctgggcagctctccaaactcagacttccaacgctgctaagaacttcatcaccaaaatggccaaggagggggctgcagaggccctggctgcaggagctgacattgcggagttctctgttgggggaatggatttcagtctttttaaagaggtctttgagtcttccaaaatggatttcattttgtctcatgccgtgtactgcagggatgttctgaagctgaagaagggacagagggcagtgatcagcaatggaaggatcattgggccactggaggatagtgagctctttaatcaagacgatttccacctcctcgaaaatatcatcttaaaaacctcaggacagaaaataaaatctcatattcaacagcttcgggtagaagaagatgtggcaagcgacttggtaatgaaggtggatgctcttctgtcagcgcaaccaaaaggagatccaagaatcgagtaccagttttttgaagacagacacagtgcaatcaaactgaggccgaaggaaggggagacatactttgatgttgtggctgtcgttgaccctgtcaccagagaagcacagagacttgctcctttgctcttggttttggctcagctgataaacatgaatctgagagtatttatgaactgccaatccaaactttctgacatgcctttaaaaagcttttaccgttatgtcttagaaccagagatttctttcacttcagacaatagttttgctaagggtccaatcgcaaaatttttggatatgcctcagtctccactgttcactctgaatttgaacacacctgagagctggatggtagaatctgtcagaacaccatatgatcttgataatatttatttagaagaggtggacagtgtagtggctgctgagtatgagctggaatacctgttactggaaggtcattgctacgacatcaccacaggccagcctccacggggactacagtttaccttaggaacttcagccaacccggtcattgtggacaccattgttatggccaatctgggctactttcagctgaaagccaacccaggagcttggatcctcagacttaggaagggacgctctgaagatatttatagaatttacagccacgatggcactgattctccccctgatgctgatgaggtggttatcgtcctcaacaacttcaaaagcaaaattattaaagtgaaggttcagaagaaggcagatatggtgaacgaagacttgctgagtgatggaacgagtgagaatgaatctggattttgggattccttcaaatggggctttacaggacagaagactgaggaagtgaagcaagataaagatgacataattaatattttctccgttgcatctggtcatctctacgaaagatttcttcgcataatgatgctatccgtgctgaagaataccaagactcctgtgaaattctggttcttgaagaattacttgtcccccacatttaaggagtttataccttacatggcaaatgaatacaatttccagtatgagcttgttcagtacaaatggccccggtggcttcatcaacaaactgaaaaacagcgtatcatctggggttacaagatcctcttcctggatgtacttttcccactagttgttgacaagttcctgtttgtggatgctgatcagattgtacgaacagatctgaaagagttaagagatttcaatttggatggtgctccttatggttacactcctttctgtgacagccgaagagaaatggacggctacaggttctggaagtcagggtactgggccagtcatttagccgggcgaaagtatcatatcagtgcactatatgttgtggatctgaagaagtttaggaaaatagctgctggtgacagactcaggggacagtaccaaggtctgagtcaggaccctaacagcctttcaaatcttgatcaagatctgcccaataacatgattcatcaggtgccaattaaatccctccctcaagaatggctttggtgtgaaacgtggtgtgatgacgcctctaagaaaagggcaaaaaccattgatttgtgtaataatccgatgaccaaagagccgaaactggaagcagctgtgcggattgtcccggagtggcaggactacgaccaagagatcaaacagctacagatccgctttcagaaggagaaagaaacgggagcactgtacaaagagaagacaaaagaaccaagccgagaaggtcctcagaaacgtgaagaattatgatctctggagaaggacaggaaatcaccccatttgaaaaacagtttttataataaatgctagttttttctgatctgtctatacaactgctgataagccggctgggcaggagtgccacaccttttgattctgagcatttgattctgacttctgtactctggtggccactggatctttgggattaaagctctgttggatttgtacctcagaggaagaccaagtggctgatcctttggactctgtaaagagcattcttctagtcagagggtggaatggcagcagcaactggaagaaaatgagttttttggtgcccacacccaagagcacacacatgctgcactgtctcggaaagcagggccagctagagccaccatgttcttccttacctcagtttacctgcggcctgcgctgcactgcagatgcccaccctgccctgggtctggccggcggaagctctgtccaaggtccacacacctccaggtttacgccaacatccttgtgccctccccaccttctcttccaacgcattaggtgcattgtttaattgaaatccaaccaacaattgtgtgtcaaggctggtttggtgcagtggctgggcaaattaattttgggccaggatgggggtgggttgcagtgagggtagggaaaatgtcaggagtaggaaggttcgggggttaagggaagggaaggaagaccagaactggccatcctcttttataatccattagtagcaccatggctcatttgaaatgaaaatattacacttattccccacccaaccgcagtgaactttctaggtaattgttttgaaaacaatttttgtatctgtgaaagtctttgctttttctttccaccttctagaaaagtctgctaccagtttccttactgaatacagccatactcagcccctctcgcatccagcccgtcagggtcagggtcagggtcaggctccctcaagacgagcaccgcattgtctgccctcttttgcgtaggatttttctctcagacccaggggacattgccttggacttttctctacaaatgccctcagatgtaagaccagaaatgattctgcttgtggaactcgtggctttctgtcctattttccttttatgtgagccctgcaggttgcctttggcgcccacaccagttctgtcttcatgtcgctgcatcgtgaagccccatttgcctttagtccctgctttgtgtgtcttcacttccacagccagtgttgcccctcagggcatactttgctggtgaacgggctgtagagtcttgagtatgttattggcctaagtgggcatgaggccccagcatccgactccatctgccaggctgcagggcacagcagcactggcatagacaggcacgctctgtcttccaacgtgcaccagccttttcttacatattttgcctgtttttaaaaaatacgaggagagggtgcagatggatactgtgccctcaccctcctaagccaggtaatatattgatgtgcagacttttaagaaatcttagtcttatcacaaatatcaagtaatttattttttccattttcaaatgcaaaagttagcctaggaagcctcccagtcatcctgaaggaccttttgactttgcttttataattctgttaaaaattgaggaggggattaatgagtacaatgaaaacaaaacaaaacaaaaaattaagaa

SEQ ID NO: 198035 - DNA, 599 bp, Homo sapiens
  Payload ID: 19067
  Gene Name: UDP-glucose glycoprotein glucosyltransferase 1
  ENST ID: ENST00000418197
  CDS Start-End: 1-394
cataatgatgctatccgtgctgaagaataccaagactcctgtgaaattctggttcttgaagaattacttgtcccccacatttaaggatctgcccaataacatgattcatcaggtgccaattaaatccctccctcaagaatggctttggtgtgaaacgtggtgtgatgacgcctctaagaaaagggcaaaaaccattgatttgtgtaataatccgatgaccaaagagccgaaactggaagcagctgtgcggattgtcccggagtggcaggactacgaccaagagatcaaacagctacagatccgctttcagaaggagaaagaaacgggagcactgtacaaagagaagacaaaagaaccaagccgagaaggtcctcagaaacgtgaagaattatgatctctggagaaggacaggaaatcaccccatttgaaaaacagtttttataataaatgctagttttttctgatctgtctatacaactgctgataagccggctgggcaggagtgccacaccttttgattctgagcatttgattctgacttctgtactctggtggccactggatctttgggattaaagctctgttggatttgtacctca

SEQ ID NO: 198036 - DNA, 3113 bp, Homo sapiens
  Payload ID: 19067
  Gene Name: UDP-glucose glycoprotein glucosyltransferase 1
  ENST ID: ENST00000438277
  CDS Start-End: 151-315
aattgctttgcgaggctgggtgttgagtcgagccgcgggaaaggcgcgtgtcggcctctcactggcgcagcctgcactgccgctgccgcctcgccccgccctgccctggcgttgtctctggcactgtggcggactgaccacggcccgggcatgggctgcaagggagacgcgagcggagtttgctataaaatgggagttctggttgtactcactgttctgtggctgttctcctcagtaaaggccgactcaaaagccattacaacctctcttacaacaaaatggttttccactccattgttgttagaagccagatagcagctgatgaacctccaccagaaggatgtaattcgtttttttcagtgcatggaaagaagacttgtgaatctgatacccttgaggctcttctactgacagcctctgaaagacccaaacctttattgttcaaaggagatcacagatatccctcgtctaatcctgaaagccctgtggtgattttctactctgagattggctctgaggaattttccaattttcaccgccagcttatatcaaaaagcaatgcaggcaaaatcaattatgtattcagacattatatatttaatcccaggaaggagcctgtttacctctctggctatggcgtggaattggccattaagagcactgagtacaaggccaaggatgatactcaggtgaaaggaactgaggtaaacaccacagtgattggtgaaaatgatcctattgatgaggttcaggggttcctctttggaaaattaagagatctgcaccccgacctggagggacagttgaaagaactcagaaagcatcttgtagagagcaccaatgaaatggcacctttaaaggtttggcagttgcaagatctcagtttccagactgctgctcgaatcttggcttctcctgttgagttggctttggttgtcatgaaggatcttagtcagaattttcctaccaaagccagagcaataacaaaaacagctgtgagctcagaacttagaaccgaagtggaagagaatcagaagtatttcaagggaactttaggattacaacctggagattcagccctcttcatcaatggacttcacatggatttagatacacaggatatattcagtctgtttgatgtgttgaggaatgaagctcgggtaatggagggtctgcatagattgggaatagaaggcctttctctgcataatgttttgaagctgaacatccagccctctgaggcagactatgccgtagacatccggagtcctgctatttcatgggtcaacaacctggaggttgatagcagatataattcgtggccttctagtttacaagagttgcttcgacccacctttcctggtgttattcggcagatcaggaaaaacttacataatatggttttcatagttgatcctgcacatgagaccacagcagagttgatgaacacagctgagatgttccttagtaatcatataccactaagaattggttttatctttgtggttaatgactctgaagatgttgatgggatgcaagatgctggagtggctgttcttagagcatataattatgttgcccaagaagtggatgattatcatgccttccagactctgacacatatctataacaaggtgaggactggagaaaaagtgaaagttgaacatgtggtcagtgtcctggagaagaaatatccgtatgtagaagtgaatagcattttggggattgattctgcttatgatcggaatcggaaggaagcaagaggctactatgagcagactggagttggacctctgcccgttgtgctgttcaatggaatgccctttgaaagggaacagctagaccctgatgagttagaaaccatcacaatgcataaaatcctggagaccaccaccttcttccaaagagcggtgtacttgggtgaactgccccatgatcaagatgtggtagagtatatcatgaatcagccaaatgttgttccacgaatcaattctaggattttgacagctgaacgagactacctggatttaacagcgagtaataacttctttgtggatgattatgctagatttactatcttggattcccaaggcaagactgctgctgtagccaatagtatgaactatctgacaaagaaaggaatgtcctccaaggaaatctatgatgattcttttattaggccagtaactttttggattgttggggattttgatagcccttctggacggcagttactgtatgatgccatcaaacatcagaaatccagtaacaatgttagaataagcatgatcaataatcctgccaaagagataagctatgagaacactcagatctccagagcaatctgggcagctctccaaactcagacttccaacgctgctaagaacttcatcaccaaaatggccaaggagggggctgcagaggccctggctgcaggagctgacattgcggagttctctgttgggggaatggatttcagtctttttaaagaggtctttgagtcttccaaaatggatttcattttgtctcatgccgtgtactgcagggatgttctgaagctgaagaagggacagagggcagtgatcagcaatggaaggatcattgggccactggaggatagtgagctctttaatcaagacgatttccacctcctcgaaaatatcatcttaaaaacctcaggacagaaaataaaatctcatattcaacagcttcgggtagaagaagatgtggcaagcgacttggtaatgaaggtggatgctcttctgtcagcgcaaccaaaaggagatccaagaatcgagtaccagttttttgaagacagacacagtgcaatcaaactgaggccgaaggaaggggagacatactttgatgttgtggctgtcgttgaccctgtcaccagagaagcacagagacttgctcctttgctcttggttttggctcagctgataaacatgaatctgagagtatttatgaactgccaatccaaactttctgacatgcctttaaaaaggtaaaacatgctatgtaagaaaacagttgaagaaattgtactgaatccaagttctgatattgcatgttagaggatcagatggatttataggtggacatcatgtttg

SEQ ID NO: 198037 - DNA, 586 bp, Homo sapiens
  Payload ID: 19067
  Gene Name: UDP-glucose glycoprotein glucosyltransferase 1
  ENST ID: ENST00000430075
  CDS Start-End: 159-335
agctgggcaattgctttgcgaggctgggtgttgagtcgagccgcgggaaaggcgcgtgtcggcctctcactggcgcagcctgcactgccgctgccgcctcgccccgccctgccctggcgttgtctctggcactgtggcggactgaccacggcccgggcatgggctgcaagggagacgcgagcggagtttgctataaaatgggagttctggttgtactcactgttctgtggctgttctcctcagtaaaggccgactcaaaagccattacaacctctcttacaacaaaatggttttccactccattgttgttagaagccagctgtggagtagagtgagattgtacaccccagtgttcacaagtaatgggaaagtcttcctttggctagtgagtttttagcagaagacagtcaagagaaattttggaattttgtagaagccagtcaaaatattggatcatcagatcatgacggtaccgattattcctactatcatgcaatattggaggctgcatttcagtttctgtcacccctccagcagaatttgtttaaattttgtctgtcccttcgttcttactcagctacaatcc

SEQ ID NO: 198038 - DNA, 2240 bp, Homo sapiens
  Payload ID: 19068
  Gene Name: UDP-glucose glycoprotein glucosyltransferase 2
  ENST ID: ENST00000376712
  CDS Start-End: 82-924
agcgggaagagccggccgaagcgtggcggccacagactgtgggtaccgggtccgagggactcgcgcttttctctccgtgccatggcgccagcgaaagccacgaacgtggtgcggctgctactaggctccacagcgctgtggctttcgcagctcggctccgggacggtcgccgcgtccaagtcggtgactgcccacttggccgcgaagtggcccgagaccccgctgctgctggaggcaagtgaatttatggcagaagaaagtaatgaaaaattttggcagtttttggaaactgtgcaagaattagcaatttataagcaaacagaatcagattattcttattacaacttaatcctgaagaaagctggacagtttctagacaatttacacatcaaccttttaaagtttgctttctctataagggcatactccccagctattcagatgtttcagcagattgcagctgatgagccaccaccagatggttgtaatgcatttgtggttattcataagaagcacacctgtaaaattaatgagattaaaaagctgctgaagaaagctgcttcaaggactagaccttatctatttaaaggagatcacaaatttcctacaaacaaagagaacttaccagtggtgattctctatgccgaaatgggtactagaacatttagtgcatttcacaaagtattgtctgaaaaagctcaaaatgaggaaattctgtatgttcttcgccattatattcagaaaccaagctcacggaaaatgtacttatctgggtatggtgtggagctagcaattaagagtacagaatacaaagcactggatgatacccaagttaaaactgtgactaatactactgtagaggatgagactgaaacaaatgaagttcaaggatttctctttgggaaactaaagcttgtctattgactattgaaaatacgtgttttcaatgagacaccatctcacaccagttagaatgacaatcattaaaaaggaaacgacagatgctggaggggatgtggagaaataggaaggcttttacactgttggtgtgtgtgtagatgagttcaaccgttgtggaagacagtgtggcaattcctcaaggatctagaaccagaaataccatttgacccagcaatgcccattactgggtgtatacccaaaggattataaatcattctactataaagacacatgcacacgtatgttgattgtagcactattcacaatagcaaagacttcgaaccaacccaaatgtccatcaatgatagactggataaagaaaatgtggcacatatacaccatagaatactctgcatccataaaaaaggataagttcatgtcctttgcagggacatggatgaagctggaaactatcattctcagcaaactaacacaggaacagaaaaccaaacaccacatgttcttactcaaaagtgggactcgaacagtgagaacacatggacacagggaggggaatatcacacaccgtggcttgtcgggggtggggagctaggagagggatagcattaggagaaatacctaatgtggataacgggttgatgggtgcagcagaccaccatgacacgtgtatacctgtgtaacaaacctgcacgttctacacatgtatcccagaacttaaagtataataaaatgaaaatatgtattttgtaagttgtgctgatagtaacttttttaaattgtatttctccatttaaatctgaaatggcaccatgtcttgatttcatgagtgatagaggaaagaagattacagtttagattgtgtgtatagtaaaataccattctactacatcattatttggctctctaaaagatgcctagagatgtttaacaatgggtaaaattatcttattttagttttttataagaatcaaagatggaacttttcagaaataaactctgattgtatgaggcatttttgactttccttatagtttttattttcaattataaaagcaaggcttgcaatttataaaatgttaaacaaaaagtatgtaatatgaaaacataagtctgccctcatccttgcatcgcttacagttgacactaacaattgagagtatattcctccagattttgttttgtttcatatatttaataaaagagacctgtatatcttcctcattatttttaagttccgtgaatatagctgtatcacaatttatgattatcttaatgatgaatgattcatttatgtctaattacatggaatatgtaatttc

SEQ ID NO: 198039 - DNA, 1233 bp, Homo sapiens
  Payload ID: 19068
  Gene Name: UDP-glucose glycoprotein glucosyltransferase 2
  Uniprot ID: Q9NYU1
  ENST ID: ENST00000376714
  CDS Start-End: 171-1007
cgcgccggagcgggacacgcatgcgccggtctggacccggcacccagtaacggactcgagctcctcccaccggaagtgggcagccgcgcagcgggaagagccggccgaagcgtggcggccacagactgtgggtaccgggtccgagggactcgcgcttttctctccgtgccatggcgccagcgaaagccacgaacgtggtgcggctgctactaggctccacagcgctgtggctttcgcagctcggctccgggacggtcgccgcgtccaagtcggtgactgcccacttggccgcgaagtggcccgagaccccgctgctgctggaggcaagtgaatttatggcagaagaaagtaatgaaaaattttggcagtttttggaaactgtgcaagaattagcaatttataagcaaacagaatcagattattcttattacaacttaatcctgaagaaagctggacagtttctagacaatttacacatcaaccttttaaagtttgctttctctataagggcatactccccagctattcagatgtttcagcagattgcagctgatgagccaccaccagatggttgtaatgcatttgtggttattcataagaagcacacctgtaaaattaatgagattaaaaagctgctgaagaaagctgcttcaaggactagaccttatctatttaaaggagatcacaaatttcctacaaacaaagagaacttaccagtggtgattctctatgccgaaatgggtactagaacatttagtgcatttcacaaagtattgtctgaaaaagctcaaaatgaggaaattctgtatgttcttcgccattatattcagaaaccaagctcacggaaaatgtacttatctgggtatggtgtggagctagcaattaagagtacagaatacaaagcactggatgatacccaagttaaaactgtgactaatactactgtagaggatgagactgaaacaaatgaagttcaaggatttctctttgggaaactaaaatcttagttttcaagcagcttctcaaataatgtccgctccagtttatgattccattaaattaatgaaagacatttcacagaacttccccataaaagccagatctctaaccagaattgctgtaaatcaacatatgagagaagaaataaaggaaaatcaaaagtatattccagaatttcttccgaggtagtatggttttcttcataggataaagaataaaggctgtgagttaatt

SEQ ID NO: 198040 - DNA, 4832 bp, Homo sapiens
  Payload ID: 19068
  Gene Name: UDP-glucose glycoprotein glucosyltransferase 2
  Uniprot ID: Q9NYU1
  ENST ID: ENST00000376747
  CDS Start-End: 72-4622
gccggccgaagcgtggcggccacagactgtgggtaccgggtccgagggactcgcgcttttctctccgtgccatggcgccagcgaaagccacgaacgtggtgcggctgctactaggctccacagcgctgtggctttcgcagctcggctccgggacggtcgccgcgtccaagtcggtgactgcccacttggccgcgaagtggcccgagaccccgctgctgctggaggcaagtgaatttatggcagaagaaagtaatgaaaaattttggcagtttttggaaactgtgcaagaattagcaatttataagcaaacagaatcagattattcttattacaacttaatcctgaagaaagctggacagtttctagacaatttacacatcaaccttttaaagtttgctttctctataagggcatactccccagctattcagatgtttcagcagattgcagctgatgagccaccaccagatggttgtaatgcatttgtggttattcataagaagcacacctgtaaaattaatgagattaaaaagctgctgaagaaagctgcttcaaggactagaccttatctatttaaaggagatcacaaatttcctacaaacaaagagaacttaccagtggtgattctctatgccgaaatgggtactagaacatttagtgcatttcacaaagtattgtctgaaaaagctcaaaatgaggaaattctgtatgttcttcgccattatattcagaaaccaagctcacggaaaatgtacttatctgggtatggtgtggagctagcaattaagagtacagaatacaaagcactggatgatacccaagttaaaactgtgactaatactactgtagaggatgagactgaaacaaatgaagttcaaggatttctctttgggaaactaaaagaaatatattcagatcttagagataatctgacagcattccaaaaatacctgattgagagtaacaaacaaatgatgcctttgaaagtctgggaactacaagatcttagttttcaagcagcttctcaaataatgtccgctccagtttatgattccattaaattaatgaaagacatttcacagaacttccccataaaagccagatctctaaccagaattgctgtaaatcaacatatgagagaagaaataaaggaaaatcaaaaggatcttcaagttagatttaaaattcagccaggcgatgctcgtctatttataaatggccttcgtgttgatatggatgtttatgacgcttttagtattttggatatgctgaaattagaaggaaaaatgatgaatggccttcgcaatcttgggatcaatggggaagatatgagcaaatttttaaaattaaattcacacatttgggaatatacttatgtattagatattcgacattcttctataatgtggattaatgacttagaaaatgatgatttgtatattacatggcctacaagttgccagaaacttctgaagccagtatttcctggaagtgtaccttccataaggcgcaattttcataatttggttctgtttattgatccggcccaagaatataccttggattttataaaacttgctgatgttttctattctcacgaagttcctcttagaattggttttgtgttcattcttaatacagatgatgaagttgatggagcaaatgatgctggagttgctctctggcgagctttcaactatattgcagaagaatttgatatatcagaagcatttatttctatagtacacatgtaccaaaaagtgaagaaggatcaaaatatactcactgtggacaatgtgaagagtgttctccaaaatacatttcctcatgctaatatttgggatattttgggaattcattctaaatatgatgaagaaagaaaggctggagcaagcttttataagatgactggcctgggtcctttgcctcaagctctttataatggtgaaccctttaaacatgaagagatgaatattaaagaactaaaaatggctgttcttcaaagaatgatggatgcatctgtatatttacaaagagaagtttttttgggcacattaaatgatcgcacgaatgcaattgattttctaatggataggaataatgttgtaccccgtataaatactttgattttgcgtactaaccagcagtacctcaatttaatatctacatcagtaactgctgatgttgaagatttctctactttctttttcttggattcacaagataagagtgctgtaattgcaaagaacatgtattatttaacccaagacgatgagagtataatttctgcagtcactctctggattattgcagattttgataagccttctgggagaaaacttctttttaatgcattaaagcacatgaaaacaagtgttcatagtcggttggggattatttataatcctacatcaaaaataaatgaagagaacacagctatttctagaggaattttggcagcttttcttacacagaagaacatgtttttgagaagctttcttgggcaactggcaaaggaagaaattgctacagctatttactctggagataaaattaaaacattccttattgaggggatggataagaatgcttttgagaaaaaatataatactgttggagtgaatatttttcgaactcaccagttgttctgtcaagatgtacttaaattacgtcctggagaaatgggtattgtcagcaatgggagattcttaggacctttagatgaagatttttatgcagaagatttttacttgttggaaaagataacatttagtaatttaggagagaaaattaaaggcattgttgaaaatatgggaatcaacgcaaataacatgagtgactttattatgaaagttgatgcccttatgtcctctgtgcctaagcgtgcatctcgatatgatgtcacatttcttagggagaatcacagtgttataaagacgaatcctcaagagaatgatatgttcttcaatgtcattgctattgttgatccattaacaagagaagcacagaaaatggcacagttgttggttgtacttggcaagattatcaacatgaagataaagttgttcatgaactgtaggggcaggctttcagaagcccctttagaaagcttttaccgttttgttctggaaccagaactgatgtcaggggctaatgacgtttcttctcttggaccagtggcaaaatttttggatattcctgaatcacccctcctaatcctcaacatgattactccagaaggctggttggttgaaacagtgcacagcaactgtgaccttgataatattcacttaaaggatactgagaaaactgttacagcagaatatgaactagaatacttactactggaaggacaatgctttgataaagtgacagaacagcctcctcggggtctgcagttcacactaggcacaaaaaataaacctgctgtggttgatacaatagtgatggcacatcatgggtattttcaattaaaagcaaacccaggtgcttggatactgaggttacaccaaggaaaatctgaagatatttatcaaatagttgggcatgaaggaactgactctcaagcagacctagaagatatcattgttgtattaaacagcttcaaaagcaagatactcaaagtaaaagtgaaaaaagaaacagacaaaattaaggaagatatccttaccgatgaagatgaaaaaacaaaaggactgtgggattccattaaaagtttcacagtaagcttgcataaagaaaacaaaaaggaaaaagatgtcctaaacattttttcagttgcttctggtcatttatatgaacgttttttaagaattatgatgctttctgttttgcgtaacaccaaaacaccagtgaaattctggttgctaaaaaattatctctcaccgacatttaaagaagtaattcctcacatggctaaagagtatggattccgatatgaactagttcaatataggtggccccgttggcttcgtcaacagactgaaagacagaggattatttggggttacaaaattcttttccttgatgttcttttcccactagcagtggacaaaatcatttttgttgatgctgaccagattgtgagacatgatctaaaagaacttcgagatttcgatctggatggagctccttatgggtatactccattttgtgatagccgcagggaaatggatggatatcgtttctggaaaacaggatactgggcatcacatcttttaagacggaaataccatatcagtgctttatatgtagtggatctcaagaagttcaggagaattggagcaggtgacaggctcaggagccagtatcaagctctcagtcaagatccaaacagtctttcaaacctagatcaggatctccccaataatatgatttaccaagtcgccattaagtctcttcctcaagactggctgtggtgtgaaacctggtgtgatgatgaatccaaacaaagagccaaaacaattgatctgtgcaataatcccaaaacaaaagaatccaaactaaaagctgctgccagaattgtcccagaatgggtggagtatgatgctgagataagacaactattagatcatcttgaaaacaagaagcaagatacaattttgacacatgatgaactctagcactggtgtatatgagaaggaaggcgaaagcatgacaggaaacctgccgcctgctggggaagtctggagcccctgctgagacgatttggaagtctcgttaagatcagtgacatattctttaattttaaaaaattgtaattatttaaaacagttatttaatgtattgaatgagtttaagttatataataaatgaccattgagtatttaaaa

SEQ ID NO: 198041 - DNA, 1547 bp, Homo sapiens
  Payload ID: 19068
  Gene Name: UDP-glucose glycoprotein glucosyltransferase 2
  ENST ID: ENST00000397618
  CDS Start-End: 89-1207
gccgcgcagcgggaagagccggccgaagcgtggcggccacagactgtgggtaccgggtccgagggactcgcgcttttctctccgtgccatggcgccagcgaaagccacgaacgtggtgcggctgctactaggctccacagcgctgtggctttcgcagctcggctccgggacggtcgccgcgtccaagtcggtgactgcccacttggccgcgaagtggcccgagaccccgctgctgctggaggcaagtgaatttatggcagaagaaagtaatgaaaaattttggcagtttttggaaactgtgcaagaattagcaatttataagcaaacagaatcagattattcttattacaacttaatcctgaagaaagctggacagtttctagacaatttacacatcaaccttttaaagtttgctttctctataagggcatactccccagctattcagatgtttcagcagattgcagctgatgagccaccaccagatggttgtaatgcatttgtggttattcataagaagcacacctgtaaaattaatgagattaaaaagctgctgaagaaagctgcttcaaggactagaccttatctatttaaaggagatcacaaatttcctacaaacaaagagaacttaccagtggtgattctctatgccgaaatgggtactagaacatttagtgcatttcacaaagtattgtctgaaaaagctcaaaatgaggaaattctgtatgttcttcgccattatattcagaaaccaagctcacggaaaatgtacttatctgggtatggtgtggagctagcaattaagagtacagaatacaaagcactggatgatacccaagttaaaactgtgactaatactactgtagaggatgagactgaaacaaatgaagttcaaggatttctctttgggaaactaaaagaaatatattcagatcttagagataatctgacagcattccaaaaatacctgattgagagtaacaaacaaatgatgcctttgaaagtctgggaactacaagatcttagttttcaagcagcttctcaaataatgtccgctccagtttatgattccattaaattaatgaaagacatttcacagaacttccccataaaagccagattaagaatgaatatattgatatgcctctttcagtcaactttaaatgtcaagaatttgagaagtcgtcatttatataataaaacatgaaatatatatgggtgtgtataaatgtcatatctgtttagccataatattttaattaatggccgttataaaaattattagatcaaatacaaataaagtaaaataactttagtcttgatcagacagttgattagctctattgatgctaagtcagtataactgttcagaggttctgatgcaaaactctgctgttaatctgtaattaagaaaaaattataaaatatgctaacattgcttaatggctaaattgtaggcttgagcatatctctaaaaccacttggtagacaatctgtaaatgtttgttgaaatgaaatatttgctaaataaatgaaaaatttgcctt

SEQ ID NO: 198042 - DNA, 1945 bp, Homo sapiens
  Payload ID: 19068
  Gene Name: UDP-glucose glycoprotein glucosyltransferase 2
  ENST ID: ENST00000621375
  CDS Start-End: 27-812
gggactcgcgcttttctctccgtgccatggcgccagcgaaagccacgaacgtggtgcggctgctactaggctccacagcgctgtggctttcgcagctcggctccgggacggtcgccgcgtccaagtcggtgactgcccacttggccgcgaagtggcccgagaccccgctgctgctggaggcaagtgaatttatggcagaagaaagtaatgaaaaattttggcagtttttggaaactgtgcaagaattagcaatttataagcaaacagaatcagattattcttattacaacttaatcctgaagaaagctggacagtttctagacaatttacacatcaaccttttaaagtttgctttctctataagggcatactccccagctattcagatgtttcagcagattgcagctgatgagccaccaccagatggttgtaatgcatttgtggttattcataagaagcacacctgtaaaattaatgagattaaaaagctgctgaagaaagctgcttcaaggactagaccttatctatttaaaggagatcacaaatttcctacaaacaaagagaacttaccagtggtgattctctatgccgaaatgggtactagaacatttagtgcatttcacaaagtattgtctgaaaaagctcaaaatgaggaaattctgtatgttcttcgccattatattcagaaaccaagctcacggaaaatgtacttatctgggtatggtgtggagctagcaattaagagtacagaatacaaagcactggatgatacccaagttaaagtgttccaagatccagaggcttttttttaagtcagttttctcaagtcagatgttaacaataaaagtatgggaacatttatcttccattaataagtttgttaaataatatagtgcacttatttttaatgacgttaaattatatagttttatttatacttgtgatttcatatttgttagcattttaatatttctcattaataagtatgttatagaagtagtatttagacatcttgcctattagtttataacaatttataggaagctttacctttttaatgttatttttttctctaaaacaaaactactttctcttgaacatattgtttgattttgtgtgtgtgtttttaggaagtaattcctcacatggctaaagagtatggattccgatatgaactagttcaatataggtggccccgttggcttcgtcaacagactgaaagacagaggattatttggggttacaaaattcttttccttgatgttcttttcccactagcagtggacaaaatcatttttgttgatgctgaccagattgtgagacatgatctaaaagaacttcgagatttcgatctggatggagctccttatgggtatactccattttgtgatagccgcagggaaatggatggatatcgtttctggaaaacaggatactgggcatcacatcttttaagacggaaataccatatcagtgctttatatgtagtggatctcaagaagttcaggagaattggagcaggtgacaggctcaggagccagtatcaagctctcagtcaagatccaaacagtctttcaaacctagatcaggatctccccaataatatgatttaccaagtcgccattaagtctcttcctcaagactggctgtggtgtgaaacctggtgtgatgatgaatccaaacaaagagccaaaacaattgatctgtgcaataatcccaaaacaaaagaatccaaactaaaagctgctgccagaattgtcccagaatgggtggagtatgatgctgagataagacaactattagatcatcttgaaaacaagaagcaagatacaattttgacacatgatgaactctagcactggtgtatatgagaaggaaggcgaaagcatgacaggaaacctgccgcctgctggggaagtctggagcccctgctgagacgatttgg

SEQ ID NO: 198043 - DNA, 2338 bp, Homo sapiens
  Payload ID: 19069
  Gene Name: UDP-glucose pyrophosphorylase 2
  Uniprot ID: Q16851
  ENST ID: ENST00000337130
  CDS Start-End: 477-2003
ggttttcgggggaggcgtttggggcctggacggcggcgcggggagggggcagctaggggcgcggcctgccagtgcctcctgcagtacagccctggagggcgtggggacttgggggcggtgaaatagccgctgtaggtccgcctctttcattgaagaaatttaagttcgtgtggttttaccttttccgggagtctccagctggccctcatttgtgtccggagctcaggagttcccaaaccgactcagtcgcaccaagtttccgtcttttggaattggggaaggagtttctttctttcttttcttttttcttgagccagttttaatcgctttgaataaatactcccttaagtagttaaatataggaggagaaagaatacatcggttgttaaagcaggagaggaagagagacctgccctgtagcgtgactcctctagaaaaaaaaaaaaaaagccggagtattttactaagcccctaaaatgtcgagatttgtacaagatcttagcaaagcaatgtctcaagatggtgcttctcagttccaagaagtcattcggcaagagctagaattatctgtgaagaaggaactagaaaaaatactcaccacagcatcatcacatgaatttgagcacaccaaaaaagacctggatggatttcggaagctatttcatagatttttgcaagaaaaggggccttctgtggattggggaaaaatccagagaccccctgaagattcgattcaaccctatgaaaagataaaggccaggggcttgcctgataatatatcttccgtgttgaacaaactagtggtggtgaaactcaatggtggtttgggaaccagcatgggctgcaaaggccctaaaagtctgattggtgtgaggaatgagaatacctttctggatctgactgttcagcaaattgaacatttgaataaaacctacaatacagatgttcctcttgttttaatgaactcttttaacacggatgaagataccaaaaaaatactacagaagtacaatcattgtcgtgtgaaaatctacactttcaatcaaagcaggtacccgaggattaataaagaatctttacttcctgtagcaaaggacgtgtcttactcaggggaaaatacagaagcttggtaccctccaggtcatggtgatatttacgccagtttctacaactctggattgcttgatacctttataggagaaggcaaagagtatatttttgtgtctaacatagataatctgggtgccacagtggatctgtatattcttaatcatctaatgaacccacccaatggaaaacgctgtgaatttgtcatggaagtcacaaataaaacacgtgcagatgtaaagggcgggacactcactcaatatgaaggcaaactgagactggtggaaattgctcaagtgccaaaagcacatgtagacgagttcaagtctgtatcaaagttcaaaatatttaatacaaacaacctatggatttctcttgcagcagttaaaagactgcaggagcaaaatgccattgacatggaaatcattgtgaatgcaaagactttggatggaggcctgaatgtcattcaattagaaactgcagtaggggctgccatcaaaagttttgagaattctctaggtattaatgtgccaaggagccgttttctgcctgtcaaaaccacatcagatctcttgctggtgatgtcaaacctctatagtcttaatgcaggatctctgacaatgagtgaaaagcgggaatttcctacagtgcccttggttaaattaggcagttcttttacgaaggttcaagattatctaagaagatttgaaagtataccagatatgcttgaattggatcacctcacagtttcaggagatgtgacatttggaaaaaatgtttcattaaagggaacggttatcatcattgcaaatcatggtgacagaattgatatcccacctggagcagtattagagaacaagattgtgtctggaaaccttcgcatcttggaccactgaaatgaaaaatactgtggacacttaaataatgggctagtttcttacaatgaaatgttctctaggattctaaaataggcaggtactttactatgttactgtaccctgcagtgttgatttttaaaatagagttttctgcagtatgcttttagtctaagaaaagcacagatggagcaatactttccttctttgaagagaatcccaaaagttagttcatcttaaagtgcaatattgtttaatcttaaaactgggcaactttggaagaacttttaacagaagcctcaatgatgatcactttgaattgcttgtgatttcaaaaataaagcagtgaagcaata

SEQ ID NO: 198044 - DNA, 2136 bp, Homo sapiens
  Payload ID: 19069
  Gene Name: UDP-glucose pyrophosphorylase 2
  Uniprot ID: Q16851
  ENST ID: ENST00000394417
  CDS Start-End: 308-1801
ctgtcggtccgtgcggcagggacatttccgcattgaaggggctgctccgaatggagggggaggggaggtgtttaggagaaagtaggggctgtgggtgtcgggagccggctgacgggtggacaagggggggttagcagctgggctgcgaccgttagggaggggctcaaggtgtgcatgtgtgagggaagagagagagagagaagggcgcctcagaggtgactttcagcctgcgagccttcttcccggggcgccataaacgcccccaatttcccagctgctaaaggaagaggaagatcttagcaaagcaatgtctcaagatggtgcttctcagttccaagaagtcattcggcaagagctagaattatctgtgaagaaggaactagaaaaaatactcaccacagcatcatcacatgaatttgagcacaccaaaaaagacctggatggatttcggaagctatttcatagatttttgcaagaaaaggggccttctgtggattggggaaaaatccagagaccccctgaagattcgattcaaccctatgaaaagataaaggccaggggcttgcctgataatatatcttccgtgttgaacaaactagtggtggtgaaactcaatggtggtttgggaaccagcatgggctgcaaaggccctaaaagtctgattggtgtgaggaatgagaatacctttctggatctgactgttcagcaaattgaacatttgaataaaacctacaatacagatgttcctcttgttttaatgaactcttttaacacggatgaagataccaaaaaaatactacagaagtacaatcattgtcgtgtgaaaatctacactttcaatcaaagcaggtacccgaggattaataaagaatctttacttcctgtagcaaaggacgtgtcttactcaggggaaaatacagaagcttggtaccctccaggtcatggtgatatttacgccagtttctacaactctggattgcttgatacctttataggagaaggcaaagagtatatttttgtgtctaacatagataatctgggtgccacagtggatctgtatattcttaatcatctaatgaacccacccaatggaaaacgctgtgaatttgtcatggaagtcacaaataaaacacgtgcagatgtaaagggcgggacactcactcaatatgaaggcaaactgagactggtggaaattgctcaagtgccaaaagcacatgtagacgagttcaagtctgtatcaaagttcaaaatatttaatacaaacaacctatggatttctcttgcagcagttaaaagactgcaggagcaaaatgccattgacatggaaatcattgtgaatgcaaagactttggatggaggcctgaatgtcattcaattagaaactgcagtaggggctgccatcaaaagttttgagaattctctaggtattaatgtgccaaggagccgttttctgcctgtcaaaaccacatcagatctcttgctggtgatgtcaaacctctatagtcttaatgcaggatctctgacaatgagtgaaaagcgggaatttcctacagtgcccttggttaaattaggcagttcttttacgaaggttcaagattatctaagaagatttgaaagtataccagatatgcttgaattggatcacctcacagtttcaggagatgtgacatttggaaaaaatgtttcattaaagggaacggttatcatcattgcaaatcatggtgacagaattgatatcccacctggagcagtattagagaacaagattgtgtctggaaaccttcgcatcttggaccactgaaatgaaaaatactgtggacacttaaataatgggctagtttcttacaatgaaatgttctctaggattctaaaataggcaggtactttactatgttactgtaccctgcagtgttgatttttaaaatagagttttctgcagtatgcttttagtctaagaaaagcacagatggagcaatactttccttctttgaagagaatcccaaaagttagttcatcttaaagtgcaatattgtttaatcttaaaactgggcaactttggaagaacttttaacagaagcctcaatgatgatcactttgaattgcttgtgatttcaaaaataaagcagtgaagcaata

SEQ ID NO: 198045 - DNA, 1955 bp, Homo sapiens
  Payload ID: 19069
  Gene Name: UDP-glucose pyrophosphorylase 2
  ENST ID: ENST00000445915
  CDS Start-End: 68-1621
cttttcgttgaattgtcatctgagctgccttgagctgctgggttgacgttccagacgcgtataatttatgctcctgtaccctgctgggtttagttttgcctccctgaaatcagatcttagcaaagcaatgtctcaagatggtgcttctcagttccaagaagtcattcggcaagagctagaattatctgtgaagaaggaactagaaaaaatactcaccacagcatcatcacatgaatttgagcacaccaaaaaagacctggatggatttcggaagctatttcatagatttttgcaagaaaaggggccttctgtggattggggaaaaatccagagaccccctgaagattcgattcaaccctatgaaaagataaaggccaggggcttgcctgataatatatcttccgtgttgaacaaactagtggtggtgaaactcaatggtggtttgggaaccagcatgggctgcaaaggccctaaaagtctgattggtgtgaggaatgagaatacctttctggatctgactgttcagcaaattgaacatttgaataaaacctacaatacagatgttcctcttgttttaatgaactcttttaacacggatgaagataccaaaaaaatactacagaagtacaatcattgtcgtgtgaaaatctacactttcaatcaaagcaggtacccgaggattaataaagaatctttacttcctgtagcaaaggacgtgtcttactcaggggaaaatacagaagcttggtaccctccaggtcatggtgatatttacgccagtttctacaactctggattgcttgatacctttataggagaaggcaaagagtatatttttgtgtctaacatagataatctgggtgccacagtggatctgtatattcttaatcatctaatgaacccacccaatggaaaacgctgtgaatttgtcatggaagtcacaaataaaacacgtgcagatgtaaagggcgggacactcactcaatatgaaggcaaactgagactggtggaaattgctcaagtgccaaaagcacatgtagacgagttcaagtctgtatcaaagttcaaaatatttaatacaaacaacctatggatttctcttgcagcagttaaaagactgcaggagcaaaatgccattgacatggaaatcattgtgaatgcaaagactttggatggaggcctgaatgtcattcaattagaaactgcagtaggggctgccatcaaaagttttgagaattctctaggtattaatgtgccaaggagccgttttctgcctgtcaaaaccacatcagatctcttgctggtgatgtcaaacctctatagtcttaatgcaggatctctgacaatgagtgaaaagcgggaatttcctacagtgcccttggttaaattaggcagttcttttacgaaggttcaagattatctaagaagatttgaaagtataccagatatgcttgaattggatcacctcacagtttcaggagatgtgacatttggaaaaaatgtttcattaaagggaacggttatcatcattgcaaatcatggtgacagaattgatatcccacctggagcagtattagagaacaagattgtgtctggaaaccttcgcatcttggaccactgaaatgaaaaatactgtggacacttaaataatgggctagtttcttacaatgaaatgttctctaggattctaaaataggcaggtactttactatgttactgtaccctgcagtgttgatttttaaaatagagttttctgcagtatgcttttagtctaagaaaagcacagatggagcaatactttccttctttgaagagaatcccaaaagttagttcatcttaaagtgcaatattgtttaatcttaaaactgggcaactttggaagaacttttaacagaagcctcaatgatgatcactttgaattgcttgtgatttcaaaaataaagcagtgaagcaat

SEQ ID NO: 198046 - DNA, 505 bp, Homo sapiens
  Payload ID: 19069
  Gene Name: UDP-glucose pyrophosphorylase 2
  ENST ID: ENST00000480679
  CDS Start-End: 392-505
agggggaggggaggtgtttaggagaaagtaggggctgtgggtgtcgggagccggctgacgggtggacaagggggggttagcagctgggctgcgaccgttagggaggggctcaaggtgtgcatgtgtgagggaagagagagagagagaagggcgcctcagaggtgactttcagcctgcgagccttcttcccggggcgccataaacgcccccaatttcccagctgctaaaggaagaggaaggtacctgtgcgtgcacgcagacgggaagggctggggaagcgggaggactgagaaaagccgggatctgcctctgtcacccaggctggagtgcggtggcgcgatctcgcctcactgcagcctctgcctcctcggctcaagatcttagcaaagcaatgtctcaagatggtgcttctcagttccaagaagtcattcggcaagagctagaattatctgtgaagaaggaactagaaaaaatactcaccacagcatcatcacatgaatttgag

SEQ ID NO: 198047 - DNA, 889 bp, Homo sapiens
  Payload ID: 19069
  Gene Name: UDP-glucose pyrophosphorylase 2
  ENST ID: ENST00000487042
  CDS Start-End: 46-204
agtagtaccgtcgctttcctggatagtggctatcttagcaaagcaatgtctcaagatggtgcttctcagttccaagaagtcattcggcaagagctagaattatctgtgaagaaggaactagaaaaaatactcaccacagcatcatcacatgaatttgagacaccgggttttgccatattgccgaggctggtctcaaactcctgagctcaaacgatcagctggcctgagcctcccaaagtgctgggattacaggcatgcaccaactacgcccagcctgtattagcttttaggatgtgaaaaagtcttgctccctccatgtcctaatggtcacaccaaaaaagacctggatggatttcggaagctatttcatagatttttgcaagaaaaggggccttctgtggattggggaaaaatccagagaccccctgaagattcgattcaaccctatgaaaagataaaggccaggggcttgcctgataatatatcttccgtgttgaacaaactagtggtggtgaaactcaatggtggtttgggaaccagcatgggctgcaaaggccctaaaagtctgattggtgtgaggaatgagaatacctttctggatctgactgttcagcaaattgaacatttgaataaaacctacaatacagatgttcctcttgttttaatgaactcttttaacacggatgaagataccaaaaaaatactacagaagtacaatcattgtcgtgtgaaaatctacactttcaatcaaagcaggtacccgaggattaataaagaatctttacttcctgtagcaaaggacgtgtcttactcaggggaaaatacagaagcttggtaccctccaggtcatggtgatatttacgccagtttctacaactctggattgctt

SEQ ID NO: 198048 - DNA, 598 bp, Homo sapiens
  Payload ID: 19069
  Gene Name: UDP-glucose pyrophosphorylase 2
  ENST ID: ENST00000483108
  CDS Start-End: 244-390
gaggtgtttaggagaaagtaggggctgtgggtgtcgggagccggctgacgggtggacaagggggggttagcagctgggctgcgaccgttagggaggggctcaaggtgtgcatgtgtgagggaagagagagagagagaagggcgcctcagaggtgactttcagcctgcgagccttcttcccggggcgccataaacgcccccaatttcccagctgctaaaggaagaggaagatcttagcaaagcaatgtctcaagatggtgcttctcagttccaagaagtcattcggcaagagctagaattatctgtgaagaaggaactagaaaaaatactcaccacagcatcatcacatgaatttgagagagtcacttctgatagaaccatgctactttgacaattgtcatagaagttttccagaactgggaggcatttacttttttacttgtaaatcaatagcacaccaaaaaagacctggatggatttcggaagctatttcatagatttttgcaagaaaaggggccttctgtggattggggaaaaatccagagaccccctgaagattcgattcaaccctatgaaaagataaaggccaggggcttgcc

SEQ ID NO: 198049 - DNA, 722 bp, Homo sapiens
  Payload ID: 19069
  Gene Name: UDP-glucose pyrophosphorylase 2
  ENST ID: ENST00000497510
  CDS Start-End: 277-507
attgaaggggctgctccgaatggagggggaggggaggtgtttaggagaaagtaggggctgtgggtgtcgggagccggctgacgggtggacaagggggggttagcagctgggctgcgaccgttagggaggggctcaaggtgtgcatgtgtgagggaagagagagagagagaagggcgcctcagaggtgactttcagcctgcgagccttcttcccggggcgccataaacgcccccaatttcccagctgctaaaggaagaggaagatcttagcaaagcaatgtctcaagatggtgcttctcagttccaagaagtcattcggcaagagctagaattatctgtgaagaaggaactagaaaaaatactcaccacagcatcatcacatgaatttgagcacaccaaaaaagacctggatggatttcggaagctatttcatagatttttgcaagaaaaggggccttctgtggattggggaaaaatccagagaccccctgaagattcggcaggctaacaagaagggagatacaagatgattttagtaaagagtcctttactaaggactttactggaacagattgtgacgtaagcagattcaaccctatgaaaagataaaggccaggggcttgcctgataatatatcttccgtgttgaacaaactagtggtggtgaaactcaatggtggtttgggaaccagcatgggctgcaaaggccctaaaagtctgattg

SEQ ID NO: 198050 - DNA, 864 bp, Homo sapiens
  Payload ID: 19069
  Gene Name: UDP-glucose pyrophosphorylase 2
  ENST ID: ENST00000493222
  CDS Start-End: 238-384
tttaggagaaagtaggggctgtgggtgtcgggagccggctgacgggtggacaagggggggttagcagctgggctgcgaccgttagggaggggctcaaggtgtgcatgtgtgagggaagagagagagagagaagggcgcctcagaggtgactttcagcctgcgagccttcttcccggggcgccataaacgcccccaatttcccagctgctaaaggaagaggaagatcttagcaaagcaatgtctcaagatggtgcttctcagttccaagaagtcattcggcaagagctagaattatctgtgaagaaggaactagaaaaaatactcaccacagcatcatcacatgaatttgagagagtcacttctgatagaaccatgctactttgacaattgtcatagaagttttccagaactgggaggcatttacttttttacttgtaaatcaatagacaccgggttttgccatattgccgaggctggtctcaaactcctgagctcaaacgatcagctggcctgagcctcccaaagtgctgggattacaggcatgcaccaactacgcccagcctgtattagcttttaggatgtgaaaaagtcttgctccctccatgtcctaatggtcacaccaaaaaagacctggatggatttcggaagctatttcatagatttttgcaagaaaaggggccttctgtggattggggaaaaatccagagaccccctgaagattcgattcaaccctatgaaaagataaaggccaggggcttgcctgataatatatcttccgtgttgaacaaactagtggtggtgaaactcaatggtggtttgggaaccagcatgggctgcaaaggccctaaaagtctgattggtgtg

SEQ ID NO: 198051 - DNA, 553 bp, Homo sapiens
  Payload ID: 19069
  Gene Name: UDP-glucose pyrophosphorylase 2
  ENST ID: ENST00000484142
  CDS Start-End: 407-553
ggcagggacatttccgcattgaaggggctgctccgaatggagggggaggggaggtgtttaggagaaagtaggggctgtgggtgtcgggagccggctgacgggtggacaagggggggttagcagctgggctgcgaccgttagggaggggctcaaggtgtgcatgtgtgagggaagagagagagagagaagggcgcctcagaggtgactttcagcctgcgagccttcttcccggggcgccataaacgcccccaatttcccagctgctaaaggaagaggaagtagttaaatataggaggagaaagaatacatcggttgttaaagcaggagaggaagagagacctgccctgtagcgtgactcctctagaaaaaaaaaaaaaaagccggagtattttactaagcccctaaaatgtcgagatttgtacaagatcttagcaaagcaatgtctcaagatggtgcttctcagttccaagaagtcattcggcaagagctagaattatctgtgaagaaggaactagaaaaaatactcaccacagcatcatcacatgaatttgag

SEQ ID NO: 198052 - DNA, 1023 bp, Homo sapiens
  Payload ID: 19069
  Gene Name: UDP-glucose pyrophosphorylase 2
  ENST ID: ENST00000466642
  CDS Start-End: 296-454
gcggcagggacatttccgcattgaaggggctgctccgaatggagggggaggggaggtgtttaggagaaagtaggggctgtgggtgtcgggagccggctgacgggtggacaagggggggttagcagctgggctgcgaccgttagggaggggctcaaggtgtgcatgtgtgagggaagagagagagagagaagggcgcctcagaggtgactttcagcctgcgagccttcttcccggggcgccataaacgcccccaatttcccagctgctaaaggaagaggaagatcttagcaaagcaatgtctcaagatggtgcttctcagttccaagaagtcattcggcaagagctagaattatctgtgaagaaggaactagaaaaaatactcaccacagcatcatcacatgaatttgagacaccgggttttgccatattgccgaggctggtctcaaactcctgagctcaaacgatcagctggcctgagcctcccaaagtgctgggattacaggcatgcaccaactacgcccagcctgtattagcttttaggatgtgaaaaagtcttgctccctccatgtcctaatggtcacaccaaaaaagacctggatggatttcggaagctatttcatagatttttgcaagaaaaggggccttctgtggattggggaaaaatccagagaccccctgaagattcgattcaaccctatgaaaagataaaggccaggggcttgcctgataatatatcttccgtgttgaacaaactagtggtggtgaaactcaatggtggtttgggaaccagcatgggctgcaaaggccctaaaagtctgattggtgtgaggaatgagaatacctttctggatctgactgttcagcaaattgaacatttgaataaaacctacaatacagatgttcctcttgttttaatgaactcttttaacacggatgaagataccaaaaaaatactacagaagtacaatcattgtcgtgtgaaaatctacactttcaatcaaagcaggtacaatgagtaaaaaa

SEQ ID NO: 198053 - DNA, 747 bp, Homo sapiens
  Payload ID: 19069
  Gene Name: UDP-glucose pyrophosphorylase 2
  ENST ID: ENST00000467999
  CDS Start-End: 1-90
agttttgcctccctgaaatcaggtacctgtgcgtgcacgcagacgggaagggctggggaagcgggaggactgagaaaagccggatcttagcaaagcaatgtctcaagatggtgcttctcagttccaagaagtcattcggcaagagctagaattatctgtgaagaaggaactagaaaaaatactcaccacagcatcatcacatgaatttgagacaccgggttttgccatattgccgaggctggtctcaaactcctgagctcaaacgatcagctggcctgagcctcccaaagtgctgggattacaggcatgcaccaactacgcccagcctgtattagcttttaggatgtgaaaaagtcttgctccctccatgtcctaatggtcacaccaaaaaagacctggatggatttcggaagctatttcatagatttttgcaagaaaaggggccttctgtggattggggaaaaatccagagaccccctgaagattcgattcaaccctatgaaaagataaaggccaggggcttgcctgataatatatcttccgtgttgaacaaactagtggtggtgaaactcaatggtggtttgggaaccagcatgggctgcaaaggccctaaaagtctgattggtgtgaggaatgagaatacctttctggatctgactgttcagcaaattgaacatttgaataaaacctacaatacagatgttcctcttgttttaatgaactcttttaacacggatgaagatacca

SEQ ID NO: 198054 - DNA, 717 bp, Homo sapiens
  Payload ID: 19069
  Gene Name: UDP-glucose pyrophosphorylase 2
  ENST ID: ENST00000467400
  CDS Start-End: 266-496
gccggctgacgggtggacaagggggggttagcagctgggctgcgaccgttagggaggggctcaaggtgtgcatgtgtgagggaagagagagagagagaagggcgcctcagaggtgactttcagcctgcgagccttcttcccggggcgccataaacgcccccaatttcccagctgctaaaggaagaggaaggtacctgtgcgtgcacgcagacgggaagggctggggaagcgggaggactgagaaaagccggatcttagcaaagcaatgtctcaagatggtgcttctcagttccaagaagtcattcggcaagagctagaattatctgtgaagaaggaactagaaaaaatactcaccacagcatcatcacatgaatttgagcacaccaaaaaagacctggatggatttcggaagctatttcatagatttttgcaagaaaaggggccttctgtggattggggaaaaatccagagaccccctgaagattcggcaggctaacaagaagggagatacaagatgattttagtaaagagtcctttactaaggactttactggaacagattgtgacgtaagcagattcaaccctatgaaaagataaaggccaggggcttgcctgataatatatcttccgtgttgaacaaactagtggtggtgaaactcaatggtggtttgggaaccagcatgggctgcaaaggccctaaaagtctgattggtgtga

SEQ ID NO: 198055 - DNA, 558 bp, Homo sapiens
  Payload ID: 19069
  Gene Name: UDP-glucose pyrophosphorylase 2
  ENST ID: ENST00000472047
  CDS Start-End: 107-558
atttctcgagtttgatcctgtgtctgggattttttcaagtctgcctctgaaacttagacctgtgttgacagagagcacatgcaatattaaatatcttagcaaagcaatgtctcaagatggtgcttctcagttccaagaagtcattcggcaagagctagaattatctgtgaagaaggaactagaaaaaatactcaccacagcatcatcacatgaatttgagcacaccaaaaaagacctggatggatttcggaagctatttcatagatttttgcaagaaaaggggccttctgtggattggggaaaaatccagagaccccctgaagattcgattcaaccctatgaaaagataaaggccaggggcttgcctgataatatatcttccgtgttgaacaaactagtggtggtgaaactcaatggtggtttgggaaccagcatgggctgcaaaggccctaaaagtctgattggtgtgaggaatgagaatacctttctggatctgactgttcagcaaattgaacatttgaataaaacctacaatacagatgttcctcttgttttaat

SEQ ID NO: 198056 - DNA, 560 bp, Homo sapiens
  Payload ID: 19069
  Gene Name: UDP-glucose pyrophosphorylase 2
  ENST ID: ENST00000475462
  CDS Start-End: 49-560
gttagtagtaccgtcgctttcctggatagtggctatcttagcaaagcaatgtctcaagatggtgcttctcagttccaagaagtcattcggcaagagctagaattatctgtgaagaaggaactagaaaaaatactcaccacagcatcatcacatgaatttgagcacaccaaaaaagacctggatggatttcggaagctatttcatagatttttgcaagaaaaggggccttctgtggattggggaaaaatccagagaccccctgaagattcgattcaaccctatgaaaagataaaggccaggggcttgcctgataatatatcttccgtgttgaacaaactagtggtggtgaaactcaatggtggtttgggaaccagcatgggctgcaaaggccctaaaagtctgattggtgtgaggaatgagaatacctttctggatctgactgttcagcaaattgaacatttgaataaaacctacaatacagatgttcctcttgttttaatgaactcttttaacacggatgaagataccaaaaaaatactacagaagtacaatcattgtcg

SEQ ID NO: 198057 - DNA, 784 bp, Homo sapiens
  Payload ID: 19069
  Gene Name: UDP-glucose pyrophosphorylase 2
  ENST ID: ENST00000488245
  CDS Start-End: 379-784
ctccagctggccctcatttgtgtccggagctcaggagttcccaaaccgactcagtcgcaccaagtttccgtcttttggaattggggaaggagtttctttctttcttttcttttttcttgagccagttttaatcgctttgaataaatactcccttaagtagttaaatataggaggagaaagaatacatcggttgttaaagcaggagaggaagagagacctgccctgtagcgtgactcctctagaaaaaaaaaaaaaaagccggagtattttactaagcccctaaaatgtcgagatttgtacaaggtacctgtgcgtgcacgcagacgggaagggctggggaagcgggaggactgagaaaagccggatcttagcaaagcaatgtctcaagatggtgcttctcagttccaagaagtcattcggcaagagctagaattatctgtgaagaaggaactagaaaaaatactcaccacagcatcatcacatgaatttgagcacaccaaaaaagacctggatggatttcggaagctatttcatagatttttgcaagaaaaggggccttctgtggattggggaaaaatccagagaccccctgaagattcgattcaaccctatgaaaagataaaggccaggggcttgcctgataatatatcttccgtgttgaacaaactagtggtggtgaaactcaatggtggtttgggaaccagcatgggctgcaaaggccctaaaagtctgattggtgtgaggaatgagaatacctttctggatctgactgttcagcaaattg

SEQ ID NO: 198058 - DNA, 645 bp, Homo sapiens
  Payload ID: 19069
  Gene Name: UDP-glucose pyrophosphorylase 2
  ENST ID: ENST00000482668
  CDS Start-End: 332-645
gcattgaaggggctgctccgaatggagggggaggggaggtgtttaggagaaagtaggggctgtgggtgtcgggagccggctgacgggtggacaagggggggttagcagctgggctgcgaccgttagggaggggctcaaggtgtgcatgtgtgagggaagagagagagagagaagggcgcctcagaggtgactttcagcctgcgagccttcttcccggggcgccataaacgcccccaatttcccagctgctaaaggaagaggaagtctgcctctgaaacttagacctgtgttgacagagagcacatgcaatattaaatatcttagcaaagcaatgtctcaagatggtgcttctcagttccaagaagtcattcggcaagagctagaattatctgtgaagaaggaactagaaaaaatactcaccacagcatcatcacatgaatttgagcacaccaaaaaagacctggatggatttcggaagctatttcatagatttttgcaagaaaaggggccttctgtggattggggaaaaatccagagaccccctgaagattcgattcaaccctatgaaaagataaaggccaggggcttgcctgataatatatcttccgtgttgaacaaactagtggtggtgaaactcaatggtgg

SEQ ID NO: 198059 - DNA, 566 bp, Homo sapiens
  Payload ID: 19069
  Gene Name: UDP-glucose pyrophosphorylase 2
  ENST ID: ENST00000487640
  CDS Start-End: 116-274
agagagagaagggcgcctcagaggtgactttcagcctgcgagccttcttcccggggcgccataaacgcccccaatttcccagctgctaaaggaagaggaagatcttagcaaagcaatgtctcaagatggtgcttctcagttccaagaagtcattcggcaagagctagaattatctgtgaagaaggaactagaaaaaatactcaccacagcatcatcacatgaatttgagacaccgggttttgccatattgccgaggctggtctcaaactcctgagctcaaacgatcagctggcctgagcctcccaaagtgctgggattacaggcatgcaccaactacgcccagcctgtattagcttttaggatgtgaaaaagtcttgctccctccatgtcctaatggtcacaccaaaaaagacctggatggatttcggaagctatttcatagatttttgcaagaaaaggggccttctgtggattggggaaaaatccagagaccccctgaagattcggcaggctaacaagaagggagatacaagatgattttagtaaagagtcctttactaaggact

SEQ ID NO: 198060 - DNA, 605 bp, Homo sapiens
  Payload ID: 19069
  Gene Name: UDP-glucose pyrophosphorylase 2
  ENST ID: ENST00000497883
  CDS Start-End: 81-605
gaggaagagagacctgccctgtagcgtgactcctctagaaaaaaaaaaaaaaagccggagtattttactaagcccctaaaatgtcgagatttgtacaagatggtgcttctcagttccaagaagtcattcggcaagagctagaattatctgtgaagaaggaactagaaaaaatactcaccacagcatcatcacatgaatttgagcacaccaaaaaagacctggatggatttcggaagctatttcatagatttttgcaagaaaaggggccttctgtggattggggaaaaatccagagaccccctgaagattcgattcaaccctatgaaaagataaaggccaggggcttgcctgataatatatcttccgtgttgaacaaactagtggtggtgaaactcaatggtggtttgggaaccagcatgggctgcaaaggccctaaaagtctgattggtgtgaggaatgagaatacctttctggatctgactgttcagcaaattgaacatttgaataaaacctacaatacagatgttcctcttgttttaatgaactcttttaacacggatgaagataccaaaaaaatactacagaagtacaatcattgtcgtgtg

SEQ ID NO: 198061 - DNA, 753 bp, Homo sapiens
  Payload ID: 19069
  Gene Name: UDP-glucose pyrophosphorylase 2
  ENST ID: ENST00000491621
  CDS Start-End: 116-753
gctattctgctgttgggtcaccttctgcctacttgtgacattccttctgctcttccttgctccagggattgttccagggcccccagttattctaaatggatatcttagcaaagcaatgtctcaagatggtgcttctcagttccaagaagtcattcggcaagagctagaattatctgtgaagaaggaactagaaaaaatactcaccacagcatcatcacatgaatttgagcacaccaaaaaagacctggatggatttcggaagctatttcatagatttttgcaagaaaaggggccttctgtggattggggaaaaatccagagaccccctgaagattcgattcaaccctatgaaaagataaaggccaggggcttgcctgataatatatcttccgtgttgaacaaactagtggtggtgaaactcaatggtggtttgggaaccagcatgggctgcaaaggccctaaaagtctgattggtgtgaggaatgagaatacctttctggatctgactgttcagcaaattgaacatttgaataaaacctacaatacagatgttcctcttgttttaatgaactcttttaacacggatgaagataccaaaaaaatactacagaagtacaatcattgtcgtgtgaaaatctacactttcaatcaaagcaggtacccgaggattaataaagaatctttacttcctgtagcaaaggacgtgtcttactcaggggaaaatacagaagcttggtaccctccaggtcatgg

SEQ ID NO: 198062 - DNA, 565 bp, Homo sapiens
  Payload ID: 19069
  Gene Name: UDP-glucose pyrophosphorylase 2
  ENST ID: ENST00000496334
  CDS Start-End: 12-125
gcgtataatttatgctcctgtaccctgctgggtttagttttgcctccctgaaatcaggtacctgtgcgtgcacgcagacgggaagggctggggaagcgggaggactgagaaaagccggatcttagcaaagcaatgtctcaagatggtgcttctcagttccaagaagtcattcggcaagagctagaattatctgtgaagaaggaactagaaaaaatactcaccacagcatcatcacatgaatttgagcacaccaaaaaagacctggatggatttcggaagctatttcatagatttttgcaagaaaaggggccttctgtggattggggaaaaatccagagaccccctgaagattcgattcaaccctatgaaaagataaaggccaggggcttgcctgataatatatcttccgtgttgaacaaactagtggtggtgaaactcaatggtggtttgggaaccagcatgggctgcaaaggccctaaaagtctgattggtgtgaggaatgagaatacctttctggatctgactgttcagcaaattgaacatttgaataaaacctacaatacag

SEQ ID NO: 198063 - DNA, 2057 bp, Homo sapiens
  Payload ID: 19069
  Gene Name: UDP-glucose pyrophosphorylase 2
  Uniprot ID: Q16851
  ENST ID: ENST00000467648
  CDS Start-End: 340-1833
gcattgaaggggctgctccgaatggagggggaggggaggtgtttaggagaaagtaggggctgtgggtgtcgggagccggctgacgggtggacaagggggggttagcagctgggctgcgaccgttagggaggggctcaaggtgtgcatgtgtgagggaagagagagagagagaagggcgcctcagaggtgactttcagcctgcgagccttcttcccggggcgccataaacgcccccaatttcccagctgctaaaggaagaggaaggtacctgtgcgtgcacgcagacgggaagggctggggaagcgggaggactgagaaaagccggatcttagcaaagcaatgtctcaagatggtgcttctcagttccaagaagtcattcggcaagagctagaattatctgtgaagaaggaactagaaaaaatactcaccacagcatcatcacatgaatttgagcacaccaaaaaagacctggatggatttcggaagctatttcatagatttttgcaagaaaaggggccttctgtggattggggaaaaatccagagaccccctgaagattcgattcaaccctatgaaaagataaaggccaggggcttgcctgataatatatcttccgtgttgaacaaactagtggtggtgaaactcaatggtggtttgggaaccagcatgggctgcaaaggccctaaaagtctgattggtgtgaggaatgagaatacctttctggatctgactgttcagcaaattgaacatttgaataaaacctacaatacagatgttcctcttgttttaatgaactcttttaacacggatgaagataccaaaaaaatactacagaagtacaatcattgtcgtgtgaaaatctacactttcaatcaaagcaggtacccgaggattaataaagaatctttacttcctgtagcaaaggacgtgtcttactcaggggaaaatacagaagcttggtaccctccaggtcatggtgatatttacgccagtttctacaactctggattgcttgatacctttataggagaaggcaaagagtatatttttgtgtctaacatagataatctgggtgccacagtggatctgtatattcttaatcatctaatgaacccacccaatggaaaacgctgtgaatttgtcatggaagtcacaaataaaacacgtgcagatgtaaagggcgggacactcactcaatatgaaggcaaactgagactggtggaaattgctcaagtgccaaaagcacatgtagacgagttcaagtctgtatcaaagttcaaaatatttaatacaaacaacctatggatttctcttgcagcagttaaaagactgcaggagcaaaatgccattgacatggaaatcattgtgaatgcaaagactttggatggaggcctgaatgtcattcaattagaaactgcagtaggggctgccatcaaaagttttgagaattctctaggtattaatgtgccaaggagccgttttctgcctgtcaaaaccacatcagatctcttgctggtgatgtcaaacctctatagtcttaatgcaggatctctgacaatgagtgaaaagcgggaatttcctacagtgcccttggttaaattaggcagttcttttacgaaggttcaagattatctaagaagatttgaaagtataccagatatgcttgaattggatcacctcacagtttcaggagatgtgacatttggaaaaaatgtttcattaaagggaacggttatcatcattgcaaatcatggtgacagaattgatatcccacctggagcagtattagagaacaagattgtgtctggaaaccttcgcatcttggaccactgaaatgaaaaatactgtggacacttaaataatgggctagtttcttacaatgaaatgttctctaggattctaaaataggcaggtactttactatgttactgtaccctgcagtgttgatttttaaaatagagttttctgcagtatgcttttagtctaagaaaagcacagatggagcaatactttccttctttgaagagaatcccaaaagttagttcatcttaaagtgc

SEQ ID NO: 198064 - DNA, 1858 bp, Homo sapiens
  Payload ID: 19069
  Gene Name: UDP-glucose pyrophosphorylase 2
  ENST ID: ENST00000613823
  CDS Start-End: 1-1527
atgagaatttttgtagaggatcttagcaaagcaatgtctcaagatggtgcttctcagttccaagaagtcattcggcaagagctagaattatctgtgaagaaggaactagaaaaaatactcaccacagcatcatcacatgaatttgagcacaccaaaaaagacctggatggatttcggaagctatttcatagatttttgcaagaaaaggggccttctgtggattggggaaaaatccagagaccccctgaagattcgattcaaccctatgaaaagataaaggccaggggcttgcctgataatatatcttccgtgttgaacaaactagtggtggtgaaactcaatggtggtttgggaaccagcatgggctgcaaaggccctaaaagtctgattggtgtgaggaatgagaatacctttctggatctgactgttcagcaaattgaacatttgaataaaacctacaatacagatgttcctcttgttttaatgaactcttttaacacggatgaagataccaaaaaaatactacagaagtacaatcattgtcgtgtgaaaatctacactttcaatcaaagcaggtacccgaggattaataaagaatctttacttcctgtagcaaaggacgtgtcttactcaggggaaaatacagaagcttggtaccctccaggtcatggtgatatttacgccagtttctacaactctggattgcttgatacctttataggagaaggcaaagagtatatttttgtgtctaacatagataatctgggtgccacagtggatctgtatattcttaatcatctaatgaacccacccaatggaaaacgctgtgaatttgtcatggaagtcacaaataaaacacgtgcagatgtaaagggcgggacactcactcaatatgaaggcaaactgagactggtggaaattgctcaagtgccaaaagcacatgtagacgagttcaagtctgtatcaaagttcaaaatatttaatacaaacaacctatggatttctcttgcagcagttaaaagactgcaggagcaaaatgccattgacatggaaatcattgtgaatgcaaagactttggatggaggcctgaatgtcattcaattagaaactgcagtaggggctgccatcaaaagttttgagaattctctaggtattaatgtgccaaggagccgttttctgcctgtcaaaaccacatcagatctcttgctggtgatgtcaaacctctatagtcttaatgcaggatctctgacaatgagtgaaaagcgggaatttcctacagtgcccttggttaaattaggcagttcttttacgaaggttcaagattatctaagaagatttgaaagtataccagatatgcttgaattggatcacctcacagtttcaggagatgtgacatttggaaaaaatgtttcattaaagggaacggttatcatcattgcaaatcatggtgacagaattgatatcccacctggagcagtattagagaacaagattgtgtctggaaaccttcgcatcttggaccactgaaatgaaaaatactgtggacacttaaataatgggctagtttcttacaatgaaatgttctctaggattctaaaataggcaggtactttactatgttactgtaccctgcagtgttgatttttaaaatagagttttctgcagtatgcttttagtctaagaaaagcacagatggagcaatactttccttctttgaagagaatcccaaaagttagttcatcttaaagtgcaatattgtttaatcttaaaactgggcaactttggaagaacttttaacagaagcctcaatgatgatcactttgaattgcttgtgatttcaaaaataaagcagtgaagc

SEQ ID NO: 198065 - DNA, 264 bp, Homo sapiens
  Payload ID: 19069
  Gene Name: UDP-glucose pyrophosphorylase 2
  ENST ID: ENST00000627474
  CDS Start-End: 118-264
aggagaggaagagagacctgccctgtagcgtgactcctctagaaaaaaaaaaaaaaagccggagtattttactaagcccctaaaatgtcgagatttgtacaagatcttagcaaagcaatgtctcaagatggtgcttctcagttccaagaagtcattcggcaagagctagaattatctgtgaagaaggaactagaaaaaatactcaccacagcatcatcacatgaatttgagagagtcacttctgatagaaccatgctactttga

SEQ ID NO: 198066 - DNA, 276 bp, Homo sapiens
  Payload ID: 19069
  Gene Name: UDP-glucose pyrophosphorylase 2
  ENST ID: ENST00000626380
  CDS Start-End: 118-276
aggagaggaagagagacctgccctgtagcgtgactcctctagaaaaaaaaaaaaaaagccggagtattttactaagcccctaaaatgtcgagatttgtacaagatcttagcaaagcaatgtctcaagatggtgcttctcagttccaagaagtcattcggcaagagctagaattatctgtgaagaaggaactagaaaaaatactcaccacagcatcatcacatgaatttgagacaccgggttttgccatattgccgaggctggtctcaaactcctga

SEQ ID NO: 198067 - DNA, 2099 bp, Homo sapiens
  Payload ID: 19070
  Gene Name: UDP-glucuronate decarboxylase 1
  Uniprot ID: Q8NBZ7
  ENST ID: ENST00000283148
  CDS Start-End: 99-1376
ggcggggctctcggggccgctgccgccgccgccgccgcgcattgtgcagcaggcgggcccccgcgcggtagggccctggacccgcgcggctcccggggatggtgagcaaggcgctgctgcgcctcgtgtctgccgtcaaccgcaggaggatgaagctgctgctgggcatcgccttgctggcctacgtcgcctctgtttggggcaacttcgttaatatgagctttctactcaacaggtctatccaggaaaatggtgaactaaaaattgaaagcaagattgaagagatggttgaaccactaagagagaaaatcagagatttagaaaaaagctttacccagaaatacccaccagtaaagtttttatcagaaaaggatcggaaaagaattttgataacaggaggcgcagggttcgtgggctcccatctaactgacaaactcatgatggacggccacgaggtgaccgtggtggacaatttcttcacgggcaggaagagaaacgtggagcactggatcggacatgagaacttcgagttgattaaccacgacgtggtggagcccctctacatcgaggttgaccagatataccatctggcatctccagcctcccctccaaactacatgtataatcctatcaagacattaaagaccaatacgattgggacattaaacatgttggggctggcaaaacgagtcggtgcccgtctgctcctggcctccacatcggaggtgtatggagatcctgaagtccaccctcaaagtgaggattactggggccacgtgaatccaataggacctcgggcctgctacgatgaaggcaaacgtgttgcagagaccatgtgctatgcctacatgaagcaggaaggcgtggaagtgcgagtggccagaatcttcaacacctttgggccacgcatgcacatgaacgatgggcgagtagtcagcaacttcatcctgcaggcgctccagggggagccactcacggtatacggatccgggtctcagacaagggcgttccagtacgtcagcgatctagtgaatggcctcgtggctctcatgaacagcaacgtcagcagcccggtcaacctggggaacccagaagaacacacaatcctagaatttgctcagttaattaaaaaccttgttggtagcggaagtgaaattcagtttctctccgaagcccaggatgacccacagaaaagaaaaccagacatcaaaaaagcaaagctgatgctggggtgggagcccgtggtcccgctggaggaaggtttaaacaaagcaattcactacttccgtaaagaactcgagtaccaggcaaataatcagtacatccccaaaccaaagcctgccagaataaagaaaggacggactcgccacagctgaactcctcacttttaggacacaagactaccattgtacacttgatgggatgtatttttggcttttttttgttgtcgtttaaagaaagactttaacaggtgtcatgaagaacaaactggaatttcattctgaagcttgctttaatgaaatggatgtgcctaaaagctcccctcaaaaaactgcagattttgccttgcactttttgaatctctctttttatgtaaaatagcgtagatgcatctctgcgtattttcaagtttttttatcttgctgtgagagcatatgttgtgactgtcgttgacagttttatttactggtttctttgtgaagctgaaaaggaacattaagcgggacaaaaaatgccgattttatttatgaaagtgggtacttaataaatgagtcgttatactatgcataaagaaaaatcctagcagtattgtcaggtggtggtgcgccggcattgattttagggcagataaaagaattctgtgtgagagctttatgtttctcttttaattcagagtttttccaaggtctacttttgagttgcaaacttgactttgaaatattcctgttggtcatgatcaaggatatttgaaatcactactgtgttttgctgcgtatctggggcgggggcaggttggggggcacaaagttaacatattcttggttaaccatggttaaatatgctattttaataaattattgaaactcaccagtcatgga

SEQ ID NO: 198068 - DNA, 1839 bp, Homo sapiens
  Payload ID: 19070
  Gene Name: UDP-glucuronate decarboxylase 1
  Uniprot ID: Q8NBZ7
  ENST ID: ENST00000409501
  CDS Start-End: 59-1321
attgtgcagcaggcgggcccccgcgcggtagggccctggacccgcgcggctcccggggatggtgagcaaggcgctgctgcgcctcgtgtctgccgtcaaccgcaggaggatgaagctgctgctgggcatcgccttgctggcctacgtcgcctctgtttggggcaacttcgttaatatgaggtctatccaggaaaatggtgaactaaaaattgaaagcaagattgaagagatggttgaaccactaagagagaaaatcagagatttagaaaaaagctttacccagaaatacccaccagtaaagtttttatcagaaaaggatcggaaaagaattttgataacaggaggcgcagggttcgtgggctcccatctaactgacaaactcatgatggacggccacgaggtgaccgtggtggacaatttcttcacgggcaggaagagaaacgtggagcactggatcggacatgagaacttcgagttgattaaccacgacgtggtggagcccctctacatcgaggttgaccagatataccatctggcatctccagcctcccctccaaactacatgtataatcctatcaagacattaaagaccaatacgattgggacattaaacatgttggggctggcaaaacgagtcggtgcccgtctgctcctggcctccacatcggaggtgtatggagatcctgaagtccaccctcaaagtgaggattactggggccacgtgaatccaataggacctcgggcctgctacgatgaaggcaaacgtgttgcagagaccatgtgctatgcctacatgaagcaggaaggcgtggaagtgcgagtggccagaatcttcaacacctttgggccacgcatgcacatgaacgatgggcgagtagtcagcaacttcatcctgcaggcgctccagggggagccactcacggtatacggatccgggtctcagacaagggcgttccagtacgtcagcgatctagtgaatggcctcgtggctctcatgaacagcaacgtcagcagcccggtcaacctggggaacccagaagaacacacaatcctagaatttgctcagttaattaaaaaccttgttggtagcggaagtgaaattcagtttctctccgaagcccaggatgacccacagaaaagaaaaccagacatcaaaaaagcaaagctgatgctggggtgggagcccgtggtcccgctggaggaaggtttaaacaaagcaattcactacttccgtaaagaactcgagtaccaggcaaataatcagtacatccccaaaccaaagcctgccagaataaagaaaggacggactcgccacagctgaactcctcacttttaggacacaagactaccattgtacacttgatgggatgtatttttggcttttttttgttgtcgtttaaagaaagactttaacaggtgtcatgaagaacaaactggaatttcattctgaagcttgctttaatgaaatggatgtgcctaaaagctcccctcaaaaaactgcagattttgccttgcactttttgaatctctctttttatgtaaaatagcgtagatgcatctctgcgtattttcaagtttttttatcttgctgtgagagcatatgttgtgactgtcgttgacagttttatttactggtttctttgtgaagctgaaaaggaacattaagcgggacaaaaaatgccgattttatttatgaaagtgggtacttaataaatgagtcgttatactatgcataaagaaaaatcctagcagtattgtcaggtggtggtgcgccggcattgattttagggcagataaaagaattctgtgtgagagctttatgtttctcttttaattcag

SEQ ID NO: 198069 - DNA, 1935 bp, Homo sapiens
  Payload ID: 19070
  Gene Name: UDP-glucuronate decarboxylase 1
  Uniprot ID: Q8NBZ7
  ENST ID: ENST00000409032
  CDS Start-End: 755-1513
aggataggaactggagttattgttaatgttacaggaagaacacattctcaaaggagaggggggtggtgggaaactttgattttcatagggttttcagtttcctctcaaatgggaggatgcagcagtgccgctacttaactgaacgtctcgacagtctgatggggcggccctcagccttccggagcagcagtgggactgacctgtccagtgaggaagaaacactgaaccagatggaatggcctttggggatggaaaaaccccagtttacgctcatctcttctctcagctaacttttgtggagccctgttcccaaactggcctgggccagagcaccgtggaggggtatttgttgtaaatggaaggtttccaggcccgcctggaaatcctgaagggtgagacctgcagtgggctcaggagtctgcatttgtgggtgaccgagggggcctcccctccctctagagtccacactgtggagagcatcaggaagggaaaggcctgcatcttgtgctcagtgagctcatcgtctagtgaggaaggcatgtgtgaatctctggacaaggcagcgctgagctgttgtggactagtggtgcaggcaagggattatttctgaccaaggatggtgagaaggtttcccatacagactgacgtctggattgagctttgaagaagaaagccaggactggagcagacgacgaggagggaagagtttgaccagatataccatctggcatctccagcctcccctccaaactacatgtataatcctatcaagacattaaagaccaatacgattgggacattaaacatgttggggctggcaaaacgagtcggtgcccgtctgctcctggcctccacatcggaggtgtatggagatcctgaagtccaccctcaaagtgaggattactggggccacgtgaatccaataggacctcgggcctgctacgatgaaggcaaacgtgttgcagagaccatgtgctatgcctacatgaagcaggaaggcgtggaagtgcgagtggccagaatcttcaacacctttgggccacgcatgcacatgaacgatgggcgagtagtcagcaacttcatcctgcaggcgctccagggggagccactcacggtatacggatccgggtctcagacaagggcgttccagtacgtcagcgatctagtgaatggcctcgtggctctcatgaacagcaacgtcagcagcccggtcaacctggggaacccagaagaacacacaatcctagaatttgctcagttaattaaaaaccttgttggtagcggaagtgaaattcagtttctctccgaagcccaggatgacccacagaaaagaaaaccagacatcaaaaaagcaaagctgatgctggggtgggagcccgtggtcccgctggaggaaggtttaaacaaagcaattcactacttccgtaaagaactcgagtaccaggcaaataatcagtacatccccaaaccaaagcctgccagaataaagaaaggacggactcgccacagctgaactcctcacttttaggacacaagactaccattgtacacttgatgggatgtatttttggcttttttttgttgtcgtttaaagaaagactttaacaggtgtcatgaagaacaaactggaatttcattctgaagcttgctttaatgaaatggatgtgcctaaaagctcccctcaaaaaactgcagattttgccttgcactttttgaatctctctttttatgtaaaatagcgtagatgcatctctgcgtattttcaagtttttttatcttgctgtgagagcatatgttgtgactgtcgttgacagttttatttactggtttctttgtgaagctgaaaaggaacattaagcgggacaaaaaatgccgattttatttatgaaagtgggtacttaataaatgagtcgttatactatgcataaagaaaaa

SEQ ID NO: 198070 - DNA, 502 bp, Homo sapiens
  Payload ID: 19070
  Gene Name: UDP-glucuronate decarboxylase 1
  ENST ID: ENST00000436241
  CDS Start-End: 345-502
agtttcctctcaaatgggaggatgcagcagtgccgctacttaactgaacgtctcgacagtctgatggggcggccctcagccttccggagcagcagtgggactgacctgtccagtgaggaagaaacactgaaccagatggaatggcctttggggatggaaaaaccccagtttacgctcatctcttctctcagctaacttttgtggagccctgttcccaaactggcctgggccagagcaccgtggaggggtatttgttgtaaatggaaggtttccaggcccgcctggaaatcctgaaggttgaccagatataccatctggcatctccagcctcccctccaaactacatgtataatcctatcaagacattaaagaccaatacgattgggacattaaacatgttggggctggcaaaacgagtcggtgcccgtctgctcctggcctccacatcggaggtgtatggagatcctgaagtccaccctcaaagtgaggattactggggcca

SEQ ID NO: 198071 - DNA, 682 bp, Homo sapiens
  Payload ID: 19070
  Gene Name: UDP-glucuronate decarboxylase 1
  ENST ID: ENST00000457835
  CDS Start-End: 111-682
attgtgcagcaggcgggcccccgcgcggtagggccctggacccgcgcggctcccggggatggtctatccaggaaaatggtgaactaaaaattgaaagcaagattgaagagatggttgaaccactaagagagaaaatcagagatttagaaaaaagctttacccagaaatacccaccagtaaagtttttatcagaaaaggatcggaaaagaattttgataacaggaggcgcagggttcgtgggctcccatctaactgacaaactcatgatggacggccacgaggtgaccgtggtggacaatttcttcacgggcaggaagagaaacgtggagcactggatcggacatgagaacttcgagttgattaaccacgacgtggtggagcccctctacatcgaggttgaccagatataccatctggcatctccagcctcccctccaaactacatgtataatcctatcaagacattaaagaccaatacgattgggacattaaacatgttggggctggcaaaacgagtcggtgcccgtctgctcctggcctccacatcggaggtgtatggagatcctgaagtccaccctcaaagtgaggattactggggccacgtgaatccaataggacctcgggcctgctacgatgaaggcaaacgtgttgcagagaccatgtgctatgcctacatgaagca

SEQ ID NO: 198072 - DNA, 701 bp, Homo sapiens
  Payload ID: 19070
  Gene Name: UDP-glucuronate decarboxylase 1
  ENST ID: ENST00000416298
  CDS Start-End: 298-701
ttctaagctgacagcttggattaacatttgtttccatggccccggatgcacactccacagtcctgcgcctccgctcctcactgaattggttttctccctgcaccgcgttttcccatatgtagctatattcccattcccgagcggtcttgactctaaaatcatatacacggtagagaaggagccctgaagctttacccagaaatacccaccagtaaagtttttatcagaaaaggatcggaaaagaattttgttgaccagatataccatctggcatctccagcctcccctccaaactacatgtataatcctatcaagacattaaagaccaatacgattgggacattaaacatgttggggctggcaaaacgagtcggtgcccgtctgctcctggcctccacatcggaggtgtatggagatcctgaagtccaccctcaaagtgaggattactggggccacgtgaatccaataggacctcgggcctgctacgatgaaggcaaacgtgttgcagagaccatgtgctatgcctacatgaagcaggaaggcgtggaagtgcgagtggccagaatcttcaacacctttgggccacgcatgcacatgaacgatgggcgagtagtcagcaacttcatcctgcaggcgctccagggggagccactcacggtatacggatccgggtctcagacaagggcgttccagtacgtcag

SEQ ID NO: 198073 - DNA, 800 bp, Homo sapiens
  Payload ID: 19070
  Gene Name: UDP-glucuronate decarboxylase 1
  ENST ID: ENST00000444193
  CDS Start-End: 438-800
ccggatgcacactccacagtcctgcgcctccgctcctcactgaattggttttctccctgcaccgcgttttcccatatgtagctatattcccattcccgagcggtcttgactctaaaatcatatacacggtagagaaggagccctgaagctttacccagaaatacccaccagtaaagtttttatcagaaaaggatcggaaaagaattttgataacaggaggcgcagggttcgtgggctcccatctaactgacaaactcatgatggacggccacgaggtgaccgtggtggacaatttcttcacgggcaggaagagaaacgtggagcactggatcggacatgagaacttcgagttgattaaccacgacgtggtggagcccctctacatcgaggttgaccagatataccatctggcatctccagcctcccctccaaactacatgtataatcctatcaagacattaaagaccaatacgattgggacattaaacatgttggggctggcaaaacgagtcggtgcccgtctgctcctggcctccacatcggaggtgtatggagatcctgaagtccaccctcaaagtgaggattactggggccacgtgaatccaataggacctcgggcctgctacgatgaaggcaaacgtgttgcagagaccatgtgctatgcctacatgaagcaggaaggcgtggaagtgcgagtggccagaatcttcaacacctttgggccacgcatgcacatgaacgatgggcgagtagtcagcaacttcatcctgcaggcgctccagggggagccactcacggta

SEQ ID NO: 198074 - DNA, 570 bp, Homo sapiens
  Payload ID: 19070
  Gene Name: UDP-glucuronate decarboxylase 1
  ENST ID: ENST00000441952
  CDS Start-End: 59-570
attgtgcagcaggcgggcccccgcgcggtagggccctggacccgcgcggctcccggggatggtgagcaaggcgctgctgcgcctcgtgtctgccgtcaaccgcaggaggatgaagctgctgctgggcatcgccttgctggcctacgtcgcctggctggcaaaacgagtcggtgcccgtctgctcctggcctccacatcggaggtgtatggagatcctgaagtccaccctcaaagtgaggattactggggccacgtgaatccaataggacctcgggcctgctacgatgaaggcaaacgtgttgcagagaccatgtgctatgcctacatgaagcaggaaggcgtggaagtgcgagtggccagaatcttcaacacctttgggccacgcatgcacatgaacgatgggcgagtagtcagcaacttcatcctgcaggcgctccagggggagccactcacggtatacggatccgggtctcagacaagggcgttccagtacgtcagcgatctagtgaatggcctcgtggctctcatgaacagcaacgtcagcagcccggtcaacctggtgagtgctcc

SEQ ID NO: 198075 - DNA, 2377 bp, Homo sapiens
  Payload ID: 19071
  Gene Name: UDP-N-acetylglucosamine pyrophosphorylase 1
  Uniprot ID: Q16222
  ENST ID: ENST00000271469
  CDS Start-End: 330-1898
cggccgcctccgcgtccgcgtcgtcgtctgtgctcccggcgctgacgtgtctgggcggtcggcttccactccttcaggcgtcggcagccactagtcgtggcgagaggggcggggtggccggggctggcgctccacttggcccccgctcccggcccgccccgccgccgcggccccccggatgagggtatatattcggagcgagcgcgggacgccgatgagtggccgcgcggaaggagctggagacggtcgtagctgcggtcgcgccgagaaaggtttacaggtacatacattacacccctatttctacaaagcttggctattagagcattatgaacattaatgacctcaaactcacgttgtccaaagctgggcaagagcacctactacgtttctggaatgagcttgaagaagcccaacaggtagaactttatgcagagctccaggccatgaactttgaggagctgaacttctttttccaaaaggccattgaaggttttaaccagtcttctcaccaaaagaatgtggatgcacgaatggaacctgtgcctcgagaggtattaggcagtgctacaagggatcaagatcagctccaggcctgggaaagtgaaggacttttccagatttctcagaataaagtagcagttcttcttctagctggtgggcaggggacaagactcggcgttgcatatcctaaggggatgtatgatgttggtttgccatcccgtaagacactttttcagattcaagcagagcgtatcctgaagctacagcaggttgctgaaaaatattatggcaacaaatgcattattccatggtatataatgaccagtggcagaacaatggaatctacaaaggagttcttcaccaagcacaagtactttggtttaaaaaaagagaatgtaatcttttttcagcaaggaatgctccccgccatgagttttgatgggaaaattattttggaagagaagaacaaagtttctatggctccagatgggaatggtggtctttatcgggcacttgcagcccagaatattgtggaggatatggagcaaagaggcatttggagcattcatgtctattgtgttgacaacatattagtaaaagtggcagacccacggttcattggattttgcattcagaaaggagcagactgtggagcaaaggtggtagagaaaacgaaccctacagaaccagttggagtggtttgccgagtggatggagtttaccaggtggtagaatatagtgagatttccctggcaacagctcaaaaacgaagctcagacggacgactgctgttcaatgcggggaacattgccaaccatttcttcactgtaccatttctgagagatgttgtcaatgtttatgaacctcagttgcagcaccatgtggctcaaaagaagattccttatgtggatacccaaggacagttaattaagccagacaaacccaatggaataaagatggaaaaatttgtctttgacatcttccagtttgcaaagaagtttgtggtatatgaagtattgcgagaagatgagttttccccactaaagaatgctgatagtcagaatgggaaagacaaccctactactgcaaggcatgctttgatgtcccttcatcattgctgggtcctcaatgcagggggccatttcatagatgaaaatggctctcgccttccagcaattccccgcagtgctacaaatgggaagtcagagaccatcacagctgatgtcaatcacaacttgaaggatgccaatgatgtaccaatccaatgtgaaatctctcctcttatctcctatgctggagaaggattagaaagttatgtggcagataaagaattccatgcacctctaatcatcgatgagaatggagttcatgagctggtgaaaaatggtatttgaaccagataccaagttttgtttgccacgataggaatagcttttatttttgatagaccaactgtgaacctacaagacgtcttggacaactgaagtttaaatatccacagggttttattttgcttgttgaactcttagagctattgcaaacttcccaagatccagatgactgaatttcagatagcatttttatgattcccaactcattgaaggtcttatttatataattttttccaagccaaggagaccattggccatccaggaaatttcgtacagctgaaatataggcaggatgttcaacatcagtttacttgcagctggaagcatttgtttttgaagttgtacatagtaataatatgtcattgtacatgttgaaaggtttctatggtactaaaagtttgttttattttatcaaacattaagcttttttaagaaaataattgggcagtgaaataaatgtatcttcttgtctctggagtgtc

SEQ ID NO: 198076 - DNA, 2066 bp, Homo sapiens
  Payload ID: 19071
  Gene Name: UDP-N-acetylglucosamine pyrophosphorylase 1
  Uniprot ID: Q16222
  ENST ID: ENST00000367924
  CDS Start-End: 33-1598
ctatttctacaaagcttggctattagagcattatgaacattaatgacctcaaactcacgttgtccaaagctgggcaagagcacctactacgtttctggaatgagcttgaagaagcccaacaggtagaactttatgcagagctccaggccatgaactttgaggagctgaacttctttttccaaaaggccattgaaggttttaaccagtcttctcaccaaaagaatgtggatgcacgaatggaacctgtgcctcgagaggtattaggcagtgctacaagggatcaagatcagctccaggcctgggaaagtgaaggacttttccagatttctcagaataaagtagcagttcttcttctagctggtgggcaggggacaagactcggcgttgcatatcctaaggggatgtatgatgttggtttgccatcccgtaagacactttttcagattcaagcagagcgtatcctgaagctacagcaggttgctgaaaaatattatggcaacaaatgcattattccatggtatataatgaccagtggcagaacaatggaatctacaaaggagttcttcaccaagcacaagtactttggtttaaaaaaagagaatgtaatcttttttcagcaaggaatgctccccgccatgagttttgatgggaaaattattttggaagagaagaacaaagtttctatggctccagatgggaatggtggtctttatcgggcacttgcagcccagaatattgtggaggatatggagcaaagaggcatttggagcattcatgtctattgtgttgacaacatattagtaaaagtggcagacccacggttcattggattttgcattcagaaaggagcagactgtggagcaaaggtggtagagaaaacgaaccctacagaaccagttggagtggtttgccgagtggatggagtttaccaggtggtagaatatagtgagatttccctggcaacagctcaaaaacgaagctcagacggacgactgctgttcaatgcggggaacattgccaaccatttcttcactgtaccatttctgagagatgttgtcaatgtttatgaacctcagttgcagcaccatgtggctcaaaagaagattccttatgtggatacccaaggacagttaattaagccagacaaacccaatggaataaagatggaaaaatttgtctttgacatcttccagtttgcaaagaagtttgtggtatatgaagtattgcgagaagatgagttttccccactaaagaatgctgatagtcagaatgggaaagacaaccctactactgcaaggcatgctttgatgtcccttcatcattgctgggtcctcaatgcagggggccatttcatagatgaaaatggctctcgccttccagcaattccccgtgctacaaatgggaagtcagagaccatcacagctgatgtcaatcacaacttgaaggatgccaatgatgtaccaatccaatgtgaaatctctcctcttatctcctatgctggagaaggattagaaagttatgtggcagataaagaattccatgcacctctaatcatcgatgagaatggagttcatgagctggtgaaaaatggtatttgaaccagataccaagttttgtttgccacgataggaatagcttttatttttgatagaccaactgtgaacctacaagacgtcttggacaactgaagtttaaatatccacagggttttattttgcttgttgaactcttagagctattgcaaacttcccaagatccagatgactgaatttcagatagcatttttatgattcccaactcattgaaggtcttatttatataattttttccaagccaaggagaccattggccatccaggaaatttcgtacagctgaaatataggcaggatgttcaacatcagtttacttgcagctggaagcatttgtttttgaagttgtacatagtaataatatgtcattgtacatgttgaaaggtttctatggtactaaaagtttgttttattttatcaaacattaagcttttttaagaaaataattgggcagtgaaataaatgtatcttcttgtc

SEQ ID NO: 198077 - DNA, 2069 bp, Homo sapiens
  Payload ID: 19071
  Gene Name: UDP-N-acetylglucosamine pyrophosphorylase 1
  Uniprot ID: Q16222
  ENST ID: ENST00000367925
  CDS Start-End: 33-1601
ctatttctacaaagcttggctattagagcattatgaacattaatgacctcaaactcacgttgtccaaagctgggcaagagcacctactacgtttctggaatgagcttgaagaagcccaacaggtagaactttatgcagagctccaggccatgaactttgaggagctgaacttctttttccaaaaggccattgaaggttttaaccagtcttctcaccaaaagaatgtggatgcacgaatggaacctgtgcctcgagaggtattaggcagtgctacaagggatcaagatcagctccaggcctgggaaagtgaaggacttttccagatttctcagaataaagtagcagttcttcttctagctggtgggcaggggacaagactcggcgttgcatatcctaaggggatgtatgatgttggtttgccatcccgtaagacactttttcagattcaagcagagcgtatcctgaagctacagcaggttgctgaaaaatattatggcaacaaatgcattattccatggtatataatgaccagtggcagaacaatggaatctacaaaggagttcttcaccaagcacaagtactttggtttaaaaaaagagaatgtaatcttttttcagcaaggaatgctccccgccatgagttttgatgggaaaattattttggaagagaagaacaaagtttctatggctccagatgggaatggtggtctttatcgggcacttgcagcccagaatattgtggaggatatggagcaaagaggcatttggagcattcatgtctattgtgttgacaacatattagtaaaagtggcagacccacggttcattggattttgcattcagaaaggagcagactgtggagcaaaggtggtagagaaaacgaaccctacagaaccagttggagtggtttgccgagtggatggagtttaccaggtggtagaatatagtgagatttccctggcaacagctcaaaaacgaagctcagacggacgactgctgttcaatgcggggaacattgccaaccatttcttcactgtaccatttctgagagatgttgtcaatgtttatgaacctcagttgcagcaccatgtggctcaaaagaagattccttatgtggatacccaaggacagttaattaagccagacaaacccaatggaataaagatggaaaaatttgtctttgacatcttccagtttgcaaagaagtttgtggtatatgaagtattgcgagaagatgagttttccccactaaagaatgctgatagtcagaatgggaaagacaaccctactactgcaaggcatgctttgatgtcccttcatcattgctgggtcctcaatgcagggggccatttcatagatgaaaatggctctcgccttccagcaattccccgcagtgctacaaatgggaagtcagagaccatcacagctgatgtcaatcacaacttgaaggatgccaatgatgtaccaatccaatgtgaaatctctcctcttatctcctatgctggagaaggattagaaagttatgtggcagataaagaattccatgcacctctaatcatcgatgagaatggagttcatgagctggtgaaaaatggtatttgaaccagataccaagttttgtttgccacgataggaatagcttttatttttgatagaccaactgtgaacctacaagacgtcttggacaactgaagtttaaatatccacagggttttattttgcttgttgaactcttagagctattgcaaacttcccaagatccagatgactgaatttcagatagcatttttatgattcccaactcattgaaggtcttatttatataattttttccaagccaaggagaccattggccatccaggaaatttcgtacagctgaaatataggcaggatgttcaacatcagtttacttgcagctggaagcatttgtttttgaagttgtacatagtaataatatgtcattgtacatgttgaaaggtttctatggtactaaaagtttgttttattttatcaaacattaagcttttttaagaaaataattgggcagtgaaataaatgtatcttcttgtc

SEQ ID NO: 198078 - DNA, 2294 bp, Homo sapiens
  Payload ID: 19071
  Gene Name: UDP-N-acetylglucosamine pyrophosphorylase 1
  Uniprot ID: Q16222
  ENST ID: ENST00000367926
  CDS Start-End: 303-1820
ctgtgctcccggcgctgacgtgtctgggcggtcggcttccactccttcaggcgtcggcagccactagtcgtggcgagaggggcggggtggccggggctggcgctccacttggcccccgctcccggcccgccccgccgccgcggccccccggatgagggtatatattcggagcgagcgcgggacgccgatgagtggccgcgcggaaggagctggagacggtcgtagctgcggtcgcgccgagaaaggtttacaggtacatacattacacccctatttctacaaagcttggctattagagcattatgaacattaatgacctcaaactcacgttgtccaaagctgggcaagagcacctactacgtttctggaatgagcttgaagaagcccaacaggtagaactttatgcagagctccaggccatgaactttgaggagctgaacttctttttccaaaaggccattgaaggttttaaccagtcttctcaccaaaagaatgtggatgcacgaatggaacctgtgcctcgagaggtattaggcagtgctacaagggatcaagatcagctccaggcctgggaaagtgaaggacttttccagatttctcagaataaagtagcagttcttcttctagctggtgggcaggggacaagactcggcgttgcatatcctaaggggatgtatgatgttggtttgccatcccgtaagacactttttcagattcaagcagagcgtatcctgaagctacagcaggttgctgaaaaatattatggcaacaaatgcattattccatggtatataatgaccagtggcagaacaatggaatctacaaaggagttcttcaccaagcacaagtactttggtttaaaaaaagagaatgtaatcttttttcagcaaggaatgctccccgccatgagttttgatgggaaaattattttggaagagaagaacaaagtttctatggctccagatgggaatggtggtctttatcgggcacttgcagcccagaatattgtggaggatatggagcaaagaggcatttggagcattcatgtctattgtgttgacaacatattagtaaaagtggcagacccacggttcattggattttgcattcagaaaggagcagactgtggagcaaaggtggtagagaaaacgaaccctacagaaccagttggagtggtttgccgagtggatggagtttaccaggtggtagaatatagtgagatttccctggcaacagctcaaaaacgaagctcagacggacgactgctgttcaatgcggggaacattgccaaccatttcttcactgtaccatttctgagagatgttgtcaatgtttatgaacctcagttgcagcaccatgtggctcaaaagaagattccttatgtggatacccaaggacagttaattaagccagacaaacccaatggaataaagatggaaaaatttgtctttgacatcttccagtttgcaaagaagtttgtggtatatgaagtattgcgagaagatgagttttccccactaaagaatgctgatagtcagaatgggaaagacaaccctactactgcaaggcatgctttgatgtcccttcatcattgctgggtcctcaatgcagggggccatttcatagatgaaaatggctctcgccttccagcaattccccgcttgaaggatgccaatgatgtaccaatccaatgtgaaatctctcctcttatctcctatgctggagaaggattagaaagttatgtggcagataaagaattccatgcacctctaatcatcgatgagaatggagttcatgagctggtgaaaaatggtatttgaaccagataccaagttttgtttgccacgataggaatagcttttatttttgatagaccaactgtgaacctacaagacgtcttggacaactgaagtttaaatatccacagggttttattttgcttgttgaactcttagagctattgcaaacttcccaagatccagatgactgaatttcagatagcatttttatgattcccaactcattgaaggtcttatttatataattttttccaagccaaggagaccattggccatccaggaaatttcgtacagctgaaatataggcaggatgttcaacatcagtttacttgcagctggaagcatttgtttttgaagttgtacatagtaataatatgtcattgtacatgttgaaaggtttctatggtactaaaagtttgttttattttatcaaacattaagcttttttaagaaaataattgggcagtgaaataaatgtatcttcttgtctctgga

SEQ ID NO: 198079 - DNA, 3201 bp, Homo sapiens
  Payload ID: 19072
  Gene Name: UDP-N-acetylglucosamine pyrophosphorylase 1 like 1
  Uniprot ID: Q3KQV9
  ENST ID: ENST00000360271
  CDS Start-End: 237-1391
gtaccgtgtggggctgcccagccggaagaccctgtaccagctgcaggcggagcggattcggcgggtggagcagctggccggtgagcgccacgggacccgctgcaccgtcccctggtgtgtcctgcctgccctacctcggcccggaggtacccttccccacgcccccccacatccccgctccagacgcgagccccaaccccggcacagaccgggacattgcccagaaccggcccaaaatggggcctggccccagccccaactggacactggaccccgaaccccgatgccggctctggtccgagccccgtctgcctgcagggccaggcgtactcgcggccggctcaccgcgcctcccttgcaggtacgtcatgaccagcgagttcactctggggcccacggccgagttcttcagggagcacaacttcttccacctggaccccgccaacgtggtcatgtttgagcagcgcctgctgcctgctgtgacctttgatggcaaggttatcctggagcggaaagacaaagttgccatggccccagacggcaacgggggcctctactgcgcgctggaggaccacaagatcctggaggacatggagcgccggggagtggagtttgtgcacgtgtactgtgtggacaacatcctggtgcggctggcggaccctgtcttcatcggcttctgtgtgttgcagggcgcagactgtggcgccaaggtggtggaaaaggcataccccgaggagcccgtgggcgtggtgtgccaggtggacggtgtcccccaggtggtggagtacagcgagatcagtcctgagaccgcacagctacgtgcctccgacgggagcctgctgtacaatgcaggcaacatctgcaaccacttcttcacccgaggcttccttaaggcggtcaccagggagtttgagcctttgctgaagccacacgtggctgtgaagaaggtcccgtatgtggatgaggaggggaatctggtaaagccgctaaaaccgaacgggataaagatggagaagtttgtgtttgatgtgttccggtttgctaagaactttgctgccttggaagtgctgcgggaggaggaattttccccactgaagaacgcagagccagccgacagggacagtccccgcaccgctcgccaggccctgctcacccagcactaccggtgggctctgcgggccggggcccgcttcctggatgcccatggggcctggctcccagagctgcccagcttgcccccaaatggagaccctccggccatctgtgagatatcgcccttggtgtcttactctggagagggtttagaagtgtacctgcaaggccgggagttccagtccccgctcatcctggatgaagaccaggccagggagccgcagctgcaggagtcctgacccgcccagactgtccccagactcccccgagacctgccagccccggcatcctggaagtcccgactccccccagacctgccagccccggcgtcctggagctgggggctacagcccagcctgagctctgggtgggaaagcagcctgccccatgcttccagcctgcagaacacagaatgaaacatgctggtagactccacgagggcagggcctctcctgtcgcctctggacacaagtggcgacagcctgctgggggctctgtggctccattcctggctgtggggtctagtcaagaggcagagggacttgggacctgggagaatggggctgagaggaggcttcgggttggggcccaagggaggtgtggtgtcatctggggagaacaggagggcatgtccctttgggagcccgccttgtggatccaccacaccccaccgagcactagaagctgcataagctacacaggatgtgcttctgcagcctacagatgcagaaccagaatgagggggacaattccacccactcgagggctgccccctcttccttagcagacgaaccagtaatgggggcaaggctggggcatcccagcccacacaccctggatgcccagcaaggccacagaaagagcctgatgtccatgatccaggtggctctgagaagcttggcctggacacctgagcctgcggccggtactcctgccttctccccatctatccccaaggcctctgcctctcagcctcttccatggtcggtttaggctgctgagttttctgtgcttccccaagaaccagtgggatcaatgccggcggcctctgtgatggttgctgactaatccgggatttcatgagtcagaggcaccacccctcaccccagctgcctgctgcttctgacggatcttggtgctcaggctgcctggctctccgagtgaggacgcagcctccatatttggtgcactcaggcatggctgggacaagccagctgccccagggttcttcccctggtgattctcgcctgctttctcatctcaggggaggcagtggcacctccctctccctgctgacatgaagagagctatgatatgccactgctgccaactcatcctctgcccccacctcgaaacccacagtccccagtggagggccactactcatccccattggtttcccaggggaggggtgttgtctggaagggcaggttcagatgcagccttccagatttagaggcactgggaggacagtggctgagtggaggcgcccagacctgggcaggcagcaggctcaggcccacaccttgtgatttttgaaaccaaagcccagaagatgatgtttacttctctctccctggctctgcccttcttactgcaaaccatgctgtgccttagggcccttctcatagctgttcctcatggccatgactggaacagggatgcaacctctttctacacaagcacagttagttgggtgaagtctttttttttgtttgttttagacggagtttcactcttgttgcccaggctggagtgaagtggcgtgaccttggctcactgcaacctccaggccagcctcagcctccctagtagctgggactacaggcacccactaccacgcctggctaattctttgtatttttagtagagatggggtttgaccgtgttagccaggatggtctcgatctcctgacctcgtgatccacccacctcggcctcccaaagtgctgggattataggtgtgagccaccgcgccgggccggttgctggcatcttaatgttctgtaggtggaatatttccaataaacacaaggtgccgtaattgac

SEQ ID NO: 198080 - DNA, 3365 bp, Homo sapiens
  Payload ID: 19072
  Gene Name: UDP-N-acetylglucosamine pyrophosphorylase 1 like 1
  Uniprot ID: Q3KQV9
  ENST ID: ENST00000409858
  CDS Start-End: 33-1556
cgagtgccgacttgacagacggcagcggcgacatggcttcggagcaggacgtgcgcgcccggctgcagcgcgctggccaggagcacctcctgcgcttctgggccgagctggcgccggagccacgagccgcgctgctggcggagctggcgctgctggagcccgaggcgctgcgcgagcactgccggcgggcggcggaggcctgcgcgcgcccccacggcccgccgcccgacttggccgcgcgcctgcggcccctgcccccagagcgcgtgggcagggccagccgcagcgaccccgagacacggcggcgctgggaggaggaaggtttccgtcagatttctctgaacaaggtggccgtcctgctgctggctggggggcagggcactcgcctgggcgtgacctaccccaagggtatgtaccgtgtggggctgcccagccggaagaccctgtaccagctgcaggcggagcggattcggcgggtggagcagctggccggtgagcgccacgggacccgctgcaccgtcccctggtacgtcatgaccagcgagttcactctggggcccacggccgagttcttcagggagcacaacttcttccacctggaccccgccaacgtggtcatgtttgagcagcgcctgctgcctgctgtgacctttgatggcaaggttatcctggagcggaaagacaaagttgccatggccccagacggcaacgggggcctctactgcgcgctggaggaccacaagatcctggaggacatggagcgccggggagtggagtttgtgcacgtgtactgtgtggacaacatcctggtgcggctggcggaccctgtcttcatcggcttctgtgtgttgcagggcgcagactgtggcgccaaggtggtggaaaaggcataccccgaggagcccgtgggcgtggtgtgccaggtggacggtgtcccccaggtggtggagtacagcgagatcagtcctgagaccgcacagctacgtgcctccgacgggagcctgctgtacaatgcaggcaacatctgcaaccacttcttcacccgaggcttccttaaggcggtcaccagggagtttgagcctttgctgaagccacacgtggctgtgaagaaggtcccgtatgtggatgaggaggggaatctggtaaagccgctaaaaccgaacgggataaagatggagaagtttgtgtttgatgtgttccggtttgctaagaactttgctgccttggaagtgctgcgggaggaggaattttccccactgaagaacgcagagccagccgacagggacagtccccgcaccgctcgccaggccctgctcacccagcactaccggtgggctctgcgggccggggcccgcttcctggatgcccatggggcctggctcccagagctgcccagcttgcccccaaatggagaccctccggccatctgtgagatatcgcccttggtgtcttactctggagagggtttagaagtgtacctgcaaggccgggagttccagtccccgctcatcctggatgaagaccaggccagggagccgcagctgcaggagtcctgacccgcccagactgtccccagactcccccgagacctgccagccccggcatcctggaagtcccgactccccccagacctgccagccccggcgtcctggagctgggggctacagcccagcctgagctctgggtgggaaagcagcctgccccatgcttccagcctgcagaacacagaatgaaacatgctggtagactccacgagggcagggcctctcctgtcgcctctggacacaagtggcgacagcctgctgggggctctgtggctccattcctggctgtggggtctagtcaagaggcagagggacttgggacctgggagaatggggctgagaggaggcttcgggttggggcccaagggaggtgtggtgtcatctggggagaacaggagggcatgtccctttgggagcccgccttgtggatccaccacaccccaccgagcactagaagctgcataagctacacaggatgtgcttctgcagcctacagatgcagaaccagaatgagggggacaattccacccactcgagggctgccccctcttccttagcagacgaaccagtaatgggggcaaggctggggcatcccagcccacacaccctggatgcccagcaaggccacagaaagagcctgatgtccatgatccaggtggctctgagaagcttggcctggacacctgagcctgcggccggtactcctgccttctccccatctatccccaaggcctctgcctctcagcctcttccatggtcggtttaggctgctgagttttctgtgcttccccaagaaccagtgggatcaatgccggcggcctctgtgatggttgctgactaatccgggatttcatgagtcagaggcaccacccctcaccccagctgcctgctgcttctgacggatcttggtgctcaggctgcctggctctccgagtgaggacgcagcctccatatttggtgcactcaggcatggctgggacaagccagctgccccagggttcttcccctggtgattctcgcctgctttctcatctcaggggaggcagtggcacctccctctccctgctgacatgaagagagctatgatatgccactgctgccaactcatcctctgcccccacctcgaaacccacagtccccagtggagggccactactcatccccattggtttcccaggggaggggtgttgtctggaagggcaggttcagatgcagccttccagatttagaggcactgggaggacagtggctgagtggaggcgcccagacctgggcaggcagcaggctcaggcccacaccttgtgatttttgaaaccaaagcccagaagatgatgtttacttctctctccctggctctgcccttcttactgcaaaccatgctgtgccttagggcccttctcatagctgttcctcatggccatgactggaacagggatgcaacctctttctacacaagcacagttagttgggtgaagtctttttttttgtttgttttagacggagtttcactcttgttgcccaggctggagtgaagtggcgtgaccttggctcactgcaacctccaggccagcctcagcctccctagtagctgggactacaggcacccactaccacgcctggctaattctttgtatttttagtagagatggggtttgaccgtgttagccaggatggtctcgatctcctgacctcgtgatccacccacctcggcctcccaaagtgctgggattataggtgtgagccaccgcgccgggccggttgctggcatcttaatgttctgtaggtggaatatttccaataaacacaaggtgccgtaattga

SEQ ID NO: 198081 - DNA, 645 bp, Homo sapiens
  Payload ID: 19072
  Gene Name: UDP-N-acetylglucosamine pyrophosphorylase 1 like 1
  ENST ID: ENST00000476184
  CDS Start-End: 8-307
cggcgacatggcttcggagcaggacgtgcgcgcccggctgcagcgcgctggccaggagcacctcctgcgcttctgggccgagctggcgccggagccacgagccgcgctgctggcggagctggcgctgctggagcccgaggcgctgcgcgagcactgccggcgggcggcggaggcctgcgcgcgcccccacggcccgccgcccgacttggccgcgcgcctgcggcccctgcccccagagcgcgtgggcagggccagccgcagcgaccccgagacacggcggcgctgggaggaggaaggtacgtcatgaccagcgagttcactctggggcccacggccgagttcttcagggagcacaacttcttccacctggaccccgccaacgtggtcatgtttgagcagcgcctgctgcctgctgtgacctttgatggcaaggttatcctggagcggaaagacaaagttgccatggccccagacggcaacgggggcctctactgcgcgctggaggaccacaagatcctggaggacatggagcgccggggagtggagtttgtgcacgtgtactgtgtggacaacatcctggtgcggctggcggaccctgtcttcatcggcttctgtgtgttgcagggcgcagactgtggcgccaag

SEQ ID NO: 198082 - DNA, 995 bp, Homo sapiens
  Payload ID: 19073
  Gene Name: UEV and lactate/malate dehyrogenase domains
  Uniprot ID: Q8IX04
  ENST ID: ENST00000300038
  CDS Start-End: 28-675
gggacctagctcgggaccggcctggagatggagttcgactgcgagggcctgagacggctgcttggcaagtacaagttcagggacctaactgtggaagaactaaggaatgtaaatgtatttttcccacatttcaaatattccatggacacctatgtttttaaagatagttctcagaaagacctgctgaattttactggcacaattcctgtgatgtatcagggtaatacatataacataccaattcgtttctggattttggattctcaccctttcgctccccctatttgcttcttgaagccaactgcaaatatgggaatcttagtcggaaaacatgtggatgctcaaggcagaatatatttgccctatctccaaaactggagccatcctaaatctgtcattgttggattaattaaagaaatgattgccaagtttcaagaggaacttcccatgtattctctatcatcatctgatgaggcacggcaggtagacttgctagcctatattgcaaaaatcactgaaggtgtttcagatacaaattcaaagagctgggcaaatcatgagaataaaacagtcaataaaattactgtggttggaggtggagaactcggtattgcctgcacattagcaatttcagcaaaggtggagtctcgctctgttacccaggctggagtgtagtggtacaatcttggctcactacagcctccgcctcctgggttcaagcgattctcctgcctcagcctccagagtagctgggactacaggcatgcgccacgacgcccagctaatttttgtatttttagcagagacagggttttgccatgttggccaggctggtctcgaacttctgacctcaagtgatccacctgccctggcctcccaaagtgctgggattacaagtgtgagccaccgtacctggcctgctattacctcttaattagaatttgagttgtattcagtcttttgtcactaaataaatgcttctataaacatttcaa

SEQ ID NO: 198083 - DNA, 1799 bp, Homo sapiens
  Payload ID: 19073
  Gene Name: UEV and lactate/malate dehyrogenase domains
  Uniprot ID: Q8IX04
  ENST ID: ENST00000320750
  CDS Start-End: 33-1106
gtcctgggacctagctcgggaccggcctggagatggagttcgactgcgagggcctgagacggctgcttggcaagtacaagttcagggacctaactgtggaagaactaaggaatgtaaatgtatttttcccacatttcaaatattccatggacacctatggtaatacatataacataccaattcgtttctggattttggattctcaccctttcgctccccctatttgcttcttgaagccaactgcaaatatgggaatcttagtcggaaaacatgtggatgctcaaggcagaatatatttgccctatctccaaaactggagccatcctaaatctgtcattgttggattaattaaagaaatgattgccaagtttcaagaggaacttcccatgtattctctatcatcatctgatgaggcacggcaggtagacttgctagcctatattgcaaaaatcactgaaggtgtttcagatacaaattcaaagagctgggcaaatcatgagaataaaacagtcaataaaattactgtggttggaggtggagaactcggtattgcctgcacattagcaatttcagcaaagggtattgcagacaggcttgtcctcttagacctctcagaagggactaaaggagccacgatggaccttgaaatcttcaaccttcctaatgtggagatcagcaaagatttgtctgcctctgctcattccaaggtggtgatcttcacagtcaactctttgggtagttctcagtcgtaccttgatgtggtacagagcaatgtggatatgttcagagcccttgtcccagctctgggacattatagtcaacacagtgtcctgctcgttgcatctcaaccagtggaaatcatgacctatgtaacatggaaactgagtacatttcctgcaaatcgagtgatcggaattggatgtaatctggattcacagagattacagtatattattacaaatgttttgaaggcacagacttcaggcaaagaagtatgggttattggcgagcaaggagaagacaaagtgctcacatggagtggccaagaagaagtagtgagtcatacctctcaagtgcagctgtccaacagggatattatgatataaatagtgaagtgtttttaagtttgccttgcatccttggaaccaatggagtatctgaagttatcaaaaccacactgaaagaagatacagttactgagaaactccaaagcagtgcatcctcaatccacagtctccaacaacagttaaaactttgattctcaaatgcaatttgagaggctggacttctacctaaagggaaaagtcatttaattttacctatatataggtttgaggatttctgtatcctgctacttacttttacaaactgcttggttaaagtagagggtttcttgattagctttgtgatgtaaatccttaaggagttatacaaggaggggaaaaattaattttatttggggttcttgagatatctatgctgttctttaaatctacagcaggggtaaacattcatctgcagtgtgcatcaatttaaatcatatatcctaaactaaaagcacaattcatacttcgggaatattttataagtaatatatctttaaaagaaaattaccctttgacttttataatcaacataagttccaggcccagtatggatttacaaaatctgtgtcagttgtacattcacaggatccacagcttaagttactaatgtttcttgtgtaaaatcctgttggtagtaatagtaaagcattgtatttcccttcttcaaattaattacctaccaaaaaatggaaa

SEQ ID NO: 198084 - DNA, 1848 bp, Homo sapiens
  Payload ID: 19073
  Gene Name: UEV and lactate/malate dehyrogenase domains
  Uniprot ID: Q8IX04
  ENST ID: ENST00000379387
  CDS Start-End: 53-1402
aagaaggtccgggggctggagtcctgggacctagctcgggaccggcctggagatggagttcgactgcgagggcctgagacggctgcttggcaagtacaagttcagggacctaactgtggaagaactaaggaatgtaaatgtatttttcccacatttcaaatattccatggacacctatggtaatacatataacataccaattcgtttctggattttggattctcaccctttcgctccccctatttgcttcttgaagccaactgcaaatatgggaatcttagtcggaaaacatgtggatgctcaaggcagaatatatttgccctatctccaaaactggagccatcctaaatctgtcattgttggattaattaaagaaatgattgccaagtttcaagaggaacttcccatgtattctctatcatcatctgatgaggcacggcaggtagacttgctagcctatattgcaaaaatcactgaaggtgtttcagatacaaattcaaagagctgggcaaatcatgagaataaaacagtcaataaaattactgtggttggaggtggagaactcggtattgcctgcacattagcaatttcagcaaagggtattgcagacaggcttgtcctcttagacctctcagaagggactaaaggagccacgatggaccttgaaatcttcaaccttcctaatgtggagatcagcaaagatttgtctgcctctgctcattccaaggtggtgatcttcacagtcaactctttgggtagttctcagtcgtaccttgatgtggtacagagcaatgtggatatgttcagagcccttgtcccagctctgggacattatagtcaacacagtgtcctgctcgttgcatctcaaccagtggaaatcatgacctatgtaacatggaaactgagtacatttcctgcaaatcgagtgatcggaattggatgtaatctggattcacagagattacagtatattattacaaatgttttgaaggcacagacttcaggcaaagaagtatgggttattggcgagcaaggagaagacaaagtgctcacatggagtggccaagaagaagtagtgagtcatacctctcaagtgcagctgtccaacagagccatggaactgctaagagtaaaaggtcaaagatcctggtctgttggactatcagtagctgacatggttgacagtattgtaaacaataagaagaaagtgcattctgtatcagctttagcaaagggatattatgatataaatagtgaagtgtttttaagtttgccttgcatccttggaaccaatggagtatctgaagttatcaaaaccacactgaaagaagatacagttactgagaaactccaaagcagtgcatcctcaatccacagtctccaacaacagttaaaactttgattctcaaatgcaatttgagaggctggacttctacctaaagggaaaagtcatttaattttacctatatataggtttgaggatttctgtatcctgctacttacttttacaaactgcttggttaaagtagagggtttcttgattagctttgtgatgtaaatccttaaggagttatacaaggaggggaaaaattaattttatttggggttcttgagatatctatgctgttctttaaatctacagcaggggtaaacattcatctgcagtgtgcatcaatttaaatcatatatcctaaactaaaagcacaattcatacttcgggaatattttataagtaatatatctttaaaagaaaattaccctttgacttttataatcaacataagttccaggcccagtatggatttacaaaatctgtgtcagttgtacattcacaggatccacagctta

SEQ ID NO: 198085 - DNA, 1354 bp, Homo sapiens
  Payload ID: 19073
  Gene Name: UEV and lactate/malate dehyrogenase domains
  ENST ID: ENST00000396196
  CDS Start-End: 64-261
agcaagtccggaagaaggtccgggggctggagtcctgggacctagctcgggaccggcctggagatggagttcgactgcgagggcctgagacggctgcttggcaagtacaagttcagggacctaactgtggaagaactaaggaatgtaaatgtatttttcccacatttcaaatattccatggacacctatgtttttaaagatagttctcagaaagacctgctgaattttactggcacaattcctgtgatgtatcaggcctaaatctgtcattgttggattaattaaagaaatgattgccaagtttcaagaggaacttcccatgtattctctatcatcatctgatgaggcacggcaggtagacttgctagcctatattgcaaaaatcactgaaggtgtttcagatacaaattcaaagagctgggcaaatcatgagaataaaacagtcaataaaattactgtggttggaggtggagaactcggtattgcctgcacattagcaatttcagcaaagggtattgcagacaggcttgtcctcttagacctctcagaagggactaaaggagccacgatggaccttgaaatcttcaaccttcctaatgtggagatcagcaaagatttgtctgcctctgctcattccaaggtggtgatcttcacagtcaactctttgggtagttctcagtcgtaccttgatgtggtacagagcaatgtggatatgttcagagcccttgtcccagctctgggacattatagtcaacacagtgtcctgctcgttgcatctcaaccagtggaaatcatgacctatgtaacatggaaactgagtacatttcctgcaaatcgagtgatcggaattggatgtaatctggattcacagagattacagtatattattacaaatgttttgaaggcacagacttcaggcaaagaagtatgggttattggcgagcaaggagaagacaaagtgctcacatggagtggccaagaagaagtagtgagtcatacctctcaagtgcagctgtccaacagagccatggaactgctaagagtaaaaggtcaaagatcctggtctgttggactatcagtagctgacatggttgacagtattgtaaacaataagaagaaagtgcattctgtatcagctttagcaaagggatattatgatataaatagtgaagtgtttttaagtttgccttgcatccttggaaccaatggagtatctgaagttatcaaaaccacactgaaagaagatacagttactgagaaactccaaagcagtgcatcctcaatccacagtctccaacaacagttaaaactttgattctcaaatgcaatttgagaggctggacttctacctaaa

SEQ ID NO: 198086 - DNA, 4156 bp, Homo sapiens
  Payload ID: 19073
  Gene Name: UEV and lactate/malate dehyrogenase domains
  Uniprot ID: Q8IX04
  ENST ID: ENST00000396197
  CDS Start-End: 30-1445
ctgggacctagctcgggaccggcctggagatggagttcgactgcgagggcctgagacggctgcttggcaagtacaagttcagggacctaactgtggaagaactaaggaatgtaaatgtatttttcccacatttcaaatattccatggacacctatgtttttaaagatagttctcagaaagacctgctgaattttactggcacaattcctgtgatgtatcagggtaatacatataacataccaattcgtttctggattttggattctcaccctttcgctccccctatttgcttcttgaagccaactgcaaatatgggaatcttagtcggaaaacatgtggatgctcaaggcagaatatatttgccctatctccaaaactggagccatcctaaatctgtcattgttggattaattaaagaaatgattgccaagtttcaagaggaacttcccatgtattctctatcatcatctgatgaggcacggcaggtagacttgctagcctatattgcaaaaatcactgaaggtgtttcagatacaaattcaaagagctgggcaaatcatgagaataaaacagtcaataaaattactgtggttggaggtggagaactcggtattgcctgcacattagcaatttcagcaaagggtattgcagacaggcttgtcctcttagacctctcagaagggactaaaggagccacgatggaccttgaaatcttcaaccttcctaatgtggagatcagcaaagatttgtctgcctctgctcattccaaggtggtgatcttcacagtcaactctttgggtagttctcagtcgtaccttgatgtggtacagagcaatgtggatatgttcagagcccttgtcccagctctgggacattatagtcaacacagtgtcctgctcgttgcatctcaaccagtggaaatcatgacctatgtaacatggaaactgagtacatttcctgcaaatcgagtgatcggaattggatgtaatctggattcacagagattacagtatattattacaaatgttttgaaggcacagacttcaggcaaagaagtatgggttattggcgagcaaggagaagacaaagtgctcacatggagtggccaagaagaagtagtgagtcatacctctcaagtgcagctgtccaacagagccatggaactgctaagagtaaaaggtcaaagatcctggtctgttggactatcagtagctgacatggttgacagtattgtaaacaataagaagaaagtgcattctgtatcagctttagcaaagggatattatgatataaatagtgaagtgtttttaagtttgccttgcatccttggaaccaatggagtatctgaagttatcaaaaccacactgaaagaagatacagttactgagaaactccaaagcagtgcatcctcaatccacagtctccaacaacagttaaaactttgattctcaaatgcaatttgagaggctggacttctacctaaagggaaaagtcatttaattttacctatatataggtttgaggatttctgtatcctgctacttacttttacaaactgcttggttaaagtagagggtttcttgattagctttgtgatgtaaatccttaaggagttatacaaggaggggaaaaattaattttatttggggttcttgagatatctatgctgttctttaaatctacagcaggggtaaacattcatctgcagtgtgcatcaatttaaatcatatatcctaaactaaaagcacaattcatacttcgggaatattttataagtaatatatctttaaaagaaaattaccctttgacttttataatcaacataagttccaggcccagtatggatttacaaaatctgtgtcagttgtacattcacaggatccacagcttaagttactaatgtttcttgtgtaaaatcctgttggtagtaatagtaaagcattgtatttcccttcttcaaattaattacctaccaaaaaatggaaaagaattttacatgcactttaaaatagtaaaatggaaagtgaatttttaaaatatatgcattaaaagtttactttaatttccagtgggacttcctttatgaaattttccataacctcttcctggagtattacaagatctccaacatctcataaactaattgtgatattagtggaaccataagcaaatatatatttttagtggaaatagattatgaatgaaagccaagcaccttactttaaagccaaaatatgagattttcattaaaaacattggtcataatagggagaggttttttatttgttctgagcaaatcctttaacctctcctgatgatacagttcagagtacacacactttggtgatggatcaagagcaatattttcttatgtgaaagatagcttattattactattgtgacatacaactaatagtaacagttaacatcaacacttcatatataccaggcagcatgataagcactttattattttactgaatcctcacaacagaccactgaggtagggactattgccatcatcattttataaaaggaaattgaggtttagtcctcaagaagtcttggctattaaggggcacttatccatacaacctctactttttctaggcactaaaagggggaaaaggcttaatagccaaaatagttatcaaaagaccctaaagctggggtcctgtacaccatgaaaggattactttcattctcatgtaagggcatgcttttataaaaaacaaacatgggctaggcgcagtgactcacgcctgtaatcccagcaccttgggaggctgaggcgggcagatcacgaggtcaggagattgagatcatcctggctaacatggtgaaaccctgtctctactaaaaatacaaaaagttagccaggcgtggtggcaggtgcctgtagtcccagctactcggaaggctgaggcaagagaatggcgtgaacccggtaggtggagcttgcagtgagcagagatcgcgccactgcactccagcctgggcgacagagcaagactccgtctcaaaaaaaaaaaaaaaaagtttaaaaattagccaggtgtggtgatgtgcacctgtagttccagctactcaggagggtgaggcaggaggatcacttgagcccagaagttcaagattgcaatgagctatgatcatgctactgcactccagcctaggcaacagagtgagaccctgtctctaaaaaaataaaaataaagcaagcatataataggttaatccagatggagttaggagggtttataagggcagacacatcctagtaaagaggaaataggcaaactaatgctgttttagtgtaataaggaatgcttataatgatgaactttagtcataaagaaaaggtgaaattatattcagtaacccatgttaggaaagcagaaaactatttaatatgcttggaaagattccaaccagagttaactgaataaaaaccttggacatttgaagagaaaagcatttagttctatctaatttcaatatgcacgtgaattagttcatgttactctaacaatgtattcttactgtccttttttatgaaataggaaagtaaaactgaaagaactatttcttgtgtttttaaaactagccttttctaatatttgatatctaattaaagttagataatatgtaatatgcttttgaacaataatctaaccagaaaatattgtataataaattaccaagaaatcattacattaattataaaaggaacatgtcaatacaacaaatgtttatttaacacctactgttactccaaatactgtgttagaatttgactattcgaagatgaataatagtctttgccctctggaaggccacaatgtagaagtaattctctgtatcagatatttccttgagtgttaagtgtattagtaatcatgttgtaaatcccagtgtaagtcaagaagcaatatcaccaccaccacctccctatgattttgtgataatttggcattttcaatgcttgttaactttcatgttttcatttttatgaaatcatgcagagcttgttataatttttagtggggtttggattaaaatgcttttttgatgtagcagaagatacattttttcccattttacattgttttccttaaatattaagaataatgagtaaaataaactgattttaaaatca

SEQ ID NO: 198087 - DNA, 755 bp, Homo sapiens
  Payload ID: 19073
  Gene Name: UEV and lactate/malate dehyrogenase domains
  Uniprot ID: Q8IX04
  ENST ID: ENST00000541984
  CDS Start-End: 64-663
agcaagtccggaagaaggtccgggggctggagtcctgggacctagctcgggaccggcctggagatggagttcgactgcgagggcctgagacggctgcttggcaagtacaagttcagggacctaactgtggaagaactaaggaatgtaaatgtatttttcccacatttcaaatattccatggacacctatgtttttaaagatagttctcagaaagacctgctgaattttactggcacaattcctgtgatgtatcagggtgtttcagatacaaattcaaagagctgggcaaatcatgagaataaaacagtcaataaaattactgtggttggaggtggagaactcggtattgcctgcacattagcaatttcagcaaagggtattgcagacaggcttgtcctcttagacctctcagaagggactaaaggagccacgatggaccttgaaatcttcaaccttcctaatgtggagatcagcaaagtggaaatcatgacctatgtaacatggaaactgagtacatttcctgcaaatcgagtgatcggaattggatgtaatctggattcacagagattacagtatattattacaaatgttttgaaggcacagacttcaggcaaagaagtatgggttattggcgagcaaggagaagacaaagggatattatgatataaatagtgaagtgtttttaagtttgccttgcatccttggaaccaatggagtatctgaagttatcaaaaccacactgaaagaagatacag

SEQ ID NO: 198088 - DNA, 1963 bp, Homo sapiens
  Payload ID: 19073
  Gene Name: UEV and lactate/malate dehyrogenase domains
  Uniprot ID: Q8IX04
  ENST ID: ENST00000535484
  CDS Start-End: 164-1189
aagtgaatgagccgtgccaaaaagacggttggatcctgcatagtggtgagaggggtgatccattctgcctcatcatttaagctgtctggagtacaagttcagggacctaactgtggaagaactaaggaatgtaaatgtatttttcccacatttcaaatattccatggacacctatgtttttaaagatagttctcagaaagacctgctgaattttactggcacaattcctgtgatgtatcagggtaatacatataacataccaattcgtttctggattttggattctcaccctttcgctccccctatttgcttcttgaagccaactgcaaatatgggaatcttagtcggaaaacatgtggatgctcaaggcagaatatatttgccctatctccaaaactggagccatcctaaatctgtcattgttggattaattaaagaaatgattgccaagtttcaagaggaacttcccatgtattctctatcatcatctgatgaggcacggcaggtagacttgctagcctatattgcaaaaatcactgaaggtgtttcagatacaaattcaaagagctgggcaaatcatgagaataaaacagtcaataaaattactgtggttggaggtggagaactcggtattgcctgcacattagcaatttcagcaaagggtattgcagacaggcttgtcctcttagacctctcagaagggactaaaggagccacgatggaccttgaaatcttcaaccttcctaatgtggagatcagcaaagatttgtctgcctctgctcattccaaggtggtgatcttcacagtcaactctttgggtagttctcagtcgtaccttgatgtggtacagagcaatgtggatatgttcagagcccttgtcccagctctgggacattatagtcaacacagtgtcctgctcgttgcatctcaaccagtggaaatcatgacctatgtaacatggaaactgagtacatttcctgcaaatcgagtgatcggaattggatgtaatctggattcacagagattacagtatattattacaaatgttttgaaggcacagacttcaggcaaagaagtatgggttattggcgagcaaggagaagacaaagtgctcacatggagtggccaagaagaagtagtgagtcatacctctcaagtgcagctgtccaacagggatattatgatataaatagtgaagtgtttttaagtttgccttgcatccttggaaccaatggagtatctgaagttatcaaaaccacactgaaagaagatacagttactgagaaactccaaagcagtgcatcctcaatccacagtctccaacaacagttaaaactttgattctcaaatgcaatttgagaggctggacttctacctaaagggaaaagtcatttaattttacctatatataggtttgaggatttctgtatcctgctacttacttttacaaactgcttggttaaagtagagggtttcttgattagctttgtgatgtaaatccttaaggagttatacaaggaggggaaaaattaattttatttggggttcttgagatatctatgctgttctttaaatctacagcaggggtaaacattcatctgcagtgtgcatcaatttaaatcatatatcctaaactaaaagcacaattcatacttcgggaatattttataagtaatatatctttaaaagaaaattaccctttgacttttataatcaacataagttccaggcccagtatggatttacaaaatctgtgtcagttgtacattcacaggatccacagcttaagttactaatgtttcttgtgtaaaatcctgttggtagtaatagtaaagcattgtatttcccttcttcaaattaattacctaccaaaaaatggaaaagaattttacatgcactttaaaatagtaaaatggaaagtgaatttttaaaatatatgcattaaaagtttactttaatttcc

SEQ ID NO: 198089 - DNA, 2503 bp, Homo sapiens
  Payload ID: 19073
  Gene Name: UEV and lactate/malate dehyrogenase domains
  Uniprot ID: Q8IX04
  ENST ID: ENST00000543987
  CDS Start-End: 93-1232
agtttggtcctcagcggcttccgtcctgcagcaagtccggaagaaggtccgggggctggagtcctgggacctagctcgggaccggcctggagatggagttcgactgcgagggcctgagacggctgcttggcaagtacaagttcagggacctaactgtggaagaactaaggaatgtaaatgtatttttcccacatttcaaatattccatggacacctatgtttttaaagatagttctcagaaagacctgctgaattttactggcacaattcctgtgatgtatcagggtaatacatataacataccaattcgtttctggattttggattctcaccctttcgctccccctatttgcttcttgaagccaactgcaaatatgggaatcttagtcggaaaacatgtggatgctcaaggcagaatatatttgccctatctccaaaactggagccatcctaaatctgtcattgttggattaattaaagaaatgattgccaagtttcaagaggaacttcccatgtattctctatcatcatctgatgaggcacggcaggtagacttgctagcctatattgcaaaaatcactgaaggtgtttcagatacaaattcaaagagctgggcaaatcatgagaataaaacagtcaataaaattactgtggttggaggtggagaactcggtattgcctgcacattagcaatttcagcaaagggtattgcagacaggcttgtcctcttagacctctcagaagggactaaaggagccacgatggaccttgaaatcttcaaccttcctaatgtggagatcagcaaagatttgtctgcctctgctcattccaaggtggtgatcttcacagtcaactctttgggtagttctcagtcgtaccttgatgtggtacagagcaatgtggatatgttcagagcccttgtcccagctctgggacattatagtcaacacagtgtcctgctcgttgcatctcaaccagtggaaatcatgacctatgtaacatggaaactgagtacatttcctgcaaatcgagtgatcggaattggatgtaatctggattcacagagattacagtatattattacaaatgttttgaaggcacagacttcaggcaaagaagtatgggttattggcgagcaaggagaagacaaagtgctcacatggagtggccaagaagaagtagtgagtcatacctctcaagtgcagctgtccaacagggatattatgatataaatagtgaagtgtttttaagtttgccttgcatccttggaaccaatggagtatctgaagttatcaaaaccacactgaaagaagatacagttactgagaaactccaaagcagtgcatcctcaatccacagtctccaacaacagttaaaactttgattctcaaatgcaatttgagaggctggacttctacctaaagggaaaagtcatttaattttacctatatataggtttgaggatttctgtatcctgctacttacttttacaaactgcttggttaaagtagagggtttcttgattagctttgtgatgtaaatccttaaggagttatacaaggaggggaaaaattaattttatttggggttcttgagatatctatgctgttctttaaatctacagcaggggtaaacattcatctgcagtgtgcatcaatttaaatcatatatcctaaactaaaagcacaattcatacttcgggaatattttataagtaatatatctttaaaagaaaattaccctttgacttttataatcaacataagttccaggcccagtatggatttacaaaatctgtgtcagttgtacattcacaggatccacagcttaagttactaatgtttcttgtgtaaaatcctgttggtagtaatagtaaagcattgtatttcccttcttcaaattaattacctaccaaaaaatggaaaagaattttacatgcactttaaaatagtaaaatggaaagtgaatttttaaaatatatgcattaaaagtttactttaatttccagtgggacttcctttatgaaattttccataacctcttcctggagtattacaagatctccaacatctcataaactaattgtgatattagtggaaccataagcaaatatatatttttagtggaaatagattatgaatgaaagccaagcaccttactttaaagccaaaatatgagattttcattaaaaacattggtcataatagggagaggttttttatttgttctgagcaaatcctttaacctctcctgatgatacagttcagagtacacacactttggtgatggatcaagagcaatattttcttatgtgaaagatagcttattattactattgtgacatacaactaatagtaacagttaacatcaacacttcatatataccaggcagcatgataagcactttattattttactgaatcctcacaacagaccactgaggtagggactattgccatcatcattttataaaaggaaattgaggtttagtcctcaagaagtc

SEQ ID NO: 198090 - DNA, 4224 bp, Homo sapiens
  Payload ID: 19074
  Gene Name: UFM1-specific ligase 1
  Uniprot ID: O94874
  ENST ID: ENST00000369278
  CDS Start-End: 67-2451
cttctcccaccgcctgtcggctgacgtgtctgcagttcctccgcgtctactgcgagtcaggccgtgatggcggacgcctgggaagagattaggcggttggcggccgacttccagcgggcgcagttcgccgaggccacgcagaggttgtccgagcggaactgcattgagattgttaataaattgattgctcagaaacagctagaagtagttcatacactcgatggaaaggaatatattactccagcccaaattagtaaagaaatgagagatgagctacatgtccgaggtggtcgagtaaacattgttgatctacaacaggtaattaatgtggacctgattcatattgaaaatagaattggtgacattattaaatcagaaaagcatgttcagttagtgttgggacaactgatagatgagaattatttggatcggttggcagaagaggtcaatgataaattgcaagaaagtggtcaggtcaccatatcagaactgtgtaaaacttatgatcttcctgggaactttctgacacaggcactaactcagcgacttggtagaattatcagtggacatattgatcttgataatagaggagtaatttttacggaagcttttgtagctcgacataaagcacgtatccgtggactattcagtgctattacccggcctacagctgtgaattctttgatttcaaaatatggatttcaggagcagcttctttactctgtgcttgaggaacttgttaatagcggacgcttacgaggcactgtggttggtgggagacaggataaagctgtgtttgtccctgacatctactccaggacacagagtacttgggtggattcctttttcaggcagaatggctatctagaatttgatgctttgtccagacttggaatcccagatgctgtaagctacataaagaaaagatataagactacacaactcttgtttttgaaagcagcttgtgttggtcaaggacttgtggatcaagtggaagcatcagtagaagaagccatcagctctggaacatgggttgatattgcacctctgctacccacttctttatcagttgaagatgctgccatattgcttcagcaggtgatgagggcattcagcaaacaggcctcaactgtagtctttagcgacactgttgtagtcagtgaaaaatttataaatgactgtacagaactgttccgtgagctgatgcaccagaaagctgaaaaggaaatgaaaaataatcctgtgcatttaatcactgaagaagatctgaaacaaatctccactttagaaagcgttagtacaagtaaaaaggataaaaaagatgagcgaagaaggaaagcaacagagggcagtggaagcatgagaggaggaggtgggggcaatgccagagagtacaaaattaaaaaagtcaagaagaaaggaagaaaagatgatgatagtgatgatgaatctcaatcatcccacactggaaagaagaagccagagatcagttttatgttccaggatgagattgaagattttttaagaaaacacatacaagatgcccctgaggagtttatttcggaacttgctgagtacttaataaaacctcttaataaaacttatctcgaggtggtacgttcagtattcatgtcttcaacaacttctgcttctgggacgggcagaaaacgcacaatcaaggacttgcaagaagaagtttcaaacctgtacaataacattaggttatttgaaaaagggatgaagttttttgcagatgacacacaggctgctcttaccaaacacttgctgaagtcagtgtgtactgatatcactaacctcattttcaacttcttagcttcggatttaatgatggcagtagacgatcctgcagccattacaagtgaaataagaaagaaaattttaagtaaattatcagaagaaaccaaagtagctcttacaaaactccataactctctgaatgaaaagagcatagaagactttatttcttgtctggattctgcagcagaagcttgtgatattatggtgaaaaggggagacaaaaaaagggaaagacagatactgttccaacatcgacaagcactggctgaacagctaaaggtcacagaagaccctgctcttattctgcacctcacatcagtcctgttgtttcagttttcaacccacagcatgctccatgcacctggaagatgtgtcccacagatcattgcttttcttaatagtaaaattccagaggatcagcatgctcttttggtaaagtatcaaggtttggttgtaaagcagctagtcagtcaaagtaagaagactgggcagggagattatcccttgaataatgaattagacaaagaacaagaagatgttgccagtactactcgtaaagagcttcaagaactttcttcatccattaaagaccttgttctcaaatctaggaaatcatctgtgacggaagagtaatgatcttaatttacatttgtcatatagtaagcattttcccccaaggttgaaggtgagtggtcacaaaaaagtagtcactatacaactcccctctccctgcaaaaaccacctcatacacacacaattcagttaaaacagtagtattgtattaaatgtaaatcttaaaaagatgtgaatttttgtaaattgggttcttcatggaagtttttttccacctgattttcacacaaatactatatgaaatttttcacattattttcacataattttaaaaattacatatttcaggtttgttctctttccaaatgttgaatgaaaaacaaattttccaatccatttatccctggggaaggattcatttgttgcgagtgccagtatacttaaatgtatactttatatacatttaagcagaaatttaaaatgtggtcttttttttttaaaagaaacacttctgtgtcagaaatgaaaataaatcatgttttttatttttaaatagaaagcacttcaaaactaaaatacagaaatttacaaaaaagaaaaattattactaagcccttgctcttatttttggcagaataaacattgattttggttggggctgcaaggatgcctttacaggtgcacaagaacgctagagtggcccatgcattgctgtgttctcttctaaaacaagctactaacaagagagagaacacatgcaatttattaccagtaagcataagtcatatttaacattggaataactaagcattttatacaaagatttttctttgacccagtttgcatttgtacattttatttttttagttcaacagctgctctgtcacataatactttgtaaatactagtgtgaaaaacagataggatgccttttccagtggtaggagcatctgtaagtgcatttaaatcattagaagcttttttccaaaactagaaacccttattaaaaaatagacatttttttctaaagattattagttaaaaataactaaaagagttccttagagtaatcatttcaaccaaatgaatttcaagcaacaacttacttactatttatcaaaaagggatttaattattttgaatataattataaattaaatttcaaatatttaaaaatactattttatataattccttatgacattttaaactttatattttaaaatatttgaatacgaaaagatcagtctacctctactccattctagacaaagtattaatccttagtgaaagtaattaattaaattgccaacttggcattattattaaacttgataggaacgcaacattaaatttaaaaatgttttcccgtgggtaattttctattatatattttcatatgggcaaagggaaaaaatgataaatcctctgtaatcacaaaccccaatttcgttttgtttattcagcttctaaaatattgaacacccagacttttaattcaacctttaagaaccttatcatttatgtttcagtagatatcaaagtaatccatgtttgtgtcaaatgatcatagaaaataaatagaagagacagtgaagcaagtaaaaagaaaagcattgttttaatttgtttgcattaatttttttcatttgtcaaaatgcttcttttgttgccacagtaaagaacagtttttattgttttgtaagtaaaattacgtagctgattttgtatgtaaagattaatttccataataaaaattattgtatgtttactgtgatcttaatgggcagggttaagaaagttatttaaaataaagttacctattctactaaa

SEQ ID NO: 198091 - DNA, 996 bp, Homo sapiens
  Payload ID: 19075
  Gene Name: UFM1-specific peptidase 1 (non-functional)
  Uniprot ID: Q6NVU6
  ENST ID: ENST00000388761
  CDS Start-End: 448-876
agcattgtgggagctcctcggtcggtgccggtcggtggctgcctattgcggcctgcggtgatcaacgaggcccggggagcgcgtccccagtctgcgcgccggtcctgcggcagctggcccaagacccggagccgaaaggaagtgttggagcctgaggtcgctccgcgccgctaggaggacgctgtgcctggcctgggacctccgctcccgcccaccgccctggagccgctgagggacgtccacgtgggcctgtccccgccgagccgcggccctgtccgcctggcgctgctctcgggccactacctctactaccactacggctgcgacggcctggacgaccgcggctggggctgcggctaccgcactctgcagacgctgtgctcgtggccagagggccagcccgcgggcgtacctggactggccgccgtacaggcggccctggaggacatgggcgacaagccccccggcttccggggctcccgggactggatcggctgcgtggaggccagcctctgcctcgctcacttcggagggccccagggacgcctctgccacgtaccccggggagtggggctgcacggggagctggagaggctttactcgcacttcgcagggggtgggggcccagtcatggttgggggggacgcagatgccaggtccaaggccttgctgggagtctgcgtagggtcaggcacggaagcctatgtcctggtattggaccctcactactggggcactccaaaaagccccagtgaactacaggctgctgggtgggtgggctggcaagaggtgagtgcagcctttgaccccaactccttctacaacctgtgcttgaccagccttagctcccaacagcagcagcgcaccttggactgaggacgaagttacagaactgagattctcgggtcccagacacgcacctatgtacctcccactggtgtccctgcaaagcctggcgcttttgacatcaataataaaagtggcagggctgagcaa

SEQ ID NO: 198092 - DNA, 1630 bp, Homo sapiens
  Payload ID: 19076
  Gene Name: UFM1-specific peptidase 2
  Uniprot ID: Q9NUQ7
  ENST ID: ENST00000264689
  CDS Start-End: 118-1527
agttgtagttggtccgcccgggccccgcccctgggccgtgcggtgacaccacttcagggccggcccccggaacttttgggcaggcgtcagcgcccgtgtcaccgccacgtcgcggacatggtgatttcagaaagtatggatatactcttcagaataagaggaggccttgatttggcttttcagctagctactcctaatgaaatttttctcaagaaggcactgaaacatgtgttgagtgacctgtcaactaagctgtcttcaaacgcccttgtgttcagaatttgccacagttcagtgtatatatggcctagcagtgacataaacaccattcctggagaactgactgatgcttctgcttgtaagaacatactgcgctttattcaatttgagccagaagaagatataaaaagaaaattcatgagaaagaaggacaaaaagttatcagacatgcatcaaatagtaaatatagatcttatgctggaaatgtcaacctccctggcagctgtaacgcccatcattgaaagggaaagcggaggacaccattatgttaatatgactttacctgtcgatgcagttatatctgttgctccagaagaaacatggggaaaagttcgtaaactcctggttgatgcaattcataatcaactaactgacatggaaaaatgtattttgaaatatatgaaaggaacatctattgtggtccctgaaccactgcactttttattaccagggaaaaaaaatcttgtaacaatttcatatccttcaggaataccagatggccagctgcaggcctataggaaggagttacatgatcttttcaatctgcctcacgacagaccctatttcaaaaggtctaatgcttatcactttccagatgagccatacaaagatggttacattagaaatccacatacttaccttaatccacctaacatggagactggtatgatttatgtggtccagggcatatatggctatcatcattatatgcaggatcgcatagatgacaatggctggggctgtgcttatcgatctctgcagactatctgctcttggttcaaacatcagggatacacagagaggtccattccaacacacagagaaattcagcaggctctagtcgatgccggggacaaaccagcaacatttgtcggatcgcggcaatggattggatctattgaggtgcagctggtactaaaccaattgatcggtataacgtcaaaaatcctgtttgtcagccaaggttcagaaattgcctctcaaggacgggaactggctaatcatttccaaagtgaaggaactccagttatgatcgggggaggagttttggcccacacaatactaggagttgcatggaatgagattacagggcagataaagtttctgattctagatccacattataccggtgctgaagacctgcaagttattttggaaaagggctggtgcggatggaagggcccagatttttggaacaaggatgcatactataacttatgtcttcctcagcgaccaaatatgatttaaaatatcttggagtcaaagactgcagtagagtggtattataaatttgtgaataaagaatcagtttaatttttcacattaaatcctggttctagtttgacgattt

SEQ ID NO: 198093 - DNA, 1672 bp, Homo sapiens
  Payload ID: 19076
  Gene Name: UFM1-specific peptidase 2
  ENST ID: ENST00000510755
  CDS Start-End: 102-1265
cccgggccccgcccctgggccgtgcggtgacaccacttcagggccggcccccggaacttttgggcaggcgtcagcgcccgtgtcaccgccacgtcgcggacatggtgatttcagaaagtatggatatactcttcagaataagaggaggccttgatttggcttttcagctagctactcctaatgaaatttttctcaagaaggcactgaaacatgtgttgagtgacctgtcaactaagctgtcttcaaacgcccttgtgttcagaatttgccacagttcagtgtatatatggcctagcagtgacataaacaccattcctggagaactgactgatgcttctgcttgtaagaacatactgcgctttattcaatttgagccagaagaagatataaaaagaaaattcatgagaaagaaggacaaaaagttatcagacatgcatcaaatagtaaatatagatcttatgctggaaatgtcaacctccctggcagctgtaacgcccatcattgaaagggaaagcggaggacaccattatgttaatatgactttacctgtcgatgcagttatatctgttgctccagaagaaacatggggaaaagttcgtaaactcctggttgatgcaattcataatcaactaactgacatggaaaaatgtattttgaaatatatgaaaggaacatctattgtggtccctgaaccactgcactttttattaccagggaaaaaaaatcttgtaacaatttcatatccttcaggaataccagatggccagctgcaggcctataggaaggagttacatgatcttttcaatctgcctcacgacagaccctatttcaaaaggtctaatgcttatcactttccagatgagccatacaaagatggttacattagaaatccacatacttaccttaatccacctaacatggagactggtatgatttatgtggtccagggcatatatggctatcatcattatatgcaggatcgcatagatgacaatggctggggctgtgcttatcgatctctgcagactatctgctcttggttcaaacatcagggatacacagagaggtccattccaacacacagagaaattcagcaggctctagtcgatgccggggacaaaccagcaacatttgtcggatcgcggcaatggattggatctattgaggtgcagctggtactaaaccaattgatcggtataacgtcaaaaatcctgtttgtcagtaacacccgaaaaaacaagaaagtaggaaacattgtctcctagctcattatttgaccgtagtgttggaagtagttcatctgatagaaaatggtttctttctagccaaggttcagaaattgcctctcaaggacgggaactggctaatcatttccaaagtgaaggaactccagttatgatcgggggaggagttttggcccacacaatactaggagttgcatggaatgagattacagggcagataaagtttctgattctagatccacattataccggtgctgaagacctgcaagttattttggaaaagggctggtgcggatggaagggcccagatttttggaacaaggatgcatactataacttatgtcttcctcagcgaccaaatatgatttaaaatatcttggagtcaaagactgcagtagagtggtattataaatttgtgaataaagaat

SEQ ID NO: 198094 - DNA, 490 bp, Homo sapiens
  Payload ID: 19076
  Gene Name: UFM1-specific peptidase 2
  ENST ID: ENST00000505357
  CDS Start-End: 119-490
gttggtccgcccgggccccgcccctgggccgtgcggtgacaccacttcagggccggcccccggaacttttgggcaggcgtcagcgcccgtgtcaccgccacgtcgcggacatgaaagtatggatatactcttcagaataagaggaggccttgatttggcttttcagctagctactcctaatgaaatttttctcaagaaggcactgaaacatgtgttgagtgacctgtcaactaagctgtcttcaaacgcccttgtgttcagaatttgccacagttcagtgtatatatggcctagcagtgacataaacaccattcctggagaactgactgatgcttctgcttgtaagaacatactgcgctttattcaatttgagccagaagaagatataaaaagaaaattcatgagaaagaaggacaaaaagttatcagacatgcatcaaatagtaaatatagatcttatgctggaaatgtcaacctccctggcagctgta

SEQ ID NO: 198095 - DNA, 2348 bp, Homo sapiens
  Payload ID: 19076
  Gene Name: UFM1-specific peptidase 2
  ENST ID: ENST00000514247
  CDS Start-End: 112-375
agttggtccgcccgggccccgcccctgggccgtgcggtgacaccacttcagggccggcccccggaacttttgggcaggcgtcagcgcccgtgtcaccgccacgtcgcggacatggtgatttcagaaagtatggatatactcttcagaataagaggaggccttgatttggcttttcagctagctactcctaatgaaatttttctcaagaaggcactgaaacatgtgttgagtgacctgtcaactaagctgtcttcaaacgcccttgtgttcagaatttgccacagttcagtgtatatatggcctagcagtgacataaacaccattcctggagaactgactgatgcttctgcttatttgagccagaagaagatataaaaagaaaattcatgagaaagaaggacaaaaagttatcagacatgcatcaaatagtaaatatagatcttatgctggaaatgtcaacctccctggcagctgtaacgcccatcattgaaagggaaagcggaggacaccattatgttaatatgactttacctgtcgatgcagttatatctgttgctccagaagaaacatggggaaaagttcgtaaactcctggttgatgcaattcataatcaactaactgacatggaaaaatgtattttgaaatatatgaaaggaacatctattgtggtccctgaaccactgcactttttattaccagggaaaaaaaatcttgtaacaatttcatatccttcaggaataccagatggccagctgcaggcctataggaaggagttacatgatcttttcaatctgcctcacgacagaccctatttcaaaaggtctaatgcttatcactttccagatgagccatacaaagatggttacattagaaatccacatacttaccttaatccacctaacatggagactggtatgatttatgtggtccagggcatatatggctatcatcattatatgcaggatcgcatagatgacaatggctggggctgtgcttatcgatctctgcagactatctgctcttggttcaaacatcagggatacacagagaggtccattccaacacacagagaaattcagcaggctctagtcgatgccggggacaaaccagcaacatttgtcggatcgcggcaatggattggatctattgaggtgcagctggtactaaaccaattgatcggtataacgtcaaaaatcctgtttgtcagccaaggttcagaaattgcctctcaaggacgggaactggctaatcatttccaaagtgaaggaactccagttatgatcgggggaggagttttggcccacacaatactaggagttgcatggaatgagattacagggcagataaagtttctgattctagatccacattataccggtgctgaagacctgcaagttattttggaaaagggctggtgcggatggaagggcccagatttttggaacaaggatgcatactataacttatgtcttcctcagcgaccaaatatgatttaaaatatcttggagtcaaagactgcagtagagtggtattataaatttgtgaataaagaatcagtttaatttttcacattaaatcctggttctagtttgacgatttaaattatgacctttttcaaaggttgtaaatactgcacggagaatgtattttttagacgttcctttaataacttaaaagacaaagcatacacaaccagcatattataggcatgtaaatacatgtgttcttaaatggatcttcacttggaagaaagtttttcgtccttctcagaaggagattagacacaacatatggtaaagccaaaagcaggagcttatagatttgcatgaaatgaaggcgttcttcagacttcttcataacccacgtgacatctgtttttaaaaacacgttaacattaaaaacttttttttaaaaagagttttatccccaaacttccaccatgcagtcccatttttggtctctagactctggtaagtataaccagtactaaaatgttaatgagaatgaaacaatactactagaaatacgagtgtcagtattaaatggaataataaatgctatgcaaacaagagatcactgcgggaggaaaaaagcagcagctctgagttacttaccagcacttccttttcccactggtattttctacacttccgagactccgtttctgtctgagcacggcaacacaatcattcctgtcagggtgttcacttgcttttattgtctgcatacatttaattgttgtaagaaacttggcacagtctggaaatccacatgaccaagcgagatcttcagctgtttgcccgttcttattacataaactgaaaacaggataaaaacggagtgaaatg

SEQ ID NO: 198096 - DNA, 592 bp, Homo sapiens
  Payload ID: 19076
  Gene Name: UFM1-specific peptidase 2
  ENST ID: ENST00000509180
  CDS Start-End: 1-592
acatggagactggtatgatttatgtggtccagggcatatatggctatcatcattatatgcaggatcgcatagatgacaatggctggggctgtgcttatcgatctctgcagactatctgctcttggttcaaacatcagggatacacagagaggtccattccaacacacagagaaattcagcaggctctagtcgatgccggggacaaaccagcaacatttgtcggatcgcggcaatggattggatctattgaggtgcagctggtactaaaccaattgatcggtataacgtcaaaaatcctgtttgtcagccaaggttcagaaattgcctctcaaggacgggaactggctaatcatttccaaagtgaaggaactccagttatgatcgggggaggagttttggcccacacaatactaggagttgcatggaatgagattacagggcagataaagtttctgattctagatccacattataccggtgctgaagacctgcaagttattttggaaaagcatttggaatttgaagtctataaaaggttttttgactggtgcatgtatcttactgaatatagtagcaatattcttgttctgta

SEQ ID NO: 198097 - DNA, 565 bp, Homo sapiens
  Payload ID: 19076
  Gene Name: UFM1-specific peptidase 2
  ENST ID: ENST00000502428
  CDS Start-End: 63-401
agggccggcccccggaacttttgggcaggcgtcagcgcccgtgtcaccgccacgtcgcggacatggtgatttcagaaagtatggatatactcttcagaataagaggaggccttgatttggcttttcagctagctactcctaatgaaatttttctcaagaaggcactgaaacatgtgttgagtgacctgtcaactaagctgtcttcaaacgcccttgtgttcagaatttgccacagttcagtgtatatatggcctagcagtgacataaacaccattcctggagaactgactgatgcttctgcttgtaagaacatactgcgctttattcaatttgagccagaagaagatataaaaagaaaattcatgagaaagaaggacaaaaagttatcagacatgctgtaacgcccatcattgaaagggaaagcggaggacaccattatgttaatatgactttacctgtcgatgcagttatatctgttgctccagaagaaacatggggaaaagttcgtaaactcctggttgatgcaattcataatcaactaactgacatggaaaaatgtattttg

SEQ ID NO: 198098 - DNA, 1159 bp, Homo sapiens
  Payload ID: 19076
  Gene Name: UFM1-specific peptidase 2
  ENST ID: ENST00000511485
  CDS Start-End: 1-1105
atttagatttgagccagaagaagatataaaaagaaaattcatgagaaagaaggacaaaaagttatcagacatgcatcaaatagtaaatatagatcttatgctggaaatgtcaacctccctggcagctgtaacgcccatcattgaaagggaaagcggaggacaccattatgttaatatgactttacctgtcgatgcagttatatctgttgctccagaagaaacatggggaaaagttcgtaaactcctggttgatgcaattcataatcaactaactgacatggaaaaatgtattttgaaatatatgaaaggaacatctattgtggtccctgaaccactgcactttttattaccagggaaaaaaaatcttgtaacaatttcatatccttcaggaataccagatggccagctgcaggcctataggaaggagttacatgatcttttcaatctgcctcacgacagaccctatttcaaaaggtctaatgcttatcactttccagatgagccatacaaagatggttacattagaaatccacatacttaccttaatccacctaacatggagactggtatggatcgcatagatgacaatggctggggctgtgcttatcgatctctgcagactatctgctcttggttcaaacatcagggatacacagagaggtccattccaacacacagagaaattcagcaggctctagtcgatgccggggacaaaccagcaacatttgtcggatcgcggcaatggattggatctattgaggtgcagctggtactaaaccaattgatcggtataacgtcaaaaatcctgtttgtcagccaaggttcagaaattgcctctcaaggacgggaactggctaatcatttccaaagtgaaggaactccagttatgatcgggggaggagttttggcccacacaatactaggagttgcatggaatgagattacagggcagataaagtttctgattctagatccacattataccggtgctgaagacctgcaagttattttggaaaagggctggtgcggatggaagggcccagatttttggaacaaggatgcatactataacttatgtcttcctcagcgaccaaatatgatttaaaatatcttggagtcaaagactgcagtagagtggtattataaatttgtgaataaa

SEQ ID NO: 198099 - DNA, 9570 bp, Homo sapiens
  Payload ID: 19077
  Gene Name: UHRF1 binding protein 1
  Uniprot ID: Q6BDS2
  ENST ID: ENST00000192788
  CDS Start-End: 172-4494
atcgtggcggagcgccaggcgcccaaagaggggcgagaaagcgccatggcggcggcggcggctgtgtccggtgctcacgccgcggcgaggtgaggggaccgcctcttctccacaactgaggaggccacagctgccggcccacccgccttccacgcgggccgcggctccggcatggccgggatcattaagaagcagatcctgaaacacctgtcccggttcactaagaatctttccccagacaaaatcaacctgagcaccctgaaaggggagggtcagctgaccaacctggagctggatgaagaggttctacagaatgtactggagctgcccacctggttagccatcactcgggtctactgcaacagggcctccatccggatccagtggacaaagttgaagacacaccctatttgcttgtgtctggataaggtagaggtggagatgaagacatgtgaggatcctcggccccccaatggacagtctcccattgcccttgcttcaggacagagtgaatatggctttgccgaaaaggtggtggaagggatgttcatcattgtcaattctatcaccatcaagattcactccaaggccttccacgcttcttttgaattgtggcagctccagggctatagtgtcaaccccaactggcagcagagtgaccttcgccttacccgcatcactgacccctgccgaggagaggttttaacatttaaggaaataacttggcaaacactccgaattgaggcagatgctacagacaatggtgatcaggacccagtcaccactccattgaggcttattacgaaccaaggcaggatccaaatagccctcaaaagaagaaccaaagattgcaatgtgatatcctccaagctgatgttcctgttggatgacctgctctgggtgctgactgactcacagctcaaggctatgatgaagtatgcagagtcactgagtgaagccatggagaagtcagcccatcaaagaaagagcctggcccctgaacctgtgcagatcactccaccagcccccagtgcccagcagtcctgggcccaggcatttggtggcagccagggcaacagcaacagcagcagcagccgcctcagccagtactttgagaaatttgatgtgaaagagtcctcctaccatctgctcatctcccgcctggacctgcacatttgtgatgatagccagtcccgagagccaggtgtctctgccaacagactcatgggtggtgccatgcagcttaccttccgcaagatggcgtttgactattaccctttccattgggcaggtgatagctgcaaacattgggtacgccactgtgaggccatggagacccgaggccagtgggcccagaagctggtgatggaatttcagagcaaaatggagaagtggcatgaagagacgggtctgaaaccaccctggcaccttggagtagactctctctttcggagaaaagcagattctctttccagtcctcgaaagaaccctcttgagagaagcccctctcagggcagacagcctgcctttcagcctccagcatggaaccgcttacgctctagctgcatggtggtacgggtggatgacctggacatccaccaggtttccaccgctggacagccaagtaaaaagccatctacactcctttcctgcagtcggaaacttcacaacctccctacccaggtctctgccattcatattgagttcacagagtattacttcccagataatcaggagcttccagttccttgtcctaatctctacattcagttaaatggtctgacatttactatggatcctgtcagtttgctctggggaaacctcttttgcctggatttataccgcagcttggagcagttcaaagctatctacaagctggaagattcaagtcagaaagatgaacacttggacatccgactagatgcattctggttgaaggtgagctttccactggaaaagagagagcgggcagagttgcatcgtccccaggcccttgtcttctctgcgtcaggcatgattgccaccaatacacgtcatgctccacattgtagttgttcagacctccagagtctcttccggggttttgctgctgctgagttctttcattccaattatgatcactttcctaaggttccaggtggctttagccttctgcacatgctttttttgcatcatgcctttcagatggattcctgcctgcctcagcctaataccctccctccccagagacctaaggcttcctgggatctctggtctgtccactttacccagatctccttggactttgagggaacagaaaacttcaaaggccataccttgaattttgtagcccccttccccctgtccatttgggcctgcctacccctccgctggcagcaagcccaggcacggaagcttcttttggcctcagaggggaggctgaaaccatcagccagttttggaagtcctgtccagtctgaggctcttgcccctgactctatgtcccatccgcggtcaaagactgaacatgacttgaaaagcttatcaggacttacagaagtcatggaaattctgaaagaaggcagtagtggtatggacaacaaagggcctctgacagagctggaggatgtagcagatgttcatatgcttgtacattccccggcccatgtccgcgtgaggcttgaccactaccagtacttggctctgcttcgcctgaaggaggtgctgcagaggcttcaggagcagctgactaaggatacagagtcaatgactgggtctcccctgcagaatcagacagcttgcattggagttctctttcccagtgctgaagtggctctgcttatgcatcctgcacccggtgctgtcgatgctgactctgcaggctcagatagcactagcctcgtagattcagagctatctccttcagaggatcgggaactgaagtctgatgcctcatcagaccagggcccagcaagccctgagaaggtcttggaggaaagtagcattgaaaatcaggatgtatcccaggagaggccacatagcaatggagaactgcaggactcaggtccacttgcccagcagctggcagggaagggccatgaggcagtagagtccctacaggccaagaaactgagcagaacccaagcctccagctcaccagctgcattgaagcccccagctggcagggagactgctgtgaatggacagggtgagctcatccccttgaagaacattgagggagaattgtcaagtgctattcacatgaccaaggatgccaccaaggaggctctacatgccaccatggacctcaccaaggaagctgtgtccctgactaaggatgccttcagtttgggcagagatcgaatgacctccaccatgcacaagatgttgtccctgcccccagccaaggagcccatggccaagacagatgagggggtggcagccccagtgagtggaggtgctgcacgactccgatttttctccatgaagaggacggtatctcaacagtcatttgatggtgtctcattggatagcagtggccctgaagaccggatttcagtggacagtgatggcagtgatagctttgtgatgctcttggagtctgagtctggtccagaatctgttccaccaggatctctttcaaatgtctcagataatgctggtgttcaagggagccctcttgtgaataattatggccaggggtcaccagcagccaacagttcagtttcacccagtggagaagacctcatctttcacccggtctcagttctggtcctgaaggtgaatgaggtgtcttttgggattgaggtacgtggtgaggacctgactgtggccctgcaagcagaggaactgaccctccagcagctgggcaccgtgggactctggcagttcctgcatggacagtgcccaggtacatgctttcaggaatcctcaactttgaagactggccacatcaggccagctgtgggccttcgctttgaggtggggcctggagcagctgttcattcccccctggcctcacaaaatggcttcctacatttattgcttcatggctgtgacctcgagctgctcacttcagtgctcagtggcctggggcccttcttggaggatgaggagatcccggtggtagtccccatgcagattgagcttctgaactccagcatcaccctaaaggatgatatcccccccatctatccaacatctccaggccccatccccatcactctggccatggaacatgttgtgctgaagaggagtgatgatggtgtgttccacataggcgctgctgctcaggacaaaccatcagctgaagtacttaaaagtgagaagagacagcccccaaaagaacaggtgtttttggtgcccacaggagaggtttttgaacagcaggtgaaagaactgcctatcctacaaaaagaacttatagaaactaaacaagccttggccaatgccaaccaggataaagaaaaacttcttcaggagattaggaaatataaccccttctttgagctctgaaaccagtggctcagccatctgtgccaaggagagaggctatcaccagcaatagcaccacctaggacagagggcactgtccagtgctgaataagtcactacggatgccagagggactggggagcactcacttcacttgtgtgggtgtgctttccactagctgttcttacttggactgaggacaagggcaaagcatgattgtatcccaggaaactggggcttgccctgtgtgtggcacaagcatcatgtcttgcctgtataaagccttttggtcctctgtgtactaggtggaatcttctcaacactgtagggccatttcacctcatggtttcatggcagggacatttgcttccttcacaggcctgtgtgaacaagcaaaagtacccacctcctcggtcacccacagagccaccaaagattccatgtcccagagcttcccatagcagacctgaaaagtccatgacctgagctttggccatggtagtggagtggaacaggaaatagtccagcagaggagtgtgggggaagggggcaggagaggcacaagaataagggagacctggactctgcctttttgggaaaaggaaccaagctcatagcaatttggctgataacacaatcagatttttccaggttaagcttcctttctgttatactttcatcattgtgatgctgtggtagaaagtaaataacagtagtggctcagtcatttaatctttcccctctataatacaacttacttgaaatttaaatcaagaaaaaatttctgacgctgagctaggttggtggcatgatatgccaggggtcagtgggggagcttgcttctgagccccctgttgtccgcctggagtcctgcttgtctttcccagctgtgctgagtggctcttctgtctccctggggtccctggcacatctgctttcccagctctgtgaccttaccagttctctcctcagcccttggtggtttgggagctgaatatatgttttaaacttttacataaacaactcaacctgttgcctctcacttccctccatcactgtggcttttaaaactcatgtattttgactcaagtgaaaaaaacacaaaaatccctcatcccagctaggttttgccccctgccctataagagagctatttccccctttctttcctttgaattcttctccaacaccatcccttcattcatactgccctgtgatacacttgaagctgtgttgattggacagacgttcatcagctaacttacctttacttggcaagatggtaaaatagtaacttagtgatgttactaaagtctcgaccattcacctttccatactgaaggaaaggtaaaaaggtttcttctatgggaaattatgcttgacttgcatactctagtttgatgaggataaaaagaaacatgtaattgcagtggtgtttacaactaattgatcacaaccaatcatagatttctttgttccttctccactctcaacacttcatttgactagaaaaaaaaaatgtattcaccaaggaacaggacccaatttgttcagacttttgttaagtttctttactaaggcaatttttgaaacaccagttactatgggatggtgggaatttttcatgcttaagaaatagagacttaggaacaaagaaacatctttctggagaagatgctaatgggaagttacctaaggcttgatgcttggttcaaccttatttaaaatttttataaatgacctgaaagtaggattttacagtgaaatcaaatgtcactacttccaggcagtgaaaggtaatctagaagaggtttaaaaaacacaaaaccggtcgggcacagcggctcacgcctgtaatcccagcactttgggaggccgaggcggggagatcacgagttcaggagatcgagaccatcctggccaacatggtgaaactttgtttccactaaaaatacaaaaattagctgggtgtggtggtgggtgcctgtagttccagccactcgggaggctgaagcaggagaatcgcttgaacccgggaggcagaggttgcagtgagccgagatagcgccattgcactccagcctgtcaacagagtgagactccgtctcacaacaaacaaacaaacacaaaaccacagaagggttactaataagcagggctgagaatactcagaaaactgacaggtgaggttcaacataatataaggaaatgtatttatggaagaattatcaactgatatgcctgaacactgttagaactcaggaaagaaacaagcattgctgagggggaggagagatcaatgtgctgctgtggccaaaagcctaattgccctgtgggcatcatcaggaagggcttttggagataacagagaacagcactttatacaaaaccatggatatgtcttgatcggattatctgtgtttctagtgaccttatttacaagatatatgataaagggaggaaaggtccagagaacagccaaaattatcaggggatggaggtatatccatatgaggacacatttttaaaatatagactctatcctgcaaagatgaaagcagaggggagttagatcaaatatccaatcaagagcaaggacccggtcctgtactactagctctagggctctatctcatagccttagtaaagaaagcacttctcatagcaaatcagaaatgtaaggagctcattgtctaagaagggatgccaccagaaactatacatgggtgcaggtttatgaggaatccttgcatgacggccttctacaaggaattatagaaaagtagggctacttggtaatatacaactgagagggtaactgtgtccctcaacaaactactccttagtgcctctttcaaaggcagaatgttgatctgaatggatcactggtcaagtatggcatctctaatgttcttgaagggggaggaaggagatctggtagctggaaaatataattattccacgttaggctcacctgaattggtttaaaatcatattctgattctcttctcatcccttcctcccctcacccaccatatacctctggcatccctccatgcaaagaaatgtcgaataggcatttcttggtataatttacctacacttgtgcttgtggggtgggagtaaaaacatatccagtaagtaccaaggctaacctcctaatggctggagctcagttaggtctctgggctctctaaaggagtccagagctcttgtccatgtcacaaatggagccttagaatttctgtctttccttatgtggcagctttggccattgtgtcttgaaattctccctcaggaaatgtgataggggatattatcccatgggattttagtaaaaatcagcttgcctaatttcatattcgtgttcataatgaagaaatgcgaagtggtggtagtcctcaggattaagtgtaaaggaaaatatgcaaggaaaaagtagcagtgtcagcccttttggactgcttatgatttctgccttagagctacaagacttggaacaagaaataacaatacctcaagaaaatgtctggagagatagcaccactgtccctcaaagacttcagccactgcacattaccaattcagctgtgaagcatttacaactgtattatctgtgattgtctgcatttcctgtttacatgcatgtgctggggatatgctttagtgtgtatggactagagtttaaatcctgtctttaactgggctgcaaggatggctatcaatcccaaattctgttttcaactcactggaataattaatctggtgttcctgatataaaacaggtgggttctattcacatgatggctgctctttaccatatatttcacctgaccctcattttgccatgggcctcaacctttatgtgtgctttttatggctctgaaaggactggctcccgtgtgtggaatatacaaggtataaacaccacccctcacatacccctgtaacttaaatgcttccatttaactcacttagattactttccccttagtggtaaacgggttgggggatgggtggtagtgcaaagaaggtagtttgaaatattgccatagtaatatgggaactttttattccaaccctttaccctggcttttttttctctcaatatttgcctaaaattctaaaatgagttatagtaaaatcataaaactatggaaacaactgaactttggtacacaagttagttcgatgacatcttgttatttgagaacagtaaaaggtgtgtcattgcctcatgatttatcatagtcattactaagggtttcagagagaatctggtgtgaagcactatcctttcagacactaaggcctttacctagttgctcccctaccttctgtcggaataggattattcccatgcacctctgggtaggtataggtagtagctattgaacggggattattttccccatggcacaaggggaaacactcttggataaccttcaacaatgaggctttgctaagtggccagacttgggatttgatcttcctcacttgttatttattaagtttaagccttattcagtatctctaattgcaatagatatagttcctgtgacttctaaaaaaaattcctgttaatgctgagacagtatcttttttgtcagtttattaatttttggtcaagatttagcctgagtcttaaagcatttatttgtggaatgccccactgaagtgtcttctccattggctaagtacatgtttaaagccatgggttttaatgtaagatactttcagtatctaattctgtttcccccactgagggtgctaaagagaattagaatctttactaagacatgctcaggaaagcttcacgagagaacagcttcaaaatcctccctatgacactgaatggtagtgaggaaagaattcttggggatgccagttacatacaatagccttattactgctaatcactgtcaataaaaggtcacttcattcacctctatttgaggaaaacaatgagaatgtatctgatgaactagaatccttgtcagtattgggaaattttaatgttgcaatatctagtcaaactttgagtgtactggttctgtgaaccacctgaaaaaacaaattaaatgtattaaaccataa

SEQ ID NO: 198100 - DNA, 4706 bp, Homo sapiens
  Payload ID: 19077
  Gene Name: UHRF1 binding protein 1
  ENST ID: ENST00000452449
  CDS Start-End: 237-4439
gcgggtggcgcgcgatcttcgcgtcgctctgggcgggcggccgcggcgccgcgctggtgggtgggatcgtggcggagcgccaggcgcccaaagaggggcgagaaagcgccatggcggcggcggcggctgtgtccggtgctcacgccgcggcgaggtgaggggaccgcctcttctccacaactgaggaggccacagctgccggcccacccgccttccacgcgggccgcggctccggcatggccgggatcattaagaagcagatcctgaaacacctgtcccggttcactaagaatctttccccagacaaaatcaacctgagcaccctgaaaggggagggtcagctgaccaacctggagctggatgaagaggttctacagaatgtactggagctgcccacctggttagccatcactcgggtctactgcaacagggcctccatccggatccagtggacaaagttgaagacacaccctatttgcttgtgtctggataaggtagaggtggagatgaagacatgtgaggatcctcggccccccaatggacagtctcccattgcccttgcttcaggacagagtgaatatggctttgccgaaaaggtggtggaagggatgttcatcattgtcaattctatcaccatcaagattcactccaaggccttccacgcttcttttgaattgtggcagctccagggctatagtgtcaaccccaactggcagcagagtgaccttcgccttacccgcatcactgacccctgccgaggagaggttttaacatttaaggaaataacttggcaaacactccgaattgaggcagatgctacagacaatggtgatcaggacccagtcaccactccattgaggcttattacgaaccaaggcaggatccaaatagccctcaaaagaagaaccaaagattgcaatgtgatatcctccaagctgatgttcctgttggatgacctgctctgggtgctgactgactcacagctcaaggctatgatgaagtatgcagagtcactgagtgaagccatggagaagtcagcccatcaaagaaagagcctggcccctgaacctgtgcagatcactccaccagcccccagtgcccagcagtcctgggcccaggcatttggtggcagccagggcaacagcaacagcagcagcagccgcctcagccagtactttgagaaatttgatgtgaaagagtcctcctaccatctgctcatctcccgcctggacctgcacatttgtgatgatagccagtcccgagagccaggtgtctctgccaacagactcatgggtggtgccatgcagcttaccttccgcaagatggcgtttgactattaccctttccattgggcaggtgatagctgcaaacattgggtacgccactgtgaggccatggagacccgaggccagtgggcccagaagctggtgatggaatttcagagcaaaatggagaagtggcatgaagagacgggtctgaaaccaccctggcaccttggagtagactctctctttcggagaaaagcagattctctttccagtcctcgaaagaaccctcttgagagaagcccctctcagggcagacagcctgcctttcagcctccagcatggaaccgcttacgctctagctgcatggtggtacgggtggatgacctggacatccaccaggtttccaccgctggacagccaagtaaaaagccatctacactcctttcctgcagtcggaaacttcacaacctccctacccaggtctctgccattcatattgagttcacagagtattacttcccagataatcaggagcttccagttccttgtcctaatctctacattcagttaaatggtctgacatttactatggatcctgtcagtttgctctggggaaacctcttttgcctggatttataccgcagcttggagcagttcaaagctatctacaagctggaagattcaagtcagaaagatgaacacttggacatccgactagatgcattctggttgaaggtgagctttccactggaaaagagagagcgggcagagttgcatcgtccccaggcccttgtcttctctgcgtcaggcatgattgccaccaatacacgtcatgctccacattgtagttgttcagacctccagagtctcttccggggttttgctgctgctgagttctttcattccaattatgatcactttcctaaggttccaggtggctttagccttctgcacatgctttttttgcatcatgcctttcagatggattcctgcctgcctcagcctaataccctccctccccagagacctaaggcttcctgggatctctggtctgtccactttacccagatctccttggactttgagggaacagaaaacttcaaaggccataccttgaattttgtagcccccttccccctgtccatttgggcctgcctacccctccgctggcagcaagcccaggcacggaagcttcttttggcctcagaggggaggctgaaaccatcagccagttttggaagtcctgtccagtctgaggctcttgcccctgactctatgtcccatccgcggtcaaagactgaacatgacttgaaaagcttatcaggacttacagaagtcatggaaattctgaaagaaggcagtagtggtatggacaacaaagggcctctgacagagctggaggatgtagcagatgttcatatgcttgtacattccccggcccatgtccgcgtgaggcttgaccactaccagtacttggctctgcttcgcctgaaggaggtgctgcagaggcttcaggagcagctgactaaggatacagagtcaatgactgggtctcccctgcagaatcagacagcttgcattggagttctctttcccagtgctgaagtggctctgcttatgcatcctgcacccggtgctgtcgatgctgactctgcaggctcagatagcactagcctcgtagattcagagctatctccttcagaggatcgggaactgaagtctgatgcctcatcagaccagggcccagcaagccctgagaaggtcttggaggaaagtagcattgaaaatcaggatgtatcccaggagaggccacatagcaatggagaactgcaggactcaggtccacttgcccagcagctggcagggaagggccatgaggcagtagagtccctacaggccaagaaactgagcagaacccaagcctccagctcaccagctgcattgaagcccccagctggcagggagactgctgtgaatggacagggtgagctcatccccttgaagaacattgagggagaattgtcaagtgctattcacatgaccaaggatgccaccaaggaggctctacatgccaccatggacctcaccaaggaagctgtgtccctgactaaggatgccttcagtttgggcagagatcgaatgacctccaccatgcacaagatgttgtccctgcccccagccaaggagcccatggccaagacagatgagggggtggcagccccagtgagtggaggtgctgcacgactccgatttttctccatgaagaggacggtatctcaacagtcatttgatggtgtctcattggatagcagtggccctgaagaccggatttcagtggacagtgatggcagtgatagctttgtgatgctcttggagtctgagtctggtccagaatctgttccaccaggatctctttcaaatgtctcagataatgctggtgttcaagggagccctcttgtgaataattatggccaggggtcaccagcagccaacagttcagtttcacccagtggagaagacctcatctttcacccggtctcagttctggtcctgaaggtgaatgaggtgtcttttgggattgaggtacgtggtgaggacctgactgtggccctgcaagcagaggaactgaccctccagcagctgggcaccgtgggactctggcagttcctgcatggacagtgcccaggtacatgctttcaggaatcctcaactttgaagactggccacatcaggccagctgtgggccttcgctttgaggtggggcctggagcagctgttcattcccccctggcctcacaaaatggcttcctacatttattgcttcatggctgtgacctcgagctgctcacttcagtgctcagtggcctggggcccttcttggaggatgaggagatcccggtggtagtccccatgcagattgagcttctgaactccagcatcaccctaaaggatgatatcccccccatctatccaacatctccaggccccatccccatcactctggccatggaacatgttgtgctgaagaggagtgatgatggtgtgttccacataggcgctgctgctcaggacaaaccatcagctgaagtacttaaaagtgagaagagacagcccccaaaagaacaggtgtttttggtgcccacaggagaggtttttgaacagcagacatagcaataacaacattctgagacacagaggtgccagtgatggactggatcagcttgaaagaagcacaaagactccgtgatcacaatagtcaaagactggctttggaacacagtaccaagtaattcacagaaaaagtttttggctgcaggattaagtaatgatgagtcttccctttcaactgttgttaaatctgagacatcctgactctcgagctgggaagatgaaagaaactctattatatatttggcctactttccaggcttgggcaaa

SEQ ID NO: 198101 - DNA, 5168 bp, Homo sapiens
  Payload ID: 19078
  Gene Name: UHRF1 binding protein 1-like
  Uniprot ID: A0JNW5
  ENST ID: ENST00000279907
  CDS Start-End: 214-4608
agatggcgcccgcggcggccgtggcggcctgagcgtgatgctccgggttctcggcggcggctgtggccttggccggggccttgggtctctcccggtcgtgagcgatcagcgcctctccgccggccgggctagccgggacagagaggagacggccacgaagagaggaggcagtgagcaacaggacgagaccgcggcgtctccagcctcggtaccatggccgggatcatcaagaaacaaatcttgaagcacctctccagatttaccaaaaatttatctcctgacaagataaatctaagtacccttaaaggagaaggtgaactgaagaatttggagttggatgaagaagtactccagaatatgttggatttgccaacatggcttgctatcaacaaagttttttgtaataaagcgtccattaggatcccatggacaaaactgaaaacacatcccatctgtttgtccctggataaagtaataatggaaatgagtacatgtgaagaaccaagaagccctaatggcccatcaccaattgcaactgcttcaggacaaagtgaatacggctttgctgaaaaagtagttgagggaatttctgtttctgtaaattctatagtcatcagaattggagcaaaagccttcaatgcatcatttgaactttctcagcttcggatctatagtgtaaatgcacactgggaacatggagatttgagatttactcgtattcaggatccacagagaggagaggttttgacttttaaagaaataaattggcagatgataagaatagaggcagatgccacccaaagttcacatcttgaaattatgtgtgctcctgttcgattaataaccaaccaatcaaaaatcagagtcacacttaaaagaaggttaaaggactgcaatgtcatagcaacaaagttagttctaatattggatgacttattatgggttttgactgattcccagttgaaagctatggtacaatatgcaaagtctcttagtgaagcaatagaaaaatcaacagaacaaaggaagagtatggctcctgaacctacacagagctctacagtagtcgcatctgcccagcaagtgaagacaacgcaaacttcaaatgctcctgatgtaaatgatgcaattgtgaaactattcaatgattttgatgttaaggaaacctcccatcatttagtgatttctcatctagatctacacatatgtgatgacattcatgctaaagaaaaagagtcaaacagacgtattactggaggggcaatgcaactctcttttacacagctaactatagattattatccttatcataaagcaggagatagttgtaatcattggatgtattttagtgatgcaaccaaaacaaaaaatggatgggccaatgagttattgcatgaatttgagtgcaacgttgaaatgcttaaacaggctgtgaaggatcataatgtaggttcacctcctaaatccccaacacatgcctctccccagcacacacaaacagagaaggactaccctctgaaagggacatgcagaacaccttcagtattatctcaacaatcaaaagctaagctaatgtctagttctgttgtggttagacttgcagatttcaatatataccaggtctctacagcggaacaatgtcgttcttcccccaaaagcatgatttgctgcaataaaaaatccctatatcttccacaagaaatgtcagctgtctatatagaattcacagaatattactatccagatggaaaggattttccaattccatctcccaacctctatagccagctgaatgcactacagtttactgtggatgaaagaagcattctatggttaaatcaatttctgttggatttaaaacagagtcttaatcagttcatggctgtgtacaagttgaatgacaattcaaaatctgacgagcatgttgatgttcgagttgatggcttaatgctaaagtttgtcattccttctgaagtgaaatctgaatgtcatcaagatcagccacgtgcaatttctattcagagttctgaaatgattgccacaaatacaaggcactgtccaaactgtcgacattctgacctagaagctttgtttcaagactttaaagattgtgatttttttagtaaaacatataccagcttccccaaatcttgtgacaattttaatcttctacatccaattttccagagacatgctcatgaacaagataccaaaatgcatgaaatttataaaggaaatattactccccaattgaataaaaacactcttaaaacttctgctgccacggatgtttgggctgtgtacttttctcaattttggatagattatgaagggatgaaaagtggaaaaggacggccaataagttttgtagactcattccctctttccatttggatttgtcaaccaacaagatatgcagagtcacaaaaagagccgcagacttgtaatcaggtatctctaaatacatcacaaagtgaatctagtgatctggctggccgattgaagcggaagaagctcttgaaggagtattatagtacagagtctgagcctttgacaaatggtggtcagaagccttcttcatcagatacatttttcagattttccccttcctcgtcagaggcagatattcatctcctagttcatgttcataaacatgtcagtatgcagattaatcactaccagtatctgcttctacttttcctgcatgagtcacttatcctgctttcagagaacttaaggaaagatgtagaagctgtaactggcagtcctgctagtcagacatccatttgtattggaattttacttagaagtgcagaactggctcttttgctccatccagtggatcaagcaaatactcttaagtctcctgtttctgaaagtgtgagcccagtggtacctgattatttgcctacagaaaatggggattttttgtcttcaaaaagaaaacaaattagtagggatataaatagaattagaagtgtaactgttaatcatatgtcagacaacagatctatgagtgttgaccttagccatatccctttaaaggatcctttgctttttaaatcagctagtgatacaaatctgcaaaaaggcatttcttttatggactatttatcagataaacatttagggaaaataagtgaagatgaaagtagtggacttgtttacaaaagtggctcaggagaaattggatcagaaacaagtgacaaaaaggattcattttatacagattcaagtagtatcttaaactacagagaagattcgaatatactttcatttgatagtgatggtaatcaaaacatactttcaagtactttaactagtaaaggaaatgaaaccatagagtccatctttaaagctgaagatttgcttccagaagcagcttcactctctgaaaacctggatatcagtaaagaagagacccccccagttagaacacttaaatcacagtcatctttaagtggaaagcctaaggaacgttgcccacccaacctggctcctctctgtgtttcttataagaatatgaaaagaagctcttcacaaatgtcattggataccatttcacttgacagcatgatattggaagaacagttattagaaagtgatggaagtgatagccatatgtttttggaaaaaggaaataaaaagaactcaactacaaattacaggggcacagcagaaagtgtgaatgctggtgcaaacctacagaattatggtgaaacttctccagatgccatcagtacaaattcagagggtgctcaggaaaatcatgatgacctgatgtccgttgtggtatttaaaattactggtgttaatggggaaattgacatccgaggggaagatacagaaatctgtcttcaagtgaaccaggtgacaccagaccaattaggcaatatcagccttcggcattacctttgtaatcgtccagttggttccgatcagaaagctgtaattcattccaaatcctctcctgagatttctctgagatttgaaagtgggcctggtgctgtaatacactctttacttgcagaaaaaaatggatttctgcagtgccacatagaaaacttcagcactgagtttcttacatcttctcttatgaatattcaacattttttggaagatgaaactgttgcaacagtaatgccaatgaagatacaagtttctaacacgaaaataaatttaaaagatgatagtccccggagtagtacagtatcccttgaaccagctcctgtaactgtacatattgatcatcttgtggtagagagaagtgacgatggctcttttcatatcagagattctcacatgcttaacactggaaatgatttgaaagaaaatgtcaaaagcgattcagtgctgctgaccagtggaaagtatgatctgaagaaacaacgcagtgtcacgcaagccactcagacaagcccaggggttccttggccttctcagtcagctaactttcctgagttctcctttgacttcactagggaacagctcatggaagagaatgaatctcttaaacaggaactggctaaagctaaaatggctcttgcagaggctcacttggaaaaagatgctcttcttcatcatataaagaagatgacagttgaatagcaggagtggcagtcaaaactgaaattatagctctggagtaggaaggttatatttataatgtggatgttaccagttaggggaagacttttattttcatgaaaagacaataaaacaaaatggaatgtgatgaagtggtgactatttcaaagccagtttagaaagtattagtacgggcattacaatcttttggttgttttgtgttttggggcttaaccctcttttaagctgttgtgatctagggaagtcaacacatagtgtaaaataattacatgcctaatgaaaagaagatgtcatttcctaattttgatatctcattttcggcattttttaaaatgtaaaaggaaaacctcttgtgttcacacagattgctgaattgatttctccatatttgttaataatttactattatttacaaagattcaaatgcttttatgactaatgtaaaatgaaaagaggcttacattttaaatgttattaaaattatgtacttaaatctataattatttaattattgtaaaaagtccaagcagatcaataaactatataattaatgggtttgg

SEQ ID NO: 198102 - DNA, 2023 bp, Homo sapiens
  Payload ID: 19078
  Gene Name: UHRF1 binding protein 1-like
  Uniprot ID: A0JNW5
  ENST ID: ENST00000356828
  CDS Start-End: 213-1781
gatggcgcccgcggcggccgtggcggcctgagcgtgatgctccgggttctcggcggcggctgtggccttggccggggccttgggtctctcccggtcgtgagcgatcagcgcctctccgccggccgggctagccgggacagagaggagacggccacgaagagaggaggcagtgagcaacaggacgagaccgcggcgtctccagcctcggtaccatggccgggatcatcaagaaacaaatcttgaagcacctctccagatttaccaaaaatttatctcctgacaagataaatctaagtacccttaaaggagaaggtgaactgaagaatttggagttggatgaagaagtactccagaatatgttggatttgccaacatggcttgctatcaacaaagttttttgtaataaagcgtccattaggatcccatggacaaaactgaaaacacatcccatctgtttgtccctggataaagtaataatggaaatgagtacatgtgaagaaccaagaagccctaatggcccatcaccaattgcaactgcttcaggacaaagtgaatacggctttgctgaaaaagtagttgagggaatttctgtttctgtaaattctatagtcatcagaattggagcaaaagccttcaatgcatcatttgaactttctcagcttcggatctatagtgtaaatgcacactgggaacatggagatttgagatttactcgtattcaggatccacagagaggagaggttttgacttttaaagaaataaattggcagatgataagaatagaggcagatgccacccaaagttcacatcttgaaattatgtgtgctcctgttcgattaataaccaaccaatcaaaaatcagagtcacacttaaaagaaggttaaaggactgcaatgtcatagcaacaaagttagttctaatattggatgacttattatgggttttgactgattcccagttgaaagctatggtacaatatgcaaagtctcttagtgaagcaatagaaaaatcaacagaacaaaggaagagtatggctcctgaacctacacagagctctacagtagtcgcatctgcccagcaagtgaagacaacgcaaacttcaaatgctcctgatgtaaatgatgcaattgtgaaactattcaatgattttgatgttaaggaaacctcccatcatttagtgatttctcatctagatctacacatatgtgatgacattcatgctaaagaaaaagagtcaaacagacgtattactggaggggcaatgcaactctcttttacacagctaactatagattattatccttatcataaagcaggagatagttgtaatcattggatgtattttagtgatgcaaccaaaacaaaaaatggatgggccaatgagttattgcatgaatttgagtgcaacgttgaaatgcttaaacaggctgtgaaggatcataatgtaggttcacctcctaaatccccaacacatgcctctccccagcacacacaaacagagaaggactaccctctgaaagggacatgcagaacaccttcagtattatctcaacaatcaaaagctaagctaatgtctagttctgttgtggttagacttgcagatttcaatatataccaggtctctacagcggaacaatgtcgttcttcccccaaaagcatgatttgctgcaataaaaaatccctatatcttccacaagaaatgtcagctgtctatatagaattcacagaatattactatccagatggaaaggattttccaactgccttcctaagcagatgagaaaactcaagatagatgaaggaagacatctgctctgcatctcatagggagtaaaatggcacagttgaaactcaagcattgtcttgtaaatctaaattcattgttttttctccactgtattacactgctcccctttgcccctgtattcaccacggccattgtctgttattgcataatcatagtattccagccatgcccccataattgtttttcttaaataaaatatatcattgaacaagtaa

SEQ ID NO: 198103 - DNA, 4088 bp, Homo sapiens
  Payload ID: 19078
  Gene Name: UHRF1 binding protein 1-like
  ENST ID: ENST00000545232
  CDS Start-End: 251-3595
agccaataagggaaggcagaaggaagtagatttaagggagagctctacagtagtcgcatctgcccagcaagtgaagacaacgcaaacttcaaatgctcctgatgtaaatgatgcaattgtgaaactattcaatgattttgatgttaaggaaacctcccatcatttagtgatttctcatctagatctacacatatgtgatgacattcatgctaaagaaaaagagtcaaacagacgtattactggaggggcaatgcaactctcttttacacagctaactatagattattatccttatcataaagcaggagatagttgtaatcattggatgtattttagtgatgcaaccaaaacaaaaaatggatgggccaatgagttattgcatgaatttgagtgcaacgttgaaatgcttaaacaggctgtgaaggatcataatgtaggttcacctcctaaatccccaacacatgcctctccccagcacacacaaacagagaaggactaccctctgaaagggacatgcagaacaccttcagtattatctcaacaatcaaaagctaagctaatgtctagttctgttgtggttagacttgcagatttcaatatataccaggtctctacagcggaacaatgtcgttcttcccccaaaagcatgatttgctgcaataaaaaatccctatatcttccacaagaaatgtcagctgtctatatagaattcacagaatattactatccagatggaaaggattttccaattccatctcccaacctctatagccagctgaatgcactacagtttactgtggatgaaagaagcattctatggttaaatcaatttctgttggatttaaaacagagtcttaatcagttcatggctgtgtacaagttgaatgacaattcaaaatctgacgagcatgttgatgttcgagttgatggcttaatgctaaagtttgtcattccttctgaagtgaaatctgaatgtcatcaagatcagccacgtgcaatttctattcagagttctgaaatgattgccacaaatacaaggcactgtccaaactgtcgacattctgacctagaagctttgtttcaagactttaaagattgtgatttttttagtaaaacatataccagcttccccaaatcttgtgacaattttaatcttctacatccaattttccagagacatgctcatgaacaagataccaaaatgcatgaaatttataaaggaaatattactccccaattgaataaaaacactcttaaaacttctgctgccacggatgtttgggctgtgtacttttctcaattttggatagattatgaagggatgaaaagtggaaaaggacggccaataagttttgtagactcattccctctttccatttggatttgtcaaccaacaagatatgcagagtcacaaaaagagccgcagacttgtaatcaggtatctctaaatacatcacaaagtgaatctagtgatctggctggccgattgaagcggaagaagctcttgaaggagtattatagtacagagtctgagcctttgacaaatggtggtcagaagccttcttcatcagatacatttttcagattttccccttcctcgtcagaggcagatattcatctcctagttcatgttcataaacatgtcagtatgcagattaatcactaccagtatctgcttctacttttcctgcatgagtcacttatcctgctttcagagaacttaaggaaagatgtagaagctgtaactggcagtcctgctagtcagacatccatttgtattggaattttacttagaagtgcagaactggctcttttgctccatccagtggatcaagcaaatactcttaagtctcctgtttctgaaagtgtgagcccagtggtacctgattatttgcctacagaaaatggggattttttgtcttcaaaaagaaaacaaattagtagggatataaatagaattagaagtgtaactgttaatcatatgtcagacaacagatctatgagtgttgaccttagccatatccctttaaaggatcctttgctttttaaatcagctagtgatacaaatctgcaaaaaggcatttcttttatggactatttatcagataaacatttagggaaaataagtgaagatgaaagtagtggacttgtttacaaaagtggctcaggagaaattggatcagaaacaagtgacaaaaaggattcattttatacagattcaagtagtatcttaaactacagagaagattcgaatatactttcatttgatagtgatggtaatcaaaacatactttcaagtactttaactagtaaaggaaatgaaaccatagagtccatctttaaagctgaagatttgcttccagaagcagcttcactctctgaaaacctggatatcagtaaagaagagacccccccagttagaacacttaaatcacagtcatctttaagtggaaagcctaaggaacgttgcccacccaacctggctcctctctgtgtttcttataagaatatgaaaagaagctcttcacaaatgtcattggataccatttcacttgacagcatgatattggaagaacagttattagaaagtgatggaagtgatagccatatgtttttggaaaaaggaaataaaaagaactcaactacaaattacaggggcacagcagaaagtgtgaatgctggtgcaaacctacagaattatggtgaaacttctccagatgccatcagtacaaattcagagggtgctcaggaaaatcatgatgacctgatgtccgttgtggtatttaaaattactggtgttaatggggaaattgacatccgaggggaagatacagaaatctgtcttcaagtgaaccaggtgacaccagaccaattaggcaatatcagccttcggcattacctttgtaatcgtccagttggttccgatcagaaagctgtaattcattccaaatcctctcctgagatttctctgagatttgaaagtgggcctggtgctgtaatacactctttacttgcagaaaaaaatggatttctgcagtgccacatagaaaacttcagcactgagtttcttacatcttctcttatgaatattcaacattttttggaagatgaaactgttgcaacagtaatgccaatgaagatacaagtttctaacacgaaaataaatttaaaagatgatagtccccggagtagtacagtatcccttgaaccagctcctgtaactgtacatattgatcatcttgtggtagagagaagtgacgatggctcttttcatatcagagattctcacatgcttaacactggaaatgatttgaaagaaaatgtcaaaagcgattcagtgctgctgaccagtggaaagtatgatctgaagaaacaacgcagtgtcacgcaagccactcagacaagcccaggggttccttggccttctcagtcagctaactttcctgagttctcctttgacttcactagggaacagctcatggaagagaatgaatctcttaaacaggaactggctaaagctaaaatggctcttgcagaggctcacttggaaaaagatgctcttcttcatcatataaagaagatgacagttgaatagcaggagtggcagtcaaaactgaaattatagctctggagtaggaaggttatatttataatgtggatgttaccagttaggggaagacttttattttcatgaaaagacaataaaacaaaatggaatgtgatgaagtggtgactatttcaaagccagtttagaaagtattagtacgggcattacaatcttttggttgttttgtgttttggggcttaaccctcttttaagctgttgtgatctagggaagtcaacacatagtgtaaaataattacatgcctaatgaaaagaagatgtcatttcctaattttgatatctcattttcggcattttttaaaatgtaaaaggaaaacctcttgtgttcacacagattgctgaattgatttctccatatttgttaataatttactattatttacaaagattcaaatgcttttatgactaatgtaaaatgaaaagaggcttacattttaaatgttattaaaattatgtacttaaa

SEQ ID NO: 198104 - DNA, 581 bp, Homo sapiens
  Payload ID: 19078
  Gene Name: UHRF1 binding protein 1-like
  ENST ID: ENST00000550544
  CDS Start-End: 380-581
attttgaagctgaaaaagtataaggaaagaagtacaggagactattttgcaatattaccatcatagacataaatactattctgttaagacttgcaaggaagattttggtagcttaggttgtgattggtaacagagatggcagtcgtagttaaagactaatagattgaagagctctacagtagtcgcatctgcccagcaagtgaagacaacgcaaacttcaaatgctcctgatgtaaatgatgcaattgtgaaactattcaatgattttgatgttaaggaaacctcccatcatttagtgatttctcatctagatctacacatatgtgatgacattcatgctaaagaaaaagagtcaaacagacgtattactggaggggcaatgcaactctcttttacacagctaactatagattattatccttatcataaagcagagaaggactaccctctgaaagggacatgcagaacaccttcagtattatctcaacaatcaaaagctaagctaatgtctagttctgttgtggttagacttgcagatttcaatatataccaggtctctacagcggaacaatgtcgttctt

SEQ ID NO: 198105 - DNA, 713 bp, Homo sapiens
  Payload ID: 19078
  Gene Name: UHRF1 binding protein 1-like
  ENST ID: ENST00000548712
  CDS Start-End: 1-614
gttccgatcagaaagctgtaattcattccaaatcctctcctgagatttctctgagatttgaaagtgggcctggtgctgtaatacactctttacttgcagaaaaaaatggatttctgcagtgccacatagaaaacttcagcactgagtttcttacatcttctcttatgaatattcaacattttttggaagatgaaactgttgcaacagtaatgccaatgaagatacaagtttctaacacgaaaataaatttaaaagatgatagtccccggagtagtacagtatcccttgaaccagctcctgtaactgtacatattgatcatcttgtggtagagagaagtgacgatggctcttttcatatcagagattctcacatgcttaacactggaaatgatttgaaagaaaatgtcaaaagcgattcagtgctgctgaccagtggaaagtatgatctgaagaaacaacgcagtgtcacgcaagccactcagacaagcccaggggttccttggccttctcagtcagctaactttcctgagttctcctttgacttcactagggaacagttgaacaagagatttttcaatcaagactttggaactacgaagatggaagagatttgaagagggatatagaatgagtaaattaagcaactttttaatatcctatttctataaatatccagaatttaaaacattcctgtattataatatctaaaaaca

SEQ ID NO: 198106 - DNA, 664 bp, Homo sapiens
  Payload ID: 19078
  Gene Name: UHRF1 binding protein 1-like
  ENST ID: ENST00000551973
  CDS Start-End: 273-664
agttggtagtaccgttagccaataagggaaggcagaaggaagtagatttaagggaggtgaggagctctacagtagtcgcatctgcccagcaagtgaagacaacgcaaacttcaaatgctcctgatgtaaatgatgcaattgtgaaactattcaatgattttgatgttaaggaaacctcccatcatttagtgatttctcatctagatctacacatatgtgatgacattcatgctaaagaaaaagagtcaaacagacgtattactggaggggcaatgcaactctcttttacacagctaactatagattattatccttatcataaagcaggagatagttgtaatcattggatgtattttagtgatgcaaccaaaacaaaaaatggatgggccaatgagttattgcatgaatttgagtgcaacgttgaaatgcttaaacaggctgtgaaggatcataatgtaggttcacctcctaaatccccaacacatgcctctccccagcacacacaaacagagaaggactaccctctgaaagggacatgcagaacaccttcagtattatctcaacaatcaaaagctaagctaatgtctagttctgttgtggttagacttgcagatttcaatatataccaggtctctacagcggaacaatgtcgttcttcccccaa

SEQ ID NO: 198107 - DNA, 559 bp, Homo sapiens
  Payload ID: 19078
  Gene Name: UHRF1 binding protein 1-like
  ENST ID: ENST00000547428
  CDS Start-End: 190-327
cggcctgagcgtgatgctccgggttctcggcggcggctgtggccttggccggggccttgggtctctcccggtcgtgagcgatcagcgcctctccgccggccgggctagccgggacagagaggagacggccacgaagagaggaggcagtgagcaacaggacgagaccgcggcgtctccagcctcggtaccatggccgggatcatcaagaaacaaatcttgaagcacctctccagcgttccctgctggctgtggtggagattggtgtgctgtgaattgcataatcacccaaatgagtaccagaggagtctaagaaaccctggcaactgactgcttgctttcaccaggaatagggacctttttctgaatttcctgccctcagatttaccaaaaatttatctcctgacaagataaatctaagtacccttaaaggagaaggtgaactgaagaatttggagttggatgaagaagtactccagaatatgttggatttgccaacatggcttgctatcaacaaagttttttgtaataaagcgtccattaggatcccatggacaaaact

SEQ ID NO: 198108 - DNA, 542 bp, Homo sapiens
  Payload ID: 19078
  Gene Name: UHRF1 binding protein 1-like
  ENST ID: ENST00000548045
  CDS Start-End: 234-542
agaaggaagtagatttaagggagagctctacagtagtcgcatctgcccagcaagtgaagacaacgcaaacttcaaatgctcctgatgtaaatgatgcaattgtgaaactattcaatgattttgatgttaaggaaacctcccatcatttagtgatttctcatctagatctacacatatgtgatgacattcatgctaaagaaaaagagtcaaacagacgtattactggaggggcaatgcaactctcttttacacagctaactatagattattatccttatcataaagcagagaaggactaccctctgaaagggacatgcagaacaccttcagtattatctcaacaatcaaaagctaagctaatgtctagttctgttgtggttagacttgcagatttcaatatataccaggtctctacagcggaacaatgtcgttcttcccccaaaagcatgatttgctgcaataaaaaatccctatatcttccacaagaaatgtcagctgtctatatagaattcacagaatattactatccagatggaaaggat

SEQ ID NO: 198109 - DNA, 560 bp, Homo sapiens
  Payload ID: 19078
  Gene Name: UHRF1 binding protein 1-like
  ENST ID: ENST00000551980
  CDS Start-End: 380-560
attttgaagctgaaaaagtataaggaaagaagtacaggagactattttgcaatattaccatcatagacataaatactattctgttaagacttgcaaggaagattttggtagcttaggttgtgattggtaacagagatggcagtcgtagttaaagactaatagattgaagagctctacagtagtcgcatctgcccagcaagtgaagacaacgcaaacttcaaatgctcctgatgtaaatgatgcaattgtgaaactattcaatgattttgatgttaaggaaacctcccatcatttagtgatttctcatctagatctacacatatgtgatgacattcatgctaaagaaaaagagtcaaacagacgtattactggaggggcaatgcaactctcttttacacagctaactatagattattatccttatcataaagcaggagatagttgtaatcattggatgtattttagtgatgcaaccaaaacaaaaaatggatgggccaatgagttattgcatgaatttgagtgcaacgttgaaatgcttaaacaggctgtgaaggatcata

SEQ ID NO: 198110 - DNA, 3142 bp, Homo sapiens
  Payload ID: 19079
  Gene Name: UL16 binding protein 1
  Uniprot ID: Q9BZM6
  ENST ID: ENST00000229708
  CDS Start-End: 44-778
gggaaccatcagcgcctcctgtccacggagctccaggtctacaatggcagcggccgccagccccgcgttccttctgtgcctcccgcttctgcacctgctgtctggctggtcccgggcaggatgggtcgacacacactgtctttgctatgacttcatcatcactcctaagtccagacctgaaccacagtggtgtgaagttcaaggcctggtggatgaaaggccttttcttcactatgactgtgttaaccacaaggccaaagcctttgcttctctggggaagaaagtcaatgtcacaaaaacctgggaagaacaaactgaaacactaagagacgtggtggatttccttaaagggcaactgcttgacattcaagtggagaatttaatacccattgagcccctcaccctgcaggccaggatgtcttgtgagcatgaagcccatggacacggcagaggatcttggcagttcctcttcaatggacagaagttcctcctctttgactcaaacaacagaaagtggacagcacttcatcctggagccaagaagatgacagagaagtgggagaagaacagggatgtgaccatgttcttccagaagatttcactgggggattgtaagatgtggcttgaagaatttttgatgtactgggaacaaatgctggatccaacaaaaccaccctctctggccccaggcacaacccaacccaaggccatggccaccaccctcagtccctggagccttctcatcatcttcctctgcttcattctagctggcagatgaggagagttgtttagagtgacaggtggaaagtgatatcaagaagcctctgttagcctggtctgggtcctgctctcccttcagggaggccgcctgtctactcaccactgtgcctttctggaaagcaggagttcaagccttagcaagcccagaggcccccagcagacgatgaggacattgtcggctcaacatctcaggccactcattaccttcgctcatgatcccagcagccatttttcttaacaccttctgccactttctgtcggtgctaatggatggaactcctgcacaagttttaactgaacaagaaatcccagcaaaaggcatttttttttctacttctttgattgtagaaaagcagacacttctctgaaacatgaccttattcttccaaacagtatcgctagtaaaatagcatgctggacttcagacctcagggatccttttgatgcactgaccaggaattgtgataatccttttcatttttatggctttttacagtttctcattctgtcaaccatattgaagtgaagtggcatagtcttcactcactgtaatctccagctcctgggctcaagtgatcctctagactcagcctctagaatagctgggactacaggcacatgccaccaggactggcaaactgttttatttttaggtagaggtagggtcttcctatgttgcccaggatggtcttcaaatcttggtctcgagcaatgctaccaccttggcctcccaatgctctgggattacagacatgaaccacagtgcctgttgtagaaatttttaattatttaatatgaaaatattacattcatgattattttatttagtaaataaaataatagagagcccagaaatcaacctgcacacctaccgccatctaatcttcaatagaaatgggcaatgtgggaaagactccctattcgaaaattagtgctggaatatctggccaaccatatgcagaagaatgaaactgaacccctacttctccccatatatgtaaaataattcaatatggatgaaagatttaaatataagtactaaaactgtaaaaatcctggaatataacctaagaaataccaatgtggacatagggcctggcaaagatttcatgaagaagacactaaaaacaattgcaacaaaaacagaaattgacaaatggggcctcattaaactaaagagcttctgcacagaaaaagaaactagcaacacagtaaacagacagcctgtagaatggggaaaactatttgcaaactctgcatctgatgaaggtccaatatccagaatctacaaggaacttaaacaattcaacaagcaagaagaaaaaacccaattaaaattgggcaaaggcatgaacagacacttttcaaaagaagacctacaattggccaacaaacatgaaaaaatgctcagtatcactaatcatcagataagtgcaaatcaaaactgcaatgagttaccatctcttaccagtcacaaagtcagagatggtggtgaggctgcagagcaaaagaaacagacactgttggtgggaaagcaaacttgttcagccactatggaaagcagtttggagatttctccaagaacttaaaatagaactaccattcaatcccgcaatcccactactcgggatatacccacaggaaaagaattcattttatcaaaaagacacctgcaccaatatgttcattacagtgctattctcaccagcaaggacagagaatcaatctaagtgcccaacaacagtaaattcaatgaaaaaaaatgtggtacatagatacgatggaaaactatgcagccatgaaacacaagaaaatcatgtccttttcagcaacatggatgcaactagaggctattatcctaagcaacctaatgcaagaacagaaaaccacatactgcatcttcccattggaaagtggcagctaaacattaaattcgcatgaaccacagatgctggagatcaccagaccggggagagaagaggggcacctgggctgaaaaacacacctgttgggtatcatgcttactgtctgggcgatgggatcattgggacaccaagcctcagcttctcaaattctacccatgtaacaaacctgtatatgtaccttgtattatataggttgaaattaaagatgaataaataaaataaaatgacacaaggccaaaaacaaatgggtttaactgaccagagcgagagaactctgcactatgaacccaaacccagctcaaaaagataaaatctagtcatttaagataatcataagttgtatgatgataattgtataaaaatttgtatgatgataattgtataataattatacatgaaagtgccaaaaccctacaattaaacactgtataatggaa

SEQ ID NO: 198111 - DNA, 1349 bp, Homo sapiens
  Payload ID: 19080
  Gene Name: UL16 binding protein 2
  Uniprot ID: Q9BZM5
  ENST ID: ENST00000367351
  CDS Start-End: 74-814
aaaaccttgaggtgattcatcttccaggctctccttccatcaagtctctcatccctagcgctctgggtccttaatggcagcagccgccgctaccaagatccttctgtgcctcccgcttctgctcctgctgtccggctggtcccgggctgggcgagccgaccctcactctctttgctatgacatcaccgtcatccctaagttcagacctggaccacggtggtgtgcggttcaaggccaggtggatgaaaagacttttcttcactatgactgtggcaacaagacagtcacacctgtcagtcccctggggaagaaactaaatgtcacaacggcctggaaagcacagaacccagtactgagagaggtggtggacatacttacagagcaactgcgtgacattcagctggagaattacacacccaaggaacccctcaccctgcaggcaaggatgtcttgtgagcagaaagctgaaggacacagcagtggatcttggcagttcagtttcgatgggcagatcttcctcctctttgactcagagaagagaatgtggacaacggttcatcctggagccagaaagatgaaagaaaagtgggagaatgacaaggttgtggccatgtccttccattacttctcaatgggagactgtataggatggcttgaggacttcttgatgggcatggacagcaccctggagccaagtgcaggagcaccactcgccatgtcctcaggcacaacccaactcagggccacagccaccaccctcatcctttgctgcctcctcatcatcctcccctgcttcatcctccctggcatctgaggagagtcctttagagtgacaggttaaagctgataccaaaaggctcctgtgagcacggtcttgatcaaactcgcccttctgtctggccagctgcccacgacctacggtgtatgtccagtggcctccagcagatcatgatgacatcatggacccaatagctcattcactgccttgattccttttgccaacaattttaccagcagttatacctaacatattatgcaattttctcttggtgctacctgatggaattcctgcacttaaagttctggctgactaaacaagatatatcattttctttcttctctttttgtttggaaaatcaagtacttctttgaatgatgatctctttcttgcaaatgatattgtcagtaaaataatcacgttagacttcagacctctggggattctttccgtgtcctgaaagagaatttttaaattatttaataagaaaaaatttatattaatgattgtttcctttagtaatttattgttctgtactgatatttaaataaagagttctatttcccaaaaa

SEQ ID NO: 198112 - DNA, 988 bp, Homo sapiens
  Payload ID: 19081
  Gene Name: UL16 binding protein 3
  Uniprot ID: Q9BZM4
  ENST ID: ENST00000367339
  CDS Start-End: 30-764
ccttgtgtcccgggcgctcctggtctacaatggcagcggccgccagccccgcgatccttccgcgcctcgcgattcttccgtacctgctattcgactggtccgggacggggcgggccgacgctcactctctctggtataacttcaccatcattcatttgcccagacatgggcaacagtggtgtgaggtccagagccaggtggatcagaagaattttctctcctatgactgtggcagtgacaaggtcttatctatgggtcacctagaagagcagctgtatgccacagatgcctggggaaaacaactggaaatgctgagagaggtggggcagaggctcagactggaactggctgacactgagctggaggatttcacacccagtggacccctcacgctgcaggtcaggatgtcttgtgagtgtgaagccgatggatacatccgtggatcttggcagttcagcttcgatggacggaagttcctcctctttgactcaaacaacagaaagtggacagtggttcacgctggagccaggcggatgaaagagaagtgggagaaggatagcggactgaccaccttcttcaagatggtctcaatgagagactgcaagagctggcttagggacttcctgatgcacaggaagaagaggctggaacccacagcaccacccaccatggccccaggcttagctcaacccaaagccatagccaccaccctcagtccctggagcttcctcatcatcctctgcttcatcctccctggcatctgagaagagtcatttagagtgacaggtggaaggtgatatcaagaagcctctgttagcctggtctggttcctgctctcccttcagggaggccgcctgtctactcaccactgtgcctttctggaaagcaggagttcaagccttagcaagcccagaggcccccagcagatgatgaggacattgtcggctcaacatctcaggccactcattaccttcgctcatgatcccag

SEQ ID NO: 198113 - DNA, 735 bp, Homo sapiens
  Payload ID: 19081
  Gene Name: UL16 binding protein 3
  Uniprot ID: Q9BZM4
  ENST ID: ENST00000438272
  CDS Start-End: 1-735
atggcagcggccgccagccccgcgatccttccgcgcctcgcgattcttccgtacctgctattcgactggtccgggacggggcgggccgacgctcactctctctggtataacttcaccatcattcatttgcccagacatgggcaacagtggtgtgaggtccagagccaggtggatcagaagaattttctctcctatgactgtggcagtgacaaggtcttatctatgggtcacctagaagagcagctgtatgccacagatgcctggggaaaacaactggaaatgctgagagaggtggggcagaggctcagactggaactggctgacactgagctggaggatttcacacccagtggacccctcacgctgcaggtcaggatgtcttgtgagtgtgaagccgatggatacatccgtggatcttggcagttcagcttcgatggacggaagttcctcctctttgactcaaacaacagaaagtggacagtggttcacgctggagccaggcggatgaaagagaagtgggagaaggatagcggactgaccaccttcttcaagatggtctcaatgagagactgcaagagctggcttagggacttcctgatgcacaggaagaagaggctggaacccacagcaccacccaccatggccccaggcttagctcaacccaaagccatagccaccaccctcagtccctggagcttcctcatcatcctctgcttcatcctccctggcatctga

SEQ ID NO: 198114 - DNA, 2048 bp, Homo sapiens
  Payload ID: 19082
  Gene Name: UNC homeobox
  Uniprot ID: A6NJT0
  ENST ID: ENST00000316333
  CDS Start-End: 112-1707
tccgggtccctgtctccgccgccgccgcccgcgcctcccgccgctggcccgccccggccccggcccgcgcccccgcgccccgccaccggccccgccggccccccgcgcgagatgatggacggccgcctcctggaacacccgcatgcccagttcgggggctcgctgggcggcgtggtgggcttcccctacccgctgggccaccaccacgtgtacgagctggccgggcaccagctgcagtcggccgccgccgccgcctcggtgcccttctccatcgacggcctgctcgggggctcgtgcgccgccgccgcctcggtggtcaaccccacgccgctgctgccagccgcctgcggggtcggcggggacggccagcccttcaagctgtcagactcgggggacccggacaaggagagcccgggctgcaagcggcggcgcacccgcaccaacttcaccggctggcagctggaggagctggagaaggcgttcaacgagagccactatcccgacgtgttcatgcgcgaggcgctggcgctgcgcctagacctggtcgagtcccgagttcaggtctggttccaaaaccgccgggccaagtggaggaagaaggagaacacgaaaaagggcccggggcggccggcgcacaactcgcacccgaccacgtgcagcggcgagcccatggacccggaggagatcgcgcgcaaggagctggagaagatggagaagaagaagcgcaagcacgagaagaagctgctgaagagccagggccgccacttgcactcgcccggcggcctgtccctgcacagcgcgcccagctccgacagcgacagcggcggcggcggcctgtctccggagccgcccgagccgccgccgcccgccgccaagggccccggagcgcacgcctcgggcgccgcggggaccgcgcccgcccctcccggcgagccgcctgcacccggcacctgcgaccccgccttctacccgagccaaagaagcggcgccggcccacagccgcgcccaggtcgccctgcggacaaggacgcggcctcgtgcgggccaggggccgctgtggcggcggtggagcgcggcgccgcggggctgcccaaggccagcccattcagcgtggagagcctcctgtccgactcgccgccgcgccggaaagccgcttccaacgccgccgccgccgccgccgcggggctggacttcgcgcccgggctgccgtgcgcgccgcggaccctgatcggcaagggccacttcctcctctaccccatcacgcagccgctcggcttcctggtgccgcaggccgcgctcaagggcggcgcgggcctggagccggcgcccaaggacgcgccgcccgcgcccgccgtgccgcccgcgccgcctgcccaggccagtttcggggccttctcggggcccggcggcgccccggactcggccttcgcgcgtcgcagccccgacgccgtcgcctccccgggggccccagccccggccccggcgcctttccgggacctcgcctcggcagcggctaccgagggcggcggcggggactgcgcggacgcggggaccgccggccccgcgcccccgccgcccgcgccgtcgcccaggcccggccctcggcctcccagccccgccgaggagccggccacctgcggggttcccgagcctggcgcggcggccggacccagcccgccggagggcgaggagctggacatggactgaggccgcggcggccgggagaggcgcgtagccggcccgcggccgctcgctcaggctccgactcacgcaacgaatcaggtgatcggctctagaaacactgctttcccttcttttcttttgttttctttcttttattattttttttaagagtaaacgaaagtgctgtatgaattcggacccaggcagcaaccacaggactgggggtgagaccctcctcctcccaagagagcaaaaaggacccatggcccccaaaaaaccccacaacgagaatcctcagccttgtaaaatgcaaaaatgtctaagaatatttatatatgtaccatttttgataaataaagctggtc

SEQ ID NO: 198115 - DNA, 1653 bp, Homo sapiens
  Payload ID: 19083
  Gene Name: unc-119 lipid binding chaperone
  Uniprot ID: Q13432
  ENST ID: ENST00000301032
  CDS Start-End: 75-737
gctcccacttcccccggctccagccggcgcaggcagcggcggcagcagcaggcgagcctcggccccgcaaggccatgaaggtgaagaagggcggcggtggggccgggacggcgacggagtccgctccggggccctcgggccagagcgtggcccccataccacagccgcctgcggaatccgaatctgggtccgagtcggagccggacgcaggcccagggcccaggccggggccgctgcagaggaagcagccgatcgggccggaggacgtgctggggctgcagcggatcaccggtgactacctctgctcccctgaggagaatatctacaagatcgactttgtcaggtttaagattcgggacatggactcaggcactgtcctctttgaaatcaagaagcccccagtctcagaacggttgcccatcaaccggcgggacctggaccccaatgctgggcgctttgtccgctaccagttcacgcctgccttcctccgcctgaggcaggtgggagccacggtggagttcacagtgggagacaagcctgtcaacaacttccgcatgatcgagaggcactacttccgcaaccagctactcaaaagcttcgacttccactttggcttctgcatccccagcagcaagaacacctgcgagcacatttacgacttcccccctctctccgaggagctgagtgcgcgggcagggtcttctgggagtggggaagtgggggcgtctagagactgagctgcgggagggagagggacttgtgggtctgatcccatttctccccaccctggggctcttctgtgtctgccaccattcccatatcatccgtagagaaagaggctggggatatttcaggctgtttggctgtccctgtaccccagtcctgaagcccctgcagtggcgggactcaagctcctgacctttgcccggcctggctgggcctctcttgcagtcagcgagatgatccgccacccgtatgagacccagtctgacagcttctacttcgtggatgaccggctggtgatgcacaataaagcagactattcctacagcgggacaccctgaccccacggctgccctgaccccaggaggctccagttctgggctgggagctgtgacctccccaacgctcacccctcaaccccaagtcctctgcttggggagttctccaggagctccggaccctgagtcaatgttgggaggaagggtacctggtgtccccagtcaagcccatgaagcccatgcggcctgctacatggggtggggtcgtagggaggctgtttgcctccacgtctaggaaggcctgtgagaggagcagtcaggacttccggacaacttagctgggccctacttgggcccaagtttcagaatagtgttcccctatcaaggctgtgactagatcaggcagggatccattccctgtcccctgcccactaccttcaggccatttagagttgtaaatttacaaagatccacggtgggctccagctgccaagccacccaagggagtctgggccctaggcctagccccatccctccccatgaggggccaagacactgcctaaggtgtgggagggactggctgagattgcagcccatggtaggagctggaccaactgtatatagttttcaataaactttttccttttctgtt

SEQ ID NO: 198116 - DNA, 1424 bp, Homo sapiens
  Payload ID: 19083
  Gene Name: unc-119 lipid binding chaperone
  Uniprot ID: Q13432
  ENST ID: ENST00000335765
  CDS Start-End: 112-834
agtacctggggccccggccgggggcggggctgcggatgctcccacttcccccggctccagccggcgcaggcagcggcggcagcagcaggcgagcctcggccccgcaaggccatgaaggtgaagaagggcggcggtggggccgggacggcgacggagtccgctccggggccctcgggccagagcgtggcccccataccacagccgcctgcggaatccgaatctgggtccgagtcggagccggacgcaggcccagggcccaggccggggccgctgcagaggaagcagccgatcgggccggaggacgtgctggggctgcagcggatcaccggtgactacctctgctcccctgaggagaatatctacaagatcgactttgtcaggtttaagattcgggacatggactcaggcactgtcctctttgaaatcaagaagcccccagtctcagaacggttgcccatcaaccggcgggacctggaccccaatgctgggcgctttgtccgctaccagttcacgcctgccttcctccgcctgaggcaggtgggagccacggtggagttcacagtgggagacaagcctgtcaacaacttccgcatgatcgagaggcactacttccgcaaccagctactcaaaagcttcgacttccactttggcttctgcatccccagcagcaagaacacctgcgagcacatttacgacttcccccctctctccgaggagctgatcagcgagatgatccgccacccgtatgagacccagtctgacagcttctacttcgtggatgaccggctggtgatgcacaataaagcagactattcctacagcgggacaccctgaccccacggctgccctgaccccaggaggctccagttctgggctgggagctgtgacctccccaacgctcacccctcaaccccaagtcctctgcttggggagttctccaggagctccggaccctgagtcaatgttgggaggaagggtacctggtgtccccagtcaagcccatgaagcccatgcggcctgctacatggggtggggtcgtagggaggctgtttgcctccacgtctaggaaggcctgtgagaggagcagtcaggacttccggacaacttagctgggccctacttgggcccaagtttcagaatagtgttcccctatcaaggctgtgactagatcaggcagggatccattccctgtcccctgcccactaccttcaggccatttagagttgtaaatttacaaagatccacggtgggctccagctgccaagccacccaagggagtctgggccctaggcctagccccatccctccccatgaggggccaagacactgcctaaggtgtgggagggactggctgagattgcagcccatggtaggagctggaccaactgtatatagttttcaataaactttttccttttctgttc

SEQ ID NO: 198117 - DNA, 676 bp, Homo sapiens
  Payload ID: 19083
  Gene Name: unc-119 lipid binding chaperone
  ENST ID: ENST00000444148
  CDS Start-End: 53-676
gccggcgcaggcagcggcggcagcagcaggcgagcctcggccccgcaaggccatgaaggtgaagaagggcggcggtggggccgggacggcgacggagtccgctccggggccctcgggccagagcgtggcccccataccacagccgcctgcggaatccgaatctgggtccgagtcggagccggacgcaggcccagggcccaggccggggccgctgcagaggaagcagccgatcgggccggaggacgtgctggggctgcagcggatcaccggtggggcccgtccccttttcccagcgtggaggtttaagattcgggacatggactcaggcactgtcctctttgaaatcaagaagcccccagtctcagaacggttgcccatcaaccggcgggacctggaccccaatgctgggcgctttgtccgctaccagttcacgcctgccttcctccgcctgaggcaggtgggagccacggtggagttcacagtgggagacaagcctgtcaacaacttccgcatgatcgagaggcactacttccgcaaccagctactcaaaagcttcgacttccactttggcttctgcatccccagcagcaagaacacctgcgagcacatttacgacttcccccctctctccgaggagctgagtgcgcgggcagggtcttctgggagtggggaagtg

SEQ ID NO: 198118 - DNA, 538 bp, Homo sapiens
  Payload ID: 19083
  Gene Name: unc-119 lipid binding chaperone
  ENST ID: ENST00000581945
  CDS Start-End: 1-259
gaagaagggcggcggtggggccgggacggcgacggagtccgctccggggccctcgggccagagcgtggcccccataccacagccgcctgcggaatccgaatctgggtccgagtcggagccggacgcaggcccagggcccaggccggggccgctgcagaggaagcagccgatcgggccggaggacgtgctggggctgcagcggatcaccggtgggtggagttcacagtgggagacaagcctgtcaacaacttccgcatgatcgagaggcactacttccgcaaccagctactcaaaagcttcgacttccactttggcttctgcatccccagcagcaagaacacctgcgagcacatttacgacttcccccctctctccgaggagctgagtgcgcgggcagggtcttctgggagtggggaagtgggggcgtctagagactgagctgcgggagggagagggacttgtgggtctgatcccatttctccccaccctggggctcttctgtgtctgccaccattcccatatcatccgtagagaaaga

SEQ ID NO: 198119 - DNA, 2050 bp, Homo sapiens
  Payload ID: 19083
  Gene Name: unc-119 lipid binding chaperone
  ENST ID: ENST00000470125
  CDS Start-End: 760-1137
gaggagggggtttggaggagaggaggaatagggaaggggttgttcacctgccccagccccacccatatcagggaaagtccccttaacatcagcctcacctgatacatctagatgtcatgccaggggcagctgtggggtgagggtaggagtatcctccagagaaggacagtgactctcccaagacagagctgtgtggccccctttacaggtggttctcaaaggcagggtaccagagaagttgatacactgagttgcagtagaagagacaggtcagactgcaggaagttgttcccatatgagaagagaggctcccaccaggctggatacctaattctcccaaagtcatctagccagccttggcagagcggaggccagaatgaggaccctcaactccagagtgggagagagagtgttcaggaggtggccttgtcctctacccttctctgccctgcccttccctggcccccagagaccagtaggatggcactccttatcccctgttagatccccatggcggagttatgtctcttccacactgggggtgtaccccaagggcagggactgaggtccctctttccagagggcagtgatcccagggatgagaagatggtagctactctggggtcccacacaagctgacctggcagcaggggctttgcggccccttccttgctcagctgcctgtttcccctagactacctctgctcccctgaggagaatatctacaagatcgactttgtcaggtttaagattcgggacatggactcaggcactgtcctctttgaaatcaagaagcccccagtctcagaacggttgcccatcaaccggcgggacctggaccccaatgctgggcgctttgtccgctaccagttcacgcctgccttcctccgcctgaggcaggtgggagccacggtggagttcacagtgggagacaagcctgtcaacaacttccgcatgatcgagaggcactacttccgcaaccagctactcaaaagcttcgacttccactttggcttctgcatccccagcagcaagaacacctgcgagcacatttacgacttcccccctctctccgaggagctgagtgcgcgggcagggtcttctgggagtggggaagtgggggcgtctagagactgagctgcgggagggagagggacttgtgggtctgatcccatttctccccaccctggggctcttctgtgtctgccaccattcccatatcatccgtagagaaagaggctggggatatttcaggctgtttggctgtccctgtaccccagtcctgaagcccctgcagtggcgggactcaagctcctgacctttgcccggcctggctgggcctctcttgcagtcagcgagatgatccgccacccgtatgagacccagtctgacagcttctacttcgtggatgaccggctggtgatgcacaataaagcagactattcctacagcgggacaccctgaccccacggctgccctgaccccaggaggctccagttctgggctgggagctgtgacctccccaacgctcacccctcaaccccaagtcctctgcttggggagttctccaggagctccggaccctgagtcaatgttgggaggaagggtacctggtgtccccagtcaagcccatgaagcccatgcggcctgctacatggggtggggtcgtagggaggctgtttgcctccacgtctaggaaggcctgtgagaggagcagtcaggacttccggacaacttagctgggccctacttgggcccaagtttcagaatagtgttcccctatcaaggctgtgactagatcaggcagggatccattccctgtcccctgcccactaccttcaggccatttagagttgtaaatttacaaagatccacggtgggctccagctgccaagccacccaagggagtctgggccctaggcctagccccatccctccccatgaggggccaagacactgcctaaggtgtgggagggactggctgagattgcagcccatggtaggagctggaccaactgtatatagttttcaataaactttttccttttct

SEQ ID NO: 198120 - DNA, 4189 bp, Homo sapiens
  Payload ID: 19083
  Gene Name: unc-119 lipid binding chaperone
  ENST ID: ENST00000484980
  CDS Start-End: 3163-3600
gtgtgttggctgtggttcctctcatggggagtggcataatgtccctccaagcctggactagcacctgtcctcttctgggggctctgtcatcaagggaggcttggtctccactgtggttaagagtttctgagctggactgcctgggttggagttccaactctgccatataattgtctgtgtgaccttgggcaagtaacctcacctctctgagcatgtcttttcatctgtaaaatggggataatgatacctttctcgtaagattattgtgaagataagtcctctgattctgtacagtgcctggcatctatgcatgctgtgtacattgggctctttgatcagtagtatttttgggccctacagggctgctcatagctgctgcctggagtcaaacaacttggctttcagggcaggggagggggtcatcataggcagggaacgagggctaggaaacctcatagcagaggctttggatgagcctcaaaggatgaaaggtgcatggagagacagtggctctccaccttggccacattcaccagcaacctgccctggccccctttgtgagaataactgttggggggggcctctctgtgggtatggggggcatgtattggagtggacctgagccctagagcttccaaagcagcagaacaccggactcccagacagagctgtggaggggagacagccttgagcctgtgctcctgggtccctgggggccaattcctctctccttactgagctaggcagcagccattcttagctgggcccccagagtactgagctcccttgcccaagcaggcatcaatggagagagggaggctggaccaggctgatgttgaagccagttgggctacaatttgcaatagcagcatttaggattcagcttagctctggggcagaactttctcagactgactgagtcctgagtaactttgggggtttattttgcaactagagggagcttccagctcatgtaccaccatttgtctcctaatttggaggaaattcatagcccttagagatggggcatctgtgaagggtaagtagaggaaagggcttcatgagaaccccttcctgtgcaggaattgagaacagagttccagggatttccaccctggcaccccttgcctggtctcttctgaccctaatcatgcaggtctgaggtttgctgttcccagattactgggccctgaatccagcttaggaagctatttgtggctgagaggaatagagcagttgtgttctgagcccttggccactctgccccttattctgacctgaccctgggtcccaggcctcatcctttctagaagagaaggagtggccgtggtgttctgagccatagatatccgtgttcctcacttcttctaaggacagagaggttgatagattgagtttgcagtagaagagactgaggttagactgcaggaagttgttcccaaatgagagaggctccaaaagttggagaatgggagaagagaaggccttacagggatctgggagttgggcactgggatcctgctccccactctgccacctccgttccctatgctctgtaccttctttctatgtctttatactggtgcttactttctgtgaaaatagggtgaatggggtgagataggggttgcccacttccattctctccccaccccacatgtgggctgtagtagactcagggccctgcctcttccccaagctgtataaagtccatgctgggccccagggtaccagatggctgccaggagggcttcctggaggggacagcgtcaggcttggggaagaagcagacctggggaagagaaaatgactttatattcacttcctgttcctgccccagaggaataggaggtggcccaggggcctggagggtgatttccaggcctctgtgggccaccaggggaggatgtgatgctgtgcaggctgacagcacgagtccctccctgcacctctcagctctttttgttgccagggcctccctgagcacttgaagttgctgctgcaagagctgtgagggttagatcaggccctgtagctccctgagcttcctcaggcagggcctcccactgttcttggttcccttcctgggcctgaggactccccttaccccttccacacccactgctgcacctgccacaccctcctcctggcctagcctgtgttcttctctatgggggtccaggactactttctccatggtggtggctcatagccagggctgcgtaaatgacctctaagggggttctctctgcttgctaagacttcctcccatttggagatcaacaaaggatgagagcaaagttggcctcctcccacctgccatatcccaggctctgggcttgagtcagcagagctttggttaagctgcttaagggagctgggctggtgtaagcttcttactgagaggagggggtttggaggagaggaggaatagggaaggggttgttcacctgccccagccccacccatatcagggaaagtccccttaacatcagcctcacctgatacatctagatgtcatgccaggggcagctgtggggtgagggtaggagtatcctccagagaaggacagtgactctcccaagacagagctgtgtggccccctttacaggtggttctcaaaggcagggtaccagagaagttgatacactgagttgcagtagaagagacaggtcagactgcaggaagttgttcccatatgagaagagaggctcccaccaggctggatacctaattctcccaaagtcatctagccagccttggcagagcggaggccagaatgaggaccctcaactccagagtgggagagagagtgttcaggaggtggccttgtcctctacccttctctgccctgcccttccctggcccccagagaccagtaggatggcactccttatcccctgttagatccccatggcggagttatgtctcttccacactgggggtgtaccccaagggcagggactgaggtccctctttccagagggcagtgatcccagggatgagaagatggtagctactctggggtcccacacaagctgacctggcagcaggggctttgcggccccttccttgctcagctgcctgtttcccctagactacctctgctcccctgaggagaatatctacaagatcgactttgtcaggtttaagattcgggacatggactcaggcactgtcctctttgaaatcaagaagcccccagtctcagaacggttgcccatcaaccggcgggacctggaccccaatgctgggcgctttgtccgctaccagttcacgcctgccttcctccgcctgaggcaggtgggagccacggtggagttcacagtgggagacaagcctgtcaacaacttccgcatgatcgagaggcactacttccgcaaccagctactcaaaagcttcgacttccactttggcttctgcatccccagcagcaagaacacctgcgagcacatttacgacttcccccctctctccgaggagctgatcagcgagatgatccgccacccgtatgagacccagtctgacagcttctacttcgtggatgaccggctggtgatgcacaataaagcagactattcctacagcgggacaccctgaccccacggctgccctgaccccaggaggctccagttctgggctgggagctgtgacctccccaacgctcacccctcaaccccaagtcctctgcttggggagttctccaggagctccggaccctgagtcaatgttgggaggaagggtacctggtgtccccagtcaagcccatgaagcccatgcggcctgctacatggggtggggtcgtagggaggctgtttgcctccacgtctaggaaggcctgtgagaggagcagtcaggacttccggacaacttagctgggccctacttgggcccaagtttcagaatagtgttcccctatcaaggctgtgactagatcaggcagggatccattccctgtcccctgcccactaccttcaggccatttagagttgtaaatttacaaagatccacggtgggctccagctgccaagccacccaagggagtctgggccctaggcctagccccatccctccccatgaggggccaagacactgcctaaggtgtgggagggactggctgagattgcagcccatggtaggagctggaccaactgtatatagttttcaataaactttttccttttctgtt

SEQ ID NO: 198121 - DNA, 4404 bp, Homo sapiens
  Payload ID: 19084
  Gene Name: unc-119 lipid binding chaperone B
  Uniprot ID: A6NIH7
  ENST ID: ENST00000344651
  CDS Start-End: 41-796
accgcgctgtggaggcggcggccatcttggcggcggagcgatgagcgggtctaacccgaaggctgcggccgcggcgtcggcggctgggcccggggggctggtggctggcaaggaggagaagaagaaggcgggcggcggcgtcctgaaccgcctgaaggcgcggcggcaggcgccccaccacgcggccgacgacggcgtcggggcagcggtcacggagcaggagctgctggcgctggacaccatccggcccgagcacgtcctgcgcctcagccgggtcaccgagaattatttatgtaaacccgaagacaacatctacagtattgatttcacccgcttcaaaattcgagatttggagacagggacagtactttttgagattgccaaaccttgcgtttcagaccaggaggaggatgaggaggagggaggtggagacgtggacatcagcgcaggacgttttgtccgctatcagttcacaccggcatttctccgcctccggacagtcggggctacggtggagttcacagtgggagacaaacctgtttcaaacttccggatgatcgaacggcactatttccgggaacacttgctgaaaaactttgactttgattttggcttctgcatccccagcagtaggaacacttgtgaacatatctatgagtttccccagctttcggaggatgtcattcgtctaatgattgaaaatccttacgagacccgctctgacagcttctactttgttgacaacaagctgataatgcacaacaaggctgattatgcctataatggaggccagtaagtgctgcaagagtagataggggaggtgctttgccgcggccacaagatcctggcacacggagatgatcgaagctgcagtttgtcaacacacatctggaacctggccccaggaagccaaggctggggtggcagtttcctgcgcgccaaaggagctgccaaacagtgctgtgttttcttccccagtattttttcttccctttttttcctgccccgtaggttgcagaggtactatagtaaagtaaaaggttaggataagggtcctggaatccagataaaaaagtttattttccgtagttctggctgcctgttggttgtcttgacgaccaggcatagctgtgcctggtgagaaggctctggccaggcccaccagcaggtcagcagctcttaaggttcctgggtgctgtgggaagctgaaaggtaggcctcttccaggtagctcctcctctcacctccggcattgccatcagcgcagtctgccctcggtctgtgtgaagtcttaaaccaactggaagacacttgaaagggtggggagggagggaggtgccaagagtggaggcaccaaggaatgggtgatgctgccaagctgaagggtctgctttgtggagaggctgctgctctgtctgacttccagggtctcagccagccctcctgggaatagaccaagttttcagcctggcagtgccttctgttcccattttggaggacagacaagcttgctccacatctcctggctcctcccttctgagtctcatgaaatagaatgagtcagctctgctcatggaacagtagtatctcttgaggccagagcaggtcttgtattttgtttttttatttccagacttctttcggggaggttttataaaatgacagtggtgttcccagcatatgtgatatgtggttagacttctgatagtatcagcttccaggggctaatctggcttatgttgggaggatatgcttacgaatcagcagcagctttctaaaggagagatttgacttttctctgcactgcacagcctggaggattggcttttgatggggatttgcctccgaagctctttgtacatttcttgtttaggagggttttcctatctacctttctactgaagtagtttctggaactttcctggtggatcagagttacgtaatgcagtctgagccttcagactgctagttagaattgttttaggtgttcagaaagggcaaaataggctgatgtggcctgtcagagtgatgtgttctcaaaaaagttcacttgcacatctgtgggctgcttttgtcctcagacccttagtggacagactccacaaaccctctgatgagacgattgatgtggccagggtccagttagcatcagtagaaggatgtcactaggaaaggcccaggtatctggtaagtgactgtgaggtgtcacagtacctgtgacaggagagtgtcctgatgtgcttgggagaaaggccgtatgggggccagggatggaagagacagtgtgtggccacagaaattcctgtccatccaccaccagtgctgctccctgtgtgggctttagggcgagtggccccgaaccttggcccagtgctttgtcccaggccagagtcttggcaatgccacatgctggcagctttctcactgagaaggtcctagcttacccctgtgtgctggccttggattcagccccgagagaggggagagaccattcctcctgtggagtgggttccttatcaccagaccggccactctcagaactggcgtccactgtaaatccaggtgccttacgtgtggctctgtcccttatgctgcaggggaaagctgcattgccattgttcccacctcctcactggcagaaagatgccagggctgttagcactgtctcctcaccttctgtttctcattgtggctcctcaaatgggatttgcatgttcctgtcaagcgtaacaacaatcccttctctctttgacagaggcccaggtgggacagtttctactatttgatatttgagtattatctgggatgtggttctggagctgcccagagctgtgcttagtagagtgtgtcttggaaacatgcccctgggcacactgtatctgctacattagtgggctatctcttatctgcagtgttcgcttttgctagaaagaggatgtggaggaaggaggaggtgggcaatctggcttgagttgtgctgtatcctcttccttgttagcttgccttagtctcactggagaccatttgcggatagtgcttggtccatgcccagcaggacagggctttgctgcttctgaaagtctggtgttctgtatctggggctgtgggttcctgtgtctagctgctcaggaaatcttgagaagcattccactctggggtgtaaaccagtatgagtttgaaattcaagcgtttgtacctgagttggggagagaattgcaaggcatactttctctgaaagtaacagaaccattcaggctgccatgttattaaggaatctgaactgttgatagcagttaccttgtgggtgatacaatgggaggcggcaaaaaaactacctgcataggagaccctgccctttgtcaagagctgggagcacatttcatcagagtagcaggcccacctggtgccagagggcctgcccctcctgcttctgttcctttgccttgcagtctcctggagagagcctctcttttcctgtacagcctttgggccaaaatgcccttctagcttctccaaagaagatccgagtttatttcattctatgttttaagaggtaaaaggacataacaagtgaaagaagttttgggctaaagtaggctatgtctccttatgtattactcaatactgttttgcagagaaaacatttttcaagcatgtgcttcctgaagacacctcagtctttgggccatttgatttccaatacatagggtggaagaatgtgattttggggctgaccataaactggaaatttgtgaaatggcagtgattgggcaatcttcagtttattttttcagttgaagtggaactcatttctggaatggatttaataggctgtgtctaatgtacaaactgggtgagtcctgccttagtgtgtcctgccccaccggtacgcttccaggatactcttttcccctctgtaaagtcactttcttctgatggccagtgtcactatgatgtcagtgaggtctggggatgaggacagtgtgtcctgaaattcacaggactgactcctcaccccagtgcacgaggattcctgtggcatcaggtgctgctgtacctggtgtaggagcctaatcattgaaccattgtgttactcacattccatgtcacagaacatatcagcctcaagaaggatttggtggaggtggatttaccactggttttacaaaggaccgtgtaaagtcattgaagttgtgaaagtctattttttttcctgtaaatctattttttacagaatataagaaacatcaatgacctgatctgtccttcctcctccttcccgcttcccccaaaatcacattccagtttttattgtctttgtgtccaaagtaaactaggtgacttatttgtataaaatgttattttgccacatgagacagtaataaaagaaagattttcacagta

SEQ ID NO: 198122 - DNA, 9837 bp, Homo sapiens
  Payload ID: 19085
  Gene Name: unc-13 homolog A (C. elegans)
  ENST ID: ENST00000252773
  CDS Start-End: 1-5112
ctgtctctcctctgtgtctctctcaaaaaagccaagtttgatggtgcccaagagaaattcaacacgtacgtgaccctgaaagtgcagaatgtcaagagcacgaccatcgcggtgcggggcagccagcccagctgggagcaggatttcatgttcgagattaaccgtctggatttgggactgacggtggaggtgtggaataagggtctcatctgggacacaatggtgggcactgtgtggatcccactgaggaccatccgccagtccaatgaggagggccctggagagtggctgacgctggactcccaggtcatcatggcagacagtgagatctgtggcaccaaggaccccaccttccaccgcatcctcctggacacgcgctttgagctacccttagacattcctgaagaggaggctcgctactgggccaagaagctggagcagctcaatgctatgcgggaccaggatgaatattcgttccaagatgagcaagacaagcctctgcctgtccccagcaaccagtgctgcaactggaattattttggctggggtgagcagcacaacgatgaccccgacagtgcagtggatgatcgtgacagtgactaccgcagtgaaacgagcaacagcatcccgccgccctattatactacgtcacaacccaacgcctcagtccaccaatattctgttcgcccaccacccctgggctcccgggagtcctacagtgactccatgcacagttacgaggagttctctgagccacaagccctcagccccacgggtagcagccgctatgcctcttccggggagctgagccagggaagctctcagctgagcgaggacttcgaccctgacgagcacagcctgcagggctccgacatggaggatgagcgggaccgggactcctaccactcctgccacagctcggtcagctaccacaaagactcgcctcgctgggaccaggatgaggaagagctggaggaggacctggaggacttcctggaggaggaggagctgcctgaagatgaggaggagctggaggaggaggaggaggaggtgcctgacgatttgggcagctatgcccagcgtgaagacgtagctgtggctgagcccaaagacttcaaacgcatcagcctcccgccagctgccccagggaaggaggacaaggccccagtggcacccaccgaggcccccgacatggccaaggtggcccccaagccagccacgcccgacaaggtgcctgcagctgagcagatccctgaggctgagccacccaaggacgaggagagtttcaggccgagagaggatgaggaaggccaggaggggcaggactccatgtccagggccaaggccaactggctgcgtgccttcaacaaggtgcggatgcagctgcaggaggcccggggagaaggagagatgtctaaatccctatggttcaaaggcggcccagggggcggtctcatcatcatcgacagcatgccagacatccgcaagaggaaacctatcccactcgtgagcgacttggccatgtccctggtccagtccaggaaagcgggcatcacctcggccttggcctccagcacgttgaacaacgaggagctgaaaaaccacgtttacaagaagaccctgcaagccttaatctaccccatctcgtgcacgacgccacacaacttcgaagtgtggacggccaccacgcccacctactgctacgagtgcgaggggctgctgtggggcatcgcgaggcagggcatgcgctgcaccgagtgcggtgtcaagtgccacgagaagtgccaggacctgctcaacgccgactgcctgcagcgggctgcggagaagagctccaagcacggggcggaggaccggacacagaacatcatcatggtgctcaaggaccgcatgaagatccgggagcgcaacaagcccgagatcttcgagctcatccaggagatcttcgcggtgaccaagacggcgcacacgcagcagatgaaggcggtcaagcagagcgtgctggacggcacgtccaagtggtccgccaagatcagcatcaccgtggtctgcgcccagggcttgcaggcaaaggacaagacaggatccagtgacccctatgtcaccgtccaggtcgggaagaccaagaaacggacaaaaaccatctatgggaacctcaacccggtgtgggaggagaatttccactttgaatgtcacaattcctccgaccgcatcaaggtgcgcgtctgggacgaggatgacgacatcaaatcccgcgtgaaacagaggttcaagagggaatctgacgatttcctggggcagacgatcattgaggtgcggacgctcagcggcgagatggacgtgtggtacaacctggacaagcgaactgacaaatctgccgtgtcgggtgccatccggctccacatcagtgtggagatcaaaggcgaggagaaggtggccccgtaccatgtccagtacacctgtctgcatgagaacctgttccacttcgtgaccgacgtgcagaacaatggggtcgtgaagatcccagatgccaagggtgacgatgcctggaaggtttactacgatgagacagcccaggagattgtggacgagtttgccatgcgctacggcgtcgagtccatctaccaagccatgacccactttgcctgcctctcctccaagtatatgtgcccaggggtgcctgccgtcatgagcaccctgctcgccaacatcaatgcctactacgcacacaccaccgcctccaccaacgtgtctgcctccgaccgcttcgccgcctccaactttgggaaagagcgcttcgtgaaactcctggaccagctgcataactccctgcggattgacctctccatgtaccggaataacttcccagccagcagcccggagagactccaggacctcaaatccactgtggaccttctcaccagcatcaccttctttcggatgaaggtacaagaactccagagcccgccccgagccagccaggtggtaaaggactgtgtgaaagcctgccttaattctacctacgagtacatcttcaataactgccatgaactgtacagccgggagtaccagacagacccggccaagaagggggaagttctcccagaggaacaggggcccagcatcaagaacctcgacttctggtccaagctgattaccctcatagtgtccatcattgaggaagacaagaattcctacactccctgcctcaaccagtttccccaggagctgaatgtgggtaaaatcagcgctgaagtgatgtggaatctgtttgcccaagacatgaagtacgccatggaggagcacgacaagcatcgtctatgcaagagtgccgactacatgaacctccacttcaaggtgaaatggctctacaatgagtatgtgacggaacttcccgccttcaaggaccgcgtgcctgagtaccctgcatggtttgaacccttcgtcatccagtggctggatgagaatgaggaggtgtcccgggatttcctgcacggtgccctggagcgagacaagaaggatgggttccagcagacctcagagcatgccctattctcctgctccgtggtggatgttttctcccaactcaaccagagctttgaaatcatcaagaaactcgagtgtcccgaccctcagatcgtggggcactacatgaggcgctttgccaagaccatcagtaatgtgctcctccagtatgcagacatcatctccaaggactttgcctcctactgctccaaggagaaggagaaagtgccctgcattctcatgaataacactcaacagctacgagttcagctggagaagatgttcgaagccatgggaggaaaggagctggatgctgaagccagtgacatcctgaaggagcttcaggtgaaactcaataacgtcttggatgagctcagccgggtgtttgctaccagcttccagccgcacattgaagagtgtgtcaaacagatgggtgacatccttagccaggttaagggcacaggcaatgtgccagccagtgcctgcagcagcgtggcccaggacgcggacaatgtgttgcagcccatcatggacctgctggacagcaacctgaccctctttgccaaaatctgtgagaagactgtgctgaagcgagtgctgaaggagctgtggaagctggttatgaacaccatggagaaaaccatcgtcctgccgcccctcactgaccagacgatgatcgggaacctcttgagaaaacatggcaagggattagaaaagggcagggtgaaattgccaagccactcagacggaacccagatgatcttcaatgcagccaaggagctgggtcagctgtccaaactcaaggatcacatggtacgagaagaagccaagagcttgaccccaaagcagtgcgcggttgttgagttggccctggacaccatcaagcaatatttccacgcgggtggcgtgggcctcaagaagaccttcctggagaagagcccggacctgcaatccttgcgctatgccctgtcgctctacacgcaggccaccgacctgctaatcaagacctttgtacagacgcaatcggcccagggcttgggtgtagaagaccctgtgggtgaagtctctgtccatgttgagctgttcactcatccaggaactggggaacacaaggtcacagtgaaagtggtggctgccaatgacctcaagtggcagacttctggcatcttccggccgttcatcgaggtcaacatcattgggccccagctcagcgacaagaaacgcaagtttgcgaccaaatccaagaacaatagctgggctcccaagtacaatgagagcttccagttcacgctgagcgccgacgcgggtcccgagtgctatgagctgcaggtgtgcgtcaaggactactgcttcgcgcgcgaggaccgcacggtggggctggccgtgctgcagctgcgtgagctggcccagcgcgggagcgccgcctgctggctgccgctcggccgccgcatccacatggacgacacgggcctcacggtgctgcgaatcctctcgcagcgcagcaacgacgaggtggccaaggagttcgtgaagctcaagtcggacacgcgctccgccgaggagggcggtgccgcgcctgcgccttagcgcgggcggtcggccgagcggcactgcgcctgcgcggagggcgctgggcggggagggacggggcttgcgccttggtgggacctccccaggggcggggctcggggggctccacgccaagggtgggctgcgcctacgcccttgactcagctttcccttttggggaattaggaatggaggatgccccgccctctcgggaggccacgcccaagggcgcgacgaaggaaggagccacatccccaacttgaggccacgcccccagcacctagggggcattttgagctgggatgggggaaacctcgtccctatggaggaggccacatcccggggctctggtaccgggaggcaccacctcatgtcccctggaaaagccataagatgggacccagacccctgggaccccagaccaattgccaagtatggaaatctcagctccctcgagggggggccctgggcaaggggtagggctctctggagcgcccctctaggtggcctggggactggagggaccaggatgctggttggagggccccggaataccggagtccctttagatatttgtgcaaaaaataaatggggggaggggggaggatgggatttcaaaagcacatgcgcccttgggcgcccaaaccctgggggccgaggggacggctctggttccccacgctgcccctacttccctttgggagtttgcctctccctctcccccaacaaacccagtcctcatatcatagagttcaacacacccatttgacagatggcaaaactgaggcttaaagagctgcttgagacttggccaaggttccaggtgccataccctctgtgcccctcccttaggcctgtgtgccccatggaagggtgggctgagatcgggatgacctgacacagctccctattgctgctaattccccctcggcctcctccaaggggtgggaattccaggccaagacccctacttcgcctttccttctccggctgccaagcaggacctttgccctcagccctttctcctgggatctccatgggggatgccatgagggcctcccaccacaaaagagaatttgggatcccctggtcccaggtttctccatcccttcttccttttccagaattttccaaataggaaagaacagaaggagaccagaaactctaggggggagaaagagaatgagagaaagagaatgagagagagagaaacacaaacacagtgacacagtgagagcttagtctccaagagcctattcattgattcaaacacccaagccacaggatacctcagatggccctcttgccagctggaagctctttctccaatgagcaaagttacagtgacctggctggagttacctggtgcacataggaccttaggggaaagttcagcgtggactacacttgctctgggatctgcttttccacatgtgtgtatggcacgcctttttctgctggattgggaaggacaagattttgctgtgctagggagaaatgaaaacggggtgagctgagtagctgggtttctggaggatagaacatcagatggggaggctttccgaggtgaagaatgagagggaaccacttactagagagaaaagagctccaggcctggggaacagcacgtgcgaaggccaggagagaagaactgttgaaacaacgagaagggtggcacggctggagctgagccagcaagggggatcgtgaggagccttggggttggggagatctgcagaagcatcagaccaggcagggcctcgtacgcagtcctgaggagttttacttttattctaagacagttggggagctccaggagctgttttaagttggggagagactggattccagcctgcaaaagctgttttgtgaagactaaaaccagtgaggagaggtggaggtgctttggggacactgaaatggattcttggaaagattctgaaggctgtgttgaaaagacacctatagctgtggggacatgactataatcccagcatttggggagaccgaggctggcagatcacttaaggtcaggagtttgagaccagcctggccaacatggcgaaaccccatctctgctaaaaatacaaaaattagctgggtgcagtggtgcatgcctgtagtcccagctactcaggagactgaggcgggagaattgtttgaaccctggaggcagaggttgtagtgagtcgtgatcacacaactgcactccagcctgggcaacagaacaatactccattccctcccctctaccccaccaaaaaaaaaaaaaaatcctgcccttagatgagctctagggctgctgagtacagttgtcccagttgcacagtgcccaagggtttggcattgctaagaaggccacgtgcaaatcctagatattgagtgttgtatgtttgtgacgttggtttcccgacatgtgaatggcccaagtgtctggaagaagtggcgccactttctaatttgcttggagatgttgcatgtcccttaaattcagacaggtgcaggtaactggaggttctgaaccaaaggttaaaatgcaaattctcatacagggttgggaagttgtagccagggataagcttatgtgactgttatatggactgaggagcagatgtgaatttcgaaccatgacatggctgagggtaggggtcgggtggatggatgattcagggttgtaacccatagagcccaaaggggaagtgatctgtgacctggggtgagggtgatctggaagatttttggatggctggaaagaaatggggaagtcgagctgcctgagagagccaagttatttcccaaaagattccttaggagtctttctgttcaagacctccgtgtgtgtgtgtgtgtgtttagggttccccagcaatggcccaggcatgtgaaggaaacaagcttcttcagggaatatttgttgaatgagttttcctgactcccaggctagaactgtttttgcaatttccaccctcttttctttcccccagagaactcctattcgtccttcaaaacccatcacggaaacccctcttggagaaaaccctccttccttcccctcaggactttcccagccaccgtctctcctccagtccagcctgatgccatgggactgggggtttctctgtccagctctgtttctcccagactggggtctgaggactctcaggacccccaactttacctagcacaggctgggcacaagtgggtgacagggagtctacgcctagtggaattatgtattggggcagggtcagtgtgagaatacacatccgcatgcatgtctgtccatgtctgtccgtaccaaccttccccttccacacggacctgggcacataggaggtgtctgagcctgacacatgggacagagagtggacatggctgagacacggacagagaaaagacaaggagtccagggggctgaaagccttttgaaatcaggaagttcctgtattggcagaacaaagcccagagaggagcagggctttcctcaacgccacccagcaagtggacacagagcccggccttggatgacacctccagggttctgaaccctggacctcgctttatgcaaggagctggccccacatttccatgaatcggggaaacagcacaagaaggttggcctgtggcagggcaagggttaaaggggtgacattgagggatgcctcagagtcaaagtcccctgaccaagaggaatagagtagaaaacacagagacagagggtgagatcacgccccgatgaggacggagagagacagagatggagagagacatagaggtggaaatatacagagaaagataaatgcagagaccaaggcagggagtgtcgggggaagtaaagagggtgtcctgaagaaagaaggatctgttcactcttaccagtctgtcctcgaatgatttgcataaaatgaggaggtgcctgtccacacccccaattcctctctcaggccccagagcctgagacctcaccatgcccccatcagagatgcaaaaaactaaacacccaactagaaatccttgggacctctctcggctgggatctcagagcctttctgtcccctacccctaccccatgtgctgtcgattttgcagatggggacaacctggggcctcccggaactctgccaccctggggaagttgggggagggccttagtcccggatcacaaccccgtctgctccccagaatcctttcctaagaatcgttgaggaccaaagttgtctttgctgacacgtgttgcttttctctttgccttttattgtttcagagaaaaatcaagttgactgtgtcaagtaacaccccaccccttacccccgtccagccatagtggctctctggagacacaggtcacaggcggagggtcccctgatcatccccaaccacacagccagggggacttgacccctgtccacccctgtctcgtgctccctcagacccccacaaaccggccaagcagtccggggaggcttcccctccacacaactcttagcatgtgattgcagatgtgaaatcaaaacgttgtttgttttttgttttgttttgattctaccccgtcggtccagtgtctgcacagacgccttcatttctctgtaaatatgtgacttggaacaaatgtttaacacaaacgagaagtggtcatgaatgcatggtgttgagatgttttgcactattctgactttttggtctctgtaaaaatattttattaacagcagacattaaaaaaagaaaaaccacacacagccttgg

SEQ ID NO: 198123 - DNA, 9838 bp, Homo sapiens
  Payload ID: 19085
  Gene Name: unc-13 homolog A (C. elegans)
  Uniprot ID: Q9UPW8
  ENST ID: ENST00000519716
  CDS Start-End: 1-5112
atgtctctgctttgcgttggagtcaaaaaagccaagtttgatggtgcccaagagaaattcaacacgtacgtgaccctgaaagtgcagaatgtcaagagcacgaccatcgcggtgcggggcagccagcccagctgggagcaggatttcatgttcgagattaaccgtctggatttgggactgacggtggaggtgtggaataagggtctcatctgggacacaatggtgggcactgtgtggatcccactgaggaccatccgccagtccaatgaggagggccctggagagtggctgacgctggactcccaggtcatcatggcagacagtgagatctgtggcaccaaggaccccaccttccaccgcatcctcctggacacgcgctttgagctacccttagacattcctgaagaggaggctcgctactgggccaagaagctggagcagctcaatgctatgcgggaccaggatgaatattcgttccaagatgagcaagacaagcctctgcctgtccccagcaaccagtgctgcaactggaattattttggctggggtgagcagcacaacgatgaccccgacagtgcagtggatgatcgtgacagtgactaccgcagtgaaacgagcaacagcatcccgccgccctattatactacgtcacaacccaacgcctcagtccaccaatattctgttcgcccaccacccctgggctcccgggagtcctacagtgactccatgcacagttacgaggagttctctgagccacaagccctcagccccacgggtagcagccgctatgcctcttccggggagctgagccagggaagctctcagctgagcgaggacttcgaccctgacgagcacagcctgcagggctccgacatggaggatgagcgggaccgggactcctaccactcctgccacagctcggtcagctaccacaaagactcgcctcgctgggaccaggatgaggaagagctggaggaggacctggaggacttcctggaggaggaggagctgcctgaagatgaggaggagctggaggaggaggaggaggaggtgcctgacgatttgggcagctatgcccagcgtgaagacgtagctgtggctgagcccaaagacttcaaacgcatcagcctcccgccagctgccccagggaaggaggacaaggccccagtggcacccaccgaggcccccgacatggccaaggtggcccccaagccagccacgcccgacaaggtgcctgcagctgagcagatccctgaggctgagccacccaaggacgaggagagtttcaggccgagagaggatgaggaaggccaggaggggcaggactccatgtccagggccaaggccaactggctgcgtgccttcaacaaggtgcggatgcagctgcaggaggcccggggagaaggagagatgtctaaatccctatggttcaaaggcggcccagggggcggtctcatcatcatcgacagcatgccagacatccgcaagaggaaacctatcccactcgtgagcgacttggccatgtccctggtccagtccaggaaagcgggcatcacctcggccttggcctccagcacgttgaacaacgaggagctgaaaaaccacgtttacaagaagaccctgcaagccttaatctaccccatctcgtgcacgacgccacacaacttcgaagtgtggacggccaccacgcccacctactgctacgagtgcgaggggctgctgtggggcatcgcgaggcagggcatgcgctgcaccgagtgcggtgtcaagtgccacgagaagtgccaggacctgctcaacgccgactgcctgcagcgggctgcggagaagagctccaagcacggggcggaggaccggacacagaacatcatcatggtgctcaaggaccgcatgaagatccgggagcgcaacaagcccgagatcttcgagctcatccaggagatcttcgcggtgaccaagacggcgcacacgcagcagatgaaggcggtcaagcagagcgtgctggacggcacgtccaagtggtccgccaagatcagcatcaccgtggtctgcgcccagggcttgcaggcaaaggacaagacaggatccagtgacccctatgtcaccgtccaggtcgggaagaccaagaaacggacaaaaaccatctatgggaacctcaacccggtgtgggaggagaatttccactttgaatgtcacaattcctccgaccgcatcaaggtgcgcgtctgggacgaggatgacgacatcaaatcccgcgtgaaacagaggttcaagagggaatctgacgatttcctggggcagacgatcattgaggtgcggacgctcagcggcgagatggacgtgtggtacaacctggacaagcgaactgacaaatctgccgtgtcgggtgccatccggctccacatcagtgtggagatcaaaggcgaggagaaggtggccccgtaccatgtccagtacacctgtctgcatgagaacctgttccacttcgtgaccgacgtgcagaacaatggggtcgtgaagatcccagatgccaagggtgacgatgcctggaaggtttactacgatgagacagcccaggagattgtggacgagtttgccatgcgctacggcgtcgagtccatctaccaagccatgacccactttgcctgcctctcctccaagtatatgtgcccaggggtgcctgccgtcatgagcaccctgctcgccaacatcaatgcctactacgcacacaccaccgcctccaccaacgtgtctgcctccgaccgcttcgccgcctccaactttgggaaagagcgcttcgtgaaactcctggaccagctgcataactccctgcggattgacctctccatgtaccggaataacttcccagccagcagcccggagagactccaggacctcaaatccactgtggaccttctcaccagcatcaccttctttcggatgaaggtacaagaactccagagcccgccccgagccagccaggtggtaaaggactgtgtgaaagcctgccttaattctacctacgagtacatcttcaataactgccatgaactgtacagccgggagtaccagacagacccggccaagaagggggaagttctcccagaggaacaggggcccagcatcaagaacctcgacttctggtccaagctgattaccctcatagtgtccatcattgaggaagacaagaattcctacactccctgcctcaaccagtttccccaggagctgaatgtgggtaaaatcagcgctgaagtgatgtggaatctgtttgcccaagacatgaagtacgccatggaggagcacgacaagcatcgtctatgcaagagtgccgactacatgaacctccacttcaaggtgaaatggctctacaatgagtatgtgacggaacttcccgccttcaaggaccgcgtgcctgagtaccctgcatggtttgaacccttcgtcatccagtggctggatgagaatgaggaggtgtcccgggatttcctgcacggtgccctggagcgagacaagaaggatgggttccagcagacctcagagcatgccctattctcctgctccgtggtggatgttttctcccaactcaaccagagctttgaaatcatcaagaaactcgagtgtcccgaccctcagatcgtggggcactacatgaggcgctttgccaagaccatcagtaatgtgctcctccagtatgcagacatcatctccaaggactttgcctcctactgctccaaggagaaggagaaagtgccctgcattctcatgaataacactcaacagctacgagttcagctggagaagatgttcgaagccatgggaggaaaggagctggatgctgaagccagtgacatcctgaaggagcttcaggtgaaactcaataacgtcttggatgagctcagccgggtgtttgctaccagcttccagccgcacattgaagagtgtgtcaaacagatgggtgacatccttagccaggttaagggcacaggcaatgtgccagccagtgcctgcagcagcgtggcccaggacgcggacaatgtgttgcagcccatcatggacctgctggacagcaacctgaccctctttgccaaaatctgtgagaagactgtgctgaagcgagtgctgaaggagctgtggaagctggttatgaacaccatggagaaaaccatcgtcctgccgcccctcactgaccagacgatgatcgggaacctcttgagaaaacatggcaagggattagaaaagggcagggtgaaattgccaagccactcagacggaacccagatgatcttcaatgcagccaaggagctgggtcagctgtccaaactcaaggatcacatggtacgagaagaagccaagagcttgaccccaaagcagtgcgcggttgttgagttggccctggacaccatcaagcaatatttccacgcgggtggcgtgggcctcaagaagaccttcctggagaagagcccggacctgcaatccttgcgctatgccctgtcgctctacacgcaggccaccgacctgctaatcaagacctttgtacagacgcaatcggcccagggcttgggtgtagaagaccctgtgggtgaagtctctgtccatgttgagctgttcactcatccaggaactggggaacacaaggtcacagtgaaagtggtggctgccaatgacctcaagtggcagacttctggcatcttccggccgttcatcgaggtcaacatcattgggccccagctcagcgacaagaaacgcaagtttgcgaccaaatccaagaacaatagctgggctcccaagtacaatgagagcttccagttcacgctgagcgccgacgcgggtcccgagtgctatgagctgcaggtgtgcgtcaaggactactgcttcgcgcgcgaggaccgcacggtggggctggccgtgctgcagctgcgtgagctggcccagcgcgggagcgccgcctgctggctgccgctcggccgccgcatccacatggacgacacgggcctcacggtgctgcgaatcctctcgcagcgcagcaacgacgaggtggccaaggagttcgtgaagctcaagtcggacacgcgctccgccgaggagggcggtgccgcgcctgcgccttagcgcgggcggtcggccgagcggcactgcgcctgcgcggagggcgctgggcggggagggacggggcttgcgccttggtgggacctccccaggggcggggctcggggggctccacgccaagggtgggctgcgcctacgcccttgactcagctttcccttttggggaattaggaatggaggatgccccgccctctcgggaggccacgcccaagggcgcgacgaaggaaggagccacatccccaacttgaggccacgcccccagcacctagggggcattttgagctgggatgggggaaacctcgtccctatggaggaggccacatcccggggctctggtaccgggaggcaccacctcatgtcccctggaaaagccataagatgggacccagacccctgggaccccagaccaattgccaagtatggaaatctcagctccctcgagggggggccctgggcaaggggtagggctctctggagcgcccctctaggtggcctggggactggagggaccaggatgctggttggagggccccggaataccggagtccctttagatatttgtgcaaaaaataaatggggggaggggggaggatgggatttcaaaagcacatgcgcccttgggcgcccaaaccctgggggccgaggggacggctctggttccccacgctgcccctacttccctttgggagtttgcctctccctctcccccaacaaacccagtcctcatatcatagagttcaacacacccatttgacagatggcaaaactgaggcttaaagagctgcttgagacttggccaaggttccaggtgccataccctctgtgcccctcccttaggcctgtgtgccccatggaagggtgggctgagatcgggatgacctgacacagctccctattgctgctaattccccctcggcctcctccaaggggtgggaattccaggccaagacccctacttcgcctttccttctccggctgccaagcaggacctttgccctcagccctttctcctgggatctccatgggggatgccatgagggcctcccaccacaaaagagaatttgggatcccctggtcccaggtttctccatcccttcttccttttccagaattttccaaataggaaagaacagaaggagaccagaaactctaggggggagaaagagaatgagagaaagagaatgagagagagagaaacacaaacacagtgacacagtgagagcttagtctccaagagcctattcattgattcaaacacccaagccacaggatacctcagatggccctcttgccagctggaagctctttctccaatgagcaaagttacagtgacctggctggagttacctggtgcacataggaccttaggggaaagttcagcgtggactacacttgctctgggatctgcttttccacatgtgtgtatggcacgcctttttctgctggattgggaaggacaagattttgctgtgctagggagaaatgaaaacggggtgagctgagtagctgggtttctggaggatagaacatcagatggggaggctttccgaggtgaagaatgagagggaaccacttactagagagaaaagagctccaggcctggggaacagcacgtgcgaaggccaggagagaagaactgttgaaacaacgagaagggtggcacggctggagctgagccagcaagggggatcgtgaggagccttggggttggggagatctgcagaagcatcagaccaggcagggcctcgtacgcagtcctgaggagttttacttttattctaagacagttggggagctccaggagctgttttaagttggggagagactggattccagcctgcaaaagctgttttgtgaagactaaaaccagtgaggagaggtggaggtgctttggggacactgaaatggattcttggaaagattctgaaggctgtgttgaaaagacacctatagctgtggggacatgactataatcccagcatttggggagaccgaggctggcagatcacttaaggtcaggagtttgagaccagcctggccaacatggcgaaaccccatctctgctaaaaatacaaaaattagctgggtgcagtggtgcatgcctgtagtcccagctactcaggagactgaggcgggagaattgtttgaaccctggaggcagaggttgtagtgagtcgtgatcacacaactgcactccagcctgggcaacagaacaatactccattccctcccctctaccccaccaaaaaaaaaaaaaaatcctgcccttagatgagctctagggctgctgagtacagttgtcccagttgcacagtgcccaagggtttggcattgctaagaaggccacgtgcaaatcctagatattgagtgttgtatgtttgtgacgttggtttcccgacatgtgaatggcccaagtgtctggaagaagtggcgccactttctaatttgcttggagatgttgcatgtcccttaaattcagacaggtgcaggtaactggaggttctgaaccaaaggttaaaatgcaaattctcatacagggttgggaagttgtagccagggataagcttatgtgactgttatatggactgaggagcagatgtgaatttcgaaccatgacatggctgagggtaggggtcgggtggatggatgattcagggttgtaacccatagagcccaaaggggaagtgatctgtgacctggggtgagggtgatctggaagatttttggatggctggaaagaaatggggaagtcgagctgcctgagagagccaagttatttcccaaaagattccttaggagtctttctgttcaagacctccgtgtgtgtgtgtgtgtgtttagggttccccagcaatggcccaggcatgtgaaggaaacaagcttcttcagggaatatttgttgaatgagttttcctgactcccaggctagaactgtttttgcaatttccaccctcttttctttcccccagagaactcctattcgtccttcaaaacccatcacggaaacccctcttggagaaaaccctccttccttcccctcaggactttcccagccaccgtctctcctccagtccagcctgatgccatgggactgggggtttctctgtccagctctgtttctcccagactggggtctgaggactctcaggacccccaactttacctagcacaggctgggcacaagtgggtgacagggagtctacgcctagtggaattatgtattggggcagggtcagtgtgagaatacacatccgcatgcatgtctgtccatgtctgtccgtaccaaccttccccttccacacggacctgggcacataggaggtgtctgagcctgacacatgggacagagagtggacatggctgagacacggacagagaaaagacaaggagtccagggggctgaaagccttttgaaatcaggaagttcctgtattggcagaacaaagcccagagaggagcagggctttcctcaacgccacccagcaagtggacacagagcccggccttggatgacacctccagggttctgaaccctggacctcgctttatgcaaggagctggccccacatttccatgaatcggggaaacagcacaagaaggttggcctgtggcagggcaagggttaaaggggtgacattgagggatgcctcagagtcaaagtcccctgaccaagaggaatagagtagaaaacacagagacagagggtgagatcacgccccgatgaggacggagagagacagagatggagagagacatagaggtggaaatatacagagaaagataaatgcagagaccaaggcagggagtgtcgggggaagtaaagagggtgtcctgaagaaagaaggatctgttcactcttaccagtctgtcctcgaatgatttgcataaaatgaggaggtgcctgtccacacccccaattcctctctcaggccccagagcctgagacctcaccatgcccccatcagagatgcaaaaaactaaacacccaactagaaatccttgggacctctctcggctgggatctcagagcctttctgtcccctacccctaccccatgtgctgtcgattttgcagatggggacaacctggggcctcccggaactctgccaccctggggaagttgggggagggccttagtcccggatcacaaccccgtctgctccccagaatcctttcctaagaatcgttgaggaccaaagttgtctttgctgacacgtgttgcttttctctttgccttttattgtttcagagaaaaatcaagttgactgtgtcaagtaacaccccaccccttacccccgtccagccatagtggctctctggagacacaggtcacaggcggagggtcccctgatcatccccaaccacacagccagggggacttgacccctgtccacccctgtctcgtgctccctcagacccccacaaaccggccaagcagtccggggaggcttcccctccacacaactcttagcatgtgattgcagatgtgaaatcaaaacgttgtttgttttttgttttgttttgattctaccccgtcggtccagtgtctgcacagacgccttcatttctctgtaaatatgtgacttggaacaaatgtttaacacaaacgagaagtggtcatgaatgcatggtgttgagatgttttgcactattctgactttttggtctctgtaaaaatattttattaacagcagacattaaaaaaagaaaaaccacacacagccttgga

SEQ ID NO: 198124 - DNA, 5200 bp, Homo sapiens
  Payload ID: 19085
  Gene Name: unc-13 homolog A (C. elegans)
  ENST ID: ENST00000550896
  CDS Start-End: 167-5197
gcgctgtccgcgcccccggtgctgaaccaagatggccggtggcggccgggccccggcgtgagccaagcgcgggctgcagccgggagatgccccagcccagcggccgctgagcccgacccgacagagccggcccggccgcctccggcccacctgcgagctcggagacatgtctctgctttgcgttggagtcaaaaaagccaagtttgatggtgcccaagagaaattcaacacgtacgtgaccctgaaagtgcagaatgtcaagagcacgaccatcgcggtgcggggcagccagcccagctgggagcaggatttcatgttcgagattaaccgtctggatttgggactgacggtggaggtgtggaataagggtctcatctgggacacaatggtgggcactgtgtggatcccactgaggaccatccgccagtccaatgaggagggccctggagagtggctgacgctggactcccaggtcatcatggcagacagtgagatctgtggcaccaaggaccccaccttccaccgcatcctcctggacacgcgctttgagctacccttagacattcctgaagaggaggctcgctactgggccaagaagctggagcagctcaatgctatgcgggaccaggatgaatattcgttccaagatgagcaagacaagcctctgcctgtccccagcaaccagtgctgcaactggaattattttggctggggtgagcagcacaacgatgaccccgacagtgcagtggatgatcgtgacagtgactaccgcagtgaaacgagcaacagcatcccgccgccctattatactacgtcacaacccaacgcctcagtccaccaatattctgttcgcccaccacccctgggctcccgggagtcctacagtgactccatgcacagttacgaggagttctctgagccacaagccctcagccccacgggtagcagccgctatgcctcttccggggagctgagccagggaagctctcagctgagcgaggacttcgaccctgacgagcacagcctgcagggctccgacatggaggatgagcgggaccgggactcctaccactcctgccacagctcggtcagctaccacaaagactcgcctcgctgggaccaggatgaggaagagctggaggaggacctggaggacttcctggaggaggaggagctgcctgaagatgaggaggagctggaggaggaggaggaggaggtgcctgacgatttgggcagctatgcccagcgtgaagacgtagctgtggctgagcccaaagacttcaaacgcatcagcctcccgccagctgccccagggaaggaggacaaggccccagtggcacccaccgaggcccccgacatggccaaggtggcccccaagccagccacgcccgacaaggtgcctgcagctgagcagatccctgaggctgagccacccaaggacgaggagagtttcaggccgagagaggatgaggaaggccaggaggggcaggactccatgtccagggccaaggccaactggctgcgtgccttcaacaaggtgcggatgcagctgcaggaggcccggggagaaggagagatgtctaaatccctatggttcaaaggcggcccagggggcggtctcatcatcatcgacagcatgccagacatccgcaagaggaaacctatcccactcgtgagcgacttgtccctggtccagtccaggaaagcgggcatcacctcggccttggcctccagcacgttgaacaacgaggagctgaaaaaccacgtttacaagaagaccctgcaagccttaatctaccccatctcgtgcacgacgccacacaacttcgaagtgtggacggccaccacgcccacctactgctacgagtgcgaggggctgctgtggggcatcgcgaggcagggcatgcgctgcaccgagtgcggtgtcaagtgccacgagaagtgccaggacctgctcaacgccgactgcctgcagcgggctgcggagaagagctccaagcacggggcggaggaccggacacagaacatcatcatggtgctcaaggaccgcatgaagatccgggagcgcaacaagcccgagatcttcgagctcatccaggagatcttcgcggtgaccaagacggcgcacacgcagcagatgaaggcggtcaagcagagcgtgctggacggcacgtccaagtggtccgccaagatcagcatcaccgtggtctgcgcccagggcttgcaggcaaaggacaagacaggatccagtgacccctatgtcaccgtccaggtcgggaagaccaagaaacggacaaaaaccatctatgggaacctcaacccggtgtgggaggagaatttccactttgaatgtcacaattcctccgaccgcatcaaggtgcgcgtctgggacgaggatgacgacatcaaatcccgcgtgaaacagaggttcaagagggaatctgacgatttcctggggcagacgatcattgaggtgcggacgctcagcggcgagatggacgtgtggtacaacctggacaagcgaactgacaaatctgccgtgtcgggtgccatccggctccacatcagtgtggagatcaaaggcgaggagaaggtggccccgtaccatgtccagtacacctgtctgcatgagaacctgttccacttcgtgaccgacgtgcagaacaatggggtcgtgaagatcccagatgccaagggtgacgatgcctggaaggtttactacgatgagacagcccaggagattgtggacgagtttgccatgcgctacggcgtcgagtccatctaccaagccatgacccactttgcctgcctctcctccaagtatatgtgcccaggggtgcctgccgtcatgagcaccctgctcgccaacatcaatgcctactacgcacacaccaccgcctccaccaacgtgtctgcctccgaccgcttcgccgcctccaactttgggaaagagcgcttcgtgaaactcctggaccagctgcataactccctgcggattgacctctccatgtaccggaataacttcccagccagcagcccggagagactccaggacctcaaatccactgtggaccttctcaccagcatcaccttctttcggatgaaggtacaagaactccagagcccgccccgagccagccaggtggtaaaggactgtgtgaaagcctgccttaattctacctacgagtacatcttcaataactgccatgaactgtacagccgggagtaccagacagacccggccaagaagggggaagttctcccagaggaacaggggcccagcatcaagaacctcgacttctggtccaagctgattaccctcatagtgtccatcattgaggaagacaagaattcctacactccctgcctcaaccagtttccccaggagctgaatgtgggtaaaatcagcgctgaagtgatgtggaatctgtttgcccaagacatgaagtacgccatggaggagcacgacaagcatcgtctatgcaagagtgccgactacatgaacctccacttcaaggtgaaatggctctacaatgagtatgtgacggaacttcccgccttcaaggaccgcgtgcctgagtaccctgcatggtttgaacccttcgtcatccagtggctggatgagaatgaggaggtgtcccgggatttcctgcacggtgccctggagcgagacaagaaggatgggttccagcagacctcagagcatgccctattctcctgctccgtggtggatgttttctcccaactcaaccagagctttgaaatcatcaagaaactcgagtgtcccgaccctcagatcgtggggcactacatgaggcgctttgccaagaccatcagtaatgtgctcctccagtatgcagacatcatctccaaggactttgcctcctactgctccaaggagaaggagaaagtgccctgcattctcatgaataacactcaacagctacgagttcagctggagaagatgttcgaagccatgggaggaaaggagctggatgctgaagccagtgacatcctgaaggagcttcaggtgaaactcaataacgtcttggatgagctcagccgggtgtttgctaccagcttccagccgcacattgaagagtgtgtcaaacagatgggtgacatccttagccaggttaagggcacaggcaatgtgccagccagtgcctgcagcagcgtggcccaggacgcggacaatgtgttgcagcccatcatggacctgctggacagcaacctgaccctctttgccaaaatctgtgagaagactgtgctgaagcgagtgctgaaggagctgtggaagctggttatgaacaccatggagaaaaccatcgtcctgccgcccctcactgaccagacgggaacccagatgatcttcaatgcagccaaggagctgggtcagctgtccaaactcaaggatcacatggtacgagaagaagccaagagcttgaccccaaagcagtgcgcggttgttgagttggccctggacaccatcaagcaatatttccacgcgggtggcgtgggcctcaagaagaccttcctggagaagagcccggacctgcaatccttgcgctatgccctgtcgctctacacgcaggccaccgacctgctaatcaagacctttgtacagacgcaatcggcccagggcttgggtgtagaagaccctgtgggtgaagtctctgtccatgttgagctgttcactcatccaggaactggggaacacaaggtcacagtgaaagtggtggctgccaatgacctcaagtggcagacttctggcatcttccggccgttcatcgaggtcaacatcattgggccccagctcagcgacaagaaacgcaagtttgcgaccaaatccaagaacaatagctgggctcccaagtacaatgagagcttccagttcacgctgagcgccgacgcgggtcccgagtgctatgagctgcaggtgtgcgtcaaggactactgcttcgcgcgcgaggaccgcacggtggggctggccgtgctgcagctgcgtgagctggcccagcgcgggagcgccgcctgctggctgccgctcggccgccgcatccacatggacgacacgggcctcacggtgctgcgaatcctctcgcagcgcagcaacgacgaggtggccaaggagttcgtgaagctcaagtcggacacgcgctccgccgaggagggcggtgccgcgcctgcgccttagcgc

SEQ ID NO: 198125 - DNA, 6052 bp, Homo sapiens
  Payload ID: 19085
  Gene Name: unc-13 homolog A (C. elegans)
  ENST ID: ENST00000551649
  CDS Start-End: 151-5319
cggtgctgaaccaagatggccggtggcggccgggccccggcgtgagccaagcgcgggctgcagccgggagatgccccagcccagcggccgctgagcccgacccgacagagccggcccggccgcctccggcccacctgcgagctcggagacatgtctctgctttgcgttggagtcaaaaaagccaagtttgatggtgcccaagagaaattcaacacgtacgtgaccctgaaagtgcagaatgtcaagagcacgaccatcgcggtgcggggcagccagcccagctgggagcaggatttcatgttcgagattaaccgtctggatttgggactgacggtggaggtgtggaataagggtctcatctgggacacaatggtgggcactgtgtggatcccactgaggaccatccgccagtccaatgaggagggccctggagagtggctgacgctggactcccaggtcatcatggcagacagtgagatctgtggcaccaaggaccccaccttccaccgcatcctcctggacacgcgctttgagctacccttagacattcctgaagaggaggctcgctactgggccaagaagctggagcagctcaatgctatgcgggaccaggatgaatattcgttccaagatgagcaagacaagcctctgcctgtccccagcaaccagtgctgcaactggaattattttggctggggtgagcagcacaacgatgaccccgacagtgcagtggatgatcgtgacagtgactaccgcagtgaaacgagcaacagcatcccgccgccctattatactacgtcacaacccaacgcctcagtccaccaatattctgttcgcccaccacccctgggctcccgggagtcctacagtgactccatgcacagttacgaggagttctctgagccacaagccctcagccccacgggtagcagccgctatgcctcttccggggagctgagccagggaagctctcagctgagcgaggacttcgaccctgacgagcacagcctgcagggctccgacatggaggatgagcgggaccgggactcctaccactcctgccacagctcggtcagctaccacaaagactcgcctcgctgggaccaggatgaggaagagctggaggaggacctggaggacttcctggaggaggaggagctgcctgaagatgaggaggagctggaggaggaggaggaggaggtgcctgacgatttgggcagctatgcccagcgtgaagacgtagctgtggctgagcccaaagacttcaaacgcatcagcctcccgccagctgccccagggaaggaggacaaggccccagtggcacccaccgaggcccccgacatggccaaggtggcccccaagccagccacgcccgacaaggtgcctgcagctgagcagatccctgaggctgagccacccaaggacgaggagagtttcaggccgagagaggatgaggaaggccaggaggggcaggactccatgtccagggccaaggccaactggctgcgtgccttcaacaaggtgcggatgcagctgcaggaggcccggggagaaggagagatgtctaaatccctatggttcaaaggcggcccagggggcggtctcatcatcatcgacagcatgccagacatccgcaagaggaaacctatcccactcgtgagcgacttggccatgtccctggtccagtccaggaaagcgggcatcacctcggccttggcctccagcacgttgaacaacgaggagctgaaaaaccacgtttacaagaagaccctgcaagccttaatctaccccatctcgtgcacgacgccacacaacttcgaagtgtggacggccaccacgcccacctactgctacgagtgcgaggggctgctgtggggcatcgcgaggcagggcatgcgctgcaccgagtgcggtgtcaagtgccacgagaagtgccaggacctgctcaacgccgactgcctgcagcgggctgcggagaagagctccaagcacggggcggaggaccggacacagaacatcatcatggtgctcaaggaccgcatgaagatccgggagcgcaacaagcccgagatcttcgagctcatccaggagatcttcgcggtgaccaagacggcgcacacgcagcagatgaaggcggtcaagcagagcgtgctggacggcacgtccaagtggtccgccaagatcagcatcaccgtggtctgcgcccagggcttgcaggcaaaggacaagacaggatccagtgacccctatgtcaccgtccaggtcgggaagaccaagaaacggacaaaaaccatctatgggaacctcaacccggtgtgggaggagaatttccactttgaatgtcacaattcctccgaccgcatcaaggtgcgcgtctgggacgaggatgacgacatcaaatcccgcgtgaaacagaggttcaagagggaatctgacgatttcctggggcagacgatcattgaggtgcggacgctcagcggcgagatggacgtgtggtacaacctggacaagcgaactgacaaatctgccgtgtcgggtgccatccggctccacatcagtgtggagatcaaaggcgaggagaaggtggccccgtaccatgtccagtacacctgtctgcatgagaacctgttccacttcgtgaccgacgtgcagaacaatggggtcgtgaagatcccagatgccaagggtgacgatgcctggaaggtttactacgatgagacagcccaggagattgtggacgagtttgccatgcgctacggcgtcgagtccatctaccaagccatgacccactttgcctgcctctcctccaagtatatgtgcccaggggtgcctgccgtcatgagcaccctgctcgccaacatcaatgcctactacgcacacaccaccgcctccaccaacgtgtctgcctccgaccgcttcgccgcctccaactttgggaaagagcgcttcgtgaaactcctggaccagctgcataactccctgcggattgacctctccatgtaccggaataacttcccagccagcagcccggagagactccaggacctcaaatccactgtggaccttctcaccagcatcaccttctttcggatgaaggtacaagaactccagagcccgccccgagccagccaggtggtaaaggactgtgtgaaagcctgccttaattctacctacgagtacatcttcaataactgccatgaactgtacagccgggagtaccagacagacccggccaagaagggggaagttctcccagaggaacaggggcccagcatcaagaacctcgacttctggtccaagctgattaccctcatagtgtccatcattgaggaagacaagaattcctacactccctgcctcaaccagtttccccaggagctgaatgtgggtaaaatcagcgctgaagtgatgtggaatctgtttgcccaagacatgaagtacgccatggaggagcacgacaagcatcgtctatgcaagagtgccgactacatgaacctccacttcaaggtgaaatggctctacaatgagtatgtgacggaacttcccgccttcaaggaccgcgtgcctgagtaccctgcatggtttgaacccttcgtcatccagtggctggatgagaatgaggaggtgtcccgggatttcctgcacggtgccctggagcgagacaagaaggatgggttccagcagacctcagagcatgccctattctcctgctccgtggtggatgttttctcccaactcaaccagagctttgaaatcatcaagaaactcgagtgtcccgaccctcagatcgtggggcactacatgaggcgctttgccaagaccatcagtaatgtgctcctccagtatgcagacatcatctccaaggactttgcctcctactgctccaaggagaaggagaaagtgccctgcattctcatgaataacactcaacagctacgagttcagctggagaagatgttcgaagccatgggaggaaaggagctggatgctgaagccagtgacatcctgaaggagcttcaggtgaaactcaataacgtcttggatgagctcagccgggtgtttgctaccagcttccagccgcacattgaagagtgtgtcaaacagatgggtgacatccttagccaggttaagggcacaggcaatgtgccagccagtgcctgcagcagcgtggcccaggacgcggacaatgtgttgcagcccatcatggacctgctggacagcaacctgaccctctttgccaaaatctgtgagaagactgtgctgaagcgagtgctgaaggagctgtggaagctggttatgaacaccatggagaaaaccatcgtcctgccgcccctcactgaccagacgatgatcgggaacctcttgagaaaacatggcaagggattagaaaagggcagggtgaaattgccaagccactcagacggaacccagatgatcttcaatgcagccaaggagctgggtcagctgtccaaactcaaggatcacatggtacgagaagaagccaagagcttgaccccaaagcagtgcgcggttgttgagttggccctggacaccatcaagcaatatttccacgcgggtggcgtgggcctcaagaagaccttcctggagaagagcccggacctgcaatccttgcgctatgccctgtcgctctacacgcaggccaccgacctgctaatcaagacctttgtacagacgcaatcggcccaggtccatggtggaaaaggtactaggtttacccttagtgaagacatttatcctgagaagggcttgggtgtagaagaccctgtgggtgaagtctctgtccatgttgagctgttcactcatccaggaactggggaacacaaggtcacagtgaaagtggtggctgccaatgacctcaagtggcagacttctggcatcttccggccgttcatcgaggtcaacatcattgggccccagctcagcgacaagaaacgcaagtttgcgaccaaatccaagaacaatagctgggctcccaagtacaatgagagcttccagttcacgctgagcgccgacgcgggtcccgagtgctatgagctgcaggtgtgcgtcaaggactactgcttcgcgcgcgaggaccgcacggtggggctggccgtgctgcagctgcgtgagctggcccagcgcgggagcgccgcctgctggctgccgctcggccgccgcatccacatggacgacacgggcctcacggtgctgcgaatcctctcgcagcgcagcaacgacgaggtggccaaggagttcgtgaagctcaagtcggacacgcgctccgccgaggagggcggtgccgcgcctgcgccttagcgcgggcggtcggccgagcggcactgcgcctgcgcggagggcgctgggcggggagggacggggcttgcgccttggtgggacctccccaggggcggggctcggggggctccacgccaagggtgggctgcgcctacgcccttgactcagctttcccttttggggaattaggaatggaggatgccccgccctctcgggaggccacgcccaagggcgcgacgaaggaaggagccacatccccaacttgaggccacgcccccagcacctagggggcattttgagctgggatgggggaaacctcgtccctatggaggaggccacatcccggggctctggtaccgggaggcaccacctcatgtcccctggaaaagccataagatgggacccagacccctgggaccccagaccaattgccaagtatggaaatctcagctccctcgagggggggccctgggcaaggggtagggctctctggagcgcccctctaggtggcctggggactggagggaccaggatgctggttggagggccccggaataccggagtccctttagatatttgtgcaaaaaataaatggggggaggggggaggatgggatttcaaaagcacatgcgcccttgggcgcccaaaccctgggggccgaggggacggctctggttccccacgctgcccctacttccctttgggagtttgcctctccctctcccccaacaaacccagtcctcatatcatagag

SEQ ID NO: 198126 - DNA, 5314 bp, Homo sapiens
  Payload ID: 19085
  Gene Name: unc-13 homolog A (C. elegans)
  ENST ID: ENST00000552293
  CDS Start-End: 128-5221
tggcggccgggccccggcgtgagccaagcgcgggctgcagccgggagatgccccagcccagcggccgctgagcccgacccgacagagccggcccggccgcctccggcccacctgcgagctcggagacatgtctctgctttgcgttggagtcaaaaaagccaagtttgatggtgcccaagagaaattcaacacgtacgtgaccctgaaagtgcagaatgtcaagagcacgaccatcgcggtgcggggcagccagcccagctgggagcaggatttcatgttcgagattaaccgtctggatttgggactgacggtggaggtgtggaataagggtctcatctgggacacaatggtgggcactgtgtggatcccactgaggaccatccgccagtccaatgaggagggccctggagagtggctgacgctggactcccaggtcatcatggcagacagtgagatctgtggcaccaaggaccccaccttccaccgcatcctcctggacacgcgctttgagctacccttagacattcctgaagaggaggctcgctactgggccaagaagctggagcagctcaatgctatgcgggaccaggatgaatattcgttccaagatgagcaagacaagcctctgcctgtccccagcaaccagtgctgcaactggaattattttggctggggtgagcagcacaacgatgaccccgacagtgcagtggatgatcgtgacagtgactaccgcagtgaaacgagcaacagcatcccgccgccctattatactacgtcacaacccaacgcctcagtccaccaatattctgttcgcccaccacccctgggctcccgggagtcctacagtgactccatgcacagttacgaggagttctctgagccacaagccctcagccccacgggtagcagccgctatgcctcttccggggagctgagccagggaagctctcagctgagcgaggacttcgaccctgacgagcacagcctgcagggctccgacatggaggatgagcgggaccgggactcctaccactcctgccacagctcggtcagctaccacaaagactcgcctcgctgggaccaggatgaggaagagctggaggaggacctggaggacttcctggaggaggaggagctgcctgaagatgaggaggagctggaggaggaggaggaggaggtgcctgacgatttgggcagctatgcccagcgtgaagacgtagctgtggctgagcccaaagacttcaaacgcatcagcctcccgccagctgccccagggaaggaggacaaggccccagtggcacccaccgaggcccccgacatggccaaggtggcccccaagccagccacgcccgacaaggtgcctgcagctgagcagatccctgaggctgagccacccaaggacgaggagagtttcaggccgagagaggatgaggaaggccaggaggggcaggactccatgtccagggccaaggccaactggctgcgtgccttcaacaaggtgcggatgcagctgcaggaggcccggggagaaggagagatgtctaaatccctatggttcaaaggcggcccagggggcggtctcatcatcatcgacagcatgccagacatccgcaagaggaaacctatcccactcgtgagcgacttggccatgtccctggtccagtccaggaaagcgggcatcacctcggccttggcctccagcacgttgaacaacgaggagctgaaaaaccacgtttacaagaagaccctgcaagccttaatctaccccatctcgtgcacgacgccacacaacttcgaagtgtggacggccaccacgcccacctactgctacgagtgcgaggggctgctgtggggcatcgcgaggcagggcatgcgctgcaccgagtgcggtgtcaagtgccacgagaagtgccaggacctgctcaacgccgactgcctgcagcgggctgcggagaagagctccaagcacggggcggaggaccggacacagaacatcatcatggtgctcaaggaccgcatgaagatccgggagcgcaacaagcccgagatcttcgagctcatccaggagatcttcgcggtgaccaagacggcgcacacgcagcagatgaaggcggtcaagcagagcgtgctggacggcacgtccaagtggtccgccaagatcagcatcaccgtggtctgcgcccagggcttgcaggcaaaggacaagacaggatccagtgacccctatgtcaccgtccaggtcgggaagaccaagaaacggacaaaaaccatctatgggaacctcaacccggtgtgggaggagaatttccactttgaatgtcacaattcctccgaccgcatcaaggtgcgcgtctgggacgaggatgacgacatcaaatcccgcgtgaaacagaggttcaagagggaatctgacgatttcctggggcagacgatcattgaggtgcggacgctcagcggcgagatggacgtgtggtacaacctggacaagcgaactgacaaatctgccgtgtcgggtgccatccggctccacatcagtgtggagatcaaaggcgaggagaaggtggccccgtaccatgtccagtacacctgtctgcatgagaacctgttccacttcgtgaccgacgtgcagaacaatggggtcgtgaagatcccagatgccaagggtgacgatgcctggaaggtttactacgatgagacagcccaggagattgtggacgagtttgccatgcgctacggcgtcgagtccatctaccaagccatgacccactttgcctgcctctcctccaagtatatgtgcccaggggtgcctgccgtcatgagcaccctgctcgccaacatcaatgcctactacgcacacaccaccgcctccaccaacgtgtctgcctccgaccgcttcgccgcctccaactttgggaaagagcgcttcgtgaaactcctggaccagctgcataactccctgcggattgacctctccatgtaccggaataacttcccagccagcagcccggagagactccaggacctcaaatccactgtggaccttctcaccagcatcaccttctttcggatgaaggtacaagaactccagagcccgccccgagccagccaggtggtaaaggactgtgtgaaagcctgccttaattctacctacgagtacatcttcaataactgccatgaactgtacagccgggagtaccagacagacccggccaagaagggggaagttctcccagaggaacaggggcccagcatcaagaacctcgacttctggtccaagctgattaccctcatagtgtccatcattgaggaagacaagaattcctacactccctgcctcaaccagtttccccaggagctgaatgtgggtaaaatcagcgctgaagtgatgtggaatctgtttgcccaagacatgaagtacgccatggaggagcacgacaagcatcgtctatgcaagagtgccgactacatgaacctccacttcaaggtgaaatggctctacaatgagtatgtgacggaacttcccgccttcaaggaccgcgtgcctgagtaccctgcatggtttgaacccttcgtcatccagtggctggatgagaatgaggaggtgtcccgggatttcctgcacggtgccctggagcgagacaagaaggatgggttccagcagacctcagagcatgccctattctcctgctccgtggtggatgttttctcccaactcaaccagagctttgaaatcatcaagaaactcgagtgtcccgaccctcagatcgtggggcactacatgaggcgctttgccaagaccatcagtaatgtgctcctccagtatgcagacatcatctccaaggactttgcctcctactgctccaaggagaaggagaaagtgccctgcattctcatgaataacactcaacagctacgagttcagctggagaagatgttcgaagccatgggaggaaaggagctggatgctgaagccagtgacatcctgaaggagcttcaggtgaaactcaataacgtcttggatgagctcagccgggtgtttgctaccagcttccagccgcacattgaagagtgtgtcaaacagatgggtgacatccttagccaggttaagggcacaggcaatgtgccagccagtgcctgcagcagcgtggcccaggacgcggacaatgtgttgcagcccatcatggacctgctggacagcaacctgaccctctttgccaaaatctgtgagaagactgtgctgaagcgagtgctgaaggagctgtggaagctggttatgaacaccatggagaaaaccatcgtcctgccgcccctcactgaccagacgggaacccagatgatcttcaatgcagccaaggagctgggtcagctgtccaaactcaaggatcacatggtacgagaagaagccaagagcttgaccccaaagcagtgcgcggttgttgagttggccctggacaccatcaagcaatatttccacgcgggtggcgtgggcctcaagaagaccttcctggagaagagcccggacctgcaatccttgcgctatgccctgtcgctctacacgcaggccaccgacctgctaatcaagacctttgtacagacgcaatcggcccaggtccatggtggaaaaggtactaggtttacccttagtgaagacatttatcctgagaagggcttgggtgtagaagaccctgtgggtgaagtctctgtccatgttgagctgttcactcatccaggaactggggaacacaaggtcacagtgaaagtggtggctgccaatgacctcaagtggcagacttctggcatcttccggccgttcatcgaggtcaacatcattgggccccagctcagcgacaagaaacgcaagtttgcgaccaaatccaagaacaatagctgggctcccaagtacaatgagagcttccagttcacgctgagcgccgacgcgggtcccgagtgctatgagctgcaggtgtgcgtcaaggactactgcttcgcgcgcgaggaccgcacggtggggctggccgtgctgcagctgcgtgagctggcccagcgcgggagcgccgcctgctggctgccgctcggccgccgcatccacatggacgacacgggcctcacggtgctgcgaatcctctcgcagcgcagcaacgacgaggtggccaaggagttcgtgaagctcaagtcggacacgcgctccgccgaggagggcggtgccgcgcctgcgccttagcgcgggcggtcggccgagcggcactgcgcctgcgcggagggcgctgggcggggagggacggggcttgcgccttggtgggacctccccaggggc

SEQ ID NO: 198127 - DNA, 6303 bp, Homo sapiens
  Payload ID: 19086
  Gene Name: unc-13 homolog B (C. elegans)
  Uniprot ID: O14795
  ENST ID: ENST00000378495
  CDS Start-End: 223-4998
cccagcctgccggccggtactcaccgctacccggagttcgctcagacggtgagatttggggcgggtccgaggcagcggcgggacgctacctgcgaccgggaccatgaggagctgccagacccgtggggccggtaacgagagcagtcgcggcacctgctgagaggaaagagggagcggtccggcgcggctggggcgcggcagaggcttgcccgatcctcggccatgtcactgctctgcgtgcgcgttaaaagggccaaattccagggttcaccagataaatttaacacatatgtgaccctgaaagtacagaatgtgaagagcacaactgtagcagttcgtggtgatcagccttcctgggaacaggatttcatgtttgagattagtcgcctggacctgggtctaagtgtggaggtatggaacaaaggactgatctgggacaccatggtggggactgtgtggattgcgctgaagactattcgtcagtcggatgaggaagggcctggggaatggtccacattagaggcagagacgttaatgaaagacgatgagatctgtggaactagaaacccaactcctcataaaattttgcttgatacaagatttgagttgccttttgatatcccagaggaggaagccagatattggacctacaaatgggagcaaatcaatgccttgggagctgacaatgagtattctagtcaagaagaaagccagaggaagccattgcccactgctgccgcccagtgttcttttgaagaccctgatagtgccgtcgatgaccgagatagtgactatcgcagtgagaccagcaacagcttcccacctccttaccatacagcttcccagcccaacgcttctgtgcaccagttccctgtgccggtgcgatcgccacagcagctgctacttcaaggcagttcccgggactcttgtaatgactctatgcaaagttatgaccttgattatccagagcggcgggctatcagccccaccagcagcagtaggtatggctcctcctgtaatgtgagtcaaggaagctctcagctaagtgaactagaccagtatcacgaacaagatgacgaccatcgggagacggactcgattcattcttgccacagctctcacagcctgtccagagatggccaagcaggttttggagaacaagagaaacccttggaggtgacaggtcaagcagagaaggaggcagcatgtgaacccaaggagatgaaagaagatgccacaacccaccctcccccagatctggtgctgcaaaaagaccacttcctaggtccccaggagagttttcctgaggagaatgcatcttcaccatttacccaagccagagcacattggatccgagcagttaccaaggttcgactccagctgcaggagattccagatgatggtgacccctctctgcctcagtggctcccggaagggccagccggagggctctatggcattgacagcatgccagatttacgcagaaagaagccactgccacttgtcagtgatctgtcactggtccagtctcggaaggcaggaatcacttctgcaatggctacacgcacttctcttaaggacgaagagctgaaatcccacgtgtataagaaaaccctgcaggccttaatctaccccatttcgtgcaccactcctcataactttgaggtctggacggccactaccccaacctactgctatgagtgtgaaggcctgctctggggcattgcccggcagggcatgcgctgcagcgaatgtggagtcaagtgccatgagaagtgccaggatctgctcaatgctgactgcctgcagcgggctgcagaaaagagctgtaaacatggagctgaggaccggacccagaacattatcatggccatgaaggaccgcatgaagatccgagagcgaaataagccagagatctttgaagttatccgggacgtcttcacagtgaacaaagctgcccatgtgcagcagatgaaaacagtgaagcagagtgtactggatggcacctccaaatggtcagccaagatcaccattactgtggtgtgtgcccagggcctacaagccaaggacaaaacaggatccagtgacccttacgtgactgtgcaagtcagcaaaactaagaagcgtaccaagaccatttttggaaacttgaatcctgtttgggaggagaagttccattttgagtgccacaactcctctgaccgcattaaggtgcgtgtatgggatgaggatgatgacatcaagtcaagagtaaagcaacgcctaaagcgagagtctgatgatttccttggccaaaccatcattgaggttcggaccctaagtggcgagatggacgtctggtacaacttggagaagaggacagacaaatcagccgtctcaggggctatccgactacaaatcagtgtggagatcaagggggaggagaaagtagccccataccacgtgcagtatacatgtctccatgagaatcttttccattacctcacagacattcagggcagtggaggagtccgcatccctgaagctcgaggagacgatgcctggaaggtgtactttgatgagacagcccaagaaattgtggatgaatttgccatgcgttatggcattgagtccatatatcaggccatgacgcactttgcatgtttatcatccaagtacatgtgtcctggtgtgccagcagtgatgagcaccttactggccaacatcaacgcctactatgcccacacaactgcctctaccaatgtctctgcatctgatcgctttgcagcctccaactttgggaaagagagatttgtaaaactgctggaccagctacacaactcactgaggatcgacctctctacatacaggaataatttccctgctgggagtcctgaacggcttcaggacttaaaatccacagtggatttgctgaccagcattactttcttcagaatgaaggtacaagaactgcaaagccctccaagagccagccaggtggtaaaggattgtgtgaaggcctgtttgaactccacatatgaatatatcttcaacaactgccacgacttatacagccgccagtaccagctgaagcaggagctacctccagaggaacaagggcccagcattcggaacctggatttctggcccaagctcatcacactcatcgtgtcaatcatagaggaagataagaattcctacacacctgttctgaaccagtttcctcaggagttgaatgtgggaaaagtcagcgcagaagtgatgtggcatttgtttgcccaagacatgaaatatgcattggaggagcatgagaaagaccacctgtgtaaaagtgctgactacatgaacctgcacttcaaggtgaagtggctccacaatgaatacgtgcgggatctgcctgtcctccaggggcaggtgcctgagtacccagcgtggtttgagcagttcgtgctacaatggctggatgagaatgaggatgtatccctggaattcctgcgtggggccctggaacgagataagaaggatggattccagcagacatcagagcatgcactcttttcctgctctgtggtggatgtcttcacacaactcaatcagagctttgagatcatccggaagctggaatgcccagaccccagcatccttgcccactacatgaggaggtttgctaagaccatcgggaaggtgctgatgcagtatgcagacatcttgtcaaaggacttcccagcctattgcacaaaggagaaactgccctgcatcctgatgaacaacgtgcagcaactgagggtccagctggagaaaatgtttgaggccatgggaggcaaggagctggaccttgaagctgcagacagtctgaaggagctgcaggtgaaactgaatacggttctggatgagctcagcatggtgtttggaaacagtttccaggtacggattgatgagtgtgttcgacaaatggccgacatcctgggccaggttcggggcacagggaatgcatctccagacgccagggcctcagcggctcaggatgcagatagcgtactccggcctctcatggacttcctggatggcaacctcaccctctttgccactgtgtgtgagaagacggttctgaagcgtgtactgaaggagctctggcgcgtggtgatgaacacaatggagaggatgattgttctgcccccactcactgaccagacgggcacccagctgatcttcactgctgccaaggagctgagccatctttccaaactcaaggatcacatggtacgagaggaaacacggaatctcactccaaagcagtgtgcagtccttgacctcgccctggacaccatcaagcaatacttccatgcaggaggcaatgggctgaagaaaaccttcctggagaagagcccagatctgcagtctctacgctatgccctgtctctgtacacacagactactgacactctcatcaagacctttgtgcgctcgcagaccacccaagggtctggtgtggacgatcctgtgggagaagtctctattcaggtggacttgtttacacaccctggtactggggagcacaaggtcacagtgaaagtggtggctgccaatgacctcaagtggcagacagcgggtatgttccggcctttcgtggaggtgactatggttggcccacaccaaagtgataagaagaggaagttcacaaccaaatccaaaagcaacaactgggcccccaagtacaatgagacattccacttcctcctgggaaatgaggaggggcccgagtcctatgagttgcagatatgcgtgaaggattactgctttgcccgggaagatcgcgtgctagggctggctgtgatgcctctgagggatgtcacagccaagggcagctgtgcctgctggtgccccttgggccggaagatccatatggatgagacaggcctgaccattctccggattttatctcagaggagcaatgacgaggtggcccgagaatttgtgaaactcaaatcagagtctcgttccacggaggaggggagctgaacaccttcgactcctgtgccaatcaggcagcagcaatttcacaaatcagggccagtgggagttagctgtgtaaccggcttagggtctttgcagtcaagaggctgaccccttcagttaaagatatttaaggaaaaatttggggtggtgataatatggcttttcacagaaagggtcatgaagccctggcccaacaggactgtggtactaggggctgggatgtggggttaccacatggagagattttccattaagagagaaggacaaacatttctgagagtgtcagccattcttggtagacacctctccactcctcatcccacctctacccatctccatgccacaccttatccagttagacacatacataccaatcattagaagaacaagtttagaaggtgtggaacttgtgcctggctggctgggtagtcagctgagcctgttgctgagcccggtggtctggattggagtatggccagggcaggagtacacagaatagaatttagactgtcccttgagtagaatccactgattttctgtggctccagtgagaacaaggctttgaaactgaacaagataacttctagaaatgaactgtactaatccctttccccagattgtatcatgagtagaatcaggttcacgtggtgcttcaaagccctgagaagaatatttctttggaccccaggcactaggggccacctgcctgggagtctccctgcctcactcctctaggcaggggagtgatgcttcaggacgtgacaggctgttctaacatgtgtctacctgagggctagttgaaggatccaggagtattttcttcttgggtgggccctgaacaaagccaaaaattgtagaaaccagtctagaaaaagtcctgctcatctgtggccactgccttctagccgtcctccaccttgcagaaagaatctagcctttggtctctctctctctcatcggggtcatttgctattcccctctgatattcaaccctatagaaggagcctggactctgatccctctgtacaggctggatggaaggggccctccacacttcctgggaggtcagagacaaactgtttcagagagtcagatggacttcccaagacttgttgagagatgtgacatggttcttggatttcctctgtagcagcctcctggacttcctgaggactcgacattgtccacagatgtactggccattacatgaaacaagaaaccaagcatctttgctgttgttaattattatatgtgccattgttacaggagattataggctagtctgtaataaattatcttatagcagcc

SEQ ID NO: 198128 - DNA, 5063 bp, Homo sapiens
  Payload ID: 19086
  Gene Name: unc-13 homolog B (C. elegans)
  ENST ID: ENST00000378496
  CDS Start-End: 1449-5042
cagacggtgagatttggggcgggtccgaggcagcggcgggacgctacctgcgaccgggaccatgaggagctgccagacccgtggggccggtaacgagagcagtcgcggcacctgctgagaggaaagagggagcggtccggcgcggctggggcgcggcagaggcttgcccgatcctcggccatgtcactgctctgcgtgcgcgttaaaagggccaaattccagggttcaccagataaatttaacacatatgtgaccctgaaagtacagaatgtgaagagcacaactgtagcagttcgtggtgatcagccttcctgggaacaggatttcatgtttgagattagtcgcctggacctgggtctaagtgtggaggtatggaacaaaggactgatctgggacaccatggtggggactgtgtggattgcgctgaagactattcgtcagtcggatgaggaagggcctggggaatggtccacattagaggcagagacgttaatgaaagacgatgagatctgtggaactagaaacccaactcctcataaaattttgcttgatacaagatttgagttgccttttgatatcccagaggaggaagccagatattggacctacaaatgggagcaaatcaatgccttgggagctgacaatgagtattctagtcaagaagaaagccagaggaagccattgcccactgctgccgcccagtgttcttttgaagaccctgatagtgccgtcgatgaccgagatagtgactatcgcagtgagaccagcaacagcttcccacctccttaccatacagcttcccagcccaacgcttctgtgcaccagttccctgtgccggtgcgatcgccacagcagctgctacttcaaggcagttcccgggactcttgtaatgactctatgcaaagttatgaccttgattatccagagcggcgggctatcagccccaccagcagcagtaggtatggctcctcctgtaatgtgagtcaaggaagctctcagctaagtgaactagaccagtatcacgaacaagatgacgaccatcgggagacggactcgattcattcttgccacagctctcacagcctgtccagagatggccaagcaggttttggagaacaagagaaacccttggaggtgacaggtcaagcagagaaggaggcagcatgtgaacccaaggagatgaaagaagatgccacaacccaccctcccccagatctggtgctgcaaaaagaccacttcctaggtccccaggagagttttcctgaggagaatgcatcttcaccatttacccaagccagagcacattggatccgagcagttaccaaggttcgactccagctgcaggagaagaaaagcgaggagcccttcagattccagatgatggtgacccctctctgcctcagtggctcccggaagggccagccggagggctctatggcattgacagcatgccagatttacgcagaaagaagccactgccacttgtcagtgatctggtgaagtcactggtccagtctcggaaggcaggaatcacttctgcaatggctacacgcacttctcttaaggacgaagagctgaaatcccacgtgtataagaaaaccctgcaggccttaatctaccccatttcgtgcaccactcctcataactttgaggtctggacggccactaccccaacctactgctatgagtgtgaaggcctgctctggggcattgcccggcagggcatgcgctgcagcgaatgtggagtcaagtgccatgagaagtgccaggatctgctcaatgctgactgcctgcagcgggctgcagaaaagagctgtaaacatggagctgaggaccggacccagaacattatcatggccatgaaggaccgcatgaagatccgagagcgaaataagccagagatctttgaagttatccgggacgtcttcacagtgaacaaagctgcccatgtgcagcagatgaaaacagtgaagcagagtgtactggatggcacctccaaatggtcagccaagatcaccattactgtggtgtgtgcccagggcctacaagccaaggacaaaacaggatccagtgacccttacgtgactgtgcaagtcagcaaaactaagaagcgtaccaagaccatttttggaaacttgaatcctgtttgggaggagaagttccattttgagtgccacaactcctctgaccgcattaaggtgcgtgtatgggatgaggatgatgacatcaagtcaagagtaaagcaacgcctaaagcgagagtctgatgatttccttggccaaaccatcattgaggttcggaccctaagtggcgagatggacgtctggtacaacttggagaagaggacagacaaatcagccgtctcaggggctatccgactacaaatcagtgtggagatcaagggggaggagaaagtagccccataccacgtgcagtatacatgtctccatgagaatcttttccattacctcacagacattcagggcagtggaggagtccgcatccctgaagctcgaggagacgatgcctggaaggtgtactttgatgagacagcccaagaaattgtggatgaatttgccatgcgttatggcattgagtccatatatcaggccatgacgcactttgcatgtttatcatccaagtacatgtgtcctggtgtgccagcagtgatgagcaccttactggccaacatcaacgcctactatgcccacacaactgcctctaccaatgtctctgcatctgatcgctttgcagcctccaactttgggaaagagagatttgtaaaactgctggaccagctacacaactcactgaggatcgacctctctacatacaggaataatttccctgctgggagtcctgaacggcttcaggacttaaaatccacagtggatttgctgaccagcattactttcttcagaatgaaggtacaagaactgcaaagccctccaagagccagccaggtggtaaaggattgtgtgaaggcctgtttgaactccacatatgaatatatcttcaacaactgccacgacttatacagccgccagtaccagctgaagcaggagctacctccagaggaacaagggcccagcattcggaacctggatttctggcccaagctcatcacactcatcgtgtcaatcatagaggaagataagaattcctacacacctgttctgaaccagtttcctcaggagttgaatgtgggaaaagtcagcgcagaagtgatgtggcatttgtttgcccaagacatgaaatatgcattggaggagcatgagaaagaccacctgtgtaaaagtgctgactacatgaacctgcacttcaaggtgaagtggctccacaatgaatacgtgcgggatctgcctgtcctccaggggcaggtgcctgagtacccagcgtggtttgagcagttcgtgctacaatggctggatgagaatgaggatgtatccctggaattcctgcgtggggccctggaacgagataagaaggatggattccagcagacatcagagcatgcactcttttcctgctctgtggtggatgtcttcacacaactcaatcagagctttgagatcatccggaagctggaatgcccagaccccagcatccttgcccactacatgaggaggtttgctaagaccatcgggaaggtgctgatgcagtatgcagacatcttgtcaaaggacttcccagcctattgcacaaaggagaaactgccctgcatcctgatgaacaacgtgcagcaactgagggtccagctggagaaaatgtttgaggccatgggaggcaaggagctggaccttgaagctgcagacagtctgaaggagctgcaggtgaaactgaatacggttctggatgagctcagcatggtgtttggaaacagtttccaggtacggattgatgagtgtgttcgacaaatggccgacatcctgggccaggttcggggcacagggaatgcatctccagacgccagggcctcagcggctcaggatgcagatagcgtactccggcctctcatggacttcctggatggcaacctcaccctctttgccactgtgtgtgagaagacggttctgaagcgtgtactgaaggagctctggcgcgtggtgatgaacacaatggagaggatgattgttctgcccccactcactgaccagacgggcacccagctgatcttcactgctgccaaggagctgagccatctttccaaactcaaggatcacatggtacgagaggaaacacggaatctcactccaaagcagtgtgcagtccttgacctcgccctggacaccatcaagcaatacttccatgcaggaggcaatgggctgaagaaaaccttcctggagaagagcccagatctgcagtctctacgctatgccctgtctctgtacacacagactactgacactctcatcaagacctttgtgcgctcgcagaccacccaagtgcatgatgggaaaggtattagatttactgctaatgaggacattcgtccggaaaaggggtctggtgtggacgatcctgtgggagaagtctctattcaggtggacttgtttacacaccctggtactggggagcacaaggtcacagtgaaagtggtggctgccaatgacctcaagtggcagacagcgggtatgttccggcctttcgtggaggtgactatggttggcccacaccaaagtgataagaagaggaagttcacaaccaaatccaaaagcaacaactgggcccccaagtacaatgagacattccacttcctcctgggaaatgaggaggggcccgagtcctatgagttgcagatatgcgtgaaggattactgctttgcccgggaagatcgcgtgctagggctggctgtgatgcctctgagggatgtcacagccaagggcagctgtgcctgctggtgccccttgggccggaagatccatatggatgagacaggcctgaccattctccggattttatctcagaggagcaatgacgaggtggcccgagaatttgtgaaactcaaatcagagtctcgttccacggaggaggggagctgaacaccttcgactcctgtgcca

SEQ ID NO: 198129 - DNA, 5293 bp, Homo sapiens
  Payload ID: 19086
  Gene Name: unc-13 homolog B (C. elegans)
  ENST ID: ENST00000396787
  CDS Start-End: 283-5151
gggagggagtcccggcagctcctacctcccagcgatggcgtcgctgtgccgcgcccagtccccagcctgccggccggtactcaccgctacccggagttcgctcagacggtgagatttggggcgggtccgaggcagcggcgggacgctacctgcgaccgggaccatgaggagctgccagacccgtggggccggtaacgagagcagtcgcggcacctgctgagaggaaagagggagcggtccggcgcggctggggcgcggcagaggcttgcccgatcctcggccatgtcactgctctgcgtgcgcgttaaaagggccaaattccagggttcaccagataaatttaacacatatgtgaccctgaaagtacagaatgtgaagagcacaactgtagcagttcgtggtgatcagccttcctgggaacaggatttcatgtttgagattagtcgcctggacctgggtctaagtgtggaggtatggaacaaaggactgatctgggacaccatggtggggactgtgtggattgcgctgaagactattcgtcagtcggatgaggaagggcctggggaatggtccacattagaggcagagacgttaatgaaagacgatgagatctgtggaactagaaacccaactcctcataaaattttgcttgatacaagatttgagttgccttttgatatcccagaggaggaagccagatattggacctacaaatgggagcaaatcaatgccttgggagctgacaatgagtattctagtcaagaagaaagccagaggaagccattgcccactgctgccgcccagtgttgtcactggacctatttgggctggggagaacaacagacttttgaagaccctgatagtgccgtcgatgaccgagatagtgactatcgcagtgagaccagcaacagcttcccacctccttaccatacagcttcccagcccaacgcttctgtgcaccagttccctgtgccggtgcgatcgccacagcagctgctacttcaaggcagttcccgggactcttgtaatgactctatgcaaagttatgaccttgattatccagagcggcgggctatcagccccaccagcagcagtaggtatggctcctcctgtaatgtgagtcaaggaagctctcagctaagtgaactagaccagtatcacgaacaagatgacgaccatcgggagacggactcgattcattcttgccacagctctcacagcctgtccagagatggccaagcaggttttggagaacaagagaaacccttggaggtgacaggtcaagcagagaaggaggcagcatgtgaacccaaggagatgaaagaagatgccacaacccaccctcccccagatctggtgctgcaaaaagaccacttcctaggtccccaggagagttttcctgaggagaatgcatcttcaccatttacccaagccagagcacattggatccgagcagttaccaaggttcgactccagctgcaggagattccagatgatggtgacccctctctgcctcagtggctcccggaagggccagccggagggctctatggcattgacagcatgccagatttacgcagaaagaagccactgccacttgtcagtgatctgtcactggtccagtctcggaaggcaggaatcacttctgcaatggctacacgcacttctcttaaggacgaagagctgaaatcccacgtgtataagaaaaccctgcaggccttaatctaccccatttcgtgcaccactcctcataactttgaggtctggacggccactaccccaacctactgctatgagtgtgaaggcctgctctggggcattgcccggcagggcatgcgctgcagcgaatgtggagtcaagtgccatgagaagtgccaggatctgctcaatgctgactgcctgcagcgggctgcagaaaagagctgtaaacatggagctgaggaccggacccagaacattatcatggccatgaaggaccgcatgaagatccgagagcgaaataagccagagatctttgaagttatccgggacgtcttcacagtgaacaaagctgcccatgtgcagcagatgaaaacagtgaagcagagtgtactggatggcacctccaaatggtcagccaagatcaccattactgtggtgtgtgcccagggcctacaagccaaggacaaaacaggatccagtgacccttacgtgactgtgcaagtcagcaaaactaagaagcgtaccaagaccatttttggaaacttgaatcctgtttgggaggagaagttccattttgagtgccacaactcctctgaccgcattaaggtgcgtgtatgggatgaggatgatgacatcaagtcaagagtaaagcaacgcctaaagcgagagtctgatgatttccttggccaaaccatcattgaggttcggaccctaagtggcgagatggacgtctggtacaacttggagaagaggacagacaaatcagccgtctcaggggctatccgactacaaatcagtgtggagatcaagggggaggagaaagtagccccataccacgtgcagtatacatgtctccatgagaatcttttccattacctcacagacattcagggcagtggaggagtccgcatccctgaagctcgaggagacgatgcctggaaggtgtactttgatgagacagcccaagaaattgtggatgaatttgccatgcgttatggcattgagtccatatatcaggccatgacgcactttgcatgtttatcatccaagtacatgtgtcctggtgtgccagcagtgatgagcaccttactggccaacatcaacgcctactatgcccacacaactgcctctaccaatgtctctgcatctgatcgctttgcagcctccaactttgggaaagagagatttgtaaaactgctggaccagctacacaactcactgaggatcgacctctctacatacaggaataatttccctgctgggagtcctgaacggcttcaggacttaaaatccacagtggatttgctgaccagcattactttcttcagaatgaaggtacaagaactgcaaagccctccaagagccagccaggtggtaaaggattgtgtgaaggcctgtttgaactccacatatgaatatatcttcaacaactgccacgacttatacagccgccagtaccagctgaagcaggagctacctccagaggaacaagggcccagcattcggaacctggatttctggcccaagctcatcacactcatcgtgtcaatcatagaggaagataagaattcctacacacctgttctgaaccagtttcctcaggagttgaatgtgggaaaagtcagcgcagaagtgatgtggcatttgtttgcccaagacatgaaatatgcattggaggagcatgagaaagaccacctgtgtaaaagtgctgactacatgaacctgcacttcaaggtgaagtggctccacaatgaatacgtgcgggatctgcctgtcctccaggggcaggtgcctgagtacccagcgtggtttgagcagttcgtgctacaatggctggatgagaatgaggatgtatccctggaattcctgcgtggggccctggaacgagataagaaggatggattccagcagacatcagagcatgcactcttttcctgctctgtggtggatgtcttcacacaactcaatcagagctttgagatcatccggaagctggaatgcccagaccccagcatccttgcccactacatgaggaggtttgctaagaccatcgggaaggtgctgatgcagtatgcagacatcttgtcaaaggacttcccagcctattgcacaaaggagaaactgccctgcatcctgatgaacaacgtgcagcaactgagggtccagctggagaaaatgtttgaggccatgggaggcaaggagctggaccttgaagctgcagacagtctgaaggagctgcaggtgaaactgaatacggttctggatgagctcagcatggtgtttggaaacagtttccaggtacggattgatgagtgtgttcgacaaatggccgacatcctgggccaggttcggggcacagggaatgcatctccagacgccagggcctcagcggctcaggatgcagatagcgtactccggcctctcatggacttcctggatggcaacctcaccctctttgccactgtgtgtgagaagacggttctgaagcgtgtactgaaggagctctggcgcgtggtgatgaacacaatggagaggatgattgttctgcccccactcactgaccagacgggcacccagctgatcttcactgctgccaaggagctgagccatctttccaaactcaaggatcacatggtacgagaggaaacacggaatctcactccaaagcagtgtgcagtccttgacctcgccctggacaccatcaagcaatacttccatgcaggaggcaatgggctgaagaaaaccttcctggagaagagcccagatctgcagtctctacgctatgccctgtctctgtacacacagactactgacactctcatcaagacctttgtgcgctcgcagaccacccaagtgcatgatgggaaaggtattagatttactgctaatgaggacattcgtccggaaaaggggtctggtgtggacgatcctgtgggagaagtctctattcaggtggacttgtttacacaccctggtactggggagcacaaggtcacagtgaaagtggtggctgccaatgacctcaagtggcagacagcgggtatgttccggcctttcgtggaggtgactatggttggcccacaccaaagtgataagaagaggaagttcacaaccaaatccaaaagcaacaactgggcccccaagtacaatgagacattccacttcctcctgggaaatgaggaggggcccgagtcctatgagttgcagatatgcgtgaaggattactgctttgcccgggaagatcgcgtgctagggctggctgtgatgcctctgagggatgtcacagccaagggcagctgtgcctgctggtgccccttgggccggaagatccatatggatgagacaggcctgaccattctccggattttatctcagaggagcaatgacgaggtggcccgagaatttgtgaaactcaaatcagagtctcgttccacggaggaggggagctgaacaccttcgactcctgtgccaatcaggcagcagcaatttcacaaatcagggccagtgggagttagctgtgtaaccggcttagggtctttgcagtcaagaggctgaccccttcagttaaagatatttaaggaaaaatttgggg

SEQ ID NO: 198130 - DNA, 6426 bp, Homo sapiens
  Payload ID: 19086
  Gene Name: unc-13 homolog B (C. elegans)
  Uniprot ID: O14795
  ENST ID: ENST00000619578
  CDS Start-End: 293-5125
gtggaatgacgggagggagtcccggcagctcctacctcccagcgatggcgtcgctgtgccgcgcccagtccccagcctgccggccggtactcaccgctacccggagttcgctcagacggtgagatttggggcgggtccgaggcagcggcgggacgctacctgcgaccgggaccatgaggagctgccagacccgtggggccggtaacgagagcagtcgcggcacctgctgagaggaaagagggagcggtccggcgcggctggggcgcggcagaggcttgcccgatcctcggccatgtcactgctctgcgtgcgcgttaaaagggccaaattccagggttcaccagataaatttaacacatatgtgaccctgaaagtacagaatgtgaagagcacaactgtagcagttcgtggtgatcagccttcctgggaacaggatttcatgtttgagattagtcgcctggacctgggtctaagtgtggaggtatggaacaaaggactgatctgggacaccatggtggggactgtgtggattgcgctgaagactattcgtcagtcggatgaggaagggcctggggaatggtccacattagaggcagagacgttaatgaaagacgatgagatctgtggaactagaaacccaactcctcataaaattttgcttgatacaagatttgagttgccttttgatatcccagaggaggaagccagatattggacctacaaatgggagcaaatcaatgccttgggagctgacaatgagtattctagtcaagaagaaagccagaggaagccattgcccactgctgccgcccagtgttcttttgaagaccctgatagtgccgtcgatgaccgagatagtgactatcgcagtgagaccagcaacagcttcccacctccttaccatacagcttcccagcccaacgcttctgtgcaccagttccctgtgccggtgcgatcgccacagcagctgctacttcaaggcagttcccgggactcttgtaatgactctatgcaaagttatgaccttgattatccagagcggcgggctatcagccccaccagcagcagtaggtatggctcctcctgtaatgtgagtcaaggaagctctcagctaagtgaactagaccagtatcacgaacaagatgacgaccatcgggagacggactcgattcattcttgccacagctctcacagcctgtccagagatggccaagcaggttttggagaacaagagaaacccttggaggtgacaggtcaagcagagaaggaggcagcatgtgaacccaaggagatgaaagaagatgccacaacccaccctcccccagatctggtgctgcaaaaagaccacttcctaggtccccaggagagttttcctgaggagaatgcatcttcaccatttacccaagccagagcacattggatccgagcagttaccaaggttcgactccagctgcaggagattccagatgatggtgacccctctctgcctcagtggctcccggaagggccagccggagggctctatggcattgacagcatgccagatttacgcagaaagaagccactgccacttgtcagtgatctgtcactggtccagtctcggaaggcaggaatcacttctgcaatggctacacgcacttctcttaaggacgaagagctgaaatcccacgtgtataagaaaaccctgcaggccttaatctaccccatttcgtgcaccactcctcataactttgaggtctggacggccactaccccaacctactgctatgagtgtgaaggcctgctctggggcattgcccggcagggcatgcgctgcagcgaatgtggagtcaagtgccatgagaagtgccaggatctgctcaatgctgactgcctgcagcgggctgcagaaaagagctgtaaacatggagctgaggaccggacccagaacattatcatggccatgaaggaccgcatgaagatccgagagcgaaataagccagagatctttgaagttatccgggacgtcttcacagtgaacaaagctgcccatgtgcagcagatgaaaacagtgaagcagagtgtactggatggcacctccaaatggtcagccaagatcaccattactgtggtgtgtgcccagggcctacaagccaaggacaaaacaggatccagtgacccttacgtgactgtgcaagtcagcaaaactaagaagcgtaccaagaccatttttggaaacttgaatcctgtttgggaggagaagttccattttgagtgccacaactcctctgaccgcattaaggtgcgtgtatgggatgaggatgatgacatcaagtcaagagtaaagcaacgcctaaagcgagagtctgatgatttccttggccaaaccatcattgaggttcggaccctaagtggcgagatggacgtctggtacaacttggagaagaggacagacaaatcagccgtctcaggggctatccgactacaaatcagtgtggagatcaagggggaggagaaagtagccccataccacgtgcagtatacatgtctccatgagaatcttttccattacctcacagacattcagggcagtggaggagtccgcatccctgaagctcgaggagacgatgcctggaaggtgtactttgatgagacagcccaagaaattgtggatgaatttgccatgcgttatggcattgagtccatatatcaggccatgacgcactttgcatgtttatcatccaagtacatgtgtcctggtgtgccagcagtgatgagcaccttactggccaacatcaacgcctactatgcccacacaactgcctctaccaatgtctctgcatctgatcgctttgcagcctccaactttgggaaagagagatttgtaaaactgctggaccagctacacaactcactgaggatcgacctctctacatacaggaataatttccctgctgggagtcctgaacggcttcaggacttaaaatccacagtggatttgctgaccagcattactttcttcagaatgaaggtacaagaactgcaaagccctccaagagccagccaggtggtaaaggattgtgtgaaggcctgtttgaactccacatatgaatatatcttcaacaactgccacgacttatacagccgccagtaccagctgaagcaggagctacctccagaggaacaagggcccagcattcggaacctggatttctggcccaagctcatcacactcatcgtgtcaatcatagaggaagataagaattcctacacacctgttctgaaccagtttcctcaggagttgaatgtgggaaaagtcagcgcagaagtgatgtggcatttgtttgcccaagacatgaaatatgcattggaggagcatgagaaagaccacctgtgtaaaagtgctgactacatgaacctgcacttcaaggtgaagtggctccacaatgaatacgtgcgggatctgcctgtcctccaggggcaggtgcctgagtacccagcgtggtttgagcagttcgtgctacaatggctggatgagaatgaggatgtatccctggaattcctgcgtggggccctggaacgagataagaaggatggattccagcagacatcagagcatgcactcttttcctgctctgtggtggatgtcttcacacaactcaatcagagctttgagatcatccggaagctggaatgcccagaccccagcatccttgcccactacatgaggaggtttgctaagaccatcgggaaggtgctgatgcagtatgcagacatcttgtcaaaggacttcccagcctattgcacaaaggagaaactgccctgcatcctgatgaacaacgtgcagcaactgagggtccagctggagaaaatgtttgaggccatgggaggcaaggagctggaccttgaagctgcagacagtctgaaggagctgcaggtgaaactgaatacggttctggatgagctcagcatggtgtttggaaacagtttccaggtacggattgatgagtgtgttcgacaaatggccgacatcctgggccaggttcggggcacagggaatgcatctccagacgccagggcctcagcggctcaggatgcagatagcgtactccggcctctcatggacttcctggatggcaacctcaccctctttgccactgtgtgtgagaagacggttctgaagcgtgtactgaaggagctctggcgcgtggtgatgaacacaatggagaggatgattgttctgcccccactcactgaccagacgggcacccagctgatcttcactgctgccaaggagctgagccatctttccaaactcaaggatcacatggtacgagaggaaacacggaatctcactccaaagcagtgtgcagtccttgacctcgccctggacaccatcaagcaatacttccatgcaggaggcaatgggctgaagaaaaccttcctggagaagagcccagatctgcagtctctacgctatgccctgtctctgtacacacagactactgacactctcatcaagacctttgtgcgctcgcagaccacccaagtgcatgatgggaaaggtattagatttactgctaatgaggacattcgtccggaaaaggggtctggtgtggacgatcctgtgggagaagtctctattcaggtggacttgtttacacaccctggtactggggagcacaaggtcacagtgaaagtggtggctgccaatgacctcaagtggcagacagcgggtatgttccggcctttcgtggaggtgactatggttggcccacaccaaagtgataagaagaggaagttcacaaccaaatccaaaagcaacaactgggcccccaagtacaatgagacattccacttcctcctgggaaatgaggaggggcccgagtcctatgagttgcagatatgcgtgaaggattactgctttgcccgggaagatcgcgtgctagggctggctgtgatgcctctgagggatgtcacagccaagggcagctgtgcctgctggtgccccttgggccggaagatccatatggatgagacaggcctgaccattctccggattttatctcagaggagcaatgacgaggtggcccgagaatttgtgaaactcaaatcagagtctcgttccacggaggaggggagctgaacaccttcgactcctgtgccaatcaggcagcagcaatttcacaaatcagggccagtgggagttagctgtgtaaccggcttagggtctttgcagtcaagaggctgaccccttcagttaaagatatttaaggaaaaatttggggtggtgataatatggcttttcacagaaagggtcatgaagccctggcccaacaggactgtggtactaggggctgggatgtggggttaccacatggagagattttccattaagagagaaggacaaacatttctgagagtgtcagccattcttggtagacacctctccactcctcatcccacctctacccatctccatgccacaccttatccagttagacacatacataccaatcattagaagaacaagtttagaaggtgtggaacttgtgcctggctggctgggtagtcagctgagcctgttgctgagcccggtggtctggattggagtatggccagggcaggagtacacagaatagaatttagactgtcccttgagtagaatccactgattttctgtggctccagtgagaacaaggctttgaaactgaacaagataacttctagaaatgaactgtactaatccctttccccagattgtatcatgagtagaatcaggttcacgtggtgcttcaaagccctgagaagaatatttctttggaccccaggcactaggggccacctgcctgggagtctccctgcctcactcctctaggcaggggagtgatgcttcaggacgtgacaggctgttctaacatgtgtctacctgagggctagttgaaggatccaggagtattttcttcttgggtgggccctgaacaaagccaaaaattgtagaaaccagtctagaaaaagtcctgctcatctgtggccactgccttctagccgtcctccaccttgcagaaagaatctagcctttggtctctctctctctcatcggggtcatttgctattcccctctgatattcaaccctatagaaggagcctggactctgatccctctgtacaggctggatggaaggggccctccacacttcctgggaggtcagagacaaactgtttcagagagtcagatggacttcccaagacttgttgagagatgtgacatggttcttggatttcctctgtagcagcctcctggacttcctgaggactcgacattgtccacagatgtactggccattacatgaaacaagaaaccaagcatctttgctgttgttaattattatatgtgccattgttacaggagattataggctagtctgtaataaattatcttatagc

SEQ ID NO: 198131 - DNA, 6432 bp, Homo sapiens
  Payload ID: 19086
  Gene Name: unc-13 homolog B (C. elegans)
  ENST ID: ENST00000617908
  CDS Start-End: 1538-5131
gtggaatgacgggagggagtcccggcagctcctacctcccagcgatggcgtcgctgtgccgcgcccagtccccagcctgccggccggtactcaccgctacccggagttcgctcagacggtgagatttggggcgggtccgaggcagcggcgggacgctacctgcgaccgggaccatgaggagctgccagacccgtggggccggtaacgagagcagtcgcggcacctgctgagaggaaagagggagcggtccggcgcggctggggcgcggcagaggcttgcccgatcctcggccatgtcactgctctgcgtgcgcgttaaaagggccaaattccagggttcaccagataaatttaacacatatgtgaccctgaaagtacagaatgtgaagagcacaactgtagcagttcgtggtgatcagccttcctgggaacaggatttcatgtttgagattagtcgcctggacctgggtctaagtgtggaggtatggaacaaaggactgatctgggacaccatggtggggactgtgtggattgcgctgaagactattcgtcagtcggatgaggaagggcctggggaatggtccacattagaggcagagacgttaatgaaagacgatgagatctgtggaactagaaacccaactcctcataaaattttgcttgatacaagatttgagttgccttttgatatcccagaggaggaagccagatattggacctacaaatgggagcaaatcaatgccttgggagctgacaatgagtattctagtcaagaagaaagccagaggaagccattgcccactgctgccgcccagtgttcttttgaagaccctgatagtgccgtcgatgaccgagatagtgactatcgcagtgagaccagcaacagcttcccacctccttaccatacagcttcccagcccaacgcttctgtgcaccagttccctgtgccggtgcgatcgccacagcagctgctacttcaaggcagttcccgggactcttgtaatgactctatgcaaagttatgaccttgattatccagagcggcgggctatcagccccaccagcagcagtaggtatggctcctcctgtaatgtgagtcaaggaagctctcagctaagtgaactagaccagtatcacgaacaagatgacgaccatcgggagacggactcgattcattcttgccacagctctcacagcctgtccagagatggccaagcaggttttggagaacaagagaaacccttggaggtgacaggtcaagcagagaaggaggcagcatgtgaacccaaggagatgaaagaagatgccacaacccaccctcccccagatctggtgctgcaaaaagaccacttcctaggtccccaggagagttttcctgaggagaatgcatcttcaccatttacccaagccagagcacattggatccgagcagttaccaaggttcgactccagctgcaggagattccagatgatggtgacccctctctgcctcagtggctcccggaagggccagccggagggctctatggcattgacagcatgccagatttacgcagaaagaagccactgccacttgtcagtgatctggctatgtcactggtccagtctcggaaggcaggaatcacttctgcaatggctacacgcacttctcttaaggacgaagagctgaaatcccacgtgtataagaaaaccctgcaggccttaatctaccccatttcgtgcaccactcctcataactttgaggtctggacggccactaccccaacctactgctatgagtgtgaaggcctgctctggggcattgcccggcagggcatgcgctgcagcgaatgtggagtcaagtgccatgagaagtgccaggatctgctcaatgctgactgcctgcagcgggctgcagaaaagagctgtaaacatggagctgaggaccggacccagaacattatcatggccatgaaggaccgcatgaagatccgagagcgaaataagccagagatctttgaagttatccgggacgtcttcacagtgaacaaagctgcccatgtgcagcagatgaaaacagtgaagcagagtgtactggatggcacctccaaatggtcagccaagatcaccattactgtggtgtgtgcccagggcctacaagccaaggacaaaacaggatccagtgacccttacgtgactgtgcaagtcagcaaaactaagaagcgtaccaagaccatttttggaaacttgaatcctgtttgggaggagaagttccattttgagtgccacaactcctctgaccgcattaaggtgcgtgtatgggatgaggatgatgacatcaagtcaagagtaaagcaacgcctaaagcgagagtctgatgatttccttggccaaaccatcattgaggttcggaccctaagtggcgagatggacgtctggtacaacttggagaagaggacagacaaatcagccgtctcaggggctatccgactacaaatcagtgtggagatcaagggggaggagaaagtagccccataccacgtgcagtatacatgtctccatgagaatcttttccattacctcacagacattcagggcagtggaggagtccgcatccctgaagctcgaggagacgatgcctggaaggtgtactttgatgagacagcccaagaaattgtggatgaatttgccatgcgttatggcattgagtccatatatcaggccatgacgcactttgcatgtttatcatccaagtacatgtgtcctggtgtgccagcagtgatgagcaccttactggccaacatcaacgcctactatgcccacacaactgcctctaccaatgtctctgcatctgatcgctttgcagcctccaactttgggaaagagagatttgtaaaactgctggaccagctacacaactcactgaggatcgacctctctacatacaggaataatttccctgctgggagtcctgaacggcttcaggacttaaaatccacagtggatttgctgaccagcattactttcttcagaatgaaggtacaagaactgcaaagccctccaagagccagccaggtggtaaaggattgtgtgaaggcctgtttgaactccacatatgaatatatcttcaacaactgccacgacttatacagccgccagtaccagctgaagcaggagctacctccagaggaacaagggcccagcattcggaacctggatttctggcccaagctcatcacactcatcgtgtcaatcatagaggaagataagaattcctacacacctgttctgaaccagtttcctcaggagttgaatgtgggaaaagtcagcgcagaagtgatgtggcatttgtttgcccaagacatgaaatatgcattggaggagcatgagaaagaccacctgtgtaaaagtgctgactacatgaacctgcacttcaaggtgaagtggctccacaatgaatacgtgcgggatctgcctgtcctccaggggcaggtgcctgagtacccagcgtggtttgagcagttcgtgctacaatggctggatgagaatgaggatgtatccctggaattcctgcgtggggccctggaacgagataagaaggatggattccagcagacatcagagcatgcactcttttcctgctctgtggtggatgtcttcacacaactcaatcagagctttgagatcatccggaagctggaatgcccagaccccagcatccttgcccactacatgaggaggtttgctaagaccatcgggaaggtgctgatgcagtatgcagacatcttgtcaaaggacttcccagcctattgcacaaaggagaaactgccctgcatcctgatgaacaacgtgcagcaactgagggtccagctggagaaaatgtttgaggccatgggaggcaaggagctggaccttgaagctgcagacagtctgaaggagctgcaggtgaaactgaatacggttctggatgagctcagcatggtgtttggaaacagtttccaggtacggattgatgagtgtgttcgacaaatggccgacatcctgggccaggttcggggcacagggaatgcatctccagacgccagggcctcagcggctcaggatgcagatagcgtactccggcctctcatggacttcctggatggcaacctcaccctctttgccactgtgtgtgagaagacggttctgaagcgtgtactgaaggagctctggcgcgtggtgatgaacacaatggagaggatgattgttctgcccccactcactgaccagacgggcacccagctgatcttcactgctgccaaggagctgagccatctttccaaactcaaggatcacatggtacgagaggaaacacggaatctcactccaaagcagtgtgcagtccttgacctcgccctggacaccatcaagcaatacttccatgcaggaggcaatgggctgaagaaaaccttcctggagaagagcccagatctgcagtctctacgctatgccctgtctctgtacacacagactactgacactctcatcaagacctttgtgcgctcgcagaccacccaagtgcatgatgggaaaggtattagatttactgctaatgaggacattcgtccggaaaaggggtctggtgtggacgatcctgtgggagaagtctctattcaggtggacttgtttacacaccctggtactggggagcacaaggtcacagtgaaagtggtggctgccaatgacctcaagtggcagacagcgggtatgttccggcctttcgtggaggtgactatggttggcccacaccaaagtgataagaagaggaagttcacaaccaaatccaaaagcaacaactgggcccccaagtacaatgagacattccacttcctcctgggaaatgaggaggggcccgagtcctatgagttgcagatatgcgtgaaggattactgctttgcccgggaagatcgcgtgctagggctggctgtgatgcctctgagggatgtcacagccaagggcagctgtgcctgctggtgccccttgggccggaagatccatatggatgagacaggcctgaccattctccggattttatctcagaggagcaatgacgaggtggcccgagaatttgtgaaactcaaatcagagtctcgttccacggaggaggggagctgaacaccttcgactcctgtgccaatcaggcagcagcaatttcacaaatcagggccagtgggagttagctgtgtaaccggcttagggtctttgcagtcaagaggctgaccccttcagttaaagatatttaaggaaaaatttggggtggtgataatatggcttttcacagaaagggtcatgaagccctggcccaacaggactgtggtactaggggctgggatgtggggttaccacatggagagattttccattaagagagaaggacaaacatttctgagagtgtcagccattcttggtagacacctctccactcctcatcccacctctacccatctccatgccacaccttatccagttagacacatacataccaatcattagaagaacaagtttagaaggtgtggaacttgtgcctggctggctgggtagtcagctgagcctgttgctgagcccggtggtctggattggagtatggccagggcaggagtacacagaatagaatttagactgtcccttgagtagaatccactgattttctgtggctccagtgagaacaaggctttgaaactgaacaagataacttctagaaatgaactgtactaatccctttccccagattgtatcatgagtagaatcaggttcacgtggtgcttcaaagccctgagaagaatatttctttggaccccaggcactaggggccacctgcctgggagtctccctgcctcactcctctaggcaggggagtgatgcttcaggacgtgacaggctgttctaacatgtgtctacctgagggctagttgaaggatccaggagtattttcttcttgggtgggccctgaacaaagccaaaaattgtagaaaccagtctagaaaaagtcctgctcatctgtggccactgccttctagccgtcctccaccttgcagaaagaatctagcctttggtctctctctctctcatcggggtcatttgctattcccctctgatattcaaccctatagaaggagcctggactctgatccctctgtacaggctggatggaaggggccctccacacttcctgggaggtcagagacaaactgtttcagagagtcagatggacttcccaagacttgttgagagatgtgacatggttcttggatttcctctgtagcagcctcctggacttcctgaggactcgacattgtccacagatgtactggccattacatgaaacaagaaaccaagcatctttgctgttgttaattattatatgtgccattgttacaggagattataggctagtctgtaataaattatcttatagc

SEQ ID NO: 198132 - DNA, 569 bp, Homo sapiens
  Payload ID: 19086
  Gene Name: unc-13 homolog B (C. elegans)
  ENST ID: ENST00000481299
  CDS Start-End: 1-569
tggctccacaatgaatacgtgcgggatctgcctgtcctccaggggcaggtgcctgagtacccagcgtggtttgagcagttcgtgctacaatggctggatgagaatgaggatgtatccctggaattcctgcgtggggccctggaacgagataagaaggatggaaccatcgggaaggtgctgatgcagtatgcagacatcttgtcaaaggacttcccagcctattgcacaaaggagaaactgccctgcatcctgatgaacaacgtgcagcaactgagggtccagctggagaaaatgtttgaggccatgggaggcaaggagctggaccttgaagctgcagacagtctgaaggagctgcaggtgaaactgaatacggttctggatgagctcagcatggtgtttggaaacagtttccaggtacggattgatgagtgtgttcgacaaatggccgacatcctgggccaggttcggggcacagggaatgcatctccagacgccagggcctcagcggctcaggatgcagatagcgtactccggcctctcatggacttcctggatggcaacctcaccct

SEQ ID NO: 198133 - DNA, 5063 bp, Homo sapiens
  Payload ID: 19086
  Gene Name: unc-13 homolog B (C. elegans)
  ENST ID: ENST00000634487
  CDS Start-End: 181-1578
cagacggtgagatttggggcgggtccgaggcagcggcgggacgctacctgcgaccgggaccatgaggagctgccagacccgtggggccggtaacgagagcagtcgcggcacctgctgagaggaaagagggagcggtccggcgcggctggggcgcggcagaggcttgcccgatcctcggccatgtcactgctctgcgtgcgcgttaaaagggccaaattccagggttcaccagataaatttaacacatatgtgaccctgaaagtacagaatgtgaagagcacaactgtagcagttcgtggtgatcagccttcctgggaacaggatttcatgtttgagattagtcgcctggacctgggtctaagtgtggaggtatggaacaaaggactgatctgggacaccatggtggggactgtgtggattgcgctgaagactattcgtcagtcggatgaggaagggcctggggaatggtccacattagaggcagagacgttaatgaaagacgatgagatctgtggaactagaaacccaactcctcataaaattttgcttgatacaagatttgagttgccttttgatatcccagaggaggaagccagatattggacctacaaatgggagcaaatcaatgccttgggagctgacaatgagtattctagtcaagaagaaagccagaggaagccattgcccactgctgccgcccagtgttcttttgaagaccctgatagtgccgtcgatgaccgagatagtgactatcgcagtgagaccagcaacagcttcccacctccttaccatacagcttcccagcccaacgcttctgtgcaccagttccctgtgccggtgcgatcgccacagcagctgctacttcaaggcagttcccgggactcttgtaatgactctatgcaaagttatgaccttgattatccagagcggcgggctatcagccccaccagcagcagtaggtatggctcctcctgtaatgtgagtcaaggaagctctcagctaagtgaactagaccagtatcacgaacaagatgacgaccatcgggagacggactcgattcattcttgccacagctctcacagcctgtccagagatggccaagcaggttttggagaacaagagaaacccttggaggtgacaggtcaagcagagaaggaggcagcatgtgaacccaaggagatgaaagaagatgccacaacccaccctcccccagatctggtgctgcaaaaagaccacttcctaggtccccaggagagttttcctgaggagaatgcatcttcaccatttacccaagccagagcacattggatccgagcagttaccaaggttcgactccagctgcaggagaagaaaagcgaggagcccttcagattccagatgatggtgacccctctctgcctcagtggctcccggaagggccagccggagggctctatggcattgacagcatgccagatttacgcagaaagaagccactgccacttgtcagtgatctggctatgtcactggtccagtctcggaaggcaggaatcacttctgcaatggctacacgcacttctcttaaggacgaagagctgaaatcccacgtgtataagaaaaccctgcaggccttaatctaccccatttcgtgcaccactcctcataactttgaggtctggacggccactaccccaacctactgctatgagtgtgaaggcctgctctggggcattgcccggcagggcatgcgctgcagcgaatgtggagtcaagtgccatgagaagtgccaggatctgctcaatgctgactgcctgcagcgggctgcagaaaagagctgtaaacatggagctgaggaccggacccagaacattatcatggccatgaaggaccgcatgaagatccgagagcgaaataagccagagatctttgaagttatccgggacgtcttcacagtgaacaaagctgcccatgtgcagcagatgaaaacagtgaagcagagtgtactggatggcacctccaaatggtcagccaagatcaccattactgtggtgtgtgcccagggcctacaagccaaggacaaaacaggatccagtgacccttacgtgactgtgcaagtcagcaaaactaagaagcgtaccaagaccatttttggaaacttgaatcctgtttgggaggagaagttccattttgagtgccacaactcctctgaccgcattaaggtgcgtgtatgggatgaggatgatgacatcaagtcaagagtaaagcaacgcctaaagcgagagtctgatgatttccttggccaaaccatcattgaggttcggaccctaagtggcgagatggacgtctggtacaacttggagaagaggacagacaaatcagccgtctcaggggctatccgactacaaatcagtgtggagatcaagggggaggagaaagtagccccataccacgtgcagtatacatgtctccatgagaatcttttccattacctcacagacattcagggcagtggaggagtccgcatccctgaagctcgaggagacgatgcctggaaggtgtactttgatgagacagcccaagaaattgtggatgaatttgccatgcgttatggcattgagtccatatatcaggccatgacgcactttgcatgtttatcatccaagtacatgtgtcctggtgtgccagcagtgatgagcaccttactggccaacatcaacgcctactatgcccacacaactgcctctaccaatgtctctgcatctgatcgctttgcagcctccaactttgggaaagagagatttgtaaaactgctggaccagctacacaactcactgaggatcgacctctctacatacaggaataatttccctgctgggagtcctgaacggcttcaggacttaaaatccacagtggatttgctgaccagcattactttcttcagaatgaaggtacaagaactgcaaagccctccaagagccagccaggtggtaaaggattgtgtgaaggcctgtttgaactccacatatgaatatatcttcaacaactgccacgacttatacagccgccagtaccagctgaagcaggagctacctccagaggaacaagggcccagcattcggaacctggatttctggcccaagctcatcacactcatcgtgtcaatcatagaggaagataagaattcctacacacctgttctgaaccagtttcctcaggagttgaatgtgggaaaagtcagcgcagaagtgatgtggcatttgtttgcccaagacatgaaatatgcattggaggagcatgagaaagaccacctgtgtaaaagtgctgactacatgaacctgcacttcaaggtgaagtggctccacaatgaatacgtgcgggatctgcctgtcctccaggggcaggtgcctgagtacccagcgtggtttgagcagttcgtgctacaatggctggatgagaatgaggatgtatccctggaattcctgcgtggggccctggaacgagataagaaggatggattccagcagacatcagagcatgcactcttttcctgctctgtggtggatgtcttcacacaactcaatcagagctttgagatcatccggaagctggaatgcccagaccccagcatccttgcccactacatgaggaggtttgctaagaccatcgggaaggtgctgatgcagtatgcagacatcttgtcaaaggacttcccagcctattgcacaaaggagaaactgccctgcatcctgatgaacaacgtgcagcaactgagggtccagctggagaaaatgtttgaggccatgggaggcaaggagctggaccttgaagctgcagacagtctgaaggagctgcaggtgaaactgaatacggttctggatgagctcagcatggtgtttggaaacagtttccaggtacggattgatgagtgtgttcgacaaatggccgacatcctgggccaggttcggggcacagggaatgcatctccagacgccagggcctcagcggctcaggatgcagatagcgtactccggcctctcatggacttcctggatggcaacctcaccctctttgccactgtgtgtgagaagacggttctgaagcgtgtactgaaggagctctggcgcgtggtgatgaacacaatggagaggatgattgttctgcccccactcactgaccagacgggcacccagctgatcttcactgctgccaaggagctgagccatctttccaaactcaaggatcacatggtacgagaggaaacacggaatctcactccaaagcagtgtgcagtccttgacctcgccctggacaccatcaagcaatacttccatgcaggaggcaatgggctgaagaaaaccttcctggagaagagcccagatctgcagtctctacgctatgccctgtctctgtacacacagactactgacactctcatcaagacctttgtgcgctcgcagaccacccaagtgcatgatgggaaaggtattagatttactgctaatgaggacattcgtccggaaaaggggtctggtgtggacgatcctgtgggagaagtctctattcaggtggacttgtttacacaccctggtactggggagcacaaggtcacagtgaaagtggtggctgccaatgacctcaagtggcagacagcgggtatgttccggcctttcgtggaggtgactatggttggcccacaccaaagtgataagaagaggaagttcacaaccaaatccaaaagcaacaactgggcccccaagtacaatgagacattccacttcctcctgggaaatgaggaggggcccgagtcctatgagttgcagatatgcgtgaaggattactgctttgcccgggaagatcgcgtgctagggctggctgtgatgcctctgagggatgtcacagccaagggcagctgtgcctgctggtgccccttgggccggaagatccatatggatgagacaggcctgaccattctccggattttatctcagaggagcaatgacgaggtggcccgagaatttgtgaaactcaaatcagagtctcgttccacggaggaggggagctgaacaccttcgactcctgtgcca

SEQ ID NO: 198134 - DNA, 12946 bp, Homo sapiens
  Payload ID: 19087
  Gene Name: unc-13 homolog C (C. elegans)
  Uniprot ID: Q8NB66
  ENST ID: ENST00000260323
  CDS Start-End: 1-6645
atggtggctaattttttcaagagcttgattttaccttacattcataagctttgcaaaggaatgtttacaaagaaattgggaaatacaaacaaaaacaaagagtatcgtcagcagaaaaaggatcaagacttccccactgctggccagaccaaatcccccaaattttcttacacttttaaaagcactgtaaagaagattgcaaagtgttcatccactcacaacttatccactgaggaagacgaggccagtaaagagttttccctctcaccaacattcagttaccgagtagctattgccaatggcctacaaaagaatgctaaagtaaccaacagtgataatgaggatctgcttcaagagctctcttcaatcgagagttcctactcagaatcattaaatgaactaaggagtagcacagaaaaccaggcacaatcaacacacacaatgccagttagacgcaacagaaagagttcaagcagccttgcaccctctgagggcagctctgacggggagcgtactctacatggcttaaaactgggagctttacgaaaactgagaaaatggaaaaagagtcaagaatgtgtctcctcagactcagagttaagcaccatgaaaaaatcctggggaataagaagtaagtctttggacagaactgtccgaaacccaaagacaaatgccctggagccagggttcagttcctctggctgcattagccaaacacatgatgtcatggaaatgatctttaaggaacttcagggaataagtcagattgaaacagaactttctgaactacgagggcacgtcaatgctctcaagcactccatcgatgagatctccagcagtgtggaggttgtacaaagtgaaattgagcagttgcgcacagggtttgtccagtctcggagggaaactagagacatccatgattatattaagcacttaggtcatatgggtagcaaggcaagcctgagatttttaaatgtgactgaagaaagatttgaatatgttgaaagcgtggtgtaccaaattctaatagataaaatgggtttttcagatgcaccaaatgctattaaaattgaatttgctcagaggataggacaccagagagactgcccaaatgcaaagcctcgacccatacttgtgtactttgaaacccctcaacaaagggattctgtcttaaaaaagtcatataaactcaaaggaacaggcattggaatctcaacagatattctaactcatgacatcagagaaagaaaagagaaagggataccatcctcccagacatatgagagcatggctataaagttgtctactccagagccaaaaatcaagaagaacaattggcagtcacctgatgacagtgatgaagatcttgaatctgacctcaatagaaacagttacgctgtgctttccaagtcagagcttctaacaaagggaagtacttccaagccaagctcaaaatcacacagtgctagatccaagaataaaactgctaatagcagcagaatttcaaataaatcagattatgataaaatctcctcacagttgccagaatcagatatcttggaaaagcaaaccacaacccattatgcagatgcaacacctctctggcactcacagagtgattttttcactgctaaacttagtcgttctgaatcagatttttccaaattgtgtcagtcttactcagaagatttttcagaaaatcagtttttcactagaactaatggaagctctctcctgtcatcttcggaccgggagctatggcagaggaaacaggaaggaacagcgaccctgtatgacagtcccaaggaccagcatttgaatggaggtgttcagggtatccaagggcagactgaaactgaaaacacagaaactgtggatagtggaatgagtaatggcatggtgtgtgcatctggagaccggagtcattacagtgattctcagctctctttacatgaggatctttctccatggaaggaatggaatcaaggagctgatttaggcttggattcatccacccaggaaggttttgattatgaaacaaacagtctttttgaccaacagcttgatgtttacaataaagacctagaatacttgggaaagtgccacagtgatcttcaagatgactcagagagctacgacttaactcaagatgacaattcttctccatgccctggcttggataatgaaccacaaggccagtgggttggccaatatgattcttatcagggagctaattctaatgagctataccaaaatcaaaaccagttgtccatgatgtatcgaagtcaaagtgaattgcaaagtgatgattcagaggatgccccacccaaatcatggcatagtcgattaagcattgacctttctgataagactttcagcttcccaaaatttggatctacactgcagagggctaaatcagccttggaagtagtatggaacaaaagcacacagagtctgagtgggtatgaggacagtggctcttcattaatggggagatttcggacattatctcaatcaactgcaaatgagtcaagtaccacacttgactctgatgtctacacggagccctattactataaagcagaggatgaggaagattatactgaaccagtggctgacaatgaaacagattatgttgaagtcatggaacaagtccttgctaaactagaaaacaggactagtattactgaaacagatgaacaaatgcaagcatatgatcacctttcatatgaaacaccttatgaaaccccacaagatgagggttatgatggtccagcagatgatatggttagtgaagaggggttagaacccttaaatgaaacatcagctgagatggaaataagagaagatgaaaaccaaaacattcctgaacagccagtggagatcacaaagccaaagagaattcgtccttctttcaaagaagcagctttaagggcctataaaaagcaaatggcagagttggaagagaagatcttggctggagatagcagttctgtggatgaaaaggctcgaatagtaagtggcaatgatttggatgcttccaaattttctgcactccaggtgtgtggtggggctggaggtggactttatggtattgacagcatgccggatcttcgcagaaaaaaaactttgcctattgtccgagatgtggccatgaccctggctgcccggaaatctggactctccctggctatggtgattaggacatccctaaataatgaggaactgaaaatgcacgtcttcaagaagaccttgcaggcactgatctaccctatgtcttctaccatcccacacaattttgaggtctggacggctaccacacccacctactgttatgagtgtgaagggctcctgtggggcattgcaaggcaaggcatgaagtgtctggagtgtggagtgaaatgccacgaaaagtgtcaggacctgctaaacgctgactgcttgcagagagcagcagaaaagagttctaaacatggtgccgaagacaagactcagaccattattacagcaatgaaagaaagaatgaagatcagggagaaaaaccggccagaagtatttgaagtaatccaggaaatgtttcagatttctaaagaagattttgtgcagtttacaaaggcggccaaacagagtgtactggatgggacatctaagtggtctgcaaaaataaccattacagtggtttctgcacagggtctacaggcaaaagataaaacagggtctagtgatccatatgttacagttcaagttggaaagaacaaaagaagaacaaaaaccatttttggaaatttgaatccagtatgggatgagaagttttattttgagtgtcataactccacagatcgaatcaaagtcagagtatgggatgaagatgatgatattaaatccagagtcaagcaacatttcaaaaaggagtcagatgattttctgggacaaacaattgtagaagtgaggaccttgagtggagaaatggatgtctggtacaacttagagaaaaggacagataagtcagctgtatctggggccatacgattgaaaatcaatgtggagataaaaggagaagagaaggttgctccatatcatattcaatatacatgtttacatgagaatctgttccattacttgactgaagtgaaatctaatggtggagtgaaaatcccagaagtcaaaggggatgaagcctggaaggttttctttgatgatgcttcccaagaaatagttgatgaatttgctatgcgttatggaattgaatccatttatcaagctatgacgcacttttcatgtctgtcttctaaatacatgtgccccggtgtccctgccgtcatgagcaccttgctggctaatataaatgctttttatgctcacacaacagtttcaacaaacatacaggtttctgcctcagatcgatttgctgctaccaactttggtagggaaaaattcataaaactactggaccagttacataactctttgaggattgatctgtcaaagtatagggaaaactttcctgcaagcaatactgaaagactgcaagacctgaaatcaactgttgacctgttaacaagtatcaccttttttaggatgaaggttctggagctgcaaagccccccaaaagcgagcatggtggtgaaggactgtgtaagggcttgcctggattctacatacaagtatatttttgacaactgccatgaactctactcccagctaacagacccgagtaagaaacaggatattcctcgtgaagatcagggaccaaccaccaagaatttggatttttggccccaacttattacactgatggttactattattgatgaggataaaactgcctacacacctgtcctgaatcagtttcctcaagagctgaacatgggaaaaataagtgccgaaattatgtggactctttttgctctggatatgaaatatgcattagaagaacatgaaaatcagcggttatgcaagagcaccgattatatgaatttgcatttcaaagttaaatggttttataatgaatatgtgcgtgaacttcctgccttcaaggatgctgttcctgaatactccttgtggtttgaaccttttgtcatgcaatggctagatgaaaacgaagatgtgtcaatggaattccttcatggagcactgggaagagacaaaaaagatggattccagcagacatctgagcatgctctcttttcttgctccgtggttgatgtctttgctcagctgaatcagagctttgaaattattaagaaactggaatgccctaatcctgaagcattatctcacttaatgagaagatttgcaaagactatcaataaagtgctgctccagtatgctgcaattgtatcaagtgatttcagttcacattgtgataaggaaaatgtgccctgtatcttgatgaacaatattcaacaattgcgggtccagctggaaaaaatgtttgaatccatgggagggaaggagctagattctgaagctagtactattctaaaagaacttcaggttaagctcagtggggtcctggatgagctcagcgtcacttatggtgaaagtttccaggttataattgaagagtgtataaaacagatgagtttcgaactaaatcaaatgagagcaaatggaaacaccacatctaataagaacagtgcagcaatggatgcagagattgtgttaagatctcttatggattttttggacaaaacattaagtctctcagcaaaaatctgtgagaaaacagtcctaaagcgagttttaaaagagttatggaagctagttctcaacaaaatagaaaaacaaattgttcttcctcctctgacagatcaaacaggaccccagatgattttcattgcagctaaagatcttggacaattatccaaactgaaggagcacatgattcgagaggatgccaggggtctgacgccaagacaatgcgctataatggaggtagtcctggctaccatcaagcaatactttcatgcaggaggaaatggcctgaaaaagaatttcttggagaaaagcccagatcttcagtctctgagatatgctctcagtctttatacccaaactactgatgccttgataaagaaattcatagatactcaaacctcacagagtcgttcctccaaagatgccgtgggtcagatatctgttcatgtggacatcactgccaccccaggaacgggagatcataaagtcactgtaaaagtgattgctattaatgacctaaactggcagaccacagcaatgttccgcccctttgtggaagtttgtatactgggacccaaccttggagacaagaagagaaaacaaggcacaaaaacaaaaagcaacacatggtcaccaaagtacaatgaaacatttcagttcattctcggaaaggaaaatcgaccaggggcttatgaacttcatctctcagttaaggattactgctttgccagagaagatcgaattatcggaatgacagtcattcagctacagaacatagcagaaaagggaagctatggggcatggtatcctcttctgaaaaatatctctatggatgaaactggtttgactatccttagaatactctctcagaggaccagtgatgatgtggctaaagaatttgtaagacttaaatctgaaacaagatctactgaagagagtgcttgaaacaaacactgcaagctaaatacataactataattgtttgactactgcatgcatgtgcaaatacatgggaatgtttagttcactacatttcaatgtttgccagtactcatgtacgatgtctacaaggtatgtaaaaaacctgctgaacttttataccaattctggtctttgggaaatcagtgttccatgaagtgccaaaattatgatgtaaagtgaaatatcaagaacaccttttaacatgtttattttgtttctttacccatttcacattcattaaacataatttttaaaaactagtcttttgagtttgcccatcagttgtctttgttaaatgagattatattgcccatagatcagaaaacatttattactcaatttccattttatttacttacctcattatagatgtcttacaaatacccttttctaccataactagaaatgcagtcacttctagaaagcatttgtaattttatagtcgcagatattgtgatttttgcatacacattaaaatagaaaaggtgggaaatattttctgctgaccagtttccaacctttctgaaatatcactgtgaagaaatgctgttaaagcaaacttacataaagcaatgctagagtttgttaacaatgtttgatatatattgacaaaactttgttctctaaaactgccaagatcacatcacatttgtaaaaatggtaagttaatgcatttgtcatatagtgttatgtcttggctttaccatatttcattctttaaaaagtcattaatggtttagaaatgggatggaaagtttactgaaaatacctgtaagtaactatattgttaatatcttccctctgacagttatgactctataatcagttcaatgctttatttttaaaaatattcaatgattagtattgaatgcagcattactatatattgtactgatgccaaaagtcatgttttcatccacttagtgaaaaaatagtaaaattaagtcggaagaaattgcttaaaattttgtaatttgtatttataagccccaaatgcatcaaatgcagtaggagaacaatgtaatacagcttggtacctaaaaatatagctaagttggtttttgaatataaaacagtttatgaatatgtgcattttctgtattgttatgatttgactttttagagtctatgccaaaatatatggctgtaaaacagtactttgtaattataacttatggtcataactgttagtggactacttacagaagcagaaacaagagcctgttatgattgtgctttgtgaacaagctgatctaatacgttaagtacagaagtgcttagtatcatgactgtcagaaccattctgcaactgagtatgaaatcacagaccagtgaggtgagctaattcatgttaaactgttaggccactgctttgttaatgactcctctaaatgcatagtgtgatgcgatcctctggcatatgctttaataaatggatgtatattgagcacatgcagcattgtattgtatcttctgcctttttatttcatttatgcaatatcatctcatttaggaataaaaactccaggctcttttgaccatatgtaatagtcttcatattatttggttctaacatctcattaaaagtttagatgtcagaatggttattattaaaaagtcaaaaaataacagatgctggcgaggttgtgaagaaaaatgtttgtttgtttatacactgctggtgggagtgtaaattacttcaattattgtagaaagcagtgtggtgattcctcaaagacctacaaacagaattaccattcgactaagcaatcccattactgagtacacagccaaaggaatatcaaacaaacattctaccataaacacatatgcacgtatatgtccactgcagcactattcacaatagcaaacacatggaaccatcctaaatgcccatcaacagtagaccagataaagaaaatgtggtacatatacaccgtggaatactatgcaggcataaaaagaatgagaccatgtccttcacagtgacatggatggagctggaggccattacctgaagcaaactaacacaggaatagaaaacgaaatactacatgtttgttatcacaagtggaagctaaacgatgaggacacatggacactaagggggcaacaacagacactgtggcctacttgagggtaggaggagggaaaagataagaaaaagtatctgtcacgctacgaagcttactacctgggtgacaaaataatctacaccaaaacccccgtgacacacaatttacctacgtaataaacctggacatgaacccctgaatctaaaataaaagtttttaaaaaaaagttcagatgttaaaattcattccacaggtggtgtgttcatggaaaccactgtatattgtaatgacgaggaaaataaggatgaactaatgtatctacctatatattgctaaataccgtttagtcccatgaacaaaattcaacatgcaacatggttaaaaatctcacatgataaaagttttcatcaattacttgaaaaattcattctagatttatgttataaatattttacagaacattgacttaagctctttaggagcacatattaatgtcataatacatgatacatttgagtaaaaggcagttaggatttgcattgatcactttaaattgagcaaggtattttttccctgacatgtttaattgcatccaattattctgtcttttacaatgtatacaatatatatcaaagcctaatagtggcagggtgaattaagtctatttatgactatcataaagtacaggtactaattttgaaatgattataaattctgtagactctgttttcctctcaaagcacaagtattcccgttgtcttcagaacaaagcctgttatatttacttacccaaattagtagtcactctaaggttcccagtgatctctgtcaattgagtgttgcactaatgtgtgtagcaatttattcatcttattctagataaaacacacaaaggcaaagctctgttgcttgtctatggataaacctcacattacaggtctttaaagatacacgtgtaaatcaaatttagcaaacacaaagtatttaaacccagagtggagtatttgctattcgaaggaatttgaatgcattaagtaatcagatgtccccactacaacctgcgctaatttatctacttctaggataatttataacttgaatttatcttaaatgaggcacatttataaatgacaattctaacttaatgtcttttatttggtcttttttaaaaacaatgcgtgaaacaagattttctccttttaatttctctacattacataaagatatgactatactagctagcccctttatggactactatagcagctttaatctttatgctcaaataataaatgatcatacttatacatgactcagggaatatccttgaataaatgtctaattccacctacttagaaaaattcttgggcacacaggcaagagactgccctcccctgtggaatgaattttaactcccctgatgttacctgtgtttatactcaagtcctttgtttgaaatagttgcccctttgctcttttgactccccaggcctccactgatcactcttctctgtggttcaggcttctgcagtgtgatttttagaataaaaaactaggatatgtgatatgaaggagaatcaattccaatttgcgaatgttaaataatatatatttaaaagtgctcatgttttttcacatcatgacaactttgaaatcaggatacatatataatcctttggcatgttatggtttaattggtgatttttttctcccttattagtacatgtttcttcttataatgaatgacttccaggcatcaataagcatatttattaaaaagtatatataaatcgatgaaaataaagtaatgcttagttgtctattttaaaacatagtttggctaggcacagtggctcacaactgtaatcccagcacactgagaggccgagacaggcaggttgctttgagcttagaagttcgagaccagcctagtcaacgtggcaaagccccatctctacaaaaaaatacaaaaatgagtcaggcctggtggcatgtgactgtagtcccagctacttgagaggctgaggcaggagaatcacttgagcctgggaagcagaggttccagtgagccaagatgcatcactgcactccagcctgggcaacagaatgagaccctgtctcaaaaaatatgcatattttttaatttgcatatactaaaattctctcttttggcatacatttctgtgttatgacaaatgcgtagtcatgtattaatcacaacagtcaagatatgggacaattccctcatacctcaaaattccacgttaccactttatagacaaacacttttcctactatcaaccctctgcagcactggttcattttagtccctcacgttttgtgtattccagaatgtcatataaacggaactatacagtatatattcttttgagcctgtataatttcacttagcacaatgcaccagagattcatctacattgtggcatgtataaattattacctagttttttttgttgaatagtactgcactgtatgaacattaaaaagatttcattcaccacttactacacttaccttgtttggcaatattatgaacaaagcttttataaacattcacatacaggattttgtgtatacttgtttttatttttcttgggtgattatctattagagtgtgatttctaggtcttatgataagtatatctttaacttcataaggaactttcaaacttttttgaaagtagttgtaaaattttacatttccagaagcaatgtatgagagtttcagttgctctgcatctttgcaagcactgggtatcgtcagttctttattttagttcttcttctgatatacacaaaatagcatctcaacatgcctttaatttgtattcatctgaggactaataacattgagtatctctgtgtgtgcttatttgacatccatatattttgtttagtgaagtatctgcaaatcttttgcccatttatttaatgagttgtttattgttgagtttggggacatattttcatattccatatacaaaccctttgtcagatatgaaatgtgcaactatttcatcccagtccgtggctagtcttttcatttttataacaacctctttaagagaacaaaaggttttcacttccatcaagtcgaatttgatgaaatcattttttctcttttatagatcatagctttgctaccataagaattacttgcctcactcaaggccaaaaagatttttttctcctatgttttcatatggaaattttatactttggggtattacaatttggcctatgaaccgttttgaggttaatagagggtgtaaagtttgagttaaggttcatctataattattaaattacaattgagtaattaattagaaactaattttcataggcatgtccaattgttccagcaccacacaattcattgaaaatactacagttatcacttggaattacctttgtaccttcatcataaatcaattgaccaaatgtgtgtgagtccatttctgacatctctagtctgttccattgatctgactctataccttatcaccaatgtgacactgtagcaattactgtagctttatactgtcttgaactcaggtagtaagagttctccatgttcttctcttcaaaacagtggagtattctactacttctcactctctataaaaattttaacagccagccaggcacggtggctcacgcctgtagtcccagcactttgggaggtcaaggcaggcagatcacctgaggtcaggagttcaagaccagcctaaccaacatggagaaaccccgactctactaaaaatacaaaattagccagacatggtggcgcatgcctgtaatcccagctactctggaggctgaggcaggggaatcacttgaacccaggagacggaggctgcagtgagacgagatcacgccattgcactccaacctgggcaacaagagcaaaactctgtctcaaaaaaaaaaataacagcctactgggattttgactgagaacttattaaatccatacaccaatttacaaacaaccgatgtcttaacaatattgaatcttcaattcgtgggcacagtatatgtctccacttatttacatcttcattgatttattactgtcttatggttttcagcatacaaatcctaccaaggatttcttctgtatgtgtacaagagtataaatgttactttgagaataaaattcaaaatcc

SEQ ID NO: 198135 - DNA, 938 bp, Homo sapiens
  Payload ID: 19087
  Gene Name: unc-13 homolog C (C. elegans)
  ENST ID: ENST00000539562
  CDS Start-End: 235-642
cagtgactcactcacatgctcacaaattcagcaatttgttcatgatagctgcttggcggggtggataatatcctggtcaaaatgactgagccacatcagtgatgtcgttcctccaaagatgccgtgggtcagatatctgttcatgtggacatcactgccaccccaggaacgggagatcataaagtcactgtaaaagtgattgctattaatgacctaaactggcagaccacagcaatgttccgcccctttgtggaagtttgtatactgggacccaaccttggagacaagaagagaaaacaaggcacaaaaacaaaaagcaacacatggtcaccaaagtacaatgaaacatttcagttcattctcggaaaggaaaatcgaccaggggcttatgaacttcatctctcagttaaggattactgctttgccagagaagatcgaattatcggaatgacagtcattcagctacagaacatagcagaaaagggaagctatggggcatggtatcctcttctgaaaaatatctctatggatgaaactggtttgactatccttagaatactctctcagaggaccagtgatgatgtggctaaagaatttgtaagacttaaatctgaaacaagatctactgaagagagtgcttgaaacaaacactgcaagctaaatacataactataattgtttgactactgcatgcatgtgcaaatacatgggaatgtttagttcactacatttcaatgtttgccagtactcatgtacgatgtctacaaggtatgtaaaaaacctgctgaacttttataccaattctggtctttgggaaatcagtgttccatgaagtgccaaaattatgatgtaaagtgaaatatcaagaacaccttttaacatgtttattttgtttctttacccatttcacattcattaaacataatttttaaaaacta

SEQ ID NO: 198136 - DNA, 535 bp, Homo sapiens
  Payload ID: 19087
  Gene Name: unc-13 homolog C (C. elegans)
  ENST ID: ENST00000559093
  CDS Start-End: 1-535
ttgcaaagactatcaataaagtgctgctccagtatgctgcaattgtatcaagtgatttcagttcacattgtgataaggaaaatgtgccctgtatcttgatgaacaatattcaacaattgcgggtccagctggaaaaaatgtttgaatccatgggagggaaggagaagaaggaaggagaaagattcttttatgagctagattctgaagctagtactattctaaaagaacttcaggttaagctcagtggggtcctggatgagctcagcgtcacttatggtgaaagtttccaggttataattgaagagtgtataaaacagatgagtttcgaactaaatcaaatgagagcaaatggaaacaccacatctaataagaacagtgcagcaatggatgcagagattgtgttaagatctcttatggattttttggacaaaacattaagtctctcagcaaaaatctgtgagaaaacagtcctaaagcgagttttaaaagagttatggaagctagttctcaacaaaatagaaaaacaaattgttct

SEQ ID NO: 198137 - DNA, 362 bp, Homo sapiens
  Payload ID: 19087
  Gene Name: unc-13 homolog C (C. elegans)
  ENST ID: ENST00000560537
  CDS Start-End: 302-362
gaaatctgattaagataacacctaaagaagagaaggtccatccataggttggctgagttcttatttctgaaataatctctggaggaacttttaagaatcctgaaagattcaactattttaaactcttctggaaaagtatatgcatatactcctttgaaaccgctatgattgtcgttcctccaaagatgccgtgggtcagatatctgttcatgtggacatcactgccaccccaggaacgggagatcataaagtcactgtaaaagtgattgctattaatgacctaaactggcagaccacagcaatgttccgcccctttgtggaagtttgtatactgggacccaaccttggagacaagaagagaa

SEQ ID NO: 198138 - DNA, 4393 bp, Homo sapiens
  Payload ID: 19088
  Gene Name: unc-13 homolog D (C. elegans)
  Uniprot ID: Q70J99
  ENST ID: ENST00000207549
  CDS Start-End: 381-3653
gttcagcccagcctgggcacagcacatggatggggcaggatgctgcccgcctgttctgggcccccccgccccctgctgagagcgttgtccccttcccagggcctctgtaggagggtggggcggggccaggcctgcccacggggtccaccttctgctccagccagaggagggtcctgtagggatcccagctggggaaggtgcagggggcctgggagactgcctctccgaagcggtgaaaccctcacccttccgtccctcccagccaccctccctaaaacttcccctgacagagggtggcagccccaggctctttgcataatcctgtggcttcgctgtcttcacccagcaccagcggacagggaagggcagagaaggccaccatggcgacactcctctcccatccgcagcagcgccctcccttcttgcgccaggccatcaagataaggcgccgcagagtcagagatctacaggatcccccgccccaaatggccccggagatccagcctccatcccaccacttctcccccgagcagcgggccctgctctacgaggacgcactctacactgtcttgcaccgcctgggtcatcctgagcccaaccatgtgacggaggcctctgagctgctgcgatacctgcaggaggccttccacgtggagcccgaggagcaccagcagacactgcagcgggtcagggagcttgagaagccaatattttgtctgaaggcaacagtgaaacaggccaagggcattctgggcaaagatgtcagtgggttcagcgacccctactgcctgctgggcattgagcagggggtaggtgtgccagggggcagccccgggtcccggcatcggcagaaggctgtggtgaggcacaccatccccgaggaggagacccaccgcacgcaggtcatcacccagacactcaaccccgtctgggacgagaccttcatcctggagtttgaggacatcaccaatgcgagctttcatctggacatgtgggacctggacactgtggagtctgtccgacagaagcttggggagctcacggatctgcatgggcttcgcaggatctttaaagaggcccggaaggacaaaggccaggacgactttctggggaacgtggttctgaggctgcaggacctgcgctgccgagaggaccagtggtaccccctggaaccccgcactgagacctacccagaccgaggccagtgccacctccagttccaactcatccataagcggagagccacttcggccagccgctcgcagccgagctacaccgtgcacctccacctcctgcagcagcttgtgtcccacgaggtcacccagcacgaggcgggaagcacctcctgggacgggtcgctgagtccccaggctgccaccgtcctctttctgcacgccacacagaaggacctatccgacttccaccagtccatggcgcagtggctggcctacagccgcctctaccagagcctggagttccccagcagctgcctcctgcaccccatcaccagcatcgagtaccagtggatccagggtcggctcaaggcagaacagcaggaggagctggccgcctcattcagctccctgctgacctacggcctctccctcatccggaggttccgctctgtcttccccctctctgtctcggactccccagcccggctgcagtctcttctcagggtcctggtacagatgtgcaagatgaaggcctttggagaactgtgccccaacaccgccccattgccccagctggtgactgaggccctgcagactggcaccactgaatggttccacctgaagcagcagcaccatcaacccatggtgcagggcatcccggaggcaggcaaggccttgctgggcctggtacaggatgtcattggcgacctgcaccagtgccagcgcacatgggacaagatcttccacaataccctcaagatccacctcttctccatggctttccgggagctgcagtggctggtggccaagcgggtgcaggaccacacgacggttgtgggtgatgtagtgtccccagagatgggcgagagtctgttccagctctacatcagcctcaaggagctctgccagctgcgcatgagctcctcagagagggatggagtcctggccctggataatttccaccgctggttccagccggccatcccctcctggctgcagaagacgtacaacgaggccctggcgcgggtgcagcgcgctgtgcagatggatgagctggtgcccctgggtgaactgaccaagcacagcacatcagcggtggatctatccacctgctttgcccagatcagccacactgcccggcagctggactggccagacccagaggaggccttcatgattaccgtcaagtttgtggaggacacctgtcgcctggccctggtgtactgcagccttataaaggcccgggcccgcgagctctcttcaggccagaaggaccaaggccaggcagccaacatgctgtgtgtggtggtgaatgacatggagcagctgcggctggtgatcggcaagttgcccgcccagctggcatgggaggccctggagcagcgggtaggggccgtgctggagcaggggcagctgcagaacacgctgcatgcccagctgcagagcgcgctggccgggctgggccatgagatccgcactggcgtccgcaccctggccgagcagttggaggtgggcatcgccaagcacatccagaaactggtgggcgtcagggagtctgtcctgcctgaggatgccattctgcccctgatgaagttcctggaggtggagctttgctacatgaacaccaacttggtgcaggagaacttcagcagcctcctgaccctgctctggacccacacactcacagtgctggtggaggcggccgcctcccagcgcagctcatccctggcttccaacaggctgaagattgccctgcagaacctggagatctgcttccacgctgagggctgtggcctgccacccaaggccctgcacactgccaccttccaggctctgcagagggacctggagctgcaggcggcctccagccgggaactcatccggaagtacttctgcagccgaatccagcagcaggcagaaaccacctctgaggagctgggggctgtgacagtcaaggcctcctaccgcgcctctgagcagaagctgcgtgtggagctgctcagcgcctccagcctgctgcccctggactccaatggctccagcgacccctttgtccagctgaccttggagcccaggcatgagttccctgagctggccgcccgggagacccagaagcacaagaaggaccttcacccattgtttgatgagacctttgaattcctggtgcctgctgagccgtgccgcaaggctggggcatgcctcctgctcaccgtgctggactacgacacgctgggggccgacgacctggaaggcgaggccttcctgccgctgcgtgaggtgcccgggctgagtggctctgaggagcctggtgaggtgcctcagacccgcctgcccctcacgtaccccgcacccaacggggacccaatcctgcagctgctggagggccggaagggtgaccgagaagcccaggtctttgtgaggctgcggcggcaccgggccaagcaggcctcccagcatgccttgcggccggcaccgtagccgtagaggtttgcggtggggctgggtccccggtggggacttgcaagggctttcctgtagggtctggggcttccccgccacatcgcggccctccagcctggcctaacacttggggagccccagcatgcggagtgcccagagtgcagacctcccctgcctcccatggtgatgggggctcagcagcgacatctctactcccgcctccctgcctccagccctggctgcaatgtctctaccacatcccagcaccagggggagcaaaccctgcccctgcccgcctctcagaaaagctgctgtggtgggcaggggattgggccatctgtctcctggccctggcccatctgcctcctggccttcctgttccagccactggggtgggggccaggttcactgggaccagggctacaggcacagagtctcctggaaaagggagaggggaccctgccaaagatgaggctccagctgccctggggggagggtggtggccattactagagggggcctgggtcctctccccaggggctgccagcatccaggccaggaagcctggagccaagaaccttctggctctgagggagcaagagctggcaggcggcagggctggcacagacagacggaagcagaaaggacagtttggctgctgtgtctgctgcgcacgccccctccccggacagcacctgccacctagaaactttcttagcaaaaaaattaataaaaacaaatccattgtcctcttaaaa

SEQ ID NO: 198139 - DNA, 3648 bp, Homo sapiens
  Payload ID: 19088
  Gene Name: unc-13 homolog D (C. elegans)
  Uniprot ID: Q70J99
  ENST ID: ENST00000412096
  CDS Start-End: 14-3442
agagaaggccaccatggcgacactcctctcccatccgcagcagcgccctcccttcttgcgccaggccatcaagataaggcgccgcagagtcagagatctacaggatcccccgccccaaatggccccggagatccagcctccatcccaccacttctcccccgagcagcgggccctgctctacgaggacgcactctacactgtcttgcaccgcctgggtcatcctgagcccaaccatgtgacggaggcctctgagctgctgcgatacctgcaggaggccttccacgtggagcccgaggagcaccagcagacactgcagcgggtcagggagcttgagaagccaatattttgtctgaaggcaacagtgaaacaggccaagggcattctgggcaaagatgtcagtgggttcagcgacccctactgcctgctgggcattgagcagggggtaggtgtgccagggggcagccccgggtcccggcatcggcagaaggctgtggtgaggcacaccatccccgaggaggagacccaccgcacgcaggtcatcacccagacactcaaccccgtctgggacgagaccttcatcctggagtttgaggacatcaccaatgcgagctttcatctggacatgtgggacctggacactgtggagtctgtccgacagaagcttggggagctcacggatctgcatgggcttcgcaggatctttaaagaggcccggaaggacaaaggccaggacgactttctggggaacgtggttctgaggctgcaggacctgcgctgccgagaggaccagtggtaccccctggaaccccgcactgagacctacccagaccgaggccagtgccacctccagttccaactcatccataagcggagagccacttcggccagccgctcgcagccgagctacaccgtgcacctccacctcctgcagcagcttgtgtcccacgaggtcacccagcacgaggcgggaagcacctcctgggacgggtcgctgagtccccaggctgccaccgtcctctttctgcacgccacacagaaggacctatccgacttccaccagtccatggcgcagtggctggcctacagccgcctctaccagagcctggagttccccagcagctgcctcctgcaccccatcaccagcatcgagtaccagtggatccagggtcggctcaaggcagaacagcaggaggagctggccgcctcattcagctccctgctgacctacggcctctccctcatccggaggttccgctctgtcttccccctctctgtctcggactccccagcccggctgcagtctcttctcagggtcctggtacagatgtgcaagatgaaggcctttggagaactgtgccccaacaccgccccattgccccagctggtgactgaggccctgcagactggcaccactgaatggttccacctgaagcagcagcaccatcaacccatggtgcagggcatcccggaggcaggcaaggccttgctgggcctggtacaggatgtcattggcgacctgcaccagtgccagcgcacatgggacaagatcttccacaataccctcaagatccacctcttctccatggctttccgggagctgcagtggctggtggccaagcgggtgcaggaccacacgacggttgtgggtgatgtagtgtccccagagatgggcgagagtctgttccagctctacatcagcctcaaggagctctgccagctgcgcatgagctcctcagagagggatggagtcctggccctggataatttccaccgctggttccagccggccatcccctcctggctgcagaagacgtacaacgaggccctggcgcgggtgcagcgcgctgtgcagatggatgagctggtgcccctgggtgaactgaccaagcacagcacatcagcggtggatctatccacctgctttgcccagatcagccacactgcccggcagctggactggccagacccagaggaggccttcatgattaccgtcaagtttgtggaggacacctgtcgcctggccctggtgtactgcagccttataaaggcccgggcccgcgagctctcttcaggccagaaggaccaaggccaggcagccaacatgctgtgtgtggtggtgaatgacatggagcagctgcggctggtgatcggcaagttgcccgcccagctggcatgggaggccctggagcagcgggtaggggccgtgctggagcaggggcagctgcagaacacgctgcatgcccagctgcagagcgcgctggccgggctgggccatgagatccgcactggcgtccgcaccctggccgagcagttggaggtgggcatcgccaagcacatccagaaactggtgggcgtcagggagtctgtcctgcctgaggatgccattctgcccctgatgaagttcctggaggtggagctttgctacatgaacaccaacttggtgcaggagaacttcagcagcctcctgaccctgctctggacccacacactcacagtgctggtggaggcggccgcctcccagcgcagctcatccctggcttccaacaggctgaagattgccctgcagaacctggagatctgcttccacgctgagggctgtggcctgccacccaaggccctgcacactgccaccttccaggctctgcagagggacctggagctgcaggcggcctccagccgggaactcatccggaagtacttctgcagccgaatccagcagcaggcagaaaccacctctgaggagctgggggctgtgacagtcaaggcctcctaccgcgcctctgagcagaagctgcgtgtggagctgctcagcgcctccagcctgctgcccctggactccaatggctccagcgacccctttgtccagctgaccttggagcccaggcatgagttccctgagctggccgcccgggagacccagaagcacaagaaggaccttcacccattgtttgatgagacctttgaattcctggtgcctgctgagccgtgccgcaaggctggggcatgcctcctgctcaccgtgctggactacgacacgctgggggccgacgacctggaaggcgaggccttcctgccgctgcgtgaggtgcccgggctgagtggctctgaggagcctggtgaggtgcctcagacccgcctgcccctcacgtaccccgcacccaacggggacccaatcctgcagctgctggagggccggaagggtgaccgagaagcccaggtctttgtgaggctgcggcggcaccgggccaagcaggggattgggccatctgtctcctggccctggcccatctgcctcctggccttcctgttccagccactggggtgggggccaggttcactgggaccagggctacaggcacagagtctcctggaaaagggagaggggaccctgccaaagatgaggctccagctgccctggggggagggtggtggccattactagagggggcctgggtcctctccccaggggctgccagcatccaggccaggaagcctggagccaagaaccttctggctctgagggagcaagagctggcaggcggcagggctggcacagacagacggaagcagaaaggacagtttggctgctgtgtctgctgcgcacgccccctccccggacagcacctgccacctagaaactttcttagc

SEQ ID NO: 198140 - DNA, 575 bp, Homo sapiens
  Payload ID: 19088
  Gene Name: unc-13 homolog D (C. elegans)
  ENST ID: ENST00000586108
  CDS Start-End: 67-575
ggagggtcctgtagggatcccagctggggaagcaccagcggacagggaagggcagagaaggccaccatggcgacactcctctcccatccgcagcagcgccctcccttcttgcgccaggccatcaagataaggcgccgcagagtcagagatctacaggatcccccgccccaaatggccccggagatccagcctccatcccaccacttctcccccgagcagcgggccctgctctacgaggacgcactctacactgtcttgcaccgcctgggtcatcctgagcccaaccatgtgacggaggcctctgagctgctgcgatacctgcaggaggccttccacgtggagcccgaggagcaccagcagacactgcagcgggtcagggagcttgagaagccaatattttgtctgaaggcaacagtgaaacaggccaagggcattctgggcaaagatgtcagtgggttcagcgacccctactgcctgctgggcattgagcagggggtaggtgtgccagggggcagccccgggtcccggcatcggcagaaggctgtggtgaggcacaccatccccgaggaggagac

SEQ ID NO: 198141 - DNA, 403 bp, Homo sapiens
  Payload ID: 19088
  Gene Name: unc-13 homolog D (C. elegans)
  ENST ID: ENST00000586519
  CDS Start-End: 1-207
tcctaccgcgcctctgagcagaagctgcgtgtggagctgctcagcgcctccagcctgctgcccctggactccaatgcctggtgcctgctgagccgtgccgcaaggctggggcatgcctcctgctcaccgtgctggactacgacacgctgggggccgacgacctggaaggcgaggccttcctgccgctgcgtgaggtgcccgggctgagtggctctgaggagcctggtgaggtgcctcagacccgcctgcccctcacgtaccccgcacccaacggggacccaatcctgcagctgctggagggccggaagggtgaccgagaagcccaggtctttgtgaggctgcggcggcaccgggccaagcaggcctcccagcatgccttgcggccggcaccgtagccgtagag

SEQ ID NO: 198142 - DNA, 776 bp, Homo sapiens
  Payload ID: 19088
  Gene Name: unc-13 homolog D (C. elegans)
  ENST ID: ENST00000587105
  CDS Start-End: 1-443
ggtaccccctggaaccccgcactgagacctacccagaccgaggccagtgccacctccagttccaactcatccataagcggagagccacttcggccagccgctcgcagccgagctacaccgtgcacctccacctcctgcagcagcttgtgtcccacgaggtcacccagcacgaggcgggaagcacctcctgggacgggtcgctgagtccccaggctgccaccgtcctctttctgcacgccacacagaaggacctatccgacttccaccagtccatggcgcagtggctggcctacagccgcctctaccagagcctggagttccccagcagctgcctcctgcaccccatcaccagcatcgagtaccagtggatccagggtcggctcaaggcagaacagcccggctgcagtctcttctcagggtcctggtacagatgtgcaagatgaaggcctttggagaactgtgccccaacaccgccccattgccccagctggtgactgaggccctgcagactggcaccactgaatggttccacctgaagcagcagcaccatcaacccatggtgcagggcatcccggaggcaggcaaggccttgctgggcctggtacaggatgtcattggcgacctgcaccagtgccagcgcacatgggacaagatcttccacaataccctcaagatccacctcttctccatggctttccgggagctgcagtggctggtggccaagcgggtgcaggaccacacgacggttgtgggtgatgtagtgtccccagagatgg

SEQ ID NO: 198143 - DNA, 589 bp, Homo sapiens
  Payload ID: 19088
  Gene Name: unc-13 homolog D (C. elegans)
  ENST ID: ENST00000586147
  CDS Start-End: 24-589
agggaagggcagagaaggccaccatggcgacactcctctcccatccgcagcagcgccctcccttcttgcgccaggccatcaagataaggcgccgcagagtcagagatctacaggatcccccgccccaaatggccccggagactggcaccactgaatggttccacctgaagcagcagcaccatcaacccatggtgcagggcatcccggaggcaggcaaggccttgctgggcctggtacaggatgtcattggcgacctgcaccagtgccagcgcacatgggacaagatcttccacaataccctcaagatccacctcttctccatggctttccgggagctgcagtggctggtggccaagcgggtgcaggaccacacgacggttgtgggtgatgtagtgtccccagagatgggcgagagtctgttccagctctacatcagcctcaaggagctctgccagctgcgcatgagctcctcagagagggatggagtcctggccctggataatttccaccgctggttccagccggccatcccctcctggctgcagaagacgtacaacgaggccctggcgcgggtgcagcgcgctgtgca

SEQ ID NO: 198144 - DNA, 668 bp, Homo sapiens
  Payload ID: 19088
  Gene Name: unc-13 homolog D (C. elegans)
  ENST ID: ENST00000589670
  CDS Start-End: 1-439
cagcgacccctttgtccagctgaccttggagcccaggcatgagttccctgagctggccgcccgggagacccagaagcacaagaaggaccttcacccattgtttgatgagacctttgaattcctggtgcctgctgagccgtgccgcaaggctggggcatgcctcctgctcaccgtgctggactacgacacgctgggggccgacgacctggaaggcgaggccttcctgccgctgcgtgaggtgcccgggctgagtggctctgaggagcctggtgaggtgcctcagacccgcctgcccctcacgtaccccgcacccaacggggacccaatcctgcagctgctggagggccggaagggtgaccgagaagcccaggtctttgtgaggctgcggcggcaccgggccaagcaggcctcccagcatgccttgcggccggcaccgtagccgtagaggggctgccagcatccaggccaggaagcctggagccaagaaccttctggctctgagggagcaagagctggcaggcggcagggctggcacagacagacggaagcagaaaggacagtttggctgctgtgtctgctgcgcacgccccctccccggacagcacctgccacctagaaactttcttagcaaaaaaattaataaaaacaaatccattgtcctcttaaaa

SEQ ID NO: 198145 - DNA, 930 bp, Homo sapiens
  Payload ID: 19088
  Gene Name: unc-13 homolog D (C. elegans)
  ENST ID: ENST00000592386
  CDS Start-End: 1-930
gcgacactcctctcccatccgcagcagcgccctcccttcttgcgccaggccatcaagataaggcgccgcagagtcagagatctacaggatcccccgccccaaatggccccggagatccagcctccatcccaccacttctcccccgagcaggacgcactctacactgtcttgcaccgcctgggtcatcctgagcccaaccatgtgacggaggcctctgagctgctgcgatacctgcaggaggccttccacgtggagcccgaggagcaccagcagacactgcagcgggtcagggagcttgagaagccaatattttgtctgaaggcaacagtgaaacaggccaagggcattctgggcaaagatgtcagtgggttcagcgacccctactgcctgctgggcattgagcagggggtaggtgtgccagggggcagccccgggtcccggcatcggcagaaggctgtggtgaggcacaccatccccgaggaggagacccaccgcacgcaggtcatcacccagacactcaaccccgtctgggacgagaccttcatcctggagtttgaggacatcaccaatgcgagctttcatctggacatgtgggacctggacactgtggagtctgtccgacagaagcttggggagctcacggatctgcatgggcttcgcaggatctttaaagaggcccggaaggacaaaggccaggacgactttctggggaacgtggttctgaggctgcaggacctgcgctgccgagaggaccagtggtaccccctggaaccccgcactgagacctacccagaccgaggccagtgccacctccagttccaactcatccataagcggagagccacttcggccagccgctcgcagccgagctacaccgtgcacctccacctcctgcagcagcttgtgtcccacgaggtcacccagcacgag

SEQ ID NO: 198146 - DNA, 848 bp, Homo sapiens
  Payload ID: 19088
  Gene Name: unc-13 homolog D (C. elegans)
  ENST ID: ENST00000590762
  CDS Start-End: 48-848
gagggaggtggggtgcgggtgcggagggctcgcgctgctgggcacccatggacctcagccacggcgggcccagggacggacctccaggaggcctgctgggggaacagatccagcctccatcccaccacttctcccccgagcagcgggccctgctctacgaggacgcactctacactgtcttgcaccgcctgggtcatcctgagcccaaccatgtgacggaggcctctgagctgctgcgatacctgcaggaggccttccacgtggagcccgaggagcaccagcagacactgcagcgggtcagggagcttgagaagccaatattttgtctgaaggcaacagtgaaacaggccaagggcattctgggcaaagatgtcagtgggttcagcgacccctactgcctgctgggcattgagcagggggtaggtgtgccagggggcagccccgggtcccggcatcggcagaaggctgtggtgaggcacaccatccccgaggaggagacccaccgcacgcaggtcatcacccagacactcaaccccgtctgggacgagaccttcatcctggagtttgaggacatcaccaatgcgagctttcatctggacatgtgggacctggacactgtggagtctgtccgacagaagcttggggagctcacggatctgcatgggcttcgcaggatctttaaagaggcccggaaggacaaaggccaggacgactttctggggaacgtggttctgaggctgcaggacctgcgctgccgagaggaccagtggtaccccctggaaccccgcactgagacctacccagaccgaggccagtgccacctccagttccaactcatccataagcgg

SEQ ID NO: 198147 - DNA, 4002 bp, Homo sapiens
  Payload ID: 19089
  Gene Name: unc-45 myosin chaperone A
  Uniprot ID: Q9H3U1
  ENST ID: ENST00000394275
  CDS Start-End: 836-3625
acttaacaaccgaagtaacccgcaatgcggaagggcgaggggattgcgagtcaccgagtttcccgcgcggcttgagtcacggcctagaaagagagatgttggggttcccaggaccaggacagaggtggtagtgaactctcatgggcatccagagaaggtcaggccccttgctgacaggcctatctgtggggctactgctgctcttcagctgggtgacccttgtccagccaacctctctctcagctctggtccaccaccctcacttgtgccagaccacccgggatgtccatggccgtcactaccctggtttcttttgccctcgtctgtctgattctccagaggaagcctactgctgccacctgcaggctgcagggggctcctgctgcacccgggctgaatttgaggccctgtaccaagtcaatctgtccgctcttccgcccccgcccatcctcaggggcccaggcccgctcctagtgctgggcctctacaacctactggttgtgaccctgatgaccgtagacctcgtgcacttctgctgcggtcggggccggagtctgggctggagccaccgcaggcctccctctgggtcctccgccgcgagctccctgcaggtctctgcggggacagcttaggtgcgcccggagcttgcctgcacctgcgatccagagccaagcgccccgcccctgcccgggcgcgctccctccttagccctgcccctctctgaccccacctccgacgcaagagtggggcggggcagctgccggtggcgtcccgaacccagactcgccccgccccagagactgcgcctgcgcgggcacgagacaacctctccgcgatgactgccagctcagtggagcagctgcggaaggagggcaatgagctgttcaaatgtggagactacgggggcgccctggcggcctacactcaggccctgggtctggacgcgacgccccaggaccaggccgttctgcaccggaaccgggccgcctgccacctcaagctggaagattacgacaaagcagaaacagaggcatccaaagccattgaaaaggatggtggggatgtcaaagcactctaccggcggagccaagccctagagaagctgggccgcctggaccaggctgtccttgacctgcagagatgtgtgagcttggagcccaagaacaaagttttccaggaggccttgcggaacatcgggggccagattcaggagaaggtgcgatacatgtcctcgacggatgccaaagtggaacagatgtttcagatactgttggacccagaagagaagggcactgagaaaaagcaaaaggcttctcagaacctggtggtgctggccagggaggatgctggagcggagaagatcttccggagtaatggggttcagctcttgcaacgtttactggacatgggagagactgacctcatgctggcggctctgcgtacgctggttggcatttgctctgagcatcagtcacggacagtggcaaccctgagcatactgggaactcggcgagtagtctccatcctgggcgtggaaagccaggctgtgtccctggctgcctgccacctgctgcaggttatgtttgatgccctcaaggaaggtgtcaaaaaaggcttccgaggcaaagaaggtgccatcattgtggatcctgcccgggagctgaaggtcctcatcagtaacctcttagatctgctgacagaggtgggggtctctggccaaggccgagacaatgccctgaccctcctgattaaagcggtgccccggaagtctctcaaggaccccaacaacagcctcaccctctgggtcatcgaccaaggtctgaaaaagattttggaagtggggggctctctacaggaccctcctggggagctcgcagtgaccgcaaacagccgcatgagcgcctctattctcctcagcaagctctttgatgacctcaagtgtgatgcggagagggagaatttccacagactttgtgaaaactacatcaagagctggtttgagggccaagggctggccgggaagctacgggccatccagacggtgtcctgcctcctgcagggcccatgtgacgctggcaaccgggccttggagctgagcggtgtcatggagagtgtgattgctctgtgtgcctctgagcaggaggaggagcagctggtggccgtggaggctctgatccatgcagccggcaaggctaagcgggcctcattcatcactgccaatggtgtctcgctgctgaaggacctatataagtgcagcgagaaggacagcatccgcatccgggcgctagtgggactctgtaagctcggttcggctggagggactgacttcagcatgaagcagtttgctgaaggctccactctcaaactggctaagcagtgtcgaaagtggctgtgcaatgaccagatcgacgcaggcactcggcgctgggcagtggagggcctggcttacctgacctttgatgccgacgtgaaggaagagtttgtggaggatgcggctgctctgaaagctctgttccagctcagcaggttggaggagaggtcagtgctctttgcggtggcctcagcgctggtgaactgcaccaacagctatgactacgaggagcccgaccccaagatggtggagctggccaagtatgccaagcagcatgtgcccgagcagcaccccaaggacaagccaagcttcgtgcgggctcgggtgaagaagctgctggcagcgggtgtggtgtcggccatggtgtgcatggtgaagacggagagccctgtgctgaccagttcctgcagagagctgctctccagggtcttcttggctttagtggaagaggtagaggaccgaggcactgtggttgcccagggaggcggcagggcgctgatcccgctggccctggaaggcacggacgtggggcagacaaaggcagcccaggcccttgccaagctcaccatcacctccaacccggagatgaccttccctggcgagcggatctatgaggtggtccggcccctcgtctccctgttgcacctcaactgctcaggcctgcagaacttcgaggcgctcatggccctaacaaacctggctgggatcagcgagaggctccggcagaagatcctgaaggagaaggctgtgcccatgatagaaggctacatgtttgaggagcatgagatgatccgccgggcagccacggagtgcatgtgtaacttggccatgagcaaggaggtgcaggacctcttcgaagcccagggcaatgaccgactgaagctgctggtgctgtacagtggagaggatgatgagctgctacagcgggcagctgccgggggcttggccatgcttacctccatgcggcccacgctctgcagccgcattccccaagtgaccacacactggctggagatcctgcaggccctgcttctgagctccaaccaggagctgcagcaccggggtgctgtggtggtgctgaacatggtggaggcctcgagggagattgccagcaccctgatggagagtgagatgatggagatcttgtcagtgctagctaagggtgaccacagccctgtcacaagggctgctgcagcctgcctggacaaagcagtggaatatgggcttatccaacccaaccaagatggagagtgagggggttgtccctgggcccaaggctcatgcacacgctacctattgtggcacggagagtaaggacggaagcagctttggctggtggtggctggcatgcccaatactcttgcccatcctcgcttgctgccctaggatgtcctctgttctgagtcagcggccacgttcagtcacacagccctgcttggccagcactgcctgcagcctcactcagaggggccctttttctgtactactgtagtcagctgggaatggggaaggtgcatcccaacacagcctgtggatcctggggcatctggaagggcgcacacatcagcagcctcaccagctgtgagcctgctatcaggcctgcccctccaataaaagtgtgtagaactcca

SEQ ID NO: 198148 - DNA, 3252 bp, Homo sapiens
  Payload ID: 19089
  Gene Name: unc-45 myosin chaperone A
  Uniprot ID: Q9H3U1
  ENST ID: ENST00000418476
  CDS Start-End: 41-2875
agagactgcgcctgcgcgggcacgagacaacctctccgcgatgactgtgagtggtccagggacccccgagccccggccggccacccccggggccagctcagtggagcagctgcggaaggagggcaatgagctgttcaaatgtggagactacgggggcgccctggcggcctacactcaggccctgggtctggacgcgacgccccaggaccaggccgttctgcaccggaaccgggccgcctgccacctcaagctggaagattacgacaaagcagaaacagaggcatccaaagccattgaaaaggatggtggggatgtcaaagcactctaccggcggagccaagccctagagaagctgggccgcctggaccaggctgtccttgacctgcagagatgtgtgagcttggagcccaagaacaaagttttccaggaggccttgcggaacatcgggggccagattcaggagaaggtgcgatacatgtcctcgacggatgccaaagtggaacagatgtttcagatactgttggacccagaagagaagggcactgagaaaaagcaaaaggcttctcagaacctggtggtgctggccagggaggatgctggagcggagaagatcttccggagtaatggggttcagctcttgcaacgtttactggacatgggagagactgacctcatgctggcggctctgcgtacgctggttggcatttgctctgagcatcagtcacggacagtggcaaccctgagcatactgggaactcggcgagtagtctccatcctgggcgtggaaagccaggctgtgtccctggctgcctgccacctgctgcaggttatgtttgatgccctcaaggaaggtgtcaaaaaaggcttccgaggcaaagaaggtgccatcattgtggatcctgcccgggagctgaaggtcctcatcagtaacctcttagatctgctgacagaggtgggggtctctggccaaggccgagacaatgccctgaccctcctgattaaagcggtgccccggaagtctctcaaggaccccaacaacagcctcaccctctgggtcatcgaccaaggtctgaaaaagattttggaagtggggggctctctacaggaccctcctggggagctcgcagtgaccgcaaacagccgcatgagcgcctctattctcctcagcaagctctttgatgacctcaagtgtgatgcggagagggagaatttccacagactttgtgaaaactacatcaagagctggtttgagggccaagggctggccgggaagctacgggccatccagacggtgtcctgcctcctgcagggcccatgtgacgctggcaaccgggccttggagctgagcggtgtcatggagagtgtgattgctctgtgtgcctctgagcaggaggaggagcagctggtggccgtggaggctctgatccatgcagccggcaaggctaagcgggcctcattcatcactgccaatggtgtctcgctgctgaaggacctatataagtgcagcgagaaggacagcatccgcatccgggcgctagtgggactctgtaagctcggttcggctggagggactgacttcagcatgaagcagtttgctgaaggctccactctcaaactggctaagcagtgtcgaaagtggctgtgcaatgaccagatcgacgcaggcactcggcgctgggcagtggagggcctggcttacctgacctttgatgccgacgtgaaggaagagtttgtggaggatgcggctgctctgaaagctctgttccagctcagcaggttggaggagaggtcagtgctctttgcggtggcctcagcgctggtgaactgcaccaacagctatgactacgaggagcccgaccccaagatggtggagctggccaagtatgccaagcagcatgtgcccgagcagcaccccaaggacaagccaagcttcgtgcgggctcgggtgaagaagctgctggcagcgggtgtggtgtcggccatggtgtgcatggtgaagacggagagccctgtgctgaccagttcctgcagagagctgctctccagggtcttcttggctttagtggaagaggtagaggaccgaggcactgtggttgcccagggaggcggcagggcgctgatcccgctggccctggaaggcacggacgtggggcagacaaaggcagcccaggcccttgccaagctcaccatcacctccaacccggagatgaccttccctggcgagcggatctatgaggtggtccggcccctcgtctccctgttgcacctcaactgctcaggcctgcagaacttcgaggcgctcatggccctaacaaacctggctgggatcagcgagaggctccggcagaagatcctgaaggagaaggctgtgcccatgatagaaggctacatgtttgaggagcatgagatgatccgccgggcagccacggagtgcatgtgtaacttggccatgagcaaggaggtgcaggacctcttcgaagcccagggcaatgaccgactgaagctgctggtgctgtacagtggagaggatgatgagctgctacagcgggcagctgccgggggcttggccatgcttacctccatgcggcccacgctctgcagccgcattccccaagtgaccacacactggctggagatcctgcaggccctgcttctgagctccaaccaggagctgcagcaccggggtgctgtggtggtgctgaacatggtggaggcctcgagggagattgccagcaccctgatggagagtgagatgatggagatcttgtcagtgctagctaagggtgaccacagccctgtcacaagggctgctgcagcctgcctggacaaagcagtggaatatgggcttatccaacccaaccaagatggagagtgagggggttgtccctgggcccaaggctcatgcacacgctacctattgtggcacggagagtaaggacggaagcagctttggctggtggtggctggcatgcccaatactcttgcccatcctcgcttgctgccctaggatgtcctctgttctgagtcagcggccacgttcagtcacacagccctgcttggccagcactgcctgcagcctcactcagaggggccctttttctgtactactgtagtcagctgggaatggggaaggtgcatcccaacacagcctgtggatcctggggcatctggaagggcgcacacatcagcagcctcaccagctgtgagcctgctatcaggcctgcccctccaataaaagtgtgtagaactcca

SEQ ID NO: 198149 - DNA, 5679 bp, Homo sapiens
  Payload ID: 19090
  Gene Name: unc-45 myosin chaperone B
  Uniprot ID: Q8IWX7
  ENST ID: ENST00000268876
  CDS Start-End: 98-2893
agactgaggctggctggctggaggttgacacaggagtgctcaggggagcagcatcacaagagggcagatcgaaagcatcgtccttgctgaaaaacagatggcagaggtggaagcggtacagctgaaggaggaaggaaaccggcatttccagctccaggactacaaggccgccacaaatagctacagccaggccctgaagctgaccaaggacaaggccctgctggccacgctttatcggaaccgggcagcctgtggcctgaaaacggagagctacgtccaggcagcttcagatgcctccagagccatcgacatcaactcctcggacatcaaggctctgtatcggcgatgccaggcactggagcacctggggaagctggaccaggccttcaaagacgtgcagcgttgtgccaccctcgagccacggaaccagaacttccaggagatgctgaggagactcaacaccagcattcaggagaagctccgagtgcagttctccacagactcgagggtacagaagatgtttgagatcctcttggatgaaaacagtgaggctgataagcgggaaaaggctgccaacaatctcattgtcctaggccgtgaggaagcaggggctgagaagatcttccagaacaatggagtagccttgctactgcagcttctggacactaagaagcctgagctggtgctggctgcagtgcggaccctgtcgggcatgtgcagcggccaccaagccagagccacagtgattctgcatgcagtgcggatagaccgaatctgtagcctcatggccgtggagaatgaggagatgtctctggctgtctgcaacctgctccaagccatcattgactccttgtctggggaggacaagcgggagcatcgagggaaggaggaggccctggttctagacaccaagaaggacctgaagcagatcaccagccacctgctggacatgctagtcagcaagaaggtgtctggccagggcagggatcaggcgctgaacctgctcaataagaatgttcccaggaaggaccttgccattcatgacaactcacgtaccatctatgtggtggataatggtctgaggaagatcctgaaggttgtggggcaggttccagatctgccatcctgcctgcccctgactgacaacacccgcatgctggcctctatcctcatcaacaagctctatgatgacctgcgctgtgacccggagcgcgatcacttccgcaagatctgtgaggaatatatcacgggcaagtttgacccccaggacatggacaagaacttgaatgccatccagacagtgtcagggatcctgcagggcccctttgacctgggcaaccagctgctgggactgaaaggtgtgatggagatgatggtggcactatgtggctcagagcgcgagacggaccagctggtggccgtggaggccctcatccatgcctccacgaagctcagccgcgccaccttcatcatcaccaatggagtgtcactgctcaaacagatctacaagaccaccaaaaatgagaagatcaagatccgcacactggtgggactctgtaagctcggctctgcaggtggcacagactacggtctcaggcagtttgcggaagggtcgacagaaaaactggccaaacagtgtcgcaagtggctgtgcaatatgtccatagacactcggacccgacgctgggcagtggagggcctggcctacctcacgctggacgctgatgtgaaggacgactttgtccaggacgtccctgccctgcaggccatgtttgagctggccaaggcaggtaccagtgacaagaccatcctgtactcggtggccaccaccctggtgaactgcaccaacagctacgatgtcaaggaggtcatcccagagcttgtccagctcgccaagttctccaagcagcatgtgcccgaggaacaccccaaggacaagaaggactttatagacatgcgggtgaagcggcttctgaaggcgggtgtcatctctgccctggcttgcatggtgaaagcagatagtgccatcctcactgaccagaccaaggagctgctggccagggtattcctggcactgtgtgacaacccaaaggaccgaggcaccattgtggctcaaggtggtggcaaggccctgattcccctggctttggagggcacagatgtgggcaaggtgaaggcagcccacgctctagcaaagatcgctgctgtctccaatccggacattgcttttcctggggagcgggtgtatgaggtggtgcggccccttgtaagactcttggacacacagagggatgggcttcagaactatgaggctctcctaggcctcaccaacctgtctgggcggagtgacaaactccggcagaagatctttaaggagagggccttgccagacatcgagaactacatgtttgagaatcatgatcagctgcggcaggcggccaccgagtgcatgtgcaacatggtgctccacaaggaggtacaggaaaggttcttggctgacgggaatgaccggctgaagctggtggtgctgctctgcggggaggatgatgataaggtgcagaatgcggctgcaggggctctggccatgctgacagcagcacacaagaaactgtgcctcaagatgactcaagtgacaacccagtggttggagatcctccagcggctttgcctgcacgaccagctgtctgtccaacaccggggcctggtcattgcctacaacctactggcagccgatgctgagctggccaagaagctggtggagagtgagctgctggagatcctgactgtggtgggcaaacaggagccagatgagaagaaggcagaagtggttcagacagcccgagaatgtctcatcaagtgcatggattatggtttcattaaaccagtgtcttagacagcgaccctcagggatgctgggagtggtcctgtactgtgcagagtcctgggttggttgggttctcctgaagagtcaggtcatctagggatcatagcagtgacaatgaagtctcaatataaaggaaagacttgattgttctctgagttgtgagtcttctcctttgtcctgacagagtttggatgtttcactctctctcttgcttcctgtctccttatatttgtcatgtttcagaaattcccagaataattttcacccatgattagaaataggttggatcattctttctgtacccattctgaaggccaggataataggttgaagttctttatattttggaaaatggattttgtggtaaggtaggaactaacgggtgtgtgcatataaaggttaatgctgttgtatttggatgctgatctgtgctgttttcatgacctctctcccacactatttgaatcagtctgttcagaactgtgtgtttcacctgcagtgctctgtcccagtcccatgcccattcccatcacttcactgtgatggaaatagagtttatgttcaacagtggggcatgacctctgcaatttgcttgggaaagtcttccaagcaagatggacatgatgaatacaaataagatctactcaaagtacttcaaacaaaaaataaataattcattggctcatgtatcttggccacccagggaaggtctgacattgttagttagatccagagtttcaaatgtcatcaccatggatgtgtctttttctctctctcatttcccctccccatatcttgtcttttatttattataggtttgtctcattccctggcaggctctctccctgtgataggaaagagagtccccagcagccccagggtgacatagttgttatagttcattatggaatagaagagagaagagcattctcaataacccggcaaagttcccagggatgactctgatatgtctatgtctcaggtcacatttccatctatgaaccaatcatattcagaggtggaatgctaattggccaggcctgggtcatatatacaagtctagggaagaaatgagcttcatccctgtccaattgacatggactgattaggggtattaatggaagaggtgtgccaccacaaaagaatgtaccctgggcagatcaaagaacatattctgtatgtcaggcttggccacaaaagaatgacacaagtaatatgctgtagatcagaacctctctgctaatattgcctttttagcatggttaagatagctaagatctagtactgtcactccagtatgtcccaattctacctacgtttattgaagggtcaacagttctgatctcagcattgggtaaagggtgggacattcagatttacggtccttgataaaaacaatttacaacgttccgttgtgtaataaatgtaagtgtacatatgcctgggacatcagctggaaaagggacagactatcagagagttgcactgttgcggtatgggccaaatccaacataatacccgctgtacctctagagaactaaaaccttaatttctcagatcttttctgcactaatggtctttacatacagcctacattttaactaactcttgcatgggcttgtttcacagcaggaaactatattcatcatatccttattatgatagagaatgacaacattcaaaagggtgtggtgcttctgaaaatatacacaataaatggcatgatttgacctctgtcaaattcttctttcctgctttcctcatatgtgggcttgagtgggtgtatttagctcctttaaaggaaactctttcacaggcagggccacactcttactcgttttgatctcatgaggttacatctgccagtggcgttcagggccagttagataaagttcatcttgtttggattggagagactttttttttttttttttttgagacagggtcttgctctgtaacctaggctcaagtgcagtgcagtggtgcagtcatggctcaccgcagccttggtctcctgggctcaagtgatctttctacttcagcctcctcaatagctgggactacaggcacacaccaccacccccaggtaattaaaaaatttttttttgtagagacagggtctcactatgttgcccagtctgggagaccacattctttaacatgaatattttgtaaatagtccaagaagatctagaggaaagctgaattccttcatctgatttttgccactgggctgcctcccattgtctggctaagtcttcatgggaggcctttaagaaaagctgtgacaaatacctttgtttcccactgcctaggttacataagtagttggcttttccagcctagactcttatattgttgcttgtaagagggcccttctttgcagatttcttttttttttcatctatgctttcaaataggcagatgctagcctgagatcatctctttattgaggtagtttgcccaaaaacagcaaggaacagccaatacctgccaactttctaggtttttccaaccaattctcttacagaaaatctataaatatcttagaggtatgtttcttagtttcccaacatataatgggaaaattcatcatttatattattacttttaactgaagtatgttgttatcagagaacttggtctgtgtcatattaatcctttgccatttgagaagcatacagttttaaagtttatatctccaaaaggatattttgtaaaaatttaacccctttgactcttagtcttctcatttgtgaaaggtaaataataaagaatttctgttcctagtaaga

SEQ ID NO: 198150 - DNA, 5638 bp, Homo sapiens
  Payload ID: 19090
  Gene Name: unc-45 myosin chaperone B
  Uniprot ID: Q8IWX7
  ENST ID: ENST00000394570
  CDS Start-End: 71-2860
ttgacacaggagtgctcaggggagcagcatcacaagagggcagatcgaaagcatcgtccttgctgaaaaaatggcagaggtggaagcggtacagctgaaggaggaaggaaaccggcatttccagctccaggactacaaggccgccacaaatagctacagccaggccctgaagctgaccaaggacaaggccctgctggccacgctttatcggaaccgggcagcctgtggcctgaaaacggagagctacgtccaggcagcttcagatgcctccagagccatcgacatcaactcctcggacatcaaggctctgtatcggcgatgccaggcactggagcacctggggaagctggaccaggccttcaaagacgtgcagcgttgtgccaccctcgagccacggaaccagaacttccaggagatgctgaggagactcaacaccagcattcaggagaagctccgagtgcagttctccacagactcgagggtacagaagatgtttgagatcctcttggatgaaaacagtgaggctgataagcgggaaaaggctgccaacaatctcattgtcctaggccgtgaggaagcaggggctgagaagatcttccagaacaatggagtagccttgctactgcagcttctggacactaagaagcctgagctggtgctggctgcagtgcggaccctgtcgggcatgtgcagcggccaccaagccagagccacagtgattctgcatgcagtgcggatagaccgaatctgtagcctcatggccgtggagaatgaggagatgtctctggctgtctgcaacctgctccaagccatcattgactccttgtctggggaggacaagcgggagcatcgagggaaggaggaggccctggttctagacaccaagaaggacctgaagcagatcaccagccacctgctggacatgctagtcagcaagaaggtgtctggccagggcagggatcaggcgctgaacctgctcaataagaatgttcccaggaaggaccttgccattcatgacaactcacgtaccatctatgtggtggataatggtctgaggaagatcctgaaggttgtggggcaggttccagatctgccatcctgcctgcccctgactgacaacacccgcatgctggcctctatcctcatcaacaagctctatgatgacctgcgctgtgacccggagcgcgatcacttccgcaagatctgtgaggaatatatcacgggcaagtttgacccccaggacatggacaagaacttgaatgccatccagacagtgtcagggatcctgcagggcccctttgacctgggcaaccagctgctgggactgaaaggtgtgatggagatgatggtggcactatgtggctcagagcgcgagacggaccagctggtggccgtggaggccctcatccatgcctccacgaagctcagccgcgccaccttcatcatcaccaatggagtgtcactgctcaaacagatctacaagaccaccaaaaatgagaagatcaagatccgcacactggtgggactctgtaagctcggctctgcaggtggcacagactacggtctcaggcagtttgcggaagggtcgacagaaaaactggccaaacagtgtcgcaagtggctgtgcaatatgtccatagacactcggacccgacgctgggcagtggagggcctggcctacctcacgctggacgctgatgtgaaggacgactttgtccaggacgtccctgccctgcaggccatgtttgagctggccaagaccagtgacaagaccatcctgtactcggtggccaccaccctggtgaactgcaccaacagctacgatgtcaaggaggtcatcccagagcttgtccagctcgccaagttctccaagcagcatgtgcccgaggaacaccccaaggacaagaaggactttatagacatgcgggtgaagcggcttctgaaggcgggtgtcatctctgccctggcttgcatggtgaaagcagatagtgccatcctcactgaccagaccaaggagctgctggccagggtattcctggcactgtgtgacaacccaaaggaccgaggcaccattgtggctcaaggtggtggcaaggccctgattcccctggctttggagggcacagatgtgggcaaggtgaaggcagcccacgctctagcaaagatcgctgctgtctccaatccggacattgcttttcctggggagcgggtgtatgaggtggtgcggccccttgtaagactcttggacacacagagggatgggcttcagaactatgaggctctcctaggcctcaccaacctgtctgggcggagtgacaaactccggcagaagatctttaaggagagggccttgccagacatcgagaactacatgtttgagaatcatgatcagctgcggcaggcggccaccgagtgcatgtgcaacatggtgctccacaaggaggtacaggaaaggttcttggctgacgggaatgaccggctgaagctggtggtgctgctctgcggggaggatgatgataaggtgcagaatgcggctgcaggggctctggccatgctgacagcagcacacaagaaactgtgcctcaagatgactcaagtgacaacccagtggttggagatcctccagcggctttgcctgcacgaccagctgtctgtccaacaccggggcctggtcattgcctacaacctactggcagccgatgctgagctggccaagaagctggtggagagtgagctgctggagatcctgactgtggtgggcaaacaggagccagatgagaagaaggcagaagtggttcagacagcccgagaatgtctcatcaagtgcatggattatggtttcattaaaccagtgtcttagacagcgaccctcagggatgctgggagtggtcctgtactgtgcagagtcctgggttggttgggttctcctgaagagtcaggtcatctagggatcatagcagtgacaatgaagtctcaatataaaggaaagacttgattgttctctgagttgtgagtcttctcctttgtcctgacagagtttggatgtttcactctctctcttgcttcctgtctccttatatttgtcatgtttcagaaattcccagaataattttcacccatgattagaaataggttggatcattctttctgtacccattctgaaggccaggataataggttgaagttctttatattttggaaaatggattttgtggtaaggtaggaactaacgggtgtgtgcatataaaggttaatgctgttgtatttggatgctgatctgtgctgttttcatgacctctctcccacactatttgaatcagtctgttcagaactgtgtgtttcacctgcagtgctctgtcccagtcccatgcccattcccatcacttcactgtgatggaaatagagtttatgttcaacagtggggcatgacctctgcaatttgcttgggaaagtcttccaagcaagatggacatgatgaatacaaataagatctactcaaagtacttcaaacaaaaaataaataattcattggctcatgtatcttggccacccagggaaggtctgacattgttagttagatccagagtttcaaatgtcatcaccatggatgtgtctttttctctctctcatttcccctccccatatcttgtcttttatttattataggtttgtctcattccctggcaggctctctccctgtgataggaaagagagtccccagcagccccagggtgacatagttgttatagttcattatggaatagaagagagaagagcattctcaataacccggcaaagttcccagggatgactctgatatgtctatgtctcaggtcacatttccatctatgaaccaatcatattcagaggtggaatgctaattggccaggcctgggtcatatatacaagtctagggaagaaatgagcttcatccctgtccaattgacatggactgattaggggtattaatggaagaggtgtgccaccacaaaagaatgtaccctgggcagatcaaagaacatattctgtatgtcaggcttggccacaaaagaatgacacaagtaatatgctgtagatcagaacctctctgctaatattgcctttttagcatggttaagatagctaagatctagtactgtcactccagtatgtcccaattctacctacgtttattgaagggtcaacagttctgatctcagcattgggtaaagggtgggacattcagatttacggtccttgataaaaacaatttacaacgttccgttgtgtaataaatgtaagtgtacatatgcctgggacatcagctggaaaagggacagactatcagagagttgcactgttgcggtatgggccaaatccaacataatacccgctgtacctctagagaactaaaaccttaatttctcagatcttttctgcactaatggtctttacatacagcctacattttaactaactcttgcatgggcttgtttcacagcaggaaactatattcatcatatccttattatgatagagaatgacaacattcaaaagggtgtggtgcttctgaaaatatacacaataaatggcatgatttgacctctgtcaaattcttctttcctgctttcctcatatgtgggcttgagtgggtgtatttagctcctttaaaggaaactctttcacaggcagggccacactcttactcgttttgatctcatgaggttacatctgccagtggcgttcagggccagttagataaagttcatcttgtttggattggagagactttttttttttttttttttgagacagggtcttgctctgtaacctaggctcaagtgcagtgcagtggtgcagtcatggctcaccgcagccttggtctcctgggctcaagtgatctttctacttcagcctcctcaatagctgggactacaggcacacaccaccacccccaggtaattaaaaaatttttttttgtagagacagggtctcactatgttgcccagtctgggagaccacattctttaacatgaatattttgtaaatagtccaagaagatctagaggaaagctgaattccttcatctgatttttgccactgggctgcctcccattgtctggctaagtcttcatgggaggcctttaagaaaagctgtgacaaatacctttgtttcccactgcctaggttacataagtagttggcttttccagcctagactcttatattgttgcttgtaagagggcccttctttgcagatttcttttttttttcatctatgctttcaaataggcagatgctagcctgagatcatctctttattgaggtagtttgcccaaaaacagcaaggaacagccaatacctgccaactttctaggtttttccaaccaattctcttacagaaaatctataaatatcttagaggtatgtttcttagtttcccaacatataatgggaaaattcatcatttatattattacttttaactgaagtatgttgttatcagagaacttggtctgtgtcatattaatcctttgccatttgagaagcatacagttttaaagtttatatctccaaaaggatattttgtaaaaatttaacccctttgactcttagtcttctcatttgtgaaaggtaaataataaagaatttctgttcc

SEQ ID NO: 198151 - DNA, 2553 bp, Homo sapiens
  Payload ID: 19090
  Gene Name: unc-45 myosin chaperone B
  Uniprot ID: Q8IWX7
  ENST ID: ENST00000591048
  CDS Start-End: 1-2553
atggcagaggtggaagcggtacagctgaaggaggaaggaaaccggcatttccagctccaggactacaaggccgccacaaatagctacagccaggccctgaagctgaccaaggacaaggccctgctggccacgctttatcggaaccgggcagcctgtggcctgaaaacggagagctacgtccaggcagcttcagatgcctccagagccatcgacatcaactcctcggacatcaaggctctgtatcggcgatgccaggcactggagcacctggggaagctggaccaggccttcaaagacgtgcagcgttgtgccaccctcgagccacggaaccagaacttccaggagatgctgaggagactcaacaccagcattcaggagaagctccgagtgcagttctccacagactcgagggtacagaagatgtttgagatcctcttggatgaaaacagtgaggctgataagcgggaaaaggctgccaacaatctcattgtcctaggccgtgaggaagcaggggctgagaagatcttccagaacaatggagtagccttgctactgcagcttctggacactaagaagcctgagctggtgctggctgcagtgcggaccctgtcgggcatgtgcagcggccaccaagccagagccacagtgattctgcatgcagtgcggatagaccgaatctgtagcctcatggccgtggagaatgaggagatgtctctggctgtctgcaacctgctccaagccatcattgactccttgtctggggaggacaagcgggagcatcgagggaaggaggaggccctggttctagacaccaagaaggacctgaagcagatcaccagccacctgctggacatgctagtcagcaagaaggtgtctggccagggcagggatcaggcgctgaacctgctcaataagaatgttcccaggaaggaccttgccattcatgacaactcacgtaccatctatgtggtggataatggtctgaggaagatcctgaaggttgtggggcaggttccagatctgccatcctgcctgcccctgactgacaacacccgcatgctggcctctatcctcatcaacaagctctatgatgacctgcgctgtgacccggagcgcgatcacttccgcaagatctgtgaggaatatatcacgggcaagtttgacccccaggacatggacaagaacttgaatgccatccagacagtgtcagggatcctgcagggcccctttgacctgggcaaccagctgctgggactgaaaggtgtgatggagatgatggtggcactatgtggctcagagcgcgagacggaccagctggtggccgtggaggccctcatccatgcctccacgaagctcagccgcgccaccttcatcatcaccaatggagtgtcactgctcaaacagatctacaagaccaccaaaaatgagaagatcaagatccgcacactggtgaccagtgacaagaccatcctgtactcggtggccaccaccctggtgaactgcaccaacagctacgatgtcaaggaggtcatcccagagcttgtccagctcgccaagttctccaagcagcatgtgcccgaggaacaccccaaggacaagaaggactttatagacatgcgggtgaagcggcttctgaaggcgggtgtcatctctgccctggcttgcatggtgaaagcagatagtgccatcctcactgaccagaccaaggagctgctggccagggtattcctggcactgtgtgacaacccaaaggaccgaggcaccattgtggctcaaggtggtggcaaggccctgattcccctggctttggagggcacagatgtgggcaaggtgaaggcagcccacgctctagcaaagatcgctgctgtctccaatccggacattgcttttcctggggagcgggtgtatgaggtggtgcggccccttgtaagactcttggacacacagagggatgggcttcagaactatgaggctctcctaggcctcaccaacctgtctgggcggagtgacaaactccggcagaagatctttaaggagagggccttgccagacatcgagaactacatgtttgagaatcatgatcagctgcggcaggcggccaccgagtgcatgtgcaacatggtgctccacaaggaggtacaggaaaggttcttggctgacgggaatgaccggctgaagctggtggtgctgctctgcggggaggatgatgataaggtgcagaatgcggctgcaggggctctggccatgctgacagcagcacacaagaaactgtgcctcaagatgactcaagtgacaacccagtggttggagatcctccagcggctttgcctgcacgaccagctgtctgtccaacaccggggcctggtcattgcctacaacctactggcagccgatgctgagctggccaagaagctggtggagagtgagctgctggagatcctgactgtggtgggcaaacaggagccagatgagaagaaggcagaagtggttcagacagcccgagaatgtctcatcaagtgcatggattatggtttcattaaaccagtgtcttag

SEQ ID NO: 198152 - DNA, 3136 bp, Homo sapiens
  Payload ID: 19091
  Gene Name: unc-5 family C-terminal like
  Uniprot ID: Q8IV45
  ENST ID: ENST00000244565
  CDS Start-End: 118-1674
cttgtttctcggagaaggaactggaccagccagcagcctctaagagctcctagacggcctttggctttggctggcacaggggtgaaggagagccagcggcattgagtaaccaggcgaatgtgcccccaggagagttcattccaaccctcccagttcctactgctggtgggggtcccagtggcaagtgtcctccttctggcccaatgccttcgatggcactgccctagaaggctgctgggggcctgctggacactgaatggtcaagaggaaccagtgtcccagcctaccccccaactagaaaatgaggtctcaaggcagcacctgccagccacactgccagagatggttgccttctaccaggagctacacacacccactcaaggccagaccatggtccgccagttgatgcacaaactgttggtgttttcggctcgagaggtggatcaccgcggcggttgcctgatgctccaggatacaggcatctccttgctcatcccaccaggtgctgtggctgtgggccgccaggagcgggtgtctttgatcctggtgtgggacctgtcggacgccccatcgctgtcccaagcccaggggctggtaagccctgtggtggcatgtggcccccatggggcctccttcctgaagccttgcactctcacgttcaaacactgtgccgagcagcccagccatgctcgcacctacagcagcaacactaccctgctggatgccaaggtatggaggcccctggggcggccgggggcccacgcctcccgggatgagtgtcgcatccacctctcccacttcagcctctacacctgtgtgctggaggcacctgtggggcgcgaagcccgcaaatggctgcagctggccgtattctgctcaccgctggtgccaggacagtcccatctgcaactgcgtatctacttcctcaacaacacgccctgcgccctgcagtgggcactgaccaacgagcagccccatggtgggcgcctgcgtgggccctgccagctcttcgacttcaatggggctaggggcgaccagtgcctgaagctcacgtacatctcagagggttgggagaatgtggatgacagcagttgccagctggttccccatctccacatctggcatggaaagtgccccttccgctccttctgcttccggagaaaagcagccgatgagaatgaggactgttcagcactaaccaatgagatcattgtcaccatgcacaccttccaggatggcttggagaccaagtatatggaaatcctcagattccaggcatcagaggaggaatcctgggcagcgccaccacctgtttcccagccgcccccatgcaataggctgcccccagagctctttgagcagctgcggatgttattggagccaaacagcatcaccggcaatgactggcgcagactggcctcccacctggggctttgcggcatgaagatccggttcctgtcctgccagcgcagccccgcagcggccatcctggagttgtttgaggagcagaacggcagcctgcaggagctgcactacctcatgaccgtcatggagcggctagactgcgcctccgccatccagaactacctgagtgggacacacggcggcagcccaggccccgagcgcgggggcgcccgggataaccagggcctggagctggacgagaagctctgagcgcccagcgggcagggccggaggaggtgtaggggcgagaggggttgttctcctacgcctaagaggaacacagcagctgttcctggctgtgcccaccacccttcccagaaccctcggacggtgccagggccgcccgcgtcctcgccagcctcccagcagcaggcgcgcccttccggccgcgagctgtcccgcgtgcgggtcccctcctggccggcagagggcgcaggagcccaggagatggcctcagcgtggccagcctgccaaactgaccaggggacggccacggtccccgcgtgcactttagggccggtcaggccctaaagtattcactgagcacttaggaagaccgggcattgggctggtgtcatgaagaatactggaatataggaggtagggtctggagccctgacaagcacacagttcttttgcaggagtcaagatgtgctcataggagccaagggcaaactcgaaaacagccctgccctgtggttaggggaggtgggtgtggctttaggagttgagaggggaagagctgagtgcgggctggagcagcgagaatgcttcacggaggatgttggggagagaggatttgatttgccgagtggtttggagatctttaggggcgggtaggggaagagggtggctggacttaaggtaggagccgaaagtgggcatgggagcccatccccgtgggtgtgaggccggggtaggaccaggcttcccggctaggcacgcctggctggctgcctctgcctctactaacttcctttgtctctttatcctcctgcttaggccgtgtcttcctctctctctgccattttctctatcagaaaacattaaagctgagtagaaacttcaagatgatcattctggcccagcccttttatctctttatctccaatggtgtgcgttttaagtttctctgacttggtttttctgtccctgtctcccacagttgttcccgctctgcacctgtgtttcagttactctctctctctgtcttagatctttttgtttctgcctagtctctgtgccctgtctttgtgtgtttctttctctgcctgaaaccctccctcttttcccttcaggcatatgtctctaaaccaatgttatgtatcaaagactgttgaaagagacagggctactctaggaatggatgggtggggatattttccccatggatcaagatccagtttagggttgggaaataaaggatagggataaaagaggcaccccattcagtcagcagatacttattcagcacctactatgtgtttgatactgtatacaaaagacatgaatgggctgggtcctgaacagagaataaagggtttgactccattctggaaattcttttgtttgcaaacaggtgttgttaatttgttcaaaggcaggcaaacaatctctctggcaacacaattttcttctgtatttaattaaaaaatattaaagctttttttct

SEQ ID NO: 198153 - DNA, 1620 bp, Homo sapiens
  Payload ID: 19091
  Gene Name: unc-5 family C-terminal like
  Uniprot ID: Q8IV45
  ENST ID: ENST00000373164
  CDS Start-End: 62-1618
gcctttggctttggctggcacaggggtgaaggagagccagcggcattgagtaaccaggcgaatgtgcccccaggagagttcattccaaccctcccagttcctactgctggtgggggtcccagtggcaagtgtcctccttctggcccaatgccttcgatggcactgccctagaaggctgctgggggcctgctggacactgaatggtcaagaggaaccagtgtcccagcctaccccccaactagaaaatgaggtctcaaggcagcacctgccagccacactgccagagatggttgccttctaccaggagctacacacacccactcaaggccagaccatggtccgccagttgatgcacaaactgttggtgttttcggctcgagaggtggatcaccgcggcggttgcctgatgctccaggatacaggcatctccttgctcatcccaccaggtgctgtggctgtgggccgccaggagcgggtgtctttgatcctggtgtgggacctgtcggacgccccatcgctgtcccaagcccaggggctggtaagccctgtggtggcatgtggcccccatggggcctccttcctgaagccttgcactctcacgttcaaacactgtgccgagcagcccagccatgctcgcacctacagcagcaacactaccctgctggatgccaaggtatggaggcccctggggcggccgggggcccacgcctcccgggatgagtgtcgcatccacctctcccacttcagcctctacacctgtgtgctggaggcacctgtggggcgcgaagcccgcaaatggctgcagctggccgtattctgctcaccgctggtgccaggacagtcccatctgcaactgcgtatctacttcctcaacaacacgccctgcgccctgcagtgggcactgaccaacgagcagccccatggtgggcgcctgcgtgggccctgccagctcttcgacttcaatggggctaggggcgaccagtgcctgaagctcacgtacatctcagagggttgggagaatgtggatgacagcagttgccagctggttccccatctccacatctggcatggaaagtgccccttccgctccttctgcttccggagaaaagcagccgatgagaatgaggactgttcagcactaaccaatgagatcattgtcaccatgcacaccttccaggatggcttggagaccaagtatatggaaatcctcagattccaggcatcagaggaggaatcctgggcagcgccaccacctgtttcccagccgcccccatgcaataggctgcccccagagctctttgagcagctgcggatgttattggagccaaacagcatcaccggcaatgactggcgcagactggcctcccacctggggctttgcggcatgaagatccggttcctgtcctgccagcgcagccccgcagcggccatcctggagttgtttgaggagcagaacggcagcctgcaggagctgcactacctcatgaccgtcatggagcggctagactgcgcctccgccatccagaactacctgagtgggacacacggcggcagcccaggccccgagcgcgggggcgcccgggataaccagggcctggagctggacgagaagctctgagc

SEQ ID NO: 198154 - DNA, 3812 bp, Homo sapiens
  Payload ID: 19092
  Gene Name: unc-5 netrin receptor A
  Uniprot ID: Q6ZN44
  ENST ID: ENST00000329542
  CDS Start-End: 275-2803
accggcccgctctccggctgcgggctccgcggcgcggctggctcggtgcgcggcgcggctggcgctgcgctccgccccggctgcattgctgcgctcccgtgcccaagggagccacgcgccgcgtgcgcccggcagccggccgcccggaggcagcgcagtccgctggcatgggccccgggggcgccccgagctggggctccgggctgaggcgctaaagccgccctcccgcccgcggggccccgcgcccggcccgcccgcctgcccgcccgcggccatggccgtccggcccggcctgtggccagcgctcctgggcatagtcctcgccgcttggctccgcggctcgggtgcccagcagagtgccaccgtggccaacccagtgcctggtgccaacccggacctgcttccccacttcctggtggagcccgaggatgtgtacatcgtcaagaacaagccagtgctgcttgtgtgcaaggccgtgcccgccacgcagatcttcttcaagtgcaacggggagtgggtgcgccaggtggaccacgtgatcgagcgcagcacagacgggagcagtgggctgcccaccatggaggtccgcattaatgtctcaaggcagcaggtcgagaaggtgttcgggctggaggaatactggtgccagtgcgtggcatggagctcctcgggcaccaccaagagtcagaaggcctacatccgcatagcctatttgcgcaagaacttcgagcaggagccgctggccaaggaggtgtccctggagcagggcatcgtgctgccctgccgtccaccggagggcatccctccagccgaggtggagtggctccggaacgaggacctggtggacccgtccctggaccccaatgtatacatcacgcgggagcacagcctggtggtgcgacaggcccgccttgctgacacggccaactacacctgcgtggccaagaacatcgtggcacgtcgccgcagcgcctccgctgctgtcatcgtctacgtggacggcagctggagcccgtggagcaagtggtcggcctgtgggctggactgcacccactggcggagccgtgagtgctctgacccagcaccccgcaacggaggggaggagtgccagggcactgacctggacacccgcaactgtaccagtgacctctgtgtacacactgcttctggccctgaggacgtggccctctatgtgggcctcatcgccgtggccgtctgcctggtcctgctgctgcttgtcctcatcctcgtttattgccggaagaaggaggggctggactcagatgtggctgactcgtccattctcacctcaggcttccagcccgtcagcatcaagcccagcaaagcagacaacccccatctgctcaccatccagccggacctcagcaccaccaccaccacctaccagggcagtctctgtccccggcaggatgggcccagccccaagttccagctcaccaatgggcacctgctcagccccctgggtggcggccgccacacactgcaccacagctctcccacctctgaggccgaggagttcgtctcccgcctctccacccagaactacttccgctccctgccccgaggcaccagcaacatgacctatgggaccttcaacttcctcgggggccggctgatgatccctaatacaggaatcagcctcctcatccccccagatgccataccccgagggaagatctatgagatctacctcacgctgcacaagccggaagacgtgaggttgcccctagctggctgtcagaccctgctgagtcccatcgttagctgtggaccccctggcgtcctgctcacccggccagtcatcctggctatggaccactgtggggagcccagccctgacagctggagcctgcgcctcaaaaagcagtcgtgcgagggcagctgggaggatgtgctgcacctgggcgaggaggcgccctcccacctctactactgccagctggaggccagtgcctgctacgtcttcaccgagcagctgggccgctttgccctggtgggagaggccctcagcgtggctgccgccaagcgcctcaagctgcttctgtttgcgccggtggcctgcacctccctcgagtacaacatccgggtctactgcctgcatgacacccacgatgcactcaaggaggtggtgcagctggagaagcagctggggggacagctgatccaggagccacgggtcctgcacttcaaggacagttaccacaacctgcgcctatccatccacgatgtgcccagctccctgtggaagagtaagctccttgtcagctaccaggagatccccttttatcacatctggaatggcacgcagcggtacttgcactgcaccttcaccctggagcgtgtcagccccagcactagtgacctggcctgcaagctgtgggtgtggcaggtggagggcgacgggcagagcttcagcatcaacttcaacatcaccaaggacacaaggtttgctgagctgctggctctggagagtgaagcgggggtcccagccctggtgggccccagtgccttcaagatccccttcctcattcggcagaagataatttccagcctggacccaccctgtaggcggggtgccgactggcggactctggcccagaaactccacctggacagccatctcagcttctttgcctccaagcccagccccacagccatgatcctcaacctgtgggaggcgcggcacttccccaacggcaacctcagccagctggctgcagcagtggctggactgggccagccagacgctggcctcttcacagtgtcggaggctgagtgctgaggccggccaggcccgacacctacactctcaccagctttggcacccaccaaggacaggcagaagccggacaggggcccttccccacaccggggagagctgctcggacaggccccctcccggccgaagctgtcccttaatgctggtccttcagaccctgcccgaactcccacctctccatggcctgcctagccaggctggcactgccactcacactcggccccagggcccaggagggacagtgcctggagcctgggccaggcccagcccatctgtgtgtgtgtatgtgcgtgtgatgctacctctcctcccgtccctctccaggggccccgcatacacacggccatgcacgcacacactgggcctgggccagggccccagagctcctgcctgagctggaccttatgcaaacatttctgtgcctgctgggtaggggcacgtctgaggggccctgctccaagcctgcaggaccgagggccacagccggacagggggtagcccctggattcaggcacacgaccaccacacgagcacgtgccacgcatgcctcgtgtgctcatctcacacacacccccctcccgggtcacgcagacaccccccaaccacacacatctcatgctgtacacctgaggctgctcacgtctcacgcccagtgttggtgcacatttgcctctcacatgctgccctctccacccacccagggacaccccacggctcctccctgcccctgcccctcccccagccttgaggtgccctgcccggcggggcctgtgaatatgcaatgggagtcccaggctgtacagtggtgagtgtgtgtgtggcgtggcgtgcccgtccccagggctggctggtgccccacgcggggcctgtcatgtgaagctcgtgtcctgactttgtcttaagtgcattcacgcacttactcttggccttatgtacacagccttgcccggccgccggggcacataggggttttatcgggcgtgaatgtaaataaattatatatatatattgc

SEQ ID NO: 198155 - DNA, 1031 bp, Homo sapiens
  Payload ID: 19092
  Gene Name: unc-5 netrin receptor A
  ENST ID: ENST00000509580
  CDS Start-End: 1-1031
gcctggtgccaacccggacctgcttccccacttcctggtggagcccgaggatgtgtacatcgtcaagaacaagccagtgctgcttgtgtgcaaggccgtgcccgccacgcagatcttcttcaagtgcaacggggagtgggtgcgccaggtggaccacgtgatcgagcgcagcacagacgggagcagtgggctgcccaccatggaggtccgcattaatgtctcaaggcagcaggtcgagaaggtgttcgggctggaggaatactggtgccagtgcgtggcatggagctcctcgggcaccaccaagagtcagaaggcctacatccgcatagcctatttgcgcaagaacttcgagcaggagccgctggccaaggaggtgtccctggagcagggcatcgtgctgccctgccgtccaccggagggcatccctccagccgaggtggagtggctccggaacgaggacctggtggacccgtccctggaccccaatgtatacatcacgcgggagcacagcctggtggtgcgacaggcccgccttgctgacacggccaactacacctgcgtggccaagaacatcgtggcacgtcgccgcagcgcctccgctgctgtcatcgtctacgtgaacggtgggtggtcgacgtggaccgagtggtccgtctgcagcgccagctgtgggcgcggctggcagaaacggagccggagctgcaccaacccggcgcctctcaacgggggcgctttctgtgaggggcagaatgtccagaaaacagcctgcgccaccctgtgcccagtggacggcagctggagcccgtggagcaagtggtcggcctgtgggctggactgcacccactggcggagccgtgagtgctctgacccagcaccccgcaacggaggggaggagtgccagggcactgacctggacacccgcaactgtaccagtgacctctgtgtacacactgcttctggccctgaggacgtggccctctatgtgggcctcatcgccgtggccgtctgcctggtcctgctgctgcttgtcc

SEQ ID NO: 198156 - DNA, 1518 bp, Homo sapiens
  Payload ID: 19092
  Gene Name: unc-5 netrin receptor A
  ENST ID: ENST00000513890
  CDS Start-End: 1-254
gtgcccagcagagtgccaccgtggccaacccagtgcctggtgccaacccggacctgcttccccacttcctggtggagcccgaggatgtgtacatcgtcaagaacaagccagtgctgcttgtgtgcaaggccgtgcccgccacgcagatcttcttcaagtgcaacggggagtgggtgcgccaggtggaccacgtgatcgagcgcagcacagacgggagcagtgagggagatagagagggttggcggccaatgtagcccaacagaaccctgggcaccaacacctcccaggaccagagcctctcccggccccagcggaggtgccagaggcctccctgcccagcagcagggcccaccttgtcttgctgggagggtctgcaggagaaccgcagggtcctcttctgccccgagcatccgactccagcctcccatggccggaacatctgaacgttcattgatctcatcgatttctcaacccaaagccatcgagtgctttgaggtgaagaaaaaggctttccttacccacggcagataccacggcagtggcgccacgccgccaaagaccaaagaccccaaaccagaaacgttctgtggtcagacagggctgcccaccatggaggtccgcattaatgtctcaaggcagcaggtcgagaaggtgttcgggctggaggaatactggtgccagtgcgtggcatggagctcctcgggcaccaccaagagtcagaaggcctacatccgcatagcctatttgcgcaagaacttcgagcaggagccgctggccaaggaggtgtccctggagcagggcatcgtgctgccctgccgtccaccggagggcatccctccagccgaggtggagtggctccggaacgaggacctggtggacccgtccctggaccccaatgtatacatcacgcgggagcacagcctggtggtgcgacaggcccgccttgctgacacggccaactacacctgcgtggccaagaacatcgtggcacgtcgccgcagcgcctccgctgctgtcatcgtctacgtggacggcagctggagcccgtggagcaagtggtcggcctgtgggctggactgcacccactggcggagccgtgagtgctctgacccagcaccccgcaacggaggggaggagtgccagggcactgacctggacacccgcaactgtaccagtgacctctgtgtacacactgcttctggccctgaggacgtggccctctatgtgggcctcatcgccgtggccgtctgcctggtcctgctgctgcttgtcctcatcctcgtttattgccggaagaaggaggggctggactcagatgtggctgactcgtccattctcacctcaggcttccagcccgtcagcatcaagcccagcaaagcagacaacccccatctgctcaccatccagccggacctcagcaccaccaccaccacctaccagggcagtctctgtccccggcaggatgggcccagccccaagttccagctcaccaatgggcacctgctcagccccctgggt

SEQ ID NO: 198157 - DNA, 6841 bp, Homo sapiens
  Payload ID: 19093
  Gene Name: unc-5 netrin receptor B
  Uniprot ID: Q8IZJ1
  ENST ID: ENST00000335350
  CDS Start-End: 417-3254
attgtggcaggcggctggggccggctagggcgccggagccgcacgcagccgcggggctccgagaggcgcgcactggggctgggactgcgcggcgccgccgctgcgagcgccactgagcggtcgcgcaacttcggaggcacagcgccggagccaggcgagcgctcagagacccggagccagaggggcgcgccggagcctcgttcgagagccggcgccaggcacccaccgcgctccgagtgccaggcggccctccgcgcagcgtggcttccgctgcccccacggaaggcacgggctggcgctgccgggcgccggggaggacggcgaggaggaggcggcggcggcggagacggcggcggcgagactggggccagggagacagccctgggggagaggcgcccgaaccaggccgcgggagcatgggggcccggagcggagctcggggcgcgctgctgctggcactgctgctctgctgggacccgaggctgagccaagcaggcactgattctggcagcgaggtgctccctgactccttcccgtcagcgccagcagagccgctgccctacttcctgcaggagccacaggacgcctacattgtgaagaacaagcctgtggagctccgctgccgcgccttccccgccacacagatctacttcaagtgcaacggcgagtgggtcagccagaacgaccacgtcacacaggaaggcctggatgaggccaccggcctgcgggtgcgcgaggtgcagatcgaggtgtcgcggcagcaggtggaggagctctttgggctggaggattactggtgccagtgcgtggcctggagctccgcgggcaccaccaagagtcgccgagcctacgtccgcatcgcctacctgcgcaagaacttcgatcaggagcctctgggcaaggaggtgcccctggaccatgaggttctcctgcagtgccgcccgccggagggggtgcctgtggccgaggtggaatggctcaagaatgaggatgtcatcgaccccacccaggacaccaacttcctgctcaccatcgaccacaacctcatcatccgccaggcccgcctgtcggacactgccaactatacctgcgtggccaagaacatcgtggccaaacgccggagcaccactgccaccgtcatcgtctacgtgaatggcggctggtccagctgggcagagtggtcaccctgctccaaccgctgtggccgaggctggcagaagcgcacccggacctgcaccaaccccgctccactcaacggaggggccttctgcgagggccaggcattccagaagaccgcctgcaccaccatctgcccagtcgatggggcgtggacggagtggagcaagtggtcagcctgcagcactgagtgtgcccactggcgtagccgcgagtgcatggcgcccccaccccagaacggaggccgtgactgcagcgggacgctgctcgactctaagaactgcacagatgggctgtgcatgcaaaataagaaaactctaagcgaccccaacagccacctgctggaggcctcaggggatgcggcgctgtatgcggggctcgtggtggccatcttcgtggtcgtggcaatcctcatggcggtgggggtggtggtgtaccgccgcaactgccgtgacttcgacacagacatcactgactcatctgctgccctgactggtggtttccaccccgtcaactttaagacggcaaggcccagcaacccgcagctcctacacccctctgtgcctcctgacctgacagccagcgccggcatctaccgcggacccgtgtatgccctgcaggactccaccgacaaaatccccatgaccaactctcctctgctggaccccttacccagccttaaggtcaaggtctacagctccagcaccacgggctctgggccaggcctggcagatggggctgacctgctgggggtcttgccgcctggcacataccctagcgatttcgcccgggacacccacttcctgcacctgcgcagcgccagcctcggttcccagcagctcttgggcctgccccgagacccagggagcagcgtcagcggcacctttggctgcctgggtgggaggctcagcatccccggcacaggggtcagcttgctggtgcccaatggagccattccccagggcaagttctacgagatgtatctactcatcaacaaggcagaaagtaccctcccgctttcagaagggacccagacagtattgagcccctcggtgacctgtggacccacaggcctcctgctgtgccgccccgtcatcctcaccatgccccactgtgccgaagtcagtgcccgtgactggatctttcagctcaagacccaggcccaccagggccactgggaggaggtggtgaccctggatgaggagaccctgaacacaccctgctactgccagctggagcccagggcctgtcacatcctgctggaccagctgggcacctacgtgttcacgggcgagtcctattcccgctcagcagtcaagcggctccagctggccgtcttcgcccccgccctctgcacctccctggagtacagcctccgggtctactgcctggaggacacgcctgtagcactgaaggaggtgctggagctggagcggactctgggcggatacttggtggaggagccgaaaccgctaatgttcaaggacagttaccacaacctgcgcctctccctccatgacctcccccatgcccattggaggagcaagctgctggccaaataccaggagatccccttctatcacatttggagtggcagccagaaggccctccactgcactttcaccctggagaggcacagcttggcctccacagagctcacctgcaagatctgcgtgcggcaagtggaaggggagggccagatattccagctgcataccactctggcagagacacctgctggctccctggacactctctgctctgcccctggcagcactgtcaccacccagctgggaccttatgccttcaagatcccactgtccatccgccagaagatatgcaacagcctagatgcccccaactcacggggcaatgactggcggatgttagcacagaagctctctatggaccggtacctgaattactttgccaccaaagcgagccccacgggtgtgatcctggacctctgggaagctctgcagcaggacgatggggacctcaacagcctggcgagtgccttggaggagatgggcaagagtgagatgctggtggctgtggccaccgacggggactgctgagcctcctgggacagcgggctggcagggactggcaggaggcaggtgcagggaggcctggggcagcctcctgatggggatgtttggcctctgcttcctcccagttcacagccagagttgcctctcctcctcctcttccccaacccccagaccatgaccagccttagaaaatccatgtactctgttgttagagggcccagagttccttctccacccccgctctctctctcttggcctgagatctctgtgcaggaaccaagatggggctgaagcctctggaggcagttggttgggggcgggcaggcaggaggccctccctccacccccccaccctcagcccggcaacttctgggttccatgggttttagttccgttctcgttttcttcctccgttattgatttctcctttctccctaagcccccttctgcttccacgcccttttcctctttgaagagtcaagtacaattcagacaaactgctttctcctgtccaaaagcaaaaaggcaaaggaaagaaagaaagcttcagaccgctagtaaggctcaaagaagaagaaaaacaccaaaaccacaagggaaaagaaaaacccagtttcttaggaaacgcaaacgatttattatccagattatttggataagtcctttttaagaaaaaaaaagaaaatgaaaaacaacacaaaaaaaatagaaaactcttttcttgagtgtggatgagaatgggcacgctcacacttctggccaggagtgaatgtgcctgtgtgtgtgtgtgtgtgtgtgtgtgtgtgtgtacatgtacgcgtgtgcattgaggagagagagactgaacagagagtactttgctgctaacgaatccatcttggactaaattctgacaaggcctcagtttccccagttgtgcagggagtaggtcagacagggttttcactgtctagatttagctggttagattttcctctaaaatcttaagcagatgctgaatccataaagccaaggagtgctgagggctggagtgggtgggccctccctcccacagccccagggagatacatctggactcctgggaatctggattaagaaagttgggatgaaagaggaggactgctcaggccagttgtgagccagggagaatgttccagtctggttttggtctggtggctcctagaaagggatgtggcccagaagtgggactcaaacagagagatgaagtaggggaggggagtcctccacgggcatctctctcctggcggctggatagctttaccctagggtggggccagccctgacaccctcatcccctcctcagcccagcagcctctagagcagcgtggtgctctcttgatggccaggaatccagaatctgcccttccccaaccttggtttctccttctgtaaagcagagtgatggctgagaagtcctctctagctgcagaagcctgagcttcccggtgtcagtcagctctgcaacgtgggagccttggaggcgggtggcctggctgtgcttcatatgcccaggagtggagaaggaggctgagaagctggtttcccagctctgatctccacaggcacctcctataaccctcctctcacccaccccgctacggtctgagagatctgaaataacctttcccagtgggcagggttgccagggttgaggggacagcacataccacccccacccaacctgttcgaggggccctgcatggcacgggatgagtccctgccctgtgcagctgcctggcagtggctgggacaaggatcttgcagccagcacagaggcctcttcaaaggcctctccctcttggcactccaggcaaggcaggtgcccgcttccccaacacctccaggcagtgaccctagggcatgccccagcaggtctccgagcagccactgggacccgtctcagcacatcctggcctttgaaagtctgatatcctgagaggagggcaggttttagggccgcagttccagccagcgtccccagcctggcttccctgccatggactcagtagctcgtggggcttcttaccacccaccagccccgctggggtgcggcctggctgtgggcaaaggaggacttgcctggagatttgagagaagattccttctaccagggctgctgaggggccaggcctgcatcaggggctaggctctggctgggcccggaggctgagactaaggctttcgaccctggtgcctccatgtggatgctgcctcagacaaaggcagtgagccttccctgccaaagtgcccatcccatgggctcggcctcactggtcactgttagcccatgaacacgtgtgggcctcggtcacgtggctttgagggcagtctgaccaggctagaccacacgtgccgtgacagggggtgccattcccctcgcaggctctaatgtgcccacatgtagcctggcagtccaaagaccaagaatcaacttgcaaatctgccattaaactgctgtgcgacttcaggcatatcactgccttctctgggcttcagtgtccttttcatacctagaagtctgcggtctgaggctctttgggttcagacacactgttctaggcttctgtaggggaccttgtgatctgccgtgcccctcctccctgttcttttctgtcctccccaccccaccctcagaagctgcttgctctgcccccaggacaggagcttgacggatgaagtgcagccagccacccaggtgccatttccagtctgacttccagaaatgtgcaccatgtcctagagcacagacccattggctggagcctcctgggagggttcaaaccatcagctctatgagaaatgcccagaaaggctttgccgactccatccgtctgtggaggctgcctgcctccggggtgggatgggtggtttctcctccaattcagacccaagaggtagcccccgagggcatgtacctggtgggaagcagctcaggtacccttgggggttgcagggcccttacgcaggtatttctctctctctcctctctggggtgcgtgtgtgcgtgcgcgtgtgcgtgcctatgcttttctctgtgggcacatcaggatgcccctcggagagcatgtgcacgtgtccccacctgagcgagcgtgtgtgtgtgctcctctgcgtcccaggtttggacgtctagggtttggtgtgcctgtcttctgccctccctgagcccacagggtcagtcaatgtatcttctacgtgcctctccctctgccttctctcacagtgcccccggctccagagctcaggggtaggggttctcctgagggtgcaggggatccttctcatctcctggaccctccagggcactctggtccctattccccagctcctaggcagctgagccgggtcccttaggggaggtgaccaggagctttggtgcagggagctcttggtggggcaaagggctggacccctgccaggtctgtggacatggttatatgcccgggagaggggggtgcagggccccagggatggcccccaatcccacctctgtttattctgtaaactgcaacctataaataacctttagcattcctattgtaacaaaattaatttttatgaaataaattatatttcctagtctaataaaa

SEQ ID NO: 198158 - DNA, 6451 bp, Homo sapiens
  Payload ID: 19093
  Gene Name: unc-5 netrin receptor B
  Uniprot ID: Q8IZJ1
  ENST ID: ENST00000373192
  CDS Start-End: 60-2864
gagactggggccagggagacagccctgggggagaggcgcccgaaccaggccgcgggagcatgggggcccggagcggagctcggggcgcgctgctgctggcactgctgctctgctgggacccgaggctgagccaagcaggcactgattctggcagcgaggtgctccctgactccttcccgtcagcgccagcagagccgctgccctacttcctgcaggagccacaggacgcctacattgtgaagaacaagcctgtggagctccgctgccgcgccttccccgccacacagatctacttcaagtgcaacggcgagtgggtcagccagaacgaccacgtcacacaggaaggcctggatgaggccaccggcctgcgggtgcgcgaggtgcagatcgaggtgtcgcggcagcaggtggaggagctctttgggctggaggattactggtgccagtgcgtggcctggagctccgcgggcaccaccaagagtcgccgagcctacgtccgcatcgcctacctgcgcaagaacttcgatcaggagcctctgggcaaggaggtgcccctggaccatgaggttctcctgcagtgccgcccgccggagggggtgcctgtggccgaggtggaatggctcaagaatgaggatgtcatcgaccccacccaggacaccaacttcctgctcaccatcgaccacaacctcatcatccgccaggcccgcctgtcggacactgccaactatacctgcgtggccaagaacatcgtggccaaacgccggagcaccactgccaccgtcatcgtctacgtgaatggcggctggtccagctgggcagagtggtcaccctgctccaaccgctgtggccgaggctggcagaagcgcacccggacctgcaccaaccccgctccactcaacggaggggccttctgcgagggccaggcattccagaagaccgcctgcaccaccatctgcccagtcgatggggcgtggacggagtggagcaagtggtcagcctgcagcactgagtgtgcccactggcgtagccgcgagtgcatggcgcccccaccccagaacggaggccgtgactgcagcgggacgctgctcgactctaagaactgcacagatgggctgtgcatgcaaatgctggaggcctcaggggatgcggcgctgtatgcggggctcgtggtggccatcttcgtggtcgtggcaatcctcatggcggtgggggtggtggtgtaccgccgcaactgccgtgacttcgacacagacatcactgactcatctgctgccctgactggtggtttccaccccgtcaactttaagacggcaaggcccagcaacccgcagctcctacacccctctgtgcctcctgacctgacagccagcgccggcatctaccgcggacccgtgtatgccctgcaggactccaccgacaaaatccccatgaccaactctcctctgctggaccccttacccagccttaaggtcaaggtctacagctccagcaccacgggctctgggccaggcctggcagatggggctgacctgctgggggtcttgccgcctggcacataccctagcgatttcgcccgggacacccacttcctgcacctgcgcagcgccagcctcggttcccagcagctcttgggcctgccccgagacccagggagcagcgtcagcggcacctttggctgcctgggtgggaggctcagcatccccggcacaggggtcagcttgctggtgcccaatggagccattccccagggcaagttctacgagatgtatctactcatcaacaaggcagaaagtaccctcccgctttcagaagggacccagacagtattgagcccctcggtgacctgtggacccacaggcctcctgctgtgccgccccgtcatcctcaccatgccccactgtgccgaagtcagtgcccgtgactggatctttcagctcaagacccaggcccaccagggccactgggaggaggtggtgaccctggatgaggagaccctgaacacaccctgctactgccagctggagcccagggcctgtcacatcctgctggaccagctgggcacctacgtgttcacgggcgagtcctattcccgctcagcagtcaagcggctccagctggccgtcttcgcccccgccctctgcacctccctggagtacagcctccgggtctactgcctggaggacacgcctgtagcactgaaggaggtgctggagctggagcggactctgggcggatacttggtggaggagccgaaaccgctaatgttcaaggacagttaccacaacctgcgcctctccctccatgacctcccccatgcccattggaggagcaagctgctggccaaataccaggagatccccttctatcacatttggagtggcagccagaaggccctccactgcactttcaccctggagaggcacagcttggcctccacagagctcacctgcaagatctgcgtgcggcaagtggaaggggagggccagatattccagctgcataccactctggcagagacacctgctggctccctggacactctctgctctgcccctggcagcactgtcaccacccagctgggaccttatgccttcaagatcccactgtccatccgccagaagatatgcaacagcctagatgcccccaactcacggggcaatgactggcggatgttagcacagaagctctctatggaccggtacctgaattactttgccaccaaagcgagccccacgggtgtgatcctggacctctgggaagctctgcagcaggacgatggggacctcaacagcctggcgagtgccttggaggagatgggcaagagtgagatgctggtggctgtggccaccgacggggactgctgagcctcctgggacagcgggctggcagggactggcaggaggcaggtgcagggaggcctggggcagcctcctgatggggatgtttggcctctgcttcctcccagttcacagccagagttgcctctcctcctcctcttccccaacccccagaccatgaccagccttagaaaatccatgtactctgttgttagagggcccagagttccttctccacccccgctctctctctcttggcctgagatctctgtgcaggaaccaagatggggctgaagcctctggaggcagttggttgggggcgggcaggcaggaggccctccctccacccccccaccctcagcccggcaacttctgggttccatgggttttagttccgttctcgttttcttcctccgttattgatttctcctttctccctaagcccccttctgcttccacgcccttttcctctttgaagagtcaagtacaattcagacaaactgctttctcctgtccaaaagcaaaaaggcaaaggaaagaaagaaagcttcagaccgctagtaaggctcaaagaagaagaaaaacaccaaaaccacaagggaaaagaaaaacccagtttcttaggaaacgcaaacgatttattatccagattatttggataagtcctttttaagaaaaaaaaagaaaatgaaaaacaacacaaaaaaaatagaaaactcttttcttgagtgtggatgagaatgggcacgctcacacttctggccaggagtgaatgtgcctgtgtgtgtgtgtgtgtgtgtgtgtgtgtgtgtacatgtacgcgtgtgcattgaggagagagagactgaacagagagtactttgctgctaacgaatccatcttggactaaattctgacaaggcctcagtttccccagttgtgcagggagtaggtcagacagggttttcactgtctagatttagctggttagattttcctctaaaatcttaagcagatgctgaatccataaagccaaggagtgctgagggctggagtgggtgggccctccctcccacagccccagggagatacatctggactcctgggaatctggattaagaaagttgggatgaaagaggaggactgctcaggccagttgtgagccagggagaatgttccagtctggttttggtctggtggctcctagaaagggatgtggcccagaagtgggactcaaacagagagatgaagtaggggaggggagtcctccacgggcatctctctcctggcggctggatagctttaccctagggtggggccagccctgacaccctcatcccctcctcagcccagcagcctctagagcagcgtggtgctctcttgatggccaggaatccagaatctgcccttccccaaccttggtttctccttctgtaaagcagagtgatggctgagaagtcctctctagctgcagaagcctgagcttcccggtgtcagtcagctctgcaacgtgggagccttggaggcgggtggcctggctgtgcttcatatgcccaggagtggagaaggaggctgagaagctggtttcccagctctgatctccacaggcacctcctataaccctcctctcacccaccccgctacggtctgagagatctgaaataacctttcccagtgggcagggttgccagggttgaggggacagcacataccacccccacccaacctgttcgaggggccctgcatggcacgggatgagtccctgccctgtgcagctgcctggcagtggctgggacaaggatcttgcagccagcacagaggcctcttcaaaggcctctccctcttggcactccaggcaaggcaggtgcccgcttccccaacacctccaggcagtgaccctagggcatgccccagcaggtctccgagcagccactgggacccgtctcagcacatcctggcctttgaaagtctgatatcctgagaggagggcaggttttagggccgcagttccagccagcgtccccagcctggcttccctgccatggactcagtagctcgtggggcttcttaccacccaccagccccgctggggtgcggcctggctgtgggcaaaggaggacttgcctggagatttgagagaagattccttctaccagggctgctgaggggccaggcctgcatcaggggctaggctctggctgggcccggaggctgagactaaggctttcgaccctggtgcctccatgtggatgctgcctcagacaaaggcagtgagccttccctgccaaagtgcccatcccatgggctcggcctcactggtcactgttagcccatgaacacgtgtgggcctcggtcacgtggctttgagggcagtctgaccaggctagaccacacgtgccgtgacagggggtgccattcccctcgcaggctctaatgtgcccacatgtagcctggcagtccaaagaccaagaatcaacttgcaaatctgccattaaactgctgtgcgacttcaggcatatcactgccttctctgggcttcagtgtccttttcatacctagaagtctgcggtctgaggctctttgggttcagacacactgttctaggcttctgtaggggaccttgtgatctgccgtgcccctcctccctgttcttttctgtcctccccaccccaccctcagaagctgcttgctctgcccccaggacaggagcttgacggatgaagtgcagccagccacccaggtgccatttccagtctgacttccagaaatgtgcaccatgtcctagagcacagacccattggctggagcctcctgggagggttcaaaccatcagctctatgagaaatgcccagaaaggctttgccgactccatccgtctgtggaggctgcctgcctccggggtgggatgggtggtttctcctccaattcagacccaagaggtagcccccgagggcatgtacctggtgggaagcagctcaggtacccttgggggttgcagggcccttacgcaggtatttctctctctctcctctctggggtgcgtgtgtgcgtgcgcgtgtgcgtgcctatgcttttctctgtgggcacatcaggatgcccctcggagagcatgtgcacgtgtccccacctgagcgagcgtgtgtgtgtgctcctctgcgtcccaggtttggacgtctagggtttggtgtgcctgtcttctgccctccctgagcccacagggtcagtcaatgtatcttctacgtgcctctccctctgccttctctcacagtgcccccggctccagagctcaggggtaggggttctcctgagggtgcaggggatccttctcatctcctggaccctccagggcactctggtccctattccccagctcctaggcagctgagccgggtcccttaggggaggtgaccaggagctttggtgcagggagctcttggtggggcaaagggctggacccctgccaggtctgtggacatggttatatgcccgggagaggggggtgcagggccccagggatggcccccaatcccacctctgtttattctgtaaactgcaacctataaataacctttagcattcctattgtaacaaaattaatttttatgaaataaattatatttcctagtctaataaaa

SEQ ID NO: 198159 - DNA, 9875 bp, Homo sapiens
  Payload ID: 19094
  Gene Name: unc-5 netrin receptor C
  Uniprot ID: O95185
  ENST ID: ENST00000453304
  CDS Start-End: 350-3145
cagacttcggcgtgcggcggagctgcggctgctcctgctgctggggggagcggcggaggtggccgccttgcgcctccctggacttcccaagtgggggcagagcagtcgctcgcgggagacgtcagttagaaggcattgggaaagagggaccttcaaactcctcctcggcgtctcctctcctcccccttttggcccctgcctttggagaaagtggagtgtggcgcttggttgtcgttatttcttcggactgcttcgcggtgcacggattcagcttctgcccagtggggctttcagctgtttgcgcgtctctctgtccccctcccctccccccggcacacctctgtctacgatgaggaaaggtctgcgggcgacagcggcccgctgcggactgggactgggatacttgctgcaaatgctcgtgctacctgccctggccctgctcagcgccagcggcactggctccgccgcccaagatgatgacttttttcatgaactcccagaaacttttccttctgatccacctgagcctctgccacatttccttattgagcctgaagaagcttatattgtgaagaataagcccgtgaacctgtactgtaaagcaagccctgccacccagatctatttcaagtgtaatagtgaatgggttcatcagaaggaccacatagtagatgaaagagtagatgaaacttccggtctcattgtccgggaagtgagcattgagatttcgcgccagcaagtggaagaactctttggacctgaagattactggtgccagtgtgtggcctggagctccgcgggtaccacaaagagccggaaggcgtatgtgcgcattgcatatctacggaagacatttgagcaggaacccctaggaaaggaagtgtctttggaacaggaagtcttactccagtgtcgaccacctgaagggatcccagtggctgaggtggaatggttgaaaaatgaagacataattgatcccgttgaagatcggaatttttatattactattgatcacaacctcatcataaagcaggcccgactctctgatactgcaaattacacctgtgttgccaaaaacattgttgccaagaggaaaagtacaactgccactgtcatagtctatgtcaacggtggctggtccacctggacggagtggtctgtgtgtaacagccgctgtggacgagggtatcagaaacgtacaaggacttgtaccaacccggcaccactcaatgggggtgccttctgtgaagggcagagtgtgcagaaaatagcctgtactacgttatgcccagtggatggcaggtggacgccatggagcaagtggtctacttgtggaactgagtgcacccactggcgcaggagggagtgcacggcgccagcccccaagaatggaggcaaggactgcgacggcctcgtcttgcaatccaagaactgcactgatgggctttgcatgcagactgctcctgattcagatgatgttgctctctatgttgggattgtgatagcagtgatcgtttgcctggcgatctctgtagttgtggccttgtttgtgtatcggaagaatcatcgtgactttgagtcagatattattgactcttcggcactcaatgggggctttcagcctgtgaacatcaaggcagcaagacaagatctgctggctgtacccccagacctcacgtcagctgcagccatgtacagaggacctgtctatgccctgcatgacgtctcagacaaaatcccaatgaccaactctccaattctggatccactgcccaacctgaaaatcaaagtgtacaacacctcaggtgctgtcaccccccaagatgacctctctgagtttacgtccaagctgtcccctcagatgacccagtcgttgttggagaatgaagccctcagcctgaagaaccagagtctagcaaggcagactgatccatcctgtaccgcatttggcagcttcaactcgctgggaggtcaccttattgttcccaattcaggagtcagcttgctgattcccgctggggccattccccaagggagagtctacgaaatgtatgtgactgtacacaggaaagaaactatgaggccacccatggatgactctcagacacttttgacccctgtggtgagctgtgggcccccaggagctctgctcacccgcccagtcgtcctcactatgcatcactgcgcagaccccaataccgaggactggaaaatactgctcaagaaccaggcagcacagggacagtgggaggatgtggtggtggtcggggaggaaaacttcaccaccccctgctacattcagctggatgcagaggcctgccacatcctcacagagaacctcagcacctacgccctggtaggacattccaccaccaaagcggctgcgaagcgcctcaagctggccatctttgggcccctgtgctgctcctcgctggagtacagcatccgagtctactgtctggatgacacccaggatgccctgaaggaaattttacatcttgagagacagatgggaggacagctcctagaagaacctaaggctcttcattttaaaggcagcacccacaacctgcgcctgtcaattcacgatatcgcccattccctctggaagagcaaattgctggctaaatatcaggaaattccattttaccatgtttggagtggatctcaaagaaacctgcactgcaccttcactctggaaagatttagcctgaacacagtggagctggtttgcaaactctgtgtgcggcaggtggaaggagaagggcagatcttccagctcaactgcaccgtgtcagaggaacctactggcatcgatttgccgctgctggatcctgcgaacaccatcaccacggtcacggggcccagtgctttcagcatccctctccctatccggcagaagctctgtagcagcctggatgccccccagacgagaggccatgactggaggatgctggcccataagctgaacctggacaggtacttgaattactttgccaccaaatccagcccaactggcgtaatcctggatctttgggaagcacagaacttcccagatggaaacctgagcatgctggcagctgtcttggaagaaatgggaagacatgaaacggtggtgtccttagcagcagaagggcagtattaaccaccatgctggaaggggaaatgaaggacaaaaatgcacagggagtctgtggccgtccaggtgaatcacagctgaggaggaaatccagatgagaccaatgcacttcacaggcaagactgcagcaggagccagaaggaaaacagatacaactgcccatgtacatgcccactttactcggacatcatcacgggagttaagaaaaattgtgtaaatttgtaccttgaatttagctatcaacctaattttcctcttagttgggctgtatgctgtgtggtacaggatcttacagtttcctaggaaacgctttttattgctatccagatatatggataaactttcttaacaaacccaatttctacaaatgttgtttacatcaaattggacagggatgcagacactgtccatggctcgttctatttttgttcaaatcatttgaagttgaagctgtggacggtttgttgtgtctatttcagattagtaatttacagagaaatcacagacttttgctacaaatcgtgtgcatcaagtgtctcagataatcctcccatcagtgttctgtttctagaacttgtagaaccagtgttactgtttgtatcagggaagtggagaatctaagtgtaaaaaagaaataactaagactcctattccttggagggacccttctggtgccctttgggaataaagctgtagcactgcagggaagacagtgattcatgttcaaccccacaaacaagcatttttttcacaacatgtgtgtttgtttgtaatatgcaatatgaagtgtttttttttaaaggtattattattatttacaggtattctggtaaaatgatttttttaaatttctatttttgttagcagtgctgtttgttagtatttggttattgactagacctgtcccaccttttcacctatcaaggtgggtgtggtcatcagtttaattcaacatgcatcacttccttgaccttttacctttcccttattccaccccagaaaggtgattgataaatgctgaatggctttgtcagtctgttccttcagcttgctcaggcagggtctttctttctcctctgaggagtcttaaggagacgtgttctctattaagttcacttaatattgccgttgtgtggccccacgtcgactccctatggtgctctactctagaggcagtgtggttggaggaatggactctaaactggagatcaagaaaccagttctcattgtgggtctgtcactgtcttgttgcgccaccttgagaaagtcatttaaccacacgacctcagtgtcctcactagaaagtgaaagggtgggattagatcatctccaagttctgaaatgctcaacttccaccgtgatgcctccagtctcattcatcagtctgaagaccacaatggactctgacctggatcatcatttaaaaatcatcagctggtcttttgcccaggctatgttacgcctttcaagtagttctgacaaggaagatgattattctaaccagcattatgatgttgtttgtttggcctgagtcgctctgcatcattgcattatgctgttcactgagagatgacatccctttattatcattttcttagcctctcttgggatgcccctgcccccagccttcctgactggttgcaaattctgttttttattattgtcttggcatcttgatatctagaccactcctacaagtttatctggcagtaggaacttggtgcatttttttctacgctacacccccccacccttaatctttctttgctgtcataatattcagtagcatttataaaagctgtctagttagctctttaaaaacttttgtcctgcaaaatgtttgttagtcaacacactactttgtgtaaacaactattatgtttccttgggaccatcacaagctctttaacaaacacaaggactcaattcattcagcaggtggggattaaagaatcaaagcccagtagcaaaaccaaaactgaagaacaagcagacatgtgtatgaatcggaacctttagaacatgactgtggtttacttttaggctggaggcacacaagttgctgaacagacttgaattatacatgtgcttccatctttccatgtttccgctcctattttggtagcatcttgagattccttgatgcctccgccatcctcatccctgaggaactgctgataccttgctatggaacctcttctttctttcatgctttttattccgtatcttctgttttggacatacatacatatattctataaaatctctctcagcccaccccctgcattaggatttccatatttaaaatatttgtacactgactggggaagggagagattgcactataaacaagttcagtggatgtttgtagcaatgagtaaaactgtattctaaattaaaaatcaaatatatatacacgcagttatacacacacattttttaaaaggaggaggaggaaagagagctattgtccattcctacattttgaaataaacttgtcaagattacgcatcagtaccagggttgtggaatcatctatggaaatcaagaactagaatctgaactgaatggtcaaagaaacttctatgcctagtgaaaactagaggggagcaactatgtagctatgaacatgaatcaattccataactgttactaaaaacttattttgactaaaaagtcaccaacacagaactattgaacacaaacaggaattgtttgtcttactgaagtcactgagaacccttggggttcacttcagatgcttttttggttcaacttcccaccaccagaaaagggaaaagtgattgatttcgtgtgtgaggtactcatctgtcagaacccttaatgtttcctattaagtgaatgacaacttccatacatacactatttataccaaataattttcactacaaattctgatttccttctcctttggagtaaagtaatagctgttagattgctttcaaacttagaaggtccagatataacagttcatttcataggaagccacttcatcaaccattctatgtgatacatcctgcttctttctacaccgctggagaggcagtttggctggtttcatttggatagaaaaaactatcatttgtgcatgctgccatctagtggtgtacaacacaatctaacctgagtttaatattcactagaatgtgtttgacgaagggaatgaaaacctgtagagttcaaggacctttatgacaaacagatgtagggaaattttcacttcaaatttataattttcttattctcacttttttttcatttgcatcactcatctcaatattaggtcactgtgagcccagtacatcaactcattcatacacaacatatcttcagttgcttcttgtaacagaactatgtaaaatctatataaaacagtctttgaagagttgtcatttttaacacttatggttttcattggggtttgtatactttaaatctccttttagttccttaatatttatctttggaaatgtaagaagtatctgcttagaaagaaataagtcttatatatgcgaatggaatactatgtctagggaagagaaaattggggttgttaatcaaagggaagaaagcagcttcttttctgctgaatttgggaatccaaaggcagaggtttcatcctgtttttattttcttcttatcacactctttcaagtttccttaatgtatctggaaggaatagaagttggattcagaattgataactggcatggtgatgacaaacctgtgtaacaccaaggttctcacagctaacagctgtttcacaaacggcatcttccaaatgaacagtcacctctgctatgcagaaaacccccatcctgctgtgagcaagttaggctcttcaagaactggacaacttttgggtgaggtgttcaatatcaaactgcataatcattagccattttcatatatactattttatagatttaagtctctcaactatcaaaaagtagagcgattttcaggagaaaaaagtcgtggggactgagttcaggacaccctgaaactatgcgaccagtaatttttttaaggtattttttcctacaagtaaggtatctgaaaagtcaacgttttgagggtggaatcaagacttttcacttctcctggcaaagagcaacaaggctcttgtctcgtgtccttctgtgtgtctctgtcaggatcacagcagctgtgctcttggtctgcttactcctctgtaatccacgtatgcagaagggagttaataaggtgatcaccatctccccagaattcaaaggtctttgcctctataaggtctgcccctatggggccaggaaaatataaacctatataaggacttgcaagagagcataaagaaggtagaaaaggtttacttgttgggttttcaagccttcaagttgaatgagtcttagcttttgctgggcagttgttctggacaagtcatcagtttcatgtggagaactcagtgtaagcccaaggctaatgaatgagaggggtcccatggaaacacagctgaaatgaaatgggactttatccatcttctttgagaatggaagagcttttgtgaagcagtacatcattgctcaagataatggttgataagcattagattttatagatctaataaggaaaatattttattatctcaagttaacaaaacatttttttacctctcgagtgcctcataggaccaactattactctttggcttttatttttctttttgtattatttttatatattctttaaccttgctgagctagtattgactgaaatctttagaactttgcctctgggcaatgaagtaatgtttctctaccctaagatatctatttgtataatctctggctgtaatgatcactttggaagatttcctttgcatctctaattatttctttttaatggaataaggcataagggggaataaatatattgtaaccaatgttatgtaaacccatatccatacaggccaggaaagccaaatgaagtcatttccagaattctagtgtgaaaaacctatttttgaaaagtggggagatggctttgtgtagaactgggtgggttttctctgcagactaagtctagccatgagcttccagatcctttagttttatcagccttgtgcttaccccattttcataaatgctactttaacagccagtcttcataagtcatggttcctaggttttcctgtcacctcattgtattcatctgtggtaggatattaacgggctcattcaaccaaatgtaatgtgtgcctcagacctatttagcatggttggggggcatcagcaggacaaaccaacaggtactccgcaagtgtactggcacagcaagcccaccaattattagcagctcttcatcagcctgctgtctactcagacgcttgcctactgaagggacctgtccagagatcttctggaatcccaggttgggaatctctgcagaatgtcgtgacagttgtggcccaactagcttctgagtagaaacaaggaagctaccctgagatatagtcagctgcccacctgccatagtatttgctactgaatgccagccttttaacataccatttcagatttgtccttcaacaaaaatataaattgcaagtcataccatttaagggtcttttacaaatatgtctaaattgtgtgtcatttttaagttccaaaggtctactggactaagtactatcagaccagctgtagaacctgatggcgctgatccggggtggaataaccctcagtactggtgtgtagaagatgaattgtaggcaggttttgctgatcagcagcctaaggattgatgggctctcttttggcctctgatcctgagcactatggaggcagcatcagagaatggggacctgagctacataggttctcaatgttaaaacaactctgttcggagtgacatataagagcaagaaatctacagctggtgtaaaatacctttgccttttctatcccgaaagtaacaaatggcatctgtacatgtaggggtaaaaactcagatgtctactcctccaggccatggacaagaaaaagtacagcagtcagaacagtggaacaagtgatttgcattctcttcttcacgctttcctagatctgccattggtagcgcagccctcgccctccagacataatgcatcgagcccagttgcagggaacatcactgtgtgtgtgtgatgtcatggtgttatatgtgttgagtttaatgttgagctgaagcaagttggtgaccttcctctttgctctttgtaaagaagacaccaatgtttgtcagagaaaaatccccagcagtcgtgttgaagaggcagtgtcatccacctactgtcccctttggaacagttcaactgcagaaaggtcggattgaggttttgtgctttgtcgtttttcttttttaaacaaaacatgacaaccttggcttttccgatatggaacacttttgttgttgtggagttccctcttgctgtatcttctatgcaattccttttctaaaaaaaccccccggcagaggcagagtgccctccggatatctgtccggcgccttgctgagtggtggaggtgagggataccagctccgggtgtgcctcttttctctccctggctgccaatcctgattttccctgcagtccccttggtttgtaaattgcctgcatttattctgtcagccaacatgtacaaaatgtaagaaagaatttttaaacaggtaataaattatatttataagcaacaaa

SEQ ID NO: 198160 - DNA, 1789 bp, Homo sapiens
  Payload ID: 19094
  Gene Name: unc-5 netrin receptor C
  ENST ID: ENST00000504962
  CDS Start-End: 344-1126
tcggcgtgcggcggagctgcggctgctcctgctgctggggggagcggcggaggtggccgccttgcgcctccctggacttcccaagtgggggcagagcagtcgctcgcgggagacgtcagttagaaggcattgggaaagagggaccttcaaactcctcctcggcgtctcctctcctcccccttttggcccctgcctttggagaaagtggagtgtggcgcttggttgtcgttatttcttcggactgcttcgcggtgcacggattcagcttctgcccagtggggctttcagctgtttgcgcgtctctctgtccccctcccctccccccggcacacctctgtctacgatgaggaaaggtctgcgggcgacagcggcccgctgcggactgggactgggatacttgctgcaaatgctcgtgctacctgccctggccctgctcagcgccagcggcactggctccgccgcccaagatgatgacttttttcatgaactcccagaaacttttccttctgatccacctgagcctctgccacatttccttattgagcctgaagaagcttatattgtgaagaataagcccgtgaacctgtactgtaaagcaagccctgccacccagatctatttcaagtgtaatagtgaatgggttcatcagaaggaccacatagtagatgaaagagtagatgaaacttccggtctcattgtccgggaagtgagcattgagatttcgcgccagcaagtggaagaactctttggacctgaagattactggtgccagtgtgtggcctggagctccgcgggtaccacaaagagccggaaggcgtatgtgcgcattgcatatctacggaagacatttgagcaggaacccctaggaaaggaagtgtctttggaacaggaagtcttactccagtgtcgaccacctgaagggatcccagtggctgaggtggaatggttgaaaaatgaagacataattgatcccgttgaagatcggaatttttatattactattgatcacaacctcatcataaagcaggcccgactctctgatactgcaaattacacctgtgttgccaaaaacattgttgccaagaggaaaagtacaactgccactgtcatagtctatggtccttgagaaacagcgggctcaagatcactctgctagtcctgtctcttaaaagcaggagaggagattttcagctgaaagatggcttccctataccagaaggaaagtaacattcttatcctcaaggacaggaagttgagaccacggggaagttacgatccagataattctgtatcgatcttattaaaataactcttaatcttcttttagccttaacacataattgactttttcataacttgctactctttgtccaattcaatatataagcattcaactataactgcatctttgggtcttcattttcttaggccatgtaaaagttatattaagtaaatttacatgtttttctcctgttgatttgtgttacaccaatttaattcttaggcccagccaaaaaaaaaatcctaaaagagtggaagtaaaatattgcctaccccacagtaccattcagatggatgtgtgtttatgagaagagaaaccactatgctgttccaaaggatgaatgtagtgctgctttaaaaatgtcattttaattacaggaaaaatggcacaaaaattttttgatcctctgattaccctgaggtttaatttcctagtccagataatggctgtgttgaattgtatgcaattgcctttcttaaatcacaataaaatgttttcttcttctta

SEQ ID NO: 198161 - DNA, 2220 bp, Homo sapiens
  Payload ID: 19094
  Gene Name: unc-5 netrin receptor C
  Uniprot ID: O95185
  ENST ID: ENST00000506749
  CDS Start-End: 350-2143
cagacttcggcgtgcggcggagctgcggctgctcctgctgctggggggagcggcggaggtggccgccttgcgcctccctggacttcccaagtgggggcagagcagtcgctcgcgggagacgtcagttagaaggcattgggaaagagggaccttcaaactcctcctcggcgtctcctctcctcccccttttggcccctgcctttggagaaagtggagtgtggcgcttggttgtcgttatttcttcggactgcttcgcggtgcacggattcagcttctgcccagtggggctttcagctgtttgcgcgtctctctgtccccctcccctccccccggcacacctctgtctacgatgaggaaaggtctgcgggcgacagcggcccgctgcggactgggactgggatacttgctgcaaatgctcgtgctacctgccctggccctgctcagcgccagcggcactggctccgccgcccaagatgatgacttttttcatgaactcccagaaacttttccttctgatccacctgagcctctgccacatttccttattgagcctgaagaagcttatattgtgaagaataagcccgtgaacctgtactgtaaagcaagccctgccacccagatctatttcaagtgtaatagtgaatgggttcatcagaaggaccacatagtagatgaaagagtagatgaaacttccggtctcattgtccgggaagtgagcattgagatttcgcgccagcaagtggaagaactctttggacctgaagattactggtgccagtgtgtggcctggagctccgcgggtaccacaaagagccggaaggcgtatgtgcgcattgcatatctacggaagacatttgagcaggaacccctaggaaaggaagtgtctttggaacaggaagtcttactccagtgtcgaccacctgaagggatcccagtggctgaggtggaatggttgaaaaatgaagacataattgatcccgttgaagatcggaatttttatattactattgatcacaacctcatcataaagcaggcccgactctctgatactgcaaattacacctgtgttgccaaaaacattgttgccaagaggaaaagtacaactgccactgtcatagtctatgtcaacggtggctggtccacctggacggagtggtctgtgtgtaacagccgctgtggacgagggtatcagaaacgtacaaggacttgtaccaacccggcaccactcaatgggggtgccttctgtgaagggcagagtgtgcagaaaatagcctgtactacgttatgcccagtggatggcaggtggacgccatggagcaagtggtctacttgtggaactgagtgcacccactggcgcaggagggagtgcacggcgccagcccccaagaatggaggcaaggactgcgacggcctcgtcttgcaatccaagaactgcactgatgggctttgcatgcagagtttcatttatcccatttcaactgaacagagaacccagaatgaatatggattttcttctgctcctgattcagatgatgttgctctctatgttgggattgtgatagcagtgatcgtttgcctggcgatctctgtagttgtggccttgtttgtgtatcggaagaatcatcgtgactttgagtcagatattattgactcttcggcactcaatgggggctttcagcctgtgaacatcaaggcagcaagacaagatctgctggctgtacccccagacctcacgtcagctgcagccatgtacagaggacctgtctatgccctgcatgacgtctcagacaaaatcccaatgaccaactctccaattctggatccactgcccaacctgaaaatcaaagtgtacaacacctcaggtgctgtcaccccccaagatgacctctctgagtttacgtccaagctgtcccctcagatgacccagtcgttgttggagaatgaagccctcagcctgaagaaccagagtctagcaaggcagactgatccatcctgtaccgcatttggcagcttcaactcgctgggaggtcaccttattgttcccaattcaggagtcagcttgctgattcccgctggggccattccccaagggagagtctacgaaatgtatgtgactgtacacaggaaagaaactatgaggtaaatatgctttttctggtgcactgactttaccaatgtctaacttggaggagaattgtacaatagacacaataaacccaa

SEQ ID NO: 198162 - DNA, 2350 bp, Homo sapiens
  Payload ID: 19094
  Gene Name: unc-5 netrin receptor C
  ENST ID: ENST00000513796
  CDS Start-End: 116-2350
ttatttcttcggactgcttcgcggtgcacggattcagcttctgcccagtggggctttcagctgtttgcgcgtctctctgtccccctcccctccccccggcacacctctgtctacgatgaggaaaggtctgcgggcgacagcggcccgctgcggactgggactgggatacttgctgcaaatgctcgtgctacctgccctggccctgctcagcgccagcggcactggctccgccgcccaagatgatgacttttttcatgaactcccagaaacttttccttctgatccacctgagcctctgccacatttccttattgagcctgaagaagcttatattgtgaagaataagcccgtgaacctgtactgtaaagcaagccctgccacccagatctatttcaagtgtaatagtgaatgggttcatcagaaggaccacatagtagatgaaagagtagatgaaacttccggtctcattgtccgggaagtgagcattgagatttcgcgccagcaagtggaagaactctttggacctgaagattactggtgccagtgtgtggcctggagctccgcgggtaccacaaagagccggaaggcgtatgtgcgcattgcatatctacggaagacatttgagcaggaacccctaggaaaggaagtgtctttggaacaggaagtcttactccagtgtcgaccacctgaagggatcccagtggctgaggtggaatggttgaaaaatgaagacataattgatcccgttgaagatcggaatttttatattactattgatcacaacctcatcataaagcaggcccgactctctgatactgcaaattacacctgtgttgccaaaaacattgttgccaagaggaaaagtacaactgccactgtcatagtctatgtcaacggtggctggtccacctggacggagtggtctgtgtgtaacagccgctgtggacgagggtatcagaaacgtacaaggacttgtaccaacccggcaccactcaatgggggtgccttctgtgaagggcagagtgtgcagaaaatagcctgtactacgttatgcccagtggatggcaggtggacgccatggagcaagtggtctacttgtggaactgagtgcacccactggcgcaggagggagtgcacggcgccagcccccaagaatggaggcaaggactgcgacggcctcgtcttgcaatccaagaactgcactgatgggctttgcatgcagagtttcatttatcccatttcaactgaacagagaacccagaatgaatatggattttcttctgctcctgattcagatgatgttgctctctatgttgggattgtgatagcagtgatcgtttgcctggcgatctctgtagttgtggccttgtttgtgtatcggaagaatcatcgtgactttgagtcagatattattgactcttcggcactcaatgggggctttcagcctgtgaacatcaaggcagcaagacaagatctgctggctgtacccccagacctcacgtcagctgcagccatgtacagaggacctgtctatgccctgcatgacgtctcagacaaaatcccaatgaccaactctccaattctggatccactgcccaacctgaaaatcaaagtgtacaacacctcaggtgctgtcaccccccaagatgacctctctgagtttacgtccaagctgtcccctcagatgacccagtcgttgttggagaatgaagccctcagcctgaagaaccagagtctagcaaggcagactgatccatcctgtaccgcatttggcagcttcaactcgctgggaggtcaccttattgttcccaattcaggagtcagcttgctgattcccgctggggccattccccaagggagagtctacgaaatgtatgtgactgtacacaggaaagaaactatgaggccacccatggatgactctcagacacttttgacccctgtggtgagctgtgggcccccaggagctctgctcacccgcccagtcgtcctcactatgcatcactgcgcagaccccaataccgaggactggaaaatactgctcaagaaccaggcagcacagggacagtgggaggatgtggtggtggtcggggaggaaaacttcaccaccccctgctacattcagctggatgcagaggcctgccacatcctcacagagaacctcagcacctacgccctggtaggacattccaccaccaaagcggctgcgaagcgcctcaagctggccatctttgggcccctgtgctgctcctcgctggagtacagcatccgagtctactgtctggatgacacccaggatgccctgaaggaaattttacatcttgagagacagatgggaggacagctccta

SEQ ID NO: 198163 - DNA, 9403 bp, Homo sapiens
  Payload ID: 19094
  Gene Name: unc-5 netrin receptor C
  ENST ID: ENST00000610318
  CDS Start-End: 1-2673
gatgatgacttttttcatgaactcccagaaacttttccttctgatccacctgagcctctgccacatttccttattgagcctgaagaagcttatattgtgaagaataagcccgtgaacctgtactgtaaagcaagccctgccacccagatctatttcaagtgtaatagtgaatgggttcatcagaaggaccacatagtagatgaaagagtagatgaaacttccggtctcattgtccgggaagtgagcattgagatttcgcgccagcaagtggaagaactctttggacctgaagattactggtgccagtgtgtggcctggagctccgcgggtaccacaaagagccggaaggcgtatgtgcgcattgcatatctacggaagacatttgagcaggaacccctaggaaaggaagtgtctttggaacaggaagtcttactccagtgtcgaccacctgaagggatcccagtggctgaggtggaatggttgaaaaatgaagacataattgatcccgttgaagatcggaatttttatattactattgatcacaacctcatcataaagcaggcccgactctctgatactgcaaattacacctgtgttgccaaaaacattgttgccaagaggaaaagtacaactgccactgtcatagtctatgtcaacggtggctggtccacctggacggagtggtctgtgtgtaacagccgctgtggacgagggtatcagaaacgtacaaggacttgtaccaacccggcaccactcaatgggggtgccttctgtgaagggcagagtgtgcagaaaatagcctgtactacgttatgcccagtggatggcaggtggacgccatggagcaagtggtctacttgtggaactgagtgcacccactggcgcaggagggagtgcacggcgccagcccccaagaatggaggcaaggactgcgacggcctcgtcttgcaatccaagaactgcactgatgggctttgcatgcagactgctcctgattcagatgatgttgctctctatgttgggattgtgatagcagtgatcgtttgcctggcgatctctgtagttgtggccttgtttgtgtatcggaagaatcatcgtgactttgagtcagatattattgactcttcggcactcaatgggggctttcagcctgtgaacatcaaggcagcaagacaagatctgctggctgtacccccagacctcacgtcagctgcagccatgtacagaggacctgtctatgccctgcatgacgtctcagacaaaatcccaatgaccaactctccaattctggatccactgcccaacctgaaaatcaaagtgtacaacacctcaggtgctgtcaccccccaagatgacctctctgagtttacgtccaagctgtcccctcagatgacccagtcgttgttggagaatgaagccctcagcctgaagaaccagagtctagcaaggcagactgatccatcctgtaccgcatttggcagcttcaactcgctgggaggtcaccttattgttcccaattcaggagtcagcttgctgattcccgctggggccattccccaagggagagtctacgaaatgtatgtgactgtacacaggaaagaaactatgaggccacccatggatgactctcagacacttttgacccctgtggtgagctgtgggcccccaggagctctgctcacccgcccagtcgtcctcactatgcatcactgcgcagaccccaataccgaggactggaaaatactgctcaagaaccaggcagcacagggacagtgggaggatgtggtggtggtcggggaggaaaacttcaccaccccctgctacattcagctggatgcagaggcctgccacatcctcacagagaacctcagcacctacgccctggtaggacattccaccaccaaagcggctgcgaagcgcctcaagctggccatctttgggcccctgtgctgctcctcgctggagtacagcatccgagtctactgtctggatgacacccaggatgccctgaaggaaattttacatcttgagagacagatgggaggacagctcctagaagaacctaaggctcttcattttaaaggcagcacccacaacctgcgcctgtcaattcacgatatcgcccattccctctggaagagcaaattgctggctaaatatcaggaaattccattttaccatgtttggagtggatctcaaagaaacctgcactgcaccttcactctggaaagatttagcctgaacacagtggagctggtttgcaaactctgtgtgcggcaggtggaaggagaagggcagatcttccagctcaactgcaccgtgtcagaggaacctactggcatcgatttgccgctgctggatcctgcgaacaccatcaccacggtcacggggcccagtgctttcagcatccctctccctatccggcagaagctctgtagcagcctggatgccccccagacgagaggccatgactggaggatgctggcccataagctgaacctggacaggtacttgaattactttgccaccaaatccagcccaactggcgtaatcctggatctttgggaagcacagaacttcccagatggaaacctgagcatgctggcagctgtcttggaagaaatgggaagacatgaaacggtggtgtccttagcagcagaagggcagtattaaccaccatgctggaaggggaaatgaaggacaaaaatgcacagggagtctgtggccgtccaggtgaatcacagctgaggaggaaatccagatgagaccaatgcacttcacaggcaagactgcagcaggagccagaaggaaaacagatacaactgcccatgtacatgcccactttactcggacatcatcacgggagttaagaaaaattgtgtaaatttgtaccttgaatttagctatcaacctaattttcctcttagttgggctgtatgctgtgtggtacaggatcttacagtttcctaggaaacgctttttattgctatccagatatatggataaactttcttaacaaacccaatttctacaaatgttgtttacatcaaattggacagggatgcagacactgtccatggctcgttctatttttgttcaaatcatttgaagttgaagctgtggacggtttgttgtgtctatttcagattagtaatttacagagaaatcacagacttttgctacaaatcgtgtgcatcaagtgtctcagataatcctcccatcagtgttctgtttctagaacttgtagaaccagtgttactgtttgtatcagggaagtggagaatctaagtgtaaaaaagaaataactaagactcctattccttggagggacccttctggtgccctttgggaataaagctgtagcactgcagggaagacagtgattcatgttcaaccccacaaacaagcatttttttcacaacatgtgtgtttgtttgtaatatgcaatatgaagtgtttttttttaaaggtattattattatttacaggtattctggtaaaatgatttttttaaatttctatttttgttagcagtgctgtttgttagtatttggttattgactagacctgtcccaccttttcacctatcaaggtgggtgtggtcatcagtttaattcaacatgcatcacttccttgaccttttacctttcccttattccaccccagaaaggtgattgataaatgctgaatggctttgtcagtctgttccttcagcttgctcaggcagggtctttctttctcctctgaggagtcttaaggagacgtgttctctattaagttcacttaatattgccgttgtgtggccccacgtcgactccctatggtgctctactctagaggcagtgtggttggaggaatggactctaaactggagatcaagaaaccagttctcattgtgggtctgtcactgtcttgttgcgccaccttgagaaagtcatttaaccacacgacctcagtgtcctcactagaaagtgaaagggtgggattagatcatctccaagttctgaaatgctcaacttccaccgtgatgcctccagtctcattcatcagtctgaagaccacaatggactctgacctggatcatcatttaaaaatcatcagctggtcttttgcccaggctatgttacgcctttcaagtagttctgacaaggaagatgattattctaaccagcattatgatgttgtttgtttggcctgagtcgctctgcatcattgcattatgctgttcactgagagatgacatccctttattatcattttcttagcctctcttgggatgcccctgcccccagccttcctgactggttgcaaattctgttttttattattgtcttggcatcttgatatctagaccactcctacaagtttatctggcagtaggaacttggtgcatttttttctacgctacacccccccacccttaatctttctttgctgtcataatattcagtagcatttataaaagctgtctagttagctctttaaaaacttttgtcctgcaaaatgtttgttagtcaacacactactttgtgtaaacaactattatgtttccttgggaccatcacaagctctttaacaaacacaaggactcaattcattcagcaggtggggattaaagaatcaaagcccagtagcaaaaccaaaactgaagaacaagcagacatgtgtatgaatcggaacctttagaacatgactgtggtttacttttaggctggaggcacacaagttgctgaacagacttgaattatacatgtgcttccatctttccatgtttccgctcctattttggtagcatcttgagattccttgatgcctccgccatcctcatccctgaggaactgctgataccttgctatggaacctcttctttctttcatgctttttattccgtatcttctgttttggacatacatacatatattctataaaatctctctcagcccaccccctgcattaggatttccatatttaaaatatttgtacactgactggggaagggagagattgcactataaacaagttcagtggatgtttgtagcaatgagtaaaactgtattctaaattaaaaatcaaatatatatacacgcagttatacacacacattttttaaaaggaggaggaggaaagagagctattgtccattcctacattttgaaataaacttgtcaagattacgcatcagtaccagggttgtggaatcatctatggaaatcaagaactagaatctgaactgaatggtcaaagaaacttctatgcctagtgaaaactagaggggagcaactatgtagctatgaacatgaatcaattccataactgttactaaaaacttattttgactaaaaagtcaccaacacagaactattgaacacaaacaggaattgtttgtcttactgaagtcactgagaacccttggggttcacttcagatgcttttttggttcaacttcccaccaccagaaaagggaaaagtgattgatttcgtgtgtgaggtactcatctgtcagaacccttaatgtttcctattaagtgaatgacaacttccatacatacactatttataccaaataattttcactacaaattctgatttccttctcctttggagtaaagtaatagctgttagattgctttcaaacttagaaggtccagatataacagttcatttcataggaagccacttcatcaaccattctatgtgatacatcctgcttctttctacaccgctggagaggcagtttggctggtttcatttggatagaaaaaactatcatttgtgcatgctgccatctagtggtgtacaacacaatctaacctgagtttaatattcactagaatgtgtttgacgaagggaatgaaaacctgtagagttcaaggacctttatgacaaacagatgtagggaaattttcacttcaaatttataattttcttattctcacttttttttcatttgcatcactcatctcaatattaggtcactgtgagcccagtacatcaactcattcatacacaacatatcttcagttgcttcttgtaacagaactatgtaaaatctatataaaacagtctttgaagagttgtcatttttaacacttatggttttcattggggtttgtatactttaaatctccttttagttccttaatatttatctttggaaatgtaagaagtatctgcttagaaagaaataagtcttatatatgcgaatggaatactatgtctagggaagagaaaattggggttgttaatcaaagggaagaaagcagcttcttttctgctgaatttgggaatccaaaggcagaggtttcatcctgtttttattttcttcttatcacactctttcaagtttccttaatgtatctggaaggaatagaagttggattcagaattgataactggcatggtgatgacaaacctgtgtaacaccaaggttctcacagctaacagctgtttcacaaacggcatcttccaaatgaacagtcacctctgctatgcagaaaacccccatcctgctgtgagcaagttaggctcttcaagaactggacaacttttgggtgaggtgttcaatatcaaactgcataatcattagccattttcatatatactattttatagatttaagtctctcaactatcaaaaagtagagcgattttcaggagaaaaaagtcgtggggactgagttcaggacaccctgaaactatgcgaccagtaatttttttaaggtattttttcctacaagtaaggtatctgaaaagtcaacgttttgagggtggaatcaagacttttcacttctcctggcaaagagcaacaaggctcttgtctcgtgtccttctgtgtgtctctgtcaggatcacagcagctgtgctcttggtctgcttactcctctgtaatccacgtatgcagaagggagttaataaggtgatcaccatctccccagaattcaaaggtctttgcctctataaggtctgcccctatggggccaggaaaatataaacctatataaggacttgcaagagagcataaagaaggtagaaaaggtttacttgttgggttttcaagccttcaagttgaatgagtcttagcttttgctgggcagttgttctggacaagtcatcagtttcatgtggagaactcagtgtaagcccaaggctaatgaatgagaggggtcccatggaaacacagctgaaatgaaatgggactttatccatcttctttgagaatggaagagcttttgtgaagcagtacatcattgctcaagataatggttgataagcattagattttatagatctaataaggaaaatattttattatctcaagttaacaaaacatttttttacctctcgagtgcctcataggaccaactattactctttggcttttatttttctttttgtattatttttatatattctttaaccttgctgagctagtattgactgaaatctttagaactttgcctctgggcaatgaagtaatgtttctctaccctaagatatctatttgtataatctctggctgtaatgatcactttggaagatttcctttgcatctctaattatttctttttaatggaataaggcataagggggaataaatatattgtaaccaatgttatgtaaacccatatccatacaggccaggaaagccaaatgaagtcatttccagaattctagtgtgaaaaacctatttttgaaaagtggggagatggctttgtgtagaactgggtgggttttctctgcagactaagtctagccatgagcttccagatcctttagttttatcagccttgtgcttaccccattttcataaatgctactttaacagccagtcttcataagtcatggttcctaggttttcctgtcacctcattgtattcatctgtggtaggatattaacgggctcattcaaccaaatgtaatgtgtgcctcagacctatttagcatggttggggggcatcagcaggacaaaccaacaggtactccgcaagtgtactggcacagcaagcccaccaattattagcagctcttcatcagcctgctgtctactcagacgcttgcctactgaagggacctgtccagagatcttctggaatcccaggttgggaatctctgcagaatgtcgtgacagttgtggcccaactagcttctgagtagaaacaaggaagctaccctgagatatagtcagctgcccacctgccatagtatttgctactgaatgccagccttttaacataccatttcagatttgtccttcaacaaaaatataaattgcaagtcataccatttaagggtcttttacaaatatgtctaaattgtgtgtcatttttaagttccaaaggtctactggactaagtactatcagaccagctgtagaacctgatggcgctgatccggggtggaataaccctcagtactggtgtgtagaagatgaattgtaggcaggttttgctgatcagcagcctaaggattgatgggctctcttttggcctctgatcctgagcactatggaggcagcatcagagaatggggacctgagctacataggttctcaatgttaaaacaactctgttcggagtgacatataagagcaagaaatctacagctggtgtaaaatacctttgccttttctatcccgaaagtaacaaatggcatctgtacatgtaggggtaaaaactcagatgtctactcctccaggccatggacaagaaaaagtacagcagtcagaacagtggaacaagtgatttgcattctcttcttcacgctttcctagatctgccattggtagcgcagccctcgccctccagacataatgcatcgagcccagttgcagggaacatcactgtgtgtgtgtgatgtcatggtgttatatgtgttgagtttaatgttgagctgaagcaagttggtgaccttcctctttgctctttgtaaagaagacaccaatgtttgtcagagaaaaatccccagcagtcgtgttgaagaggcagtgtcatccacctactgtcccctttggaacagttcaactgcagaaaggtcggattgaggttttgtgctttgtcgtttttcttttttaaacaaaacatgacaaccttggcttttccgatatggaacacttttgttgttgtggagttccctcttgctgtatcttctatgcaattccttttctaaaaaaaccccccggcagaggcagagtgccctccggatatctgtccggcgccttgctgagtggtggaggtgagggataccagctccgggtgtgcctcttttctctccctggctgccaatcctgattttccctgcagtccccttggtttgtaaattgcctgcatttattctgtcagccaacatgtacaaaatgtaagaaagaatttttaaacaggtaataaattatatttataagcaacaaa

SEQ ID NO: 198164 - DNA, 8662 bp, Homo sapiens
  Payload ID: 19095
  Gene Name: unc-5 netrin receptor D
  ENST ID: ENST00000287272
  CDS Start-End: 21-2675
tccggaacgcggcgaggagcatggggagagcggcggccaccgcaggcggcggcggaggggcgcgccgctggctcccgtggctggggctgtgcttctgggcggcagggaccgcggctgcccgaggaactgacaatggcgaagcccttcccgaatccatcccatcagctcctgggacactgcctcatttcatagaggagccagatgatgcttatattatcaagagcaaccctattgcactcaggtgcaaagcgaggccagccatgcagatattcttcaaatgcaacggcgagtgggtccatcagaacgagcacgtctctgaagagactctggacgagagctcaggtttgaaggtccgcgaagtgttcatcaatgttactaggcaacaggtggaggacttccatgggcccgaggactattggtgccagtgtgtggcgtggagccacctgggtacctccaagagcaggaaggcctctgtgcgcatagcctatttacggaaaaactttgaacaagacccacaaggaagggaagttcccattgaaggcatgattgtactgcactgccgcccaccagagggagtccctgctgccgaggtggaatggctgaaaaatgaagagcccattgactctgaacaagacgagaacattgacaccagggctgaccataacctgatcatcaggcaggcacggctctcggactcaggaaattacacctgcatggcagccaacatcgtggctaagaggagaagcctgtcggccactgttgtggtctacgtggatgggagctgggaagtgtggagcgaatggtccgtctgcagtccagagtgtgaacatttgcggatccgggagtgcacagcaccacccccgagaaatgggggcaaattctgtgaaggtctaagccaggaatctgaaaactgcacagatggtctttgcatcctagataaaaaacctcttcatgaaataaaaccccaaagcattgagaatgccagcgacattgctttgtactcgggcttgggtgctgccgtcgtggccgttgcagtcctggtcattggtgtcaccctttacagacggagccagagtgactatggcgtggacgtcattgactcttctgcattgacaggtaactccctgctcctgaattctgccatgcagccagatctgacagtgagccggacatacagcggacccatctgtctgcaggaccctctggacaaggagctcatgacagagtcctcactctttaaccctttgtcggacatcaaagtgaaagtccagagctcgttcatggtttccctgggagtgtctgagagagctgagtaccacggcaagaatcattccaggacttttccccatggaaacaaccacagctttagtacaatgcatcccagaaataaaatgccctacatccaaaatctgtcatcactccccacaaggacagaactgaggacaactggtgtctttggccatttaggggggcgcttagtaatgccaaatacaggggtgagcttactcataccacacggtgccatcccagaggagaattcttgggagatttatatgtccatcaaccaaggtgaacccagcctccagtcagatggctctgaggtgctcctgagtcctgaagtcacctgtggtcctccagacatgatcgtcaccactccctttgcattgaccatcccgcactgtgcagatgtcagttctgagcattggaatatccatttaaagaagaggacacagcagggcaaatgggaggaagtgatgtcagtggaagatgaatctacatcctgttactgccttttggacccctttgcgtgtcatgtgctcctggacagctttgggacctatgcgctcactggagagccaatcacagactgtgccgtgaagcaactgaaggtggcggtttttggctgcatgtcctgtaactccctggattacaacttgagagtttactgtgtggacaataccccttgtgcatttcaggaagtggtttcagatgaaaggcatcaaggtggacagctcctggaagaaccaaaattgctgcatttcaaagggaatacctttagtcttcagatttctgtccttgatattcccccattcctctggagaattaaaccattcactgcctgccaggaagtcccgttctcccgcgtgtggtgcagtaaccggcagcccctgcactgtgccttctccctggagcgttatacgcccactaccacccagctgtcctgcaaaatctgcattcggcagctcaaaggccatgaacagatcctccaagtgcagacatcaatcctagagagtgaacgagaaaccatcactttcttcgcacaagaggacagcactttccctgcacagactggccccaaagccttcaaaattccctactccatcagacagcggatttgtgctacatttgatacccccaatgccaaaggcaaggactggcagatgttagcacagaaaaacagcatcaacaggaatttatcttatttcgctacacaaagtagcccatctgctgtcattttgaacctgtgggaagctcgtcatcagcatgatggtgatcttgactccctggcctgtgcccttgaagagattgggaggacacacacgaaactctcaaacatttcagaatcccagcttgatgaagccgacttcaactacagcaggcaaaatggactctagtccacttcctcccatgagacagagtgatggccagcttggggacatttgctttaaatgggaaagaggccgctttctgcccagtggcgttgggggaattcagccttcatttataatcagtgagattcccctgttgaagaaactaaattttatataggtaaaacatgttaatagggaagagtacaagctctcttacatataagagggctctactatctccttggaatccacatttgggttaactcctcagatttggagtggcaaggataaaagtgagggcagaagtagctgtgggaaaagatgagctatgataatgctgggaaggcagagattgattaagtgcatgctttgaaataggtttttaatgatgtgccccaaagggccagctgattctggtactagattgtcagagttttctaccaactggcatctgtgatgtcagagatcattgtaaaaatggcttttagacgtgaaacagggttgccaacccatttgtatgacttcaacaacgtcaaggagggcatttagaatttagaatctgagcacatcacaccagcaccagctccctgtctcttctagccacttaatggagacacaatggagaggtaagacagaccacaaactagttcttatagtgtactccaccttttacttttttcctgagacaaatctacccttattctttcttcctcttccttaccccttgcagtagggaggtatcaaggagcataattaaacttgtcaatacggaaagttgttttttctaacacaacaaagtgggaccatctctattcccatctaagccactcaaattgctgagtgctattagaacacagcttattacatggatatggggacaggagagattaaagcaggttcaaaaacacatgaactgcagatgccataggcctcaaatcagctgtaattctaggagacacgtgttgatctagttatctaacattgttgttataagaaaatgagtttactgcatttttcaatccagattcttgaaattgtctaacatgtgggtactgtgtcatcacaaaatctctcagtaaggctatatgtgatcctcattttgcctcttgggaaattagcagatagtctttgctctaaatgatatctgagtaaatagacttgaggaatcctctaccacagtgtccctgaaaccacatgcatcattcaggaagccttcaccctgtgactattcagcctccctgaatatgctttctctatagaaccactaacatatggctattgctctatgatttttttttttacattaggaggcagtgatattgtggaagattgaaatccacagataattcatgaccctcatcttatcactttactccatctttttatcctattaaattatttttgacaagatgtcctggtagactaaaggtgaacagatttgctcttgctcatcttctggtggatattttaacttgctattcacaatcaggacaaccaaagtcaaggacccagatgaaccacaaggcagctagtcagctacttagaggttggttacattcgaataaaaagtagtcagggaatgggggaggtggggagttggggagtacttggcagttgggatatgatccatttttttaaacaagttttttgtagatcccttgtaaaataataataataatgttgtgaatctccatgccaagtgaaaaaggcctaaagatgagttgaatttgtgataccatgggtaaggcatggaagaactcttgaatgtgttggccattttctctaactaacatgtggtatgtatggtcccctatattagatagaagtctttgctacatgtaattcaaaagcatctcgcttttctcaggaaccaaaggcttatgatgtaggacaaagaaatcatcttagaactgtcaagcatattttcacaataccatgtcaagatcaggaaaacacccttttgctagtgtgcttaacttatttatttcttctaggaaacaatagataaacagcatgaaaatgtaaatcatctggcatcactgatagaatttctgaaagagaaagagaagtagatggtcaaccagtcactagttggttggcatgaggtggtgtgcagaggaaagctgcattcactattgagtaaaaacttgtagaaagcacattatagagcttatgttggaatccatcttggaggatttttgttttaaactgtctttagcattttccctcttcccttctaatgggcattataattgtttcatctactctgtgaatctacataggtctttttttttagatgtttgatacattttaagtatttttaaatagatgaaaattctaaatgattttccctcaaatctatctagattattttaagatgagacaagattattgtcaatccctgaatgtctggagttacctcccatggatttttttttcctttggcctgggttttataaacaacttgaacatcatatcatataggataacaaaggaggaagttaacttaattcacctcagacttcagcctaagattcaatcaaattcatccttcagcctgtcttgtttcttctttatgtttcttttacttattgctgctaggatcctacataggatttctatagaaatgtatgaaattctgtggtcactgcatgtcaggattgcacagtatgttacaatacaatttcaaagagaacccacatttgtgagatttacagaccaaggtgtggtggaggaggtagaattgcagatcagataaaaagtgagcttacacttgaacttagttattcactgtgacctaaatttagtcctattgtaatatgtgcctgtcacaacacaaatacccctcttgaaagagatttactcatctatccaagcacttaatttggaaattttattgtcctattgcaaaatgaaacaaaattaaaagtggcctcgagtacttggtaagttacttaaaatttttacaaaaatatcccactcaatgccaaatctttcagtcctcaaaggcatttaagtccaatagtcatgctttaaatatggctttaaattatgccaccaaaatggtgcacttcacagattcaccagactgtagcatcataaagttaatttacagtttttacaacattgcttctacattcttactggtttacattaaaatcctttaagccaaaaggaagcttgctctatggatttaaatgcaaacttcatttaccagtgcaggaagtctcataaaactcagatgtactcccacaaaaattttattggcctttttgtaagagatgaaaaagaattgacacagttctctttaaagagaagaacttttttattattatttttatctccaactgcaggtggtgtcttttgccaaggtctctgtatttttctttcagttgtctttgggaggggatgttaagtcaaatcactaaaacagggttctctttggattaaaagttctggatttattgcaactattttccttgagaaacattctcagcatcaggattgataaacaaatgtagatgattaaaataggataattggttttagataatatcttctactgccaaacttctggcaaatttacctgtgaatttcaaaatgttataaaatctcttgatatgcttttgtttttccttttagccattttctcttcaatttcttagtccctctgccctctgtaaatgtgttgagtgatatagctatcagatgtattgaaggcaaagttctcgcagaggtctctgttccagctctgtaaaggtcacaggaatcgtgaaggagctgagaaatcttcctctccggcccactgtctgtggcccattgtcattgtttcctcatgaaacattgcagagtttgaatcctcagtaactctcattgactggattagaggtgatggccacagcaaatgggagagcaaaatgttggcctacagagaatgacacaattttattcgcctttggtgttagttgccatagtgctgtatttgaaaatcgatgctttagccaaaagctgaatgaccaccgtttccgtagtttccactgttttgtctgcatagaattttcctgaactacaagcaaaaatgtattttgtccaatgtcacaaaagtgaaaatgttactaatcttagatgtgttgcatattttgtgtttttacgttccaaactctttcaaaagctgccgttacaaagctgtttggctgtattgacagcatgtggtgtttttacaaaagcaattctaggagagccagtgtctaccatgaactcctgacatccccactccagggtcattcatgacattgaaatggcaacttgtacactgtaattcttcgaaaagtaacaggggatggaaatcagacctggccgttagtcactagtgtgtagtaccgtgatctgaagtaggaaatttaactgacatagaataattgtggtttttgaagcagctactcattgctttttccttttgctgtgaagatcatggattgggaatgtcctcgtgaggtggacctaaggcagtaacatttaaacttcatgtcctagcacccgccctccatctgacccaaagataaaaaaggcatcaagcttcatggttatgcctaagcttaaaaattcccttccccactactaatattgagttcagcagggccccatcttacttatttttcaaaaaagttatagctttgaattatagactatattactaaatttggtaaggtagttctttgcatgaatgggaatgtgtgtcaaaatactttcacaaaaggcatgattacaatggaaatgcccctttgcctccagttttgctaaccctaaaaagtatttcactaatttcaagcactgtttacactcaaatcccaaaattggccaaattatataattctcttaaattttcatttctgtaggtggagatttaactatggttctggtgaatcatagaagggagagacaatatttgaggggagtttatcagcagaatatcatgccttatgaccccattactgaaacacagacattacaatcagaaatagacctaataattccaatatccctccattaactagttccagtgatgctgagagacacagcaccctgtgccaggtatcagaaatataagcctcagcagagggtaactgaaaactttcaatcagaaacactctccaaggcttatggctagattatgtaggtcactaccattcaaaacttttctatacaaaggtggaaaagcactcagaatctgggaattttctggttggaagaacaatgttctccttttccaaattggaataaagactcagaattacccattcttcataatcatgtctgattggtacatacactccaggaagtctcaacctagaaacatttccaacctaagcatttaaaggaaaactggctcattcttctgacccaaactcaaaaaatatgagtacttgcgtacctccatttctgcatgaagattttaaaacagatttcatttttttctgtttattttgggaaggtgcgtgggggtgttctttcaagtgattcacatctcaaacccataccactctcaacttttatttgatgtgttcaaagccaaaaaataaaataaaataaagcagggctgaacacttaatttgacatgaagctgaaggactgagcaagccagaggagagaggttgaatgaagcatagccttggcttcataccacactttttgtgccttgtattatcaatgtaaattctgaatgttgtacagtaaacttggatggacttcttagaaaaggctgcactggcttctttttcagcacatgtacatatctataaatatatatacatatatatttggtaatgccaaacagctctgttatattgtattgaacaaaatggacggtttggatgttttatgtcgagtttgcaaaaaaaaaaaaaaaaaaaaaaactggatggttgcagacttttcaagataaatgtacagacgtaaattactgcatatcagttatttatgaataaagagtcttttattgacattttaggata

SEQ ID NO: 198165 - DNA, 3252 bp, Homo sapiens
  Payload ID: 19095
  Gene Name: unc-5 netrin receptor D
  Uniprot ID: Q6UXZ4
  ENST ID: ENST00000404895
  CDS Start-End: 329-3190
cggactctcgcctccgctccgtagttcggggcccggcagcggcgcgagggctgggaactgcgcggcggggactgcgggcgactccggcatccgcgctggcggcagcggtcgccgcgccgtgggaagctatggggacgcgccctttctcggggtgcccattcagcggcggctcggagctccctgccccgctgctttaggaagcgatcgtggagcagagtcactctctgaagactcccgagacccattcgactcgggaccctcatcgccgaccctttcccgggctcccggagcgtgaagaagagccgccctccggaacgcggcgaggagcatggggagagcggcggccaccgcaggcggcggcggaggggcgcgccgctggctcccgtggctggggctgtgcttctgggcggcagggaccgcggctgcccgaggaactgacaatggcgaagcccttcccgaatccatcccatcagctcctgggacactgcctcatttcatagaggagccagatgatgcttatattatcaagagcaaccctattgcactcaggtgcaaagcgaggccagccatgcagatattcttcaaatgcaacggcgagtgggtccatcagaacgagcacgtctctgaagagactctggacgagagctcaggtttgaaggtccgcgaagtgttcatcaatgttactaggcaacaggtggaggacttccatgggcccgaggactattggtgccagtgtgtggcgtggagccacctgggtacctccaagagcaggaaggcctctgtgcgcatagcctatttacggaaaaactttgaacaagacccacaaggaagggaagttcccattgaaggcatgattgtactgcactgccgcccaccagagggagtccctgctgccgaggtggaatggctgaaaaatgaagagcccattgactctgaacaagacgagaacattgacaccagggctgaccataacctgatcatcaggcaggcacggctctcggactcaggaaattacacctgcatggcagccaacatcgtggctaagaggagaagcctgtcggccactgttgtggtctacgtgaatggaggctggtcttcctggacagagtggtcagcctgcaatgttcgctgtggtagaggatggcagaaacgttcccggacctgcaccaacccagctcctctcaatggtggggccttttgtgagggaatgtcagtgcagaaaataacctgcacttctctttgtcctgtggatgggagctgggaagtgtggagcgaatggtccgtctgcagtccagagtgtgaacatttgcggatccgggagtgcacagcaccacccccgagaaatgggggcaaattctgtgaaggtctaagccaggaatctgaaaactgcacagatggtctttgcatcctagataaaaaacctcttcatgaaataaaaccccaaagcattgagaatgccagcgacattgctttgtactcgggcttgggtgctgccgtcgtggccgttgcagtcctggtcattggtgtcaccctttacagacggagccagagtgactatggcgtggacgtcattgactcttctgcattgacaggtggcttccagaccttcaacttcaaaacagtccgtcaaggtaactccctgctcctgaattctgccatgcagccagatctgacagtgagccggacatacagcggacccatctgtctgcaggaccctctggacaaggagctcatgacagagtcctcactctttaaccctttgtcggacatcaaagtgaaagtccagagctcgttcatggtttccctgggagtgtctgagagagctgagtaccacggcaagaatcattccaggacttttccccatggaaacaaccacagctttagtacaatgcatcccagaaataaaatgccctacatccaaaatctgtcatcactccccacaaggacagaactgaggacaactggtgtctttggccatttaggggggcgcttagtaatgccaaatacaggggtgagcttactcataccacacggtgccatcccagaggagaattcttgggagatttatatgtccatcaaccaaggtgaacccagcctccagtcagatggctctgaggtgctcctgagtcctgaagtcacctgtggtcctccagacatgatcgtcaccactccctttgcattgaccatcccgcactgtgcagatgtcagttctgagcattggaatatccatttaaagaagaggacacagcagggcaaatgggaggaagtgatgtcagtggaagatgaatctacatcctgttactgccttttggacccctttgcgtgtcatgtgctcctggacagctttgggacctatgcgctcactggagagccaatcacagactgtgccgtgaagcaactgaaggtggcggtttttggctgcatgtcctgtaactccctggattacaacttgagagtttactgtgtggacaataccccttgtgcatttcaggaagtggtttcagatgaaaggcatcaaggtggacagctcctggaagaaccaaaattgctgcatttcaaagggaatacctttagtcttcagatttctgtccttgatattcccccattcctctggagaattaaaccattcactgcctgccaggaagtcccgttctcccgcgtgtggtgcagtaaccggcagcccctgcactgtgccttctccctggagcgttatacgcccactaccacccagctgtcctgcaaaatctgcattcggcagctcaaaggccatgaacagatcctccaagtgcagacatcaatcctagagagtgaacgagaaaccatcactttcttcgcacaagaggacagcactttccctgcacagactggccccaaagccttcaaaattccctactccatcagacagcggatttgtgctacatttgatacccccaatgccaaaggcaaggactggcagatgttagcacagaaaaacagcatcaacaggaatttatcttatttcgctacacaaagtagcccatctgctgtcattttgaacctgtgggaagctcgtcatcagcatgatggtgatcttgactccctggcctgtgcccttgaagagattgggaggacacacacgaaactctcaaacatttcagaatcccagcttgatgaagccgacttcaactacagcaggcaaaatggactctagtccacttcctcccatgagacagagtgatggccagcttggggacatttgctttaaatgggaaa

SEQ ID NO: 198166 - DNA, 2966 bp, Homo sapiens
  Payload ID: 19095
  Gene Name: unc-5 netrin receptor D
  ENST ID: ENST00000420357
  CDS Start-End: 21-2681
tccggaacgcggcgaggagcatggggagagcggcggccaccgcaggcggcggcggaggggcgcgccgctggctcccgtggctggggctgtgcttctgggcggcagggaccgcggctgcccgaggaactgacaatggcgaagcccttcccgaatccatcccatcagctcctgggacactgcctcatttcatagaggagccagatgatgcttatattatcaagagcaaccctattgcactcaggtgcaaagcgaggccagccatgcagatattcttcaaatgcaacggcgagtgggtccatcagaacgagcacgtctctgaagagactctggacgagagctcaggtttgaaggtccgcgaagtgttcatcaatgttactaggcaacaggtggaggacttccatgggcccgaggactattggtgccagtgtgtggcgtggagccacctgggtacctccaagagcaggaaggcctctgtgcgcatagcctatttacggaaaaactttgaacaagacccacaaggaagggaagttcccattgaaggcatgattgtactgcactgccgcccaccagagggagtccctgctgccgaggtggaatggctgaaaaatgaagagcccattgactctgaacaagacgagaacattgacaccagggctgaccataacctgatcatcaggcaggcacggctctcggactcaggaaattacacctgcatggcagccaacatcgtggctaagaggagaagcctgtcggccactgttgtggtctacgtggatgggagctgggaagtgtggagcgaatggtccgtctgcagtccagagtgtgaacatttgcggatccgggagtgcacagcaccacccccgagaaatgggggcaaattctgtgaaggtctaagccaggaatctgaaaactgcacagatggtctttgcatcctaggcattgagaatgccagcgacattgctttgtactcgggcttgggtgctgccgtcgtggccgttgcagtcctggtcattggtgtcaccctttacagacggagccagagtgactatggcgtggacgtcattgactcttctgcattgacaggtggcttccagaccttcaacttcaaaacagtccgtcaaggtaactccctgctcctgaattctgccatgcagccagatctgacagtgagccggacatacagcggacccatctgtctgcaggaccctctggacaaggagctcatgacagagtcctcactctttaaccctttgtcggacatcaaagtgaaagtccagagctcgttcatggtttccctgggagtgtctgagagagctgagtaccacggcaagaatcattccaggacttttccccatggaaacaaccacagctttagtacaatgcatcccagaaataaaatgccctacatccaaaatctgtcatcactccccacaaggacagaactgaggacaactggtgtctttggccatttaggggggcgcttagtaatgccaaatacaggggtgagcttactcataccacacggtgccatcccagaggagaattcttgggagatttatatgtccatcaaccaaggtgaacccagcctccagtcagatggctctgaggtgctcctgagtcctgaagtcacctgtggtcctccagacatgatcgtcaccactccctttgcattgaccatcccgcactgtgcagatgtcagttctgagcattggaatatccatttaaagaagaggacacagcagggcaaatgggaggaagtgatgtcagtggaagatgaatctacatcctgttactgccttttggacccctttgcgtgtcatgtgctcctggacagctttgggacctatgcgctcactggagagccaatcacagactgtgccgtgaagcaactgaaggtggcggtttttggctgcatgtcctgtaactccctggattacaacttgagagtttactgtgtggacaataccccttgtgcatttcaggaagtggtttcagatgaaaggcatcaaggtggacagctcctggaagaaccaaaattgctgcatttcaaagggaatacctttagtcttcagatttctgtccttgatattcccccattcctctggagaattaaaccattcactgcctgccaggaagtcccgttctcccgcgtgtggtgcagtaaccggcagcccctgcactgtgccttctccctggagcgttatacgcccactaccacccagctgtcctgcaaaatctgcattcggcagctcaaaggccatgaacagatcctccaagtgcagacatcaatcctagagagtgaacgagaaaccatcactttcttcgcacaagaggacagcactttccctgcacagactggccccaaagccttcaaaattccctactccatcagacagcggatttgtgctacatttgatacccccaatgccaaaggcaaggactggcagatgttagcacagaaaaacagcatcaacaggaatttatcttatttcgctacacaaagtagcccatctgctgtcattttgaacctgtgggaagctcgtcatcagcatgatggtgatcttgactccctggcctgtgcccttgaagagattgggaggacacacacgaaactctcaaacatttcagaatcccagcttgatgaagccgacttcaactacagcaggcaaaatggactctagtccacttcctcccatgagacagagtgatggccagcttggggacatttgctttaaatgggaaagaggccgctttctgcccagtggcgttgggggaattcagccttcatttataatcagtgagattcccctgttgaagaaactaaattttatataggtaaaacatgttaatagggaagagtacaagctctcttacatataagagggctctactatctccttggaatccacatttgggttaactcctcagatttggagtggcaaggataaaagtgagggcagaagtag

SEQ ID NO: 198167 - DNA, 7002 bp, Homo sapiens
  Payload ID: 19095
  Gene Name: unc-5 netrin receptor D
  Uniprot ID: Q6UXZ4
  ENST ID: ENST00000453357
  CDS Start-End: 57-2903
ttaaataagtagggattgtttaaaaaaaaaagctgtaatatgttatctgggggtggatgatcctggtgttagttaaagctctcagtgatgtctgtgctgggacttccgggttcctgttggacttttcctcccaaacttcaccaggaactgacaatggcgaagcccttcccgaatccatcccatcagctcctgggacactgcctcatttcatagaggagccagatgatgcttatattatcaagagcaaccctattgcactcaggtgcaaagcgaggccagccatgcagatattcttcaaatgcaacggcgagtgggtccatcagaacgagcacgtctctgaagagactctggacgagagctcaggtttgaaggtccgcgaagtgttcatcaatgttactaggcaacaggtggaggacttccatgggcccgaggactattggtgccagtgtgtggcgtggagccacctgggtacctccaagagcaggaaggcctctgtgcgcatagcctatttacggaaaaactttgaacaagacccacaaggaagggaagttcccattgaaggcatgattgtactgcactgccgcccaccagagggagtccctgctgccgaggtggaatggctgaaaaatgaagagcccattgactctgaacaagacgagaacattgacaccagggctgaccataacctgatcatcaggcaggcacggctctcggactcaggaaattacacctgcatggcagccaacatcgtggctaagaggagaagcctgtcggccactgttgtggtctacgtgaatggaggctggtcttcctggacagagtggtcagcctgcaatgttcgctgtggtagaggatggcagaaacgttcccggacctgcaccaacccagctcctctcaatggtggggccttttgtgagggaatgtcagtgcagaaaataacctgcacttctctttgtcctgtggatgggagctgggaagtgtggagcgaatggtccgtctgcagtccagagtgtgaacatttgcggatccgggagtgcacagcaccacccccgagaaatgggggcaaattctgtgaaggtctaagccaggaatctgaaaactgcacagatggtctttgcatcctagataaaaaacctcttcatgaaataaaaccccaaagcattgagaatgccagcgacattgctttgtactcgggcttgggtgctgccgtcgtggccgttgcagtcctggtcattggtgtcaccctttacagacggagccagagtgactatggcgtggacgtcattgactcttctgcattgacaggtggcttccagaccttcaacttcaaaacagtccgtcaaggtaactccctgctcctgaattctgccatgcagccagatctgacagtgagccggacatacagcggacccatctgtctgcaggaccctctggacaaggagctcatgacagagtcctcactctttaaccctttgtcggacatcaaagtgaaagtccagagctcgttcatggtttccctgggagtgtctgagagagctgagtaccacggcaagaatcattccaggacttttccccatggaaacaaccacagctttagtacaatgcatcccagaaataaaatgccctacatccaaaatctgtcatcactccccacaaggacagaactgaggacaactggtgtctttggccatttaggggggcgcttagtaatgccaaatacaggggtgagcttactcataccacacggtgccatcccagaggagaattcttgggagatttatatgtccatcaaccaaggtgaacccagcctccagtcagatggctctgaggtgctcctgagtcctgaagtcacctgtggtcctccagacatgatcgtcaccactccctttgcattgaccatcccgcactgtgcagatgtcagttctgagcattggaatatccatttaaagaagaggacacagcagggcaaatgggaggaagtgatgtcagtggaagatgaatctacatcctgttactgccttttggacccctttgcgtgtcatgtgctcctggacagctttgggacctatgcgctcactggagagccaatcacagactgtgccgtgaagcaactgaaggtggcggtttttggctgcatgtcctgtaactccctggattacaacttgagagtttactgtgtggacaataccccttgtgcatttcaggaagtggtttcagatgaaaggcatcaaggtggacagctcctggaagaaccaaaattgctgcatttcaaagggaatacctttagtcttcagatttctgtccttgatattcccccattcctctggagaattaaaccattcactgcctgccaggaagtcccgttctcccgcgtgtggtgcagtaaccggcagcccctgcactgtgccttctccctggagcgttatacgcccactaccacccagctgtcctgcaaaatctgcattcggcagctcaaaggccatgaacagatcctccaagtgcagacatcaatcctagagagtgaacgagaaaccatcactttcttcgcacaagaggacagcactttccctgcacagactggccccaaagccttcaaaattccctactccatcagacagcggatttgtgctacatttgatacccccaatgccaaaggcaaggactggcagatgttagcacagaaaaacagcatcaacaggaatttatcttatttcgctacacaaagtagcccatctgctgtcattttgaacctgtgggaagctcgtcatcagcatgatggtgatcttgactccctggcctgtgcccttgaagagattgggaggacacacacgaaactctcaaacatttcagaatcccagcttgatgaagccgacttcaactacagcaggcaaaatggactctagtccacttcctcccatgagacagagtgatggccagcttggggacatttgctttaaatgggaaagaggccgctttctgcccagtggcgttgggggaattcagccttcatttataatcagtgagattcccctgttgaagaaactaaattttatataggtaaaacatgttaatagggaagagtacaagctctcttacatataagagggctctactatctccttggaatccacatttgggttaactcctcagatttggagtggcaaggataaaagtgagggcagaagtagctgtgggaaaagatgagctatgataatgctgggaaggcagagattgattaagtgcatgctttgaaataggtttttaatgatgtgccccaaagggccagctgattctggtactagattgtcagagttttctaccaactggcatctgtgatgtcagagatcattgtaaaaatggcttttagacgtgaaacagggttgccaacccatttgtatgacttcaacaacgtcaaggagggcatttagaatttagaatctgagcacatcacaccagcaccagctccctgtctcttctagccacttaatggagacacaatggagaggtaagacagaccacaaactagttcttatagtgtactccaccttttacttttttcctgagacaaatctacccttattctttcttcctcttccttaccccttgcagtagggaggtatcaaggagcataattaaacttgtcaatacggaaagttgttttttctaacacaacaaagtgggaccatctctattcccatctaagccactcaaattgctgagtgctattagaacacagcttattacatggatatggggacaggagagattaaagcaggttcaaaaacacatgaactgcagatgccataggcctcaaatcagctgtaattctaggagacacgtgttgatctagttatctaacattgttgttataagaaaatgagtttactgcatttttcaatccagattcttgaaattgtctaacatgtgggtactgtgtcatcacaaaatctctcagtaaggctatatgtgatcctcattttgcctcttgggaaattagcagatagtctttgctctaaatgatatctgagtaaatagacttgaggaatcctctaccacagtgtccctgaaaccacatgcatcattcaggaagccttcaccctgtgactattcagcctccctgaatatgctttctctatagaaccactaacatatggctattgctctatgatttttttttttacattaggaggcagtgatattgtggaagattgaaatccacagataattcatgaccctcatcttatcactttactccatctttttatcctattaaattatttttgacaagatgtcctggtagactaaaggtgaacagatttgctcttgctcatcttctggtggatattttaacttgctattcacaatcaggacaaccaaagtcaaggacccagatgaaccacaaggcagctagtcagctacttagaggttggttacattcgaataaaaagtagtcagggaatgggggaggtggggagttggggagtacttggcagttgggatatgatccatttttttaaacaagttttttgtagatcccttgtaaaataataataataatgttgtgaatctccatgccaagtgaaaaaggcctaaagatgagttgaatttgtgataccatgggtaaggcatggaagaactcttgaatgtgttggccattttctctaactaacatgtggtatgtatggtcccctatattagatagaagtctttgctacatgtaattcaaaagcatctcgcttttctcaggaaccaaaggcttatgatgtaggacaaagaaatcatcttagaactgtcaagcatattttcacaataccatgtcaagatcaggaaaacacccttttgctagtgtgcttaacttatttatttcttctaggaaacaatagataaacagcatgaaaatgtaaatcatctggcatcactgatagaatttctgaaagagaaagagaagtagatggtcaaccagtcactagttggttggcatgaggtggtgtgcagaggaaagctgcattcactattgagtaaaaacttgtagaaagcacattatagagcttatgttggaatccatcttggaggatttttgttttaaactgtctttagcattttccctcttcccttctaatgggcattataattgtttcatctactctgtgaatctacataggtctttttttttagatgtttgatacattttaagtatttttaaatagatgaaaattctaaatgattttccctcaaatctatctagattattttaagatgagacaagattattgtcaatccctgaatgtctggagttacctcccatggatttttttttcctttggcctgggttttataaacaacttgaacatcatatcatataggataacaaaggaggaagttaacttaattcacctcagacttcagcctaagattcaatcaaattcatccttcagcctgtcttgtttcttctttatgtttcttttacttattgctgctaggatcctacataggatttctatagaaatgtatgaaattctgtggtcactgcatgtcaggattgcacagtatgttacaatacaatttcaaagagaacccacatttgtgagatttacagaccaaggtgtggtggaggaggtagaattgcagatcagataaaaagtgagcttacacttgaacttagttattcactgtgacctaaatttagtcctattgtaatatgtgcctgtcacaacacaaatacccctcttgaaagagatttactcatctatccaagcacttaatttggaaattttattgtcctattgcaaaatgaaacaaaattaaaagtggcctcgagtacttggtaagttacttaaaatttttacaaaaatatcccactcaatgccaaatctttcagtcctcaaaggcatttaagtccaatagtcatgctttaaatatggctttaaattatgccaccaaaatggtgcacttcacagattcaccagactgtagcatcataaagttaatttacagtttttacaacattgcttctacattcttactggtttacattaaaatcctttaagccaaaaggaagcttgctctatggatttaaatgcaaacttcatttaccagtgcaggaagtctcataaaactcagatgtactcccacaaaaattttattggcctttttgtaagagatgaaaaagaattgacacagttctctttaaagagaagaacttttttattattatttttatctccaactgcaggtggtgtcttttgccaaggtctctgtatttttctttcagttgtctttgggaggggatgttaagtcaaatcactaaaacagggttctctttggattaaaagttctggatttattgcaactattttccttgagaaacattctcagcatcaggattgataaacaaatgtagatgattaaaataggataattggttttagataatatcttctactgccaaacttctggcaaatttacctgtgaatttcaaaatgttataaaatctcttgatatgcttttgtttttccttttagccattttctcttcaatttcttagtccctctgccctctgtaaatgtgttgagtgatatagctatcagatgtattgaaggcaaagttctcgcagaggtctctgttccagctctgtaaaggtcacaggaatcgtgaaggagctgagaaatcttcctctccggcccactgtctgtggcccattgtcattgtttcctcatgaaacattgcagagtttgaatcctcagtaactctcattgactggattagaggtgatggccacagcaaatgggagagcaaaatgttggcctacagagaatgacacaattttattcgcctttggtgttagttgccatagtgctgtatttgaaaatcgatgctttagccaaaagctgaatgaccaccgtttccgtagtttccactgttttgtctgcatagaattttcctgaactacaagcaaaaatgtattttgtccaatgtcacaaaagtgaaaatgttactaatctt

SEQ ID NO: 198168 - DNA, 2448 bp, Homo sapiens
  Payload ID: 19095
  Gene Name: unc-5 netrin receptor D
  ENST ID: ENST00000449677
  CDS Start-End: 112-1701
ttgcctacacttaaactcaacttatgtgtattgtaaatctctaagacaatattagtcttaccaaacttacctgaccattttgttttatttttatttttagccaagaatatcatggaactaatgatacaagaaaaatcctttggtaactccctgctcctgaattctgccatgcagccagatctgacagtgagccggacatacagcggacccatctgtctgcaggaccctctggacaaggagctcatgacagagtcctcactctttaaccctttgtcggacatcaaagtgaaagtccagagctcgttcatggtttccctgggagtgtctgagagagctgagtaccacggcaagaatcattccaggacttttccccatggaaacaaccacagctttagtacaatgcatcccagaaataaaatgccctacatccaaaatctgtcatcactccccacaaggacagaactgaggacaactggtgtctttggccatttaggggggcgcttagtaatgccaaatacaggggtgagcttactcataccacacggtgccatcccagaggagaattcttgggagatttatatgtccatcaaccaaggtgaacccagcctccagtcagatggctctgaggtgctcctgagtcctgaagtcacctgtggtcctccagacatgatcgtcaccactccctttgcattgaccatcccgcactgtgcagatgtcagttctgagcattggaatatccatttaaagaagaggacacagcagggcaaatgggaggaagtgatgtcagtggaagatgaatctacatcctgttactgccttttggacccctttgcgtgtcatgtgctcctggacagctttgggacctatgcgctcactggagagccaatcacagactgtgccgtgaagcaactgaaggtggcggtttttggctgcatgtcctgtaactccctggattacaacttgagagtttactgtgtggacaataccccttgtgcatttcaggaagtggtttcagatgaaaggcatcaaggtggacagctcctggaagaaccaaaattgctgcatttcaaagggaatacctttagtcttcagatttctgtccttgatattcccccattcctctggagaattaaaccattcactgcctgccaggaagtcccgttctcccgcgtgtggtgcagtaaccggcagcccctgcactgtgccttctccctggagcgttatacgcccactaccacccagctgtcctgcaaaatctgcattcggcagctcaaaggccatgaacagatcctccaagtgcagacatcaatcctagagagtgaacgagaaaccatcactttcttcgcacaagaggacagcactttccctgcacagactggccccaaagccttcaaaattccctactccatcagacagcggatttgtgctacatttgatacccccaatgccaaaggcaaggactggcagatgttagcacagaaaaacagcatcaacaggaatttatcttatttcgctacacaaagtagcccatctgctgtcattttgaacctgtgggaagctcgtcatcagcatgatggtgatcttgactccctggcctgtgcccttgaagagattgggaggacacacacgaaactctcaaacatttcagaatcccagcttgatgaagccgacttcaactacagcaggcaaaatggactctagtccacttcctcccatgagacagagtgatggccagcttggggacatttgctttaaatgggaaagaggccgctttctgcccagtggcgttgggggaattcagccttcatttataatcagtgagattcccctgttgaagaaactaaattttatataggtaaaacatgttaatagggaagagtacaagctctcttacatataagagggctctactatctccttggaatccacatttgggttaactcctcagatttggagtggcaaggataaaagtgagggcagaagtagctgtgggaaaagatgagctatgataatgctgggaaggcagagattgattaagtgcatgctttgaaataggtttttaatgatgtgccccaaagggccagctgattctggtactagattgtcagagttttctaccaactggcatctgtgatgtcagagatcattgtaaaaatggcttttagacgtgaaacagggttgccaacccatttgtatgacttcaacaacgtcaaggagggcatttagaatttagaatctgagcacatcacaccagcaccagctccctgtctcttctagccacttaatggagacacaatggagaggtaagacagaccacaaactagttcttatagtgtactccaccttttacttttttcctgagacaaatctacccttattctttcttcctcttccttaccccttgcagtagggaggtatcaaggagcataattaaacttgtcaatacgg

SEQ ID NO: 198169 - DNA, 3532 bp, Homo sapiens
  Payload ID: 19095
  Gene Name: unc-5 netrin receptor D
  ENST ID: ENST00000416672
  CDS Start-End: 11-2887
ggcgaggagcatggggagagcggcggccaccgcaggcggcggcggaggggcgcgccgctggctcccgtggctggggctgtgcttctgggcggcagggaccgcggctgcccgaggaactgacaatggcgaagcccttcccgaatccatcccatcagctcctgggacactgcctcatttcatagaggagccagatgatgcttatattatcaagagcaaccctattgcactcaggtgcaaagcgaggccagccatgcagatattcttcaaatgcaacggcgagtgggtccatcagaacgagcacgtctctgaagagactctggacgagagctcaggtttgaaggtccgcgaagtgttcatcaatgttactaggcaacaggtggaggacttccatgggcccgaggactattggtgccagtgtgtggcgtggagccacctgggtacctccaagagcaggaaggcctctgtgcgcatagcctatttacggaaaaactttgaacaagacccacaaggaagggaagttcccattgaaggcatgattgtactgcactgccgcccaccagagggagtccctgctgccgaggtggaatggctgaaaaatgaagagcccattgactctgaacaagacgagaacattgacaccagggctgaccataacctgatcatcaggcaggcacggctctcggactcaggaaattacacctgcatggcagccaacatcgtggctaagaggagaagcctgtcggccactgttgtggtctacgtgaatggaggctggtcttcctggacagagtggtcagcctgcaatgttcgctgtggtagaggatggcagaaacgttcccggacctgcaccaacccagctcctctcaatggtggggccttttgtgagggaatgtcagtgcagaaaataacctgcacttctctttgtcctgtggatgggagctgggaagtgtggagcgaatggtccgtctgcagtccagagtgtgaacatttgcggatccgggagtgcacagcaccacccccgagaaatgggggcaaattctgtgaaggtctaagccaggaatctgaaaactgcacagatggtctttgcatcctagataaaaaacctcttcatgaaataaaaccccaaagatggagtaggagaggcattgagaatgccagcgacattgctttgtactcgggcttgggtgctgccgtcgtggccgttgcagtcctggtcattggtgtcaccctttacagacggagccagagtgactatggcgtggacgtcattgactcttctgcattgacaggtggcttccagaccttcaacttcaaaacagtccgtcaaggtaactccctgctcctgaattctgccatgcagccagatctgacagtgagccggacatacagcggacccatctgtctgcaggaccctctggacaaggagctcatgacagagtcctcactctttaaccctttgtcggacatcaaagtgaaagtccagagctcgttcatggtttccctgggagtgtctgagagagctgagtaccacggcaagaatcattccaggacttttccccatggaaacaaccacagctttagtacaatgcatcccagaaataaaatgccctacatccaaaatctgtcatcactccccacaaggacagaactgaggacaactggtgtctttggccatttaggggggcgcttagtaatgccaaatacaggggtgagcttactcataccacacggtgccatcccagaggagaattcttgggagatttatatgtccatcaaccaaggtgaacccagcctccagtcagatggctctgaggtgctcctgagtcctgaagtcacctgtggtcctccagacatgatcgtcaccactccctttgcattgaccatcccgcactgtgcagatgtcagttctgagcattggaatatccatttaaagaagaggacacagcagggcaaatgggaggaagtgatgtcagtggaagatgaatctacatcctgttactgccttttggacccctttgcgtgtcatgtgctcctggacagctttgggacctatgcgctcactggagagccaatcacagactgtgccgtgaagcaactgaaggtggcggtttttggctgcatgtcctgtaactccctggattacaacttgagagtttactgtgtggacaataccccttgtgcatttcaggaagtggtttcagatgaaaggcatcaaggtggacagctcctggaagaaccaaaattgctgcatttcaaagggaatacctttagtcttcagatttctgtccttgatattcccccattcctctggagaattaaaccattcactgcctgccaggaagtcccgttctcccgcgtgtggtgcagtaaccggcagcccctgcactgtgccttctccctggagcgttatacgcccactaccacccagctgtcctgcaaaatctgcattcggcagctcaaaggccatgaacagatcctccaagtgcagacatcaatcctagagagtgaacgagaaaccatcactttcttcgcacaagaggacagcactttccctgcacagactggccccaaagccttcaaaattccctactccatcagacagcggatttgtgctacatttgatacccccaatgccaaaggcaaggactggcagatgttagcacagaaaaacagcatcaacaggaatttatcttatttcgctacacaaagtagcccatctgctgtcattttgaacctgtgggaagctcgtcatcagcatgatggtgatcttgactccctggcctgtgcccttgaagagattgggaggacacacacgaaactctcaaacatttcagaatcccagcttgatgaagccgacttcaactacagcaggcaaaatggactctagtccacttcctcccatgagacagagtgatggccagcttggggacatttgctttaaatgggaaagaggccgctttctgcccagtggcgttgggggaattcagccttcatttataatcagtgagattcccctgttgaagaaactaaattttatataggtaaaacatgttaatagggaagagtacaagctctcttacatataagagggctctactatctccttggaatccacatttgggttaactcctcagatttggagtggcaaggataaaagtgagggcagaagtagctgtgggaaaagatgagctatgataatgctgggaaggcagagattgattaagtgcatgctttgaaataggtttttaatgatgtgccccaaagggccagctgattctggtactagattgtcagagttttctaccaactggcatctgtgatgtcagagatcattgtaaaaatggcttttagacgtgaaacagggttgccaacccatttgtatgacttcaacaacgtcaaggagggcatttagaatttagaatctgagcacatcacaccagcaccagctccctgtctcttctagccacttaatggagacacaatggagaggtaagacagaccacaaactagttcttatagtgtactccacctt

SEQ ID NO: 198170 - DNA, 1143 bp, Homo sapiens
  Payload ID: 19096
  Gene Name: unc-50 homolog (C. elegans)
  Uniprot ID: Q53HI1
  ENST ID: ENST00000357765
  CDS Start-End: 153-932
ggcggaagtcggttcccgtgacgcggcgcgccccaagggccggctccgttgagggaagggaagcccgcccggtggcggctggggtcggctgctgggaggaggtggtgggctggttcggacgtgggtcgaggctgtagcaggactccaggaagatgttaccgagtacttcagtgaattccttagtgcaggggaacggagtcttgaattccagggatgcggcaagacacacagccggagcgaaacgctacaaatatctgagaaggcttttccgctttcggcaaatggactttgaatttgctgcctggcagatgctctacctgttcacatccccacagagagtttacagaaattttcattatcgaaaacagacgaaggaccagtgggccagagatgaccctgctttcttggtcctgttaagtatctggctctgtgtgtccactataggatttggctttgtgctggacatgggattctttgagacaataaagcttctcctttgggttgtactcatagattgtgtaggcgttggtcttctgatagcaactttaatgtggttcatctctaacaagtatttagtgaaacgacagagcagagactatgatgtggaatggggctatgcttttgatgtgcatctcaatgctttttatccactcctggtcattttgcattttatccagctttttttcatcaaccatgttatcctgacagacacatttattggatatttagttggaaataccttatggttggttgcagttggctattatatctatgtaactttcctgggatacagtgcattgccatttttgaaaaatacagtaattcttctgtatccatttgcacctctgattctgctctacgggctttccctggcactgggatggaacttcacccatactctctgttctttctataagtacagagtgaaataaaaagtgagaagaagattcaatcgtaactgtgtcaacagtattgtgaagtgatcatttcttgtaaaacttgtaaataaactatcatctttgtagatatcttaaaggtgtaaagtttgcaaatttgaagaaatatatattaacactgtggtcaggtacattccttaaaactaattaaatgtacatttctataataaatattttttaaactaaa

SEQ ID NO: 198171 - DNA, 613 bp, Homo sapiens
  Payload ID: 19096
  Gene Name: unc-50 homolog (C. elegans)
  ENST ID: ENST00000393493
  CDS Start-End: 1-386
ggttcatctctaacaagtatttagtgaaacgacagagcagagactatgatgtggaatggggctatgcttttgatgtgcatctcaatgctttttatccactcctggtcattttgcattttatccagctttttttcatcaaccatgttatcctgacagacacatttattggatatttagttggaaataccttatggttggttgcagttggctattatatctatgtaactttcctgggatacagtgtttggattcctttcttttccagcattgccatttttgaaaaatacagtaattcttctgtatccatttgcacctctgattctgctctacgggctttccctggcactgggatggaacttcacccatactctctgttctttctataagtacagagtgaaataaaaagtgagaagaagattcaatcgtaactgtgtcaacagtattgtgaagtgatcatttcttgtaaaacttgtaaataaactatcatctttgtagatatcttaaaggtgtaaagtttgcaaatttgaagaaatatatattaacactgtggtcaggtacattccttaaaactaattaaatgtacatttctataataaatattttttaaactaaa

SEQ ID NO: 198172 - DNA, 1276 bp, Homo sapiens
  Payload ID: 19096
  Gene Name: unc-50 homolog (C. elegans)
  ENST ID: ENST00000409347
  CDS Start-End: 235-1065
ggcccctcggccggcgatagagttgcggctaaaatgaaaggacgcccagttacatttgcatcgtagataaagaaagagcatttagtataagcatgtccgaaatgttgcgtgggatgtaggcatactaaaaccttattcgtggcctgtctgaaatccaaatggagctggggttgggaagaacatggaaagtgacctccctgccaaataactcagaagaggagtgtcggtagccaaatgtttcttcagaatacgtgtaaaagaaatgtttttcttccatctaggaagatgttaccgagtacttcagtgaattccttagtgcaggggaacggagtcttgaattccagggatgcggcaagacacacagccggagcgaaacgctacaaatatctgagaaggcttttccgctttcggcaaatggactttgaatttgctgcctggcagatgctctacctgttcacatccccacagagagtttacagaaattttcattatcgaaaacagacgaaggaccagtgggccagagatgaccctgctttcttggtcctgttaagtatctggctctgtgtgtccactataggatttggctttgtgctggacatgggattctttgagacaataaagcttctcctttgggttgtactcatagattgtgtaggcgttggtcttctgatagcaactttaatgtggttcatctctaacaagtatttagtgaaacgacagagcagagactatgatgtggaatggggctatgcttttgatgtgcatctcaatgctttttatccactcctggtcattttgcattttatccagctttttttcatcaaccatgttatcctgacagacacatttattggatatttagttggaaataccttatggttggttgcagttggctattatatctatgtaactttcctgggatacagtgcattgccatttttgaaaaatacagtaattcttctgtatccatttgcacctctgattctgctctacgggctttccctggcactgggatggaacttcacccatactctctgttctttctataagtacagagtgaaataaaaagtgagaagaagattcaatcgtaactgtgtcaacagtattgtgaagtgatcatttcttgtaaaacttgtaaataaactatcatctttgtagatatcttaaaggtgtaaagtttgcaaatttgaagaaatatatattaacactgtggtcaggtacattccttaaaactaattaaatgtacatttctataataaatattttttaaactaaa

SEQ ID NO: 198173 - DNA, 2172 bp, Homo sapiens
  Payload ID: 19096
  Gene Name: unc-50 homolog (C. elegans)
  ENST ID: ENST00000409975
  CDS Start-End: 1131-1961
ggcggaagtcggttcccgtgacgcggcgcgccccaagggccggctccgttgagggaagggaagcccgcccggtggcggctggggtcggctgctgggaggaggtggtgggctggttcggacgtgggtcgaggctgtagcaggactccaggtgaggcctgaggaccactctgccctcccgcggcccgggctcgcgccgggggccatttaatcccgacagcttgcggcctgacgtcgctgcggcctggcagtgaccatgtcggcgtccggcccctcggccggcgatagagttgcggctaaaatgaaaggacgcccagttacatttgcatcgtagataaagaaagagcatttagtataagcatgtccgaaatgttgcgtgggatgtaggcatactaaaaccttattcgtggcctgtctgaaatccaaatggagctgggtattctgtgtttttatttgctaaatctggcagccgtacccgcggccccgggcagggagggagcagctgggctcggccagaccctgccggcgtctggggggcctgcgaagtggaggggagacgggcagccgggcagtggccggcgttccccggagctcggaccggttggattggactccgacgctaccgctccctctgctgaactattccggatgtaaaacactagggatcggagtttttcttggttttttaatctcattctagtgaccgagaagcttgctggcagtgcgctgatggatctgtgtgaataggccatttatttgacctcttcagtaacactgttctaaccggctgaaactgctttcttaggcattttcttaaaagcttggtggttaagagcacggaatttcgagtcagatttccaatcttggctctatcactatcctcggagtcatggggcagtcacatcatccctgtctctgtaatggtagctgcccctggataagtgttattaggtgattcagaagggtgggctgttgcccttgcctgaggttgcagtctgcggttcccaagccccaagacccgcctcagaactaactgcatttgcttttgactcctggcctttctctagggttgggaagaacatggaaagtgacctccctgccaaataactcagaagaggagtgtcggtagccaaatgtttcttcagaatacgtgtaaaagaaatgtttttcttccatctaggaagatgttaccgagtacttcagtgaattccttagtgcaggggaacggagtcttgaattccagggatgcggcaagacacacagccggagcgaaacgctacaaatatctgagaaggcttttccgctttcggcaaatggactttgaatttgctgcctggcagatgctctacctgttcacatccccacagagagtttacagaaattttcattatcgaaaacagacgaaggaccagtgggccagagatgaccctgctttcttggtcctgttaagtatctggctctgtgtgtccactataggatttggctttgtgctggacatgggattctttgagacaataaagcttctcctttgggttgtactcatagattgtgtaggcgttggtcttctgatagcaactttaatgtggttcatctctaacaagtatttagtgaaacgacagagcagagactatgatgtggaatggggctatgcttttgatgtgcatctcaatgctttttatccactcctggtcattttgcattttatccagctttttttcatcaaccatgttatcctgacagacacatttattggatatttagttggaaataccttatggttggttgcagttggctattatatctatgtaactttcctgggatacagtgcattgccatttttgaaaaatacagtaattcttctgtatccatttgcacctctgattctgctctacgggctttccctggcactgggatggaacttcacccatactctctgttctttctataagtacagagtgaaataaaaagtgagaagaagattcaatcgtaactgtgtcaacagtattgtgaagtgatcatttcttgtaaaacttgtaaataaactatcatctttgtagatatcttaaaggtgtaaagtttgcaaatttgaagaaatatatattaacactgtggtcaggtacattccttaaaactaattaaatgtacatttctataataaatattttttaaactaaa

SEQ ID NO: 198174 - DNA, 489 bp, Homo sapiens
  Payload ID: 19096
  Gene Name: unc-50 homolog (C. elegans)
  ENST ID: ENST00000423713
  CDS Start-End: 1-278
ggttcatctctaacaagtatttagtgaaacgacagagcagagactatgatgtggaatggggctatgcttttgatgtgcatctcaatgctttttatccactcctggtcattttgcattttatccagctttttttcatcaacccattgccatttttgaaaaatacagtaattcttctgtatccatttgcacctctgattctgctctacgggctttccctggcactgggatggaacttcacccatactctctgttctttctataagtacagagtgaaataaaaagtgagaagaagattcaatcgtaactgtgtcaacagtattgtgaagtgatcatttcttgtaaaacttgtaaataaactatcatctttgtagatatcttaaaggtgtaaagtttgcaaatttgaagaaatatatattaacactgtggtcaggtacattccttaaaactaattaaatgtacatttctataataaatattttttaaactaaa

SEQ ID NO: 198175 - DNA, 5310 bp, Homo sapiens
  Payload ID: 19097
  Gene Name: unc-51 like autophagy activating kinase 1
  Uniprot ID: O75385
  ENST ID: ENST00000321867
  CDS Start-End: 352-3504
gaggcccgggcgccgcggctcttttgtttctccgttggggccgagcccgggccctagttggagccggagtcggagtcggagtcggatccggattcggattagcagcccgggaagagtgccgtggcacaggcgccggagggagcgcgaccctcggaccccgcctggcccgcggggctgggacccggccccggcctgcccgatggggcgcgcggccccggagatgcgccctcgcccggccccgcgcccccggccccgcgcccccggcccgcccgccccggcccgcgcctccgcctgagtcccccgcgccttggcccgccaccccccgccccgcgcccccggcccgcctgcgccatggagcccggccgcggcggcacagagaccgtgggcaagttcgagttctcccgcaaggacctgatcggccacggcgccttcgcggtggtcttcaagggccgccaccgcgagaagcacgatttggaggtcgccgtcaagtgcattaacaagaagaacctcgccaagtctcagacgctgctggggaaggaaatcaaaatcctgaaggaactgaaacatgaaaacatcgtggccctgtacgacttccaggaaatggctaattctgtctacctggttatggagtactgcaacggtggggacctggccgactacctgcacgccatgcgcacgctgagcgaggacaccatcaggctcttcctgcagcagatcgcgggcgccatgcggcttctgcacagcaaaggcatcatccaccgcgacctgaaaccgcagaacatcctgctgtccaaccccgccggccgccgcgccaaccccaacagcatccgcgtcaagatcgctgacttcggcttcgcgcggtacctccagagcaacatgatggcggccacactctgcggctcccccatgtacatggcccccgaggtcatcatgtcccagcactacgacgggaaggcggacctgtggagcatcggcaccatcgtctaccagtgcctgacggggaaggcgcccttccaggccagcagcccccaggacctgcgcctgttctacgagaagaacaagacgttggtccccaccatcccccgggagacctcggccccgctgcggcagctgctcctggccctactgcaacgcaaccacaaggaccgcatggacttcgatgagttttttcatcaccctttcctcgatgccagcccctcggtcaggaaatccccacccgtgcctgtgccctcgtacccaagctcggggtccggcagcagctccagcagcagctccacctcccacctggcctccccgccgtccctgggcgagatgcagcagctgcagaagaccctggcctccccggctgacaccgctggcttcctgcacagctcccgggactctggtggcagcaaggactcttcctgtgacacagacgacttcgtcatggtccccgcgcagtttccaggtgacctggtggctgaggcgcccagtgccaaacccccgccagacagcctgatgtgcagtgggagctcactggtggcctctgcgggcttggagagccacggccggaccccatctccatccccaccctgcagcagctcccccagtccctcaggccgggctggcccgttctccagcagcaggtgcggcgcctctgtccccatcccagtccccacgcaggtgcagaactaccagcgcattgagcgaaacctgcagtcacccacccagttccaaacacctcggtcctctgccatccgcaggtcaggcagcaccagccccctgggctttgcaagggccagcccctcgccccctgcccacgctgagcatggaggcgtcctggccaggaagatgtctctgggtggaggccggccctacacgccatctcctcaagttggaaccatccctgagcggccaggctggagcgggacgccctccccacagggagctgagatgcggggtggcaggtcccctcgtccaggctcctctgcacccgagcactctccccgcacttccgggctgggctgccgcctgcacagcgcccccaacctgtctgacttgcacgtcgtccgccccaagctgcccaaaccccccacggaccccctgggagctgtgttcagcccaccacaggccagccctccccagccgtcccacggcctgcagtcctgccggaacctgcggggctcacccaagctgcccgacttcctgcagcgaaaccccctgccccccatcctgggctcccccaccaaggctgtgccctcctttgacttcccgaagacccccagctcccagaacctgctggccctcctagcccggcagggcgtggtgatgacgccccctcgaaaccggacgctgcccgacctctcggaggtgggacccttccatggtcagccgttgggccctggcctgcggccaggcgaggaccccaagggcccctttggccggtctttcagcaccagccgcctcactgacctgctccttaaggcggcgtttgggacacaagccccggacccgggcagcacggagagcctgcaggagaagcccatggagatcgcaccctcagctggctttggagggagcctgcacccaggagcccgtgctgggggcaccagcagcccttccccggtggtcttcaccgtgggctctcccccgagcgggagcacgcccccccagggcccccgcaccaggatgttctcagcgggccccactggctctgccagctcttctgcccgccacctggtgcctgggccctgcagcgaggccccagcccctgagctccctgctccaggacacggctgcagctttgccgaccccattactgcgaacctggagggggctgtgaccttcgaggcccccgacctccctgaggagaccctcatggagcaagagcacacggagatcctgcgtggcctgcgcttcacgctgctgttcgtgcagcacgtcctggagatcgcagccctgaagggcagcgccagtgaggcggcggggggccctgagtaccagctgcaggagagtgtggtggccgaccagatcagcctgctgagccgagaatggggcttcgcggaacagctggtgctgtacctgaaggtggccgagctactgtcctccggcctgcaaagtgccatcgaccagatccgggccggcaagctctgcctgtcgtccactgtgaagcaggtggtgcgcaggctgaatgagctgtacaaggccagcgtggtgtcctgccagggcctgagcctgcggctgcagcgcttcttcctggacaagcagcggctcctggaccgcattcacagcatcactgccgagaggctcatcttcagccacgctgtgcagatggtgcagtcggctgccctggacgagatgttccagcaccgtgagggctgcgtcccacgctaccacaaggccctgctgctcctggaggggctgcagcacatgctctcggaccaggccgacatcgagaacgtcaccaagtgcaagctgtgcattgagcggagactctcggcgctgctgactggcatctgtgcctgacctttctggcctggctgggccccccgtcctgccgagccctgcagagtgggctctgtgtgctggctggactcctcgggacaagcccatggcgctgatcgctggtgctgagccctgccctgggccccacggacagtcagcctgccggcctccctgcagctcacggggcagaaccagcacatctggagccacacagcttggggggtgtctcccatcttttacaggtggggatcacagaatttctgcccctccagctgcctggctcagcaggcgtgggtgccaccaccctctagccccagggcagccccggaggacaggcaagggcctgagaccactgccgactcaaagccaaagcgagctcctgcttagggaaggtcagcaggcactgtgcccaggaagagcctgcggcctcggcgtcccccagtctccaggagcctctccctccgagatacccacccagctttgtcaatcacccaagcactttatgcatatagagacagaacctggacctcaccagggactgctgggcagcgattcctggcagtggcctggtgtttgtacatacacatatgcagacacatgccagggccccccaagcccgagcaccggaccacgttgctgcccaggtctggacctcagcgggagaactggctccggggggagtggggccctgcgctagaggcagaggcagttctttgttcaagcgttcctctggggaccggcagcagaggcaccgtgttctctcagccctggatacgtcttgtaatctttcacactttattcctaaaacgtgtcttatttttatgcagctcattttttctttaaaggagaaaacttgtaggtgtttaagaattggttttgggagggcgaggactgggccaggttagaggcagatggcacaggggcgtgtggcgggcgggtgaggctgctttgcacacctgtgttggtggctgtcccctgccgcccctccctgtggcagcagcaggacaggtgtgtgcccagcaccctccctacctgggcctggaagcagatgaggggaatacttcatgcaaagaaaaaagtaacatgtgcaaaagctccccgtccagctttgacagtcagttttgatgtcagctcctcggcagggtaggcctgatgacagccctgtccctccctgcctctgccttgcccaaggccacggagggcatctgcagagaggcctgccttccggattccaggcgggcatgccctgcaaaccccgcctgggcctcccttggtctgcccagccctcgattagccctgcctgaatcagtagatacttgaacgagtccccagtctgcgggaggcagtggtggggccatggacccatgcggggggttccagggtcacacgccacataacagacaaaaatacacacacgtgtgtttttctttgcaatacttgaaatattgccactgtgcttggacttagaagaagaaaatccccgtgacttcttcctcatcaccttgatggctttattctcaccttgtggggcatgtttgtatttattgcttcatggccgactggaatcctgagtcctgggaagctggcactgcggggatcttgcccggtgtcctggtcctcttgcttccgtcgcggccgcatgtgcgtgtgtccaagcaggtcctgggcgcctcaactgctgcccctggttgaatgttctcttgatagtgctggaccctttgtctattttaaagcgaattttgtgtgatttcctgccctttgcgttatattgtataataccaacgtaaggaaataaacctttggaattgttgggctggtgtcaccact

SEQ ID NO: 198176 - DNA, 3908 bp, Homo sapiens
  Payload ID: 19098
  Gene Name: unc-51 like autophagy activating kinase 2
  Uniprot ID: Q8IYT8
  ENST ID: ENST00000361658
  CDS Start-End: 520-3630
agtcgcgcgggagcgggtagcgcgcgcgagggcgttgggcgccgccgcgaggcggggaagcgcggggccgcggcggtgcgggttctagggcggcggccgtcgccgtcgcagcagcgccccgagcggggagggccgaggaggcccgacgagctggggatggagagtaccgggcccctcactgcctcagagcgcgtgtgcggctctgggcgcgcacagtgacggtgacggcacccctggcccggcagcgccgaggccgcttcgccagacagccagcggccggcggcaggccgggccatgagcggcaggggccgggccgggcctcgctgaccctggctccgcgcggcagcttccccagtttccgctccggtctctcggcatgagagtccgcccgggcccggggctgcggctgccccagacccgccgcacgctggcgcgctccgggcccgcggagccgcggtgctgatacctgcgccgcactgcgccgcccgcccgtccgctgtgtgccccgggggcgcggccatggaggtggtgggtgacttcgagtacagcaagagggatctcgtgggacacggggccttcgccgtggtcttccgggggcggcaccgccagaaaactgattgggaggtagctattaaaagtattaataaaaagaacttgtcaaaatcacaaatactgcttggaaaggaaattaaaatcttaaaggaacttcagcatgaaaatattgtagcactctatgatgttcaggaattacccaactctgtctttttggtgatggagtattgcaatggtggagacctcgcagattatttgcaagcgaaagggactctcagtgaagacacgatcagagtgtttctgcatcagattgctgctgccatgcgaatcctgcacagcaaaggaatcatccacagagatctcaaaccacagaacatcttgctgtcctatgccaatcgcagaaaatcaagtgtcagtggtattcgcatcaaaatagcggattttggttttgctcgttacctacatagtaacatgatggctgcaacactgtgtggatccccgatgtacatggctcctgaggttattatgtctcaacattatgatgctaaggctgacttgtggagcataggaacagtgatataccaatgcctagttggaaaaccaccttttcaggccaatagtcctcaagacttaaggatgttttatgaaaaaaacaggagcttaatgcctagtattcccagagaaacatcaccttatttggctaatctccttttgggtttgcttcagagaaaccaaaaagatagaatggactttgaagcattttttagccatccttttcttgagcaaggtccagtaaaaaaatcttgcccagttccagtgcccatgtattctggttctgtctctggaagctcctgtggcagctctccatcttgtcgttttgcttctccaccatcccttccagatatgcagcatattcaggaagaaaacttatcttccccaccattgggtcctcccaactatctacaagtttccaaagattctgccagtactagtagcaagaactcttcttgtgacacggatgactttgttttggtgccacacaacatctcgtcagaccactcatgtgatatgccagtggggactgctggcagacgtgcttcaaatgaattcttggtgtgtggagggcagtgtcagcctactgtgtcacctcacagcgaaacagcaccaattccagttcctactcaaataaggaattatcagcgcatagagcagaatcttacatctactgccagctcaggcacaaatgtacatggttctccaagatctgcagtggtacgaaggtccaacaccagccccatgggcttcctccggccgggatcatgctccccagtaccagcagacacagcacagacagttggacgaaggctctccactgggtcttctaggccttactcaccttcccctttggttggtaccattcctgagcaattcagtcagtgctgctgtgggcatcctcagggccatgactccaggagtagaaactcctcaggttctccagtgccacaagctcagtccccacagtctctcttatcgggtgctagactgcagagcgcccccaccctcactgacatctatcagaacaagcagaagctcagaaaacagcactctgaccccgtgtgcccatcccatactggggctgggtacagctactcgcctcagcccagtcggcctggcagccttggaacttctcccaccaagcacttggggtcctctccacggagttctgactggttctttaaaactcctttgccaacaatcattggctctcctactaagaccacagctcctttcaaaatccctaaaactcaagcatcttccaacctgttagccttggttactcgtcatgggcctgctgaagaacagtcgaaagatgggaatgagccacgggaatgtgcccattgcctcttagtgcaaggaagtgagaggcagcgggccgagcagcagagcaaggcagtgtttggcagatctgtcagtaccgggaagttatcagatcaacaaggaaagactcctatatgtcgacatcagggcagcacagacagtttaaatacagaacgaccaatggatatagctccggcaggagcctgtggtggtgttctggcacctcctgcaggtacagcagcaagttccaaggctgtcctcttcactgtagggtctcctccacacagtgcggcagcccccacttgtacccacatgttccttcgaacaagaacaacctcagtggggcccagcaactccgggggctctctttgtgccatgagtggccgcgtgtgcgtggggtccccgcctggcccaggcttcggctcttcccctccaggagcagaggcagctcccagcctgagatacgtgccttacggtgcttcaccccccagcctagaggggctcatcacctttgaagcccctgaactgccggaggagacgctgatggagcgggaacacacagacaccttacgccatctgaatgtgatgctgatgttcactgagtgtgtgctggacctgacagccatgaggggaggaaaccctgagctgtgcacatctgctgtgtccttgtaccagatccaggagagtgtggtggtggaccagatcagtcagctgagcaaagactgggggcgggtggagcagctggtgttgtacatgaaagcagcacagctgcttgcggcttctctgcatcttgccaaagcccagatcaagtccgggaaactgagcccatccacagctgtgaaacaagttgtcaagaatctgaacgaacgatataaattctgcatcaccatgtgcaagaaacttacagaaaagctgaatcgattcttctctgacaaacagaggtttattgatgaaatcaacagtgtgactgcagagaaactcatctataattgtgctgtagaaatggttcagtctgcagccctggatgagatgtttcagcagaccgaagatattgtttatcgctatcataaggcagcccttcttttggaaggcctaagtaggattctacaggaccctgcagatattgaaaatgtgcataaatataaatgtagtattgagagaagactgtcggcgctctgccatagcaccgcaaccgtgtgagcagcaggctcatcccgtggaccggtggtgggaacgtgaggaagaggggaaggaaggaagagcttttccatttggtgctccaatgtctcctgctggacccatctgcctagtggaaggcagcaaaatttcaagaaacaggtgaggttgagcagcttggtgcaaccccatggggcctggagttggagctcaacagcaatggatttcagagaccaccctgaaactcccagtaaaaaagacttgggagacatgttaataaactcaagcatttgatcgaccca

SEQ ID NO: 198177 - DNA, 6010 bp, Homo sapiens
  Payload ID: 19098
  Gene Name: unc-51 like autophagy activating kinase 2
  Uniprot ID: Q8IYT8
  ENST ID: ENST00000395544
  CDS Start-End: 501-3611
gcgcgcgcgagggcgttgggcgccgccgcgaggcggggaagcgcggggccgcggcggtgcgggttctagggcggcggccgtcgccgtcgcagcagcgccccgagcggggagggccgaggaggcccgacgagctggggatggagagtaccgggcccctcactgcctcagagcgcgtgtgcggctctgggcgcgcacagtgacggtgacggcacccctggcccggcagcgccgaggccgcttcgccagacagccagcggccggcggcaggccgggccatgagcggcaggggccgggccgggcctcgctgaccctggctccgcgcggcagcttccccagtttccgctccggtctctcggcatgagagtccgcccgggcccggggctgcggctgccccagacccgccgcacgctggcgcgctccgggcccgcggagccgcggtgctgatacctgcgccgcactgcgccgcccgcccgtccgctgtgtgccccgggggcgcggccatggaggtggtgggtgacttcgagtacagcaagagggatctcgtgggacacggggccttcgccgtggtcttccgggggcggcaccgccagaaaactgattgggaggtagctattaaaagtattaataaaaagaacttgtcaaaatcacaaatactgcttggaaaggaaattaaaatcttaaaggaacttcagcatgaaaatattgtagcactctatgatgttcaggaattacccaactctgtctttttggtgatggagtattgcaatggtggagacctcgcagattatttgcaagcgaaagggactctcagtgaagacacgatcagagtgtttctgcatcagattgctgctgccatgcgaatcctgcacagcaaaggaatcatccacagagatctcaaaccacagaacatcttgctgtcctatgccaatcgcagaaaatcaagtgtcagtggtattcgcatcaaaatagcggattttggttttgctcgttacctacatagtaacatgatggctgcaacactgtgtggatccccgatgtacatggctcctgaggttattatgtctcaacattatgatgctaaggctgacttgtggagcataggaacagtgatataccaatgcctagttggaaaaccaccttttcaggccaatagtcctcaagacttaaggatgttttatgaaaaaaacaggagcttaatgcctagtattcccagagaaacatcaccttatttggctaatctccttttgggtttgcttcagagaaaccaaaaagatagaatggactttgaagcattttttagccatccttttcttgagcaaggtccagtaaaaaaatcttgcccagttccagtgcccatgtattctggttctgtctctggaagctcctgtggcagctctccatcttgtcgttttgcttctccaccatcccttccagatatgcagcatattcaggaagaaaacttatcttccccaccattgggtcctcccaactatctacaagtttccaaagattctgccagtactagtagcaagaactcttcttgtgacacggatgactttgttttggtgccacacaacatctcgtcagaccactcatgtgatatgccagtggggactgctggcagacgtgcttcaaatgaattcttggtgtgtggagggcagtgtcagcctactgtgtcacctcacagcgaaacagcaccaattccagttcctactcaaataaggaattatcagcgcatagagcagaatcttacatctactgccagctcaggcacaaatgtacatggttctccaagatctgcagtggtacgaaggtccaacaccagccccatgggcttcctccggccgggatcatgctccccagtaccagcagacacagcacagacagttggacgaaggctctccactgggtcttctaggccttactcaccttcccctttggttggtaccattcctgagcaattcagtcagtgctgctgtgggcatcctcagggccatgactccaggagtagaaactcctcaggttctccagtgccacaagctcagtccccacagtctctcttatcgggtgctagactgcagagcgcccccaccctcactgacatctatcagaacaagcagaagctcagaaaacagcactctgaccccgtgtgcccatcccatactggggctgggtacagctactcgcctcagcccagtcggcctggcagccttggaacttctcccaccaagcacttggggtcctctccacggagttctgactggttctttaaaactcctttgccaacaatcattggctctcctactaagaccacagctcctttcaaaatccctaaaactcaagcatcttccaacctgttagccttggttactcgtcatgggcctgctgaagaacagtcgaaagatgggaatgagccacgggaatgtgcccattgcctcttagtgcaaggaagtgagaggcagcgggccgagcagcagagcaaggcagtgtttggcagatctgtcagtaccgggaagttatcagatcaacaaggaaagactcctatatgtcgacatcagggcagcacagacagtttaaatacagaacgaccaatggatatagctccggcaggagcctgtggtggtgttctggcacctcctgcaggtacagcagcaagttccaaggctgtcctcttcactgtagggtctcctccacacagtgcggcagcccccacttgtacccacatgttccttcgaacaagaacaacctcagtggggcccagcaactccgggggctctctttgtgccatgagtggccgcgtgtgcgtggggtccccgcctggcccaggcttcggctcttcccctccaggagcagaggcagctcccagcctgagatacgtgccttacggtgcttcaccccccagcctagaggggctcatcacctttgaagcccctgaactgccggaggagacgctgatggagcgggaacacacagacaccttacgccatctgaatgtgatgctgatgttcactgagtgtgtgctggacctgacagccatgaggggaggaaaccctgagctgtgcacatctgctgtgtccttgtaccagatccaggagagtgtggtggtggaccagatcagtcagctgagcaaagactgggggcgggtggagcagctggtgttgtacatgaaagcagcacagctgcttgcggcttctctgcatcttgccaaagcccagatcaagtccgggaaactgagcccatccacagctgtgaaacaagttgtcaagaatctgaacgaacgatataaattctgcatcaccatgtgcaagaaacttacagaaaagctgaatcgattcttctctgacaaacagaggtttattgatgaaatcaacagtgtgactgcagagaaactcatctataattgtgctgtagaaatggttcagtctgcagccctggatgagatgtttcagcagaccgaagatattgtttatcgctatcataaggcagcccttcttttggaaggcctaagtaggattctacaggaccctgcagatattgaaaatgtgcataaatataaatgtagtattgagagaagactgtcggcgctctgccatagcaccgcaaccgtgtgagcagcaggctcatcccgtggaccggtggtgggaacgtgaggtgatgcctttgggattacagcttgagttctgtcaccccatccccaggaaactgtagcttcttaactggtgactaccaaagaacaagcagtgatttgaaaaaggaaaaacaatccaaaaactacatatttgtaggaaatctgccttattggagaaaatcaccctttccctttttctttgtagaagcaggagcaagagtgtttggctcccagtttggacttggtgaataaatgtaccttagaactaggataatcggtacagttattcttaaagataattaaaaatgaaacaaagtgagtgctcgtcactgggttcatcagagcagtgtgtgaaattccatgtgtttgctgaggtgtaaaggtaaatgtattcacccctcatccaggcagtttgatatttggagtaagtttgtttaaatctgagcatgcatctttaaacagctcaggaagaaatagcttaagaagaagtgaaacatggatcttggaagaaattttgaaatcttcaatttgatcctaatatggatacatgttaatcttccaaaatctttcatattgcactaatttattaaaacaactgtgtattggattttgtaatttaactaaggcacaatggacttgtttaaaatattttacttgattgtatacatagaccctttccagaattcacatgtaatctccagtgaacttttaagtggttaaaacttgtattcatgtgaacctttgcacattttttttttttacttctttatctacacctacagattttctcagtaatgtttttgttagcttttggttccattttttattgtgcatgcagaatgtacattgatgcctgtgaccttaggtttattaaaggctaggtttatttgggcagtattagaaacaaaatcatggatcaagagatactcttgataatttgaatagggccaaaacaaagttggtgacctaaaggcttgttagtgatgtggagttcctacatgcagtgagtggaaaatgaagttcgttttctcttaggaaaatgggcagctgtcttctgcctaatgtgtatttttcatgttaattctgacagttcaccaaatagctagtcatggagaatgcaggcagttaacttaatatccctccaggaatggttcctacgttgtgtattacttggtttcttttacttacctgcttgaatacttgaataaaccattcaccaattttaatccttttattttaatccttttacataaaataatctgaactctttgacaaattgcacagagctctttggcattaatctaattttaatgtactgataaaaacaaacatggttttcctttactttgacaaagtaatgtaatttttaccttatttatctgtatgaaattccagtagttaatttgaacatttatttatatgacgtttgtatttttaggtctttaatacagtgtttctacctctcatttgtaactgcatgcattattcttgaaactaggtaaaactcactgaattgttgtgtaatagcctttttattattgcctgtacaaatgtatattaaggtaaaataaaactgacaaagtgtttctagggtgtagctgggtacatattaagtggcttgttgagccaggtacttccttagtgagtttagagacttggccatgaatatcctttgtcctgccccaggatttagatcttggctactgtcatgcaggcttccaggaacatagactgttttacctccacaaccctatttgttattagtgatactttattttatataatattttttattcacagtgaaatttcattcatgttctttcagttatcacctgtgttatctcagttgtaggtttattctatcctctcctcttcctctcccatttcttttttaagacaggatgaaacaggttcagagaggggaagtgattggcctaaagtcaggaactaggcaagtggtcaagccatgctttgtgactttcaagttaattcttcttgttcttgtatattaaaggtcttggggtagatggtgtgtgtgaaacagtgaagtctcaacagcagaaaagaacaaaatgtaaattcatgaataatggttctggttatacttccattatcaaggctaattaagagattttgccttgagtatagcaataataaacaaatgctttatgtttccctgagtatttttaaatttcatatcgtgtttcatagagtggaaatgtaccagttcatacattcatgggttgacacctgtattcaagccataacctggaaaattgctgaccagctattcctgctctaagggtttgctttaactataccctccactggactatatatagagagagagcctatgctgtatatagttggtttcccacagtc

SEQ ID NO: 198178 - DNA, 594 bp, Homo sapiens
  Payload ID: 19098
  Gene Name: unc-51 like autophagy activating kinase 2
  ENST ID: ENST00000575432
  CDS Start-End: 1-594
ggccgagcagcagagcaaggcagtgtttggcagatctgtcagtaccgggaagttatcagatcaacaaggaaagactcctatatgtcgacatcagggcagcacagacagtttaaatacagaacgaccaatggatatagggtctcctccacacagtgcggcagcccccacttgtacccacatgttccttcgaacaagaacaacctcagtggggcccagcaactccgggggctctctttgtgccatgagtggccgcgtgtgcgtggggtccccgcctggcccaggcttcggctcttcccctccaggagcagaggcagctcccagcctgagatacgtgccttacggtgcttcaccccccagcctagaggggctcatcacctttgaagcccctgaactgccggaggagacgctgatggagcgggaacacacagacaccttacgccatctgaatgtgatgctgatgttcactgagtgtgtgctggacctgacagccatgaggggaggaaaccctgagctgtgcacatctgctgtgtccttgtaccagatccaggagagtgtggtggtggaccagatcagtcagctgagcaaagactgggg

SEQ ID NO: 198179 - DNA, 564 bp, Homo sapiens
  Payload ID: 19098
  Gene Name: unc-51 like autophagy activating kinase 2
  ENST ID: ENST00000574732
  CDS Start-End: 1-64
ttatttgcaaggttatatagaacatattctaagaattatatggacagacatgcatcacgaataatttaaataggtacatggatactaaatcctcagtgtagcgaaagggactctcagtgaagacacgatcagagtgtttctgcatcagattgctgctgccatgcgaatcctgcacagcaaaggaatcatccacagagatctcaaaccacagaacatcttgctgtcctatgccaatcgcagaaaatcaagtgtcagtggtattcgcatcaaaatagcggattttggttttgctcgttacctacatagtaacatgatggctgcaacactgtgtggatccccgatgtacatggctcctgaggttattatgtctcaacattatgatgctaaggctgacttgtggagcataggaacagtgatataccaatgcctagttggaaaaccaccttttcaggccaatagtcctcaagacttaaggatgttttatgaaaaaaacaggagcttaatgcctagtattcccagagaaacatcaccttatttggctaatctccttttgggtttgcttca

SEQ ID NO: 198180 - DNA, 577 bp, Homo sapiens
  Payload ID: 19098
  Gene Name: unc-51 like autophagy activating kinase 2
  ENST ID: ENST00000580118
  CDS Start-End: 1-148
gcatgaaaatattgtagcactctatgatgttcagtcttgctcttgtcgcccagggtggagtgcaatggcacaatctcagctcattgcacctctgcctcctgagttcaagggattctcctgcctcagcctcctgaatagctgggattaaggaattacccaactctgtctttttggtgatggagtattgcaatggtggagacctcgcagattatttgcaagcgaaagggactctcagtgaagacacgatcagagtgtttctgcatcagattgctgctgccatgcgaatcctgcacagcaaaggaatcatccacagagatctcaaaccacagaacatcttgctgtcctatgccaatcgcagaaaatcaagtgtcagtggtattcgcatcaaaatagcggattttggttttgctcgttacctacatagtaacatgatggctgcaacactgtgtggatccccgatgtacatggctcctgaggttattatgtctcaacattatgatgctaaggctgacttgtggagcataggaacagtgatataccaatgcctagttggaaaaccaccttttcaggccaatag

SEQ ID NO: 198181 - DNA, 2623 bp, Homo sapiens
  Payload ID: 19099
  Gene Name: unc-51 like kinase 3
  Uniprot ID: Q6PHR2
  ENST ID: ENST00000440863
  CDS Start-End: 93-1511
gcgtggagccacccagtgctcggcccgccccgcaacccgccggaaccgccgcccgcagcgaggaagcgcccgcgcgggcgcaggcggccggaatggcggggcccggctggggtcccccgcgcctggacggcttcatcctcaccgagcgcctgggcagcggcacgtacgccacggtgtacaaggcctacgccaagaaggacactcgtgaagtggtagccataaagtgtgtagccaagaaaagtctgaacaaggcatcggtggagaacctcctcacggagattgagatcctcaagggcattcgacatccccacattgtgcagctgaaagactttcagtgggacagtgacaatatctacctcatcatggagttttgcgcagggggcgacctgtctcgcttcatccatacccgcaggattctgcctgagaaggtggcgcgtgtcttcatgcagcaattagctagcgccctgcaattcctgcatgaacggaatatctctcacctggatctgaagccacagaacattctactgagctccttggagaagccccacctaaaactggcagactttggtttcgcacaacacatgtccccgtgggatgagaagcacgtgctccgtggctcccccctctacatggcccccgagatggtgtgccagcggcagtatgacgcccgcgtggacctctggtccatgggggtcatcctgtatgaagccctcttcgggcagcccccctttgcctccaggtcgttctcggagctggaagagaagatccgtagcaaccgggtcatcgagctccccttgcggcccctgctctcccgagactgccgggacctactgcagcggctcctggagcgggaccccagccgtcgcatctccttccaggacttttttgcgcacccctgggtggacctggagcacatgcccagtggggagagtctggggcgagcaaccgccctggtggtgcaggctgtgaagaaagaccaggagggggattcagcagctgccttatcactctactgcaaggctctggacttctttgtacctgccctgcactatgaagtggatgcccagcggaaggaggcaattaaggcaaaggtggggcagtacgtgtcccgggctgaggagctcaaggccatcgtctcctcttccaatcaggccctgctgaggcaggggacctctgcccgagacctgctcagagagatggcccgggacaagccacgcctcctagctgccctggaagtggcttcagctgccatggccaaggaggaggccgccggcggggagcaggatgccctggacctgtaccagcacagcctgggggagctactgctgttgctggcagcggagcccccgggccggaggcgggagctgcttcacactgaggttcagaacctcatggcccgagctgaatacttgaaggagcaggtcaagatgagggaatctcgctgggaagctgacaccctggacaaagagggactgtcggaatctgttcgtagctcttgcacccttcagtgaccctagaagaatgattggacagatgtgagccatctggagcagaggggcactaacccaggctgacgccaagaatgaagtggcccactgcagccctggcgagcaggcttcttggatggacagtgctgagacccccatatcccagagtccccagcctccctcaggttactctgcaccccacagatggtttgatggctgtgctgtatactggaggggagggcaggactctgggagaacagcacttctttcatgagacctttgttactcggtggttactgggtcctgtgcctgtccgttttggggcatgcagccctctatcatttttggctccgagaagagggcaaggggcccccgcagggtacttctgtgcttgccctcgccctgccagcaggcagctgtgcccctggcctgcccttcccgggaccccttattccaactcagctcctctttgcactggaatggggcactccaacacccctcagggaccaccctccccacagtatgcactcagccccacagaacccaccagtctttctgggaactcacacctgcccgccatcttggtactttaggttaatccctcaagcatgaaagctggatcttttggggtttaagaagcccaagccttgttcctgccctggcctagggagcactcaggagggttccttggtcctcatctctcccacctccgttccctctgggccccacactagccacagcgcgggccttgtgctggagtttgagcctgggacagggagagggaggcttggagacagtctgacccagtgccctctaggccacccacttctaggcctgccctgccgccgtggagccctgggcaagctctttcccctttctgggcctgggtctccccatctcttcaatggggctgataccttcacagcccacagcatgggcacttatgaggacaaagtgaatttaacctggaaaagaatgtatttgagagtttcttttaaataatcagcgggtgttggtgatttgtagcccttctgcccttaaatgcttccttgggcaagagctgtctgtcctccctgcaggaggctgagtgtaaagagtatcattcattgtttctctattaaattattttctctatt

SEQ ID NO: 198182 - DNA, 1711 bp, Homo sapiens
  Payload ID: 19099
  Gene Name: unc-51 like kinase 3
  ENST ID: ENST00000568273
  CDS Start-End: 4-156
agaatgcaaagaaatggatcagctagccgagggttggagaagaccaggctgaggctgtgtcgggaagccaggattccagaatcagcattcctcactggcctcacaagggaaagctgggaagcccggtgctggtgtgcagtagaaggacactcgtgaagtggtagccataaagtgtgtagccaagaaaagtctgaacaaggcatcggtggagaacctcctcacggagattgagatcctcaagggcattcgacatccccacattgtgcagctgaaagactttcaggattctgcctgagaaggtggcgcgtgtcttcatgcagcaattagctagcgccctgcaattcctgcatgaacggaatatctctcacctggatctgaagccacagaacattctactgagctccttggagaagccccacctaaaactggcagactttggtttcgcacaacacatgtccccgtgggatgagaagcacgtgctccgtggctcccccctctacatggcccccgagatggtgtgccagcggcagtatgacgcccgcgtggacctctggtccatgggggtcatcctgtatgaagccctcttcgggcagcccccctttgcctccaggtcgttctcggagctggaagagaagatccgtagcaaccgggtcatcgagctccccttgcggcccctgctctcccgagactgccgggacctactgcagcggctcctggagcgggaccccagccgtcgcatctccttccaggacttttttgcgcacccctgggtggacctggagcacatgcccagtggggagagtctggggcgagcaaccgccctggtggtgcaggctgtgaagaaagaccaggagggggattcagcagctgccttatcactctactgcaaggctctggacttctttgtacctgccctgcactatgaagtggatgcccagcggaaggaggcaattaaggcaaaggtggggcagtacgtgtcccgggctgaggagctcaaggccatcgtctcctcttccaatcaggccctgctgaggcaggggacctctgcccgagacctgctcagagagatggcccgggacaagccacgcctcctagctgccctggaagtggcttcagctgccatggccaaggaggaggccgccggcggggagcaggatgccctggacctgtaccagcacagcctgggggagctactgctgttgctggcagcggagcccccgggccggaggcgggagctgcttcacactgaggttcagaacctcatggcccgagctgaatacttgaaggagcagatgagggaatctcgctgggaagctgacaccctggacaaagagggactgtcggaatctgttcgtagctcttgcacccttcagtgaccctagaagaatgattggacagatgtgagccatctggagcagaggggcactaacccaggctgacgccaagaatgaagtggcccactgcagccctggcgagcaggcttcttggatggacagtgctgagacccccatatcccagagtccccagcctccctcaggttactctgcaccccacagatggtttgatggctgtgctgtatactggaggggagggcaggactctgggagaacagcacttctttcatgagacctttgttactcggtggttactgggtcctgtgcctgtccgttttggggcatgcagccctctatcatttttggctccgagaaga

SEQ ID NO: 198183 - DNA, 539 bp, Homo sapiens
  Payload ID: 19099
  Gene Name: unc-51 like kinase 3
  ENST ID: ENST00000568679
  CDS Start-End: 20-145
gcgggcgcaggcggccggaatggcggggcccggctggggtcccccgcgcctggacggcttcatcctcaccgagcgcctgggcagcggcacgtacgccacggtgtacaaggcctacgccaagaatgcaaagaaatggatcagctagccgagggttggagaagaccaggctgaggctgtgtcgggaagccaggattccagaatcagcattcctcactggcctcacaagggaaagctgggaagcccggtgctggtgtgcagtagaaggacactcgtgaagtggtagccataaagtgtgtagccaagaaaagtctgaacaaggcatcggtggagaacctcctcacggagattgagatcctcaagggcattcgacatccccacattgtgcagctgaaagactttcagtgggacagtgacaatatctacctcatcatggagttttgcgcagggggcgacctgtctcgcttcatccatacccgcaggattctgcctgagaaggtggcgcgtgtcttcatgcagcaattagctagcgccctgcaatt

SEQ ID NO: 198184 - DNA, 1633 bp, Homo sapiens
  Payload ID: 19099
  Gene Name: unc-51 like kinase 3
  ENST ID: ENST00000566631
  CDS Start-End: 37-291
agcgaggaagcgcccgcgcgggcgcaggcggccggaatggcggggcccggctggggtcccccgcgcctggacggcttcatcctcaccgagcgcctgggcagcggcacgtacgccacggtgtacaaggcctacgccaagaaggacactcgtgaagtggtagccataaagtgtgtagccaagaaaagtctgaacaaggcatcggtggagaacctcctcacggagattgagatcctcaagggcattcgacatccccacattgtgcagctgaaagactttcaggattctgcctgagaaggtggcgcgtgtcttcatgcagcaattagctagcgccctgcaattcctgcatgaacggaatatctctcacctggatctgaagccacagaacattctactgagctccttggagaagccccacctaaaactggcagactttggtttcgcacaacacatgtccccgtgggatgagaagcacgtgctccgtggctcccccctctacatggcccccgagatggtgtgccagcggcagtatgacgcccgcgtggacctctggtccatgggggtcatcctgtatgaagccctcttcgggcagcccccctttgcctccaggtcgttctcggagctggaagagaagatccgtagcaaccgggtcatcgagctccccttgcggcccctgctctcccgagactgccgggacctactgcagcggctcctggagcgggaccccagccgtcgcatctccttccaggacttttttgcgcacccctgggtggacctggagcacatgcccagtggggagagtctggggcgagcaaccgccctggtggtgcaggctgtgaagaaagaccaggagggggattcagcagctgccttatcactctactgcaaggctctggacttctttgtacctgccctgcactatgaagtggatgcccagcggaaggaggcaattaaggcaaaggtggggcagtacgtgtcccgggctgaggagctcaaggccatcgtctcctcttccaatcaggccctgctgaggcaggggacctctgcccgagacctgctcagagagatggcccgggacaagccacgcctcctagctgccctggaagtggcttcagctgccatggccaaggaggaggccgccggcggggagcaggatgccctggacctgtaccagcacagcctgggggagctactgctgttgctggcagcggagcccccgggccggaggcgggagctgcttcacactgaggttcagaacctcatggcccgagctgaatacttgaaggagcaggtcaagatgagggaatctcgctgggaagctgacaccctggacaaagagggactgtcggaatctgttcgtagctcttgcacccttcagtgaccctagaagaatgattggacagatgtgagccatctggagcagaggggcactaacccaggctgacgccaagaatgaagtggcccactgcagccctggcgagcaggcttcttggatggacagtgctgagacccccatatcccagagtccccagcctccctcaggttactctgcaccccacagatggtttgatggctgtgctgtatactggaggggagggcaggactctgggagaacagcacttctttcatgagacct

SEQ ID NO: 198185 - DNA, 2611 bp, Homo sapiens
  Payload ID: 19099
  Gene Name: unc-51 like kinase 3
  Uniprot ID: Q6PHR2
  ENST ID: ENST00000569437
  CDS Start-End: 89-1501
ggagccacccagtgctcggcccgccccgcaacccgccggaaccgccgcccgcagcgaggaagcgcccgcgcgggcgcaggcggccggaatggcggggcccggctggggtcccccgcgcctggacggcttcatcctcaccgagcgcctgggcagcggcacgtacgccacggtgtacaaggcctacgccaagaaggacactcgtgaagtggtagccataaagtgtgtagccaagaaaagtctgaacaaggcatcggtggagaacctcctcacggagattgagatcctcaagggcattcgacatccccacattgtgcagctgaaagactttcagtgggacagtgacaatatctacctcatcatggagttttgcgcagggggcgacctgtctcgcttcatccatacccgcaggattctgcctgagaaggtggcgcgtgtcttcatgcagcaattagctagcgccctgcaattcctgcatgaacggaatatctctcacctggatctgaagccacagaacattctactgagctccttggagaagccccacctaaaactggcagactttggtttcgcacaacacatgtccccgtgggatgagaagcacgtgctccgtggctcccccctctacatggcccccgagatggtgtgccagcggcagtatgacgcccgcgtggacctctggtccatgggggtcatcctgtatgaagccctcttcgggcagcccccctttgcctccaggtcgttctcggagctggaagagaagatccgtagcaaccgggtcatcgagctccccttgcggcccctgctctcccgagactgccgggacctactgcagcggctcctggagcgggaccccagccgtcgcatctccttccaggacttttttgcgcacccctgggtggacctggagcacatgcccagtggggagagtctggggcgagcaaccgccctggtggtgcaggctgtgaagaaagaccaggagggggattcagcagctgccttatcactctactgcaaggctctggacttctttgtacctgccctgcactatgaagtggatgcccagcggaaggaggcaattaaggcaaaggtggggcagtacgtgtcccgggctgaggagctcaaggccatcgtctcctcttccaatcaggccctgctgaggcaggggacctctgcccgagacctgctcagagagatggcccgggacaagccacgcctcctagctgccctggaagtggcttcagctgccatggccaaggaggaggccgccggcggggagcaggatgccctggacctgtaccagcacagcctgggggagctactgctgttgctggcagcggagcccccgggccggaggcgggagctgcttcacactgaggttcagaacctcatggcccgagctgaatacttgaaggagcagatgagggaatctcgctgggaagctgacaccctggacaaagagggactgtcggaatctgttcgtagctcttgcacccttcagtgaccctagaagaatgattggacagatgtgagccatctggagcagaggggcactaacccaggctgacgccaagaatgaagtggcccactgcagccctggcgagcaggcttcttggatggacagtgctgagacccccatatcccagagtccccagcctccctcaggttactctgcaccccacagatggtttgatggctgtgctgtatactggaggggagggcaggactctgggagaacagcacttctttcatgagacctttgttactcggtggttactgggtcctgtgcctgtccgttttggggcatgcagccctctatcatttttggctccgagaagagggcaaggggcccccgcagggtacttctgtgcttgccctcgccctgccagcaggcagctgtgcccctggcctgcccttcccgggaccccttattccaactcagctcctctttgcactggaatggggcactccaacacccctcagggaccaccctccccacagtatgcactcagccccacagaacccaccagtctttctgggaactcacacctgcccgccatcttggtactttaggttaatccctcaagcatgaaagctggatcttttggggtttaagaagcccaagccttgttcctgccctggcctagggagcactcaggagggttccttggtcctcatctctcccacctccgttccctctgggccccacactagccacagcgcgggccttgtgctggagtttgagcctgggacagggagagggaggcttggagacagtctgacccagtgccctctaggccacccacttctaggcctgccctgccgccgtggagccctgggcaagctctttcccctttctgggcctgggtctccccatctcttcaatggggctgataccttcacagcccacagcatgggcacttatgaggacaaagtgaatttaacctggaaaagaatgtatttgagagtttcttttaaataatcagcgggtgttggtgatttgtagcccttctgcccttaaatgcttccttgggcaagagctgtctgtcctccctgcaggaggctgagtgtaaagagtatcattcattgtttctctattaaattattttctcta

SEQ ID NO: 198186 - DNA, 1717 bp, Homo sapiens
  Payload ID: 19099
  Gene Name: unc-51 like kinase 3
  ENST ID: ENST00000568210
  CDS Start-End: 4-156
agaatgcaaagaaatggatcagctagccgagggttggagaagaccaggctgaggctgtgtcgggaagccaggattccagaatcagcattcctcactggcctcacaagggaaagctgggaagcccggtgctggtgtgcagtagaaggacactcgtgaagtggtagccataaagtgtgtagccaagaaaagtctgaacaaggcatcggtggagaacctcctcacggagattgagatcctcaagggcattcgacatccccacattgtgcagctgaaagactttcagtgggacagtgacaatatctacctcatcatggagttttgcgcagggggcgacctgtctcgcttcatccatacccgcaggattctgcctgagaaggtggcgcgtgtcttcatgcagcaattagctagcgccctgcaattcctgcatgaacggaatatctctcacctggatctgaagccacagaacattctactgagctccttggagaagccccacctaaaactggcagactttggtttcgcacaacacatgtccccgtgggatgagaagcacgtgctccgtggctcccccctctacatggcccccgagatggtgtgccagcggcagtatgacgcccgcgtggacctctggtccatgggggtcatcctgtatgaagccctcttcgggcagcccccctttgcctccaggtcgttctcggagctggaagagaagatccgtagcaaccgggtcatcgagctccccttgcggcccctgctctcccgagactgccgggacctactgcagcggctcctggagcgggaccccagccgtcgcatctccttccaggacttttttgcgcacccctgggtggacctggagcacatgcccagtggggagagtctggggcgagcaaccgccctggtggtgcaggctgtgaagaaagaccaggagggggattcagcagctgccttatcactctactgcaaggctctggacttctttgtacctgccctgcactatgaagtggatgcccagcggaaggaggcaattaaggcaaaggtggggcagtacgtgtcccgggctgaggagctcaaggccatcgtctcctcttccaatcaggccctgctgaggcaggggacctctgcccgagacctgctcagagagatggcccgggacaagccacgcctcctagctgccctggaagtggcttcagctgccatggccaaggaggaggccgccggcggggagcaggatgccctggacctgtaccagcacagcctgggggagctactgctgttgctggcagcggagcccccgggccggaggcgggagctgcttcacactgaggttcagaacctcatggcccgagctgaatacttgaaggagcagatgagggaatctcgctgggaagctgacaccctggacaaagagggactgtcggaatctgttcgtagctcttgcacccttcagtgaccctagaagaatgattggacagatgtgagccatctggagcagaggggcactaacccaggctgacgccaagaatgaagtggcccactgcagccctggcgagcaggcttcttggatggacagtgctgagacccccatatcccagagtccccagcctccctcaggttactctgcaccccacagatggtttgatggctgtgctgtatactggaggggagggcaggactctgggagaacagcacttctttcatgagacctttgttactc

SEQ ID NO: 198187 - DNA, 561 bp, Homo sapiens
  Payload ID: 19099
  Gene Name: unc-51 like kinase 3
  ENST ID: ENST00000562161
  CDS Start-End: 4-189
agaatgcaaagaaatggatcagctagccgagggttggagaagaccaggctgaggctgtgtcgggaagccaggattccagaatcagcattcctcactggcctcacaagggaaagctgggaagcccggtgctggtgtgcagcagagtccccaaatctcctgtctcgcagaaggacactcgtgaagtggtagccataaagtgtgtagccaagaaaagtctgaacaaggcatcggtggagaacctcctcacggagattgagatcctcaagggcattcgacatccccacattgtgcagctgaaagactttcagtgggacagtgacaatatctacctcatcatggagttttgcgcagggggcgacctgtctcgcttcatccatacccgcaggattctgcctgagaaggtggcgcgtgtcttcatgcagcaattagctagcgccctgcaattcctgcatgaacggaatatctctcacctggatctgaagccacagaacattctactgagctccttggagaagccccacctaaaactggcagactttggtttcgcacaacacatgtccc

SEQ ID NO: 198188 - DNA, 884 bp, Homo sapiens
  Payload ID: 19099
  Gene Name: unc-51 like kinase 3
  ENST ID: ENST00000563301
  CDS Start-End: 20-430
gcgggcgcaggcggccggaatggcggggcccggctggggtcccccgcgcctggacggcttcatcctcaccgagcgcctgggcagcggcacgtacgccacggtgtacaaggcctacgccaagaaggacactcgtgaagtggtagccataaagtgtgtagccaagaaaagtctgaacaaggcatcggtggagaacctcctcacggagattgagatcctcaagggcattcgacatccccacattgtgcagctgaaagactttcagtgggacagtgacaatatctacctcatcatggagttttgcgcagggggcgacctgtctcgcttcatccatacccgcaggattctgcctgagaaggtggcgcgtgtcttcatgcagcaattagcgccctgcaattcctgcatgaacggaatatctctcacctggatctgaagccacagaacattctactgagctccttggagaagccccacctaaaactggcagactttggtttcgcacaacacatgtccccgtgggatgagaagcacgtgctccgtggctcccccctctacatggcccccgagatggtgtgccagcggcagtatgacgcccgcgtggacctctggtccatgggggtcatcctgtatggtgagacctcttttccctgcttctcaccctgaggcctacagtttcctcaggcaaggcctctctgggccacttctgaagggttctgatgaaaactgactgctggcccagggcccctgctgaggggcgtcaggccaggcttgacccattccctcccagcctccgctctgcctcccttccacagaagccctcttcgggcagcccccctttgcctccaggtcgttctcggagctggaagagaagatccgtagcaaccggg

SEQ ID NO: 198189 - DNA, 567 bp, Homo sapiens
  Payload ID: 19099
  Gene Name: unc-51 like kinase 3
  ENST ID: ENST00000565790
  CDS Start-End: 26-154
atgcctctgccgggagcactccagaatgcaaagaaatggatcagctagccgagggttggagaagaccaggctgaggctgtgtcgggaagccaggattccagaatcagcattcctcactggcctcacaagggaaagctgggaagcccggtgctgaaggacactcgtgaagtggtagccataaagtgtgtagccaagaaaagtctgaacaaggcatcggtggagaacctcctcacggagattgagatcctcaagggcattcgacatccccacattgtgcagctgaaagactttcagtgggacagtgacaatatctacctcatcatggagttttgcgcagggggcgacctgtctcgcttcatccatacccgcaggattctgcctgagaaggtggcgcgtgtcttcatgcagcaattagctagcgccctgcaattcctgcatgaacggaatatctctcacctggatctgaagccacagaacattctactgagctccttggagaagccccacctaaaactggcagactttggtttcgcacaacacatgtccccgtgggatgagaagcacgtg

SEQ ID NO: 198190 - DNA, 1470 bp, Homo sapiens
  Payload ID: 19099
  Gene Name: unc-51 like kinase 3
  Uniprot ID: Q6PHR2
  ENST ID: ENST00000568667
  CDS Start-End: 4-1455
agaatgcaaagaaatggatcagctagccgagggttggagaagaccaggctgaggctgtgtcgggaagccaggattccagaatcagcattcctcactggcctcacaagggaaagctgggaagcccggtgctggtgtgcaaaggacactcgtgaagtggtagccataaagtgtgtagccaagaaaagtctgaacaaggcatcggtggagaacctcctcacggagattgagatcctcaagggcattcgacatccccacattgtgcagctgaaagactttcagtgggacagtgacaatatctacctcatcatggagttttgcgcagggggcgacctgtctcgcttcatccatacccgcaggattctgcctgagaaggtggcgcgtgtcttcatgcagcaattagctagcgccctgcaattcctgcatgaacggaatatctctcacctggatctgaagccacagaacattctactgagctccttggagaagccccacctaaaactggcagactttggtttcgcacaacacatgtccccgtgggatgagaagcacgtgctccgtggctcccccctctacatggcccccgagatggtgtgccagcggcagtatgacgcccgcgtggacctctggtccatgggggtcatcctgtatgaagccctcttcgggcagcccccctttgcctccaggtcgttctcggagctggaagagaagatccgtagcaaccgggtcatcgagctccccttgcggcccctgctctcccgagactgccgggacctactgcagcggctcctggagcgggaccccagccgtcgcatctccttccaggacttttttgcgcacccctgggtggacctggagcacatgcccagtggggagagtctggggcgagcaaccgccctggtggtgcaggctgtgaagaaagaccaggagggggattcagcagctgccttatcactctactgcaaggctctggacttctttgtacctgccctgcactatgaagtggatgcccagcggaaggaggcaattaaggcaaaggtggggcagtacgtgtcccgggctgaggagctcaaggccatcgtctcctcttccaatcaggccctgctgaggcaggggacctctgcccgagacctgctcagagagatggcccgggacaagccacgcctcctagctgccctggaagtggcttcagctgccatggccaaggaggaggccgccggcggggagcaggatgccctggacctgtaccagcacagcctgggggagctactgctgttgctggcagcggagcccccgggccggaggcgggagctgcttcacactgaggttcagaacctcatggcccgagctgaatacttgaaggagcaggtcaagatgagggaatctcgctgggaagctgacaccctggacaaagagggactgtcggaatctgttcgtagctcttgcacccttcagtgaccctagaagaatgat

SEQ ID NO: 198191 - DNA, 561 bp, Homo sapiens
  Payload ID: 19099
  Gene Name: unc-51 like kinase 3
  ENST ID: ENST00000565373
  CDS Start-End: 4-153
agaatgcaaagaaatggatcagctagccgagggttggagaagaccaggctgaggctgtgtcgggaagccaggattccagaatcagcattcctcactggcctcacaagggaaagctgggaagcccggtgctggtgtgcagtaggacactcgtgaagtggtagccataaagtgtgtagccaagaaaagtctgaacaaggcatcggtggagaacctcctcacggagattgagatcctcaagggcattcgacatccccacattgtgcagctgaaagactttcagtgggacagtgacaatatctacctcatcatggagttttgcgcagggggcgacctgtctcgcttcatccatacccgcaggattctgcctgagaaggtggcgcgtgtcttcatgcagcaattagctagcgccctgcaattcctgcatgaacggaatatctctcacctggatctgaagccacagaacattctactgagctccttggagaagccccacctaaaactggcagactttggtttcgcacaacacatgtccccgtgggatgagaagcacgtgctccgtgg

SEQ ID NO: 198192 - DNA, 126 bp, Homo sapiens
  Payload ID: 19099
  Gene Name: unc-51 like kinase 3
  ENST ID: ENST00000631115
  CDS Start-End: 1-126
atggcggggcccggctggggtcccccgcgcctggacggcttcatcctcaccgagcgcctgggcagcggcacgtacgccacggtgtacaaggcctacgccaagaatgcaaagaaatggatcagctag

SEQ ID NO: 198193 - DNA, 4613 bp, Homo sapiens
  Payload ID: 19100
  Gene Name: unc-51 like kinase 4
  Uniprot ID: Q96C45
  ENST ID: ENST00000301831
  CDS Start-End: 464-4291
atagagggatggtgggccgaccactatgactgttactccagcacttcccgccccagtctctggcctgtgggctcgtccaaaggcagggcgtgatgccctttgggtggagggaggggccctcgtggtctctcacttccgggccccagccaacaggaacggaaactgcacagccagtcggcttcctgagcttcttccggcgttctgtgtgctgccgtggaaaccgtatggacgaatccaaacctggaggggcgtcgcctccgtaaggctggtcggcttcttccgcgcgttccgctttgcttcactgctttctcccccattcttgggcctgtggacctgtcctgaggcagaggccgagatgcgcgcaaccgcgggagcagccaagtggactggactcttttcttgacttagctaccaggagctagagatgctgttattctattgtatgtgagaagtcggcccagagatggaaaactttattctgtatgaggagatcggaagaggaagcaagactgttgtctataaagggcgacggaagggaacaatcaattttgtagccattctttgtactgataagtgcaaaaggcctgaaataaccaactgggtccgtctcacccgtgaaataaaacacaagaatattgtaacttttcatgaatggtatgaaacaagcaaccacctctggctagtggtggaactctgcacaggtggttccttaaaaacagttattgctcaagatgaaaacctcccagaagatgttgtgagagaatttggaattgacctgattagtggattacatcatcttcataaacttggcattctcttttgtgacatttctcctaggaagatactcttggaagggcctggcacactgaagtttagcaacttttgcttggcaaaagtggaaggtgaaaatttggaagagttctttgctttggtggcagcagaggaaggaggaggtgataatggggaaaatgtcctgaagaaaagcatgaaaagtagagtcaaaggatctcctgtatatacagcaccagaagttgtgaggggtgctgacttttccatctccagtgacctctggtctttgggctgtctgctttatgaaatgttttcaggaaaacctccattcttctcagaaagtatttcagaattaactgaaaagatcttatgtgaagatcctttgccacctattccgaaagattcttctcgtcctaaagcttcttcagattttattaatttgcttgatgggttacttcaaagagatcctcagaaaagattgacttggacaaggctactgcagcattcattttggaagaaagcttttgctggagcagatcaggaatcaagcgtcgaagatctcagtctcagcagaaacactatggagtgttctgggccacaagattccaaggagcttttgcagaactctcagagtagacaagcaaaagggcacaagagtggtcaaccactaggtcactctttcagactagaaaatccaactgagtttcggcctaagagtactcttgagggtcaattgaatgaatccatgtttcttctcagttctcgtcctactcccagaactagcactgcagtggaagtaagtcctggtgaggatatgactcactgttcaccacagaagacttctcctctgaccaagattacaagtggacacctgagtcagcaggacctggaatcccagatgagagagcttatctacacggactcagatcttgttgtcacccccattatcgacaatccaaagataatgaaacagccaccagttaaatttgatgcaaaaatattgcatctaccaacatattcagtggataagttattatttctgaaagatcaagattggaatgactttttgcaacaagtgtgctcgcagatcgactccactgagaagagcatgggggcctcccgagccaagctgaatctcctttgctatttgtgcgtggtggctggtcaccaggaggtggccaccaggctcctccattcccccctgttccaattgctaatccagcatttgcggatagctccaaactgggatatacgggccaaggttgctcacgtaattggtttactggcttcgcacacagctgagctccaggaaaatacacctgttgttgaggcaattgttctcttaactgaattaattagggaaaacttcaggaacagcaaattaaaacagtgccttttaccaacccttggggagctgatctatcttgtagccacccaggaagaaaaaaaaaagaaccctagagagtgctgggctgttcccttggctgcatacacagtgctaatgaggtgccttcgggaaggggaagagcgtgttgtgaatcacatggcagcaaaaattattgaaaatgtctgtaccaccttttctgctcagtcccagggctttattacaggagaaataggacccattttgtggtacctattcagacactccactgctgattctcttaggataacagcagtatcggccttgtgtagaatcactcgccattctcctactgccttccagaatgttattgaaaaggtgggactgaactcagtaataaactccctggcctctgccatctgcaaagttcagcagtacatgttgaccttattcgctgccatgttgtcctgtgggattcatcttcaaagactaatccaagaaaagggttttgtctccacaattatccgtttacttgacagcccctcaacatgcattagagcaaaagccttcctggttcttctatatattttgatttataaccgtgagatgttgctgctcagttgccaagcaagactggtgatgtacatcgagagagacagcagaaagaccactccaggcaaggagcagcaaagtggcaatgaatacctgtccaaatgcctggatcttctcatctgtcacattgtgcaggagctgccacgaatcctgggtgacattcttaactccttggctaatgtttctggacgtaaacacccatcaacagttcaagtgaaacagctgaagttgtgtctccccctgatgcctgtagtgcttcacctcgtaacttcacaggtatttcgacctcaagttgtgacagaagagtttcttttcagctatggaactattcttagtcatattaaatctgtagactcaggagaaacgaacatagatggagccataggactgacagcatcagaagaatttatcaagatcacattgtcagcttttgaagcaataatacagtatcctattttattgaaagactatcgctccacggttgttgactatatactgccacccttggtgtccttggttcaaagccaaaatgtggagtggagactctttagcttgcggttgctctcagaaaccacatctctactcgtgaaccaggagtttggggatggcaaggagaaggccagtgttgattctgacagcaatcttctggctctcattcgagatgtcttacttccccagtatgagcacattcttttagaacctgacccagtaccagcatatgctctgaaactgctagtcgcgatgactgaacacaacccaactttcacaagacttgtggaagaaagcaaactgatcccactcatttttgaagtaactctggaacatcaggagagcattctgggtaataccatgcaaagtgtgattgcattactcagcaatctagttgcctgcaaagattcgaatatggaactactttatgaacaaggacttgtcagtcacatctgtaacctgctcactgaaactgccacactgtgcttggatgtggacaataaaaacaacaatgagatggcagctccactgctcttttccctgcttgatattttgcacagcatgctgacctatacctccggtattgtacggctggctttgcaggcccagaagtctggctcaggagaggaccctcaggctgcagaagacctgctgctgctcaacagacctctgacagacctgattagcctgctcattccactgcttcctaatgaagatcctgagatttttgatgtttcatccaagtgcctgtctatactggttcagctgtatggaggggaaaacccggacagcctctctcctgaaaatgtggaaatttttgctcatttactgacatccaaggaggacccaaaggagcagaagcttctgttaaggattctcagaagaatgatcacctccaatgagaagcacttggagagcctcaagaatgcaggcagcctcctgcgggctctggagcggctggcccctgggagtggttcatttgccgacagtgcggtggctcccttggccctggaaatcctccaagccgttgggcactaggcaagaaggtgcttagcacaagcccgccctgtggccccagccctcggatgcataagcaaggtcagctcccagacacctttgccacatcccctcacagctgtctttggacctaataaagtcagcttaacccagaacctggtggcccaagtgctcactaaccccagggcctagaaaactgactcagaatggacttccttggttcctgtggaatgcatctgggaagcccaggtttgttagctgttctcagaaatgttctttccctctctgtgtgggccaggtgggctaaggttagcactgcctgtggtaataaagcagtggatgc

SEQ ID NO: 198194 - DNA, 465 bp, Homo sapiens
  Payload ID: 19100
  Gene Name: unc-51 like kinase 4
  ENST ID: ENST00000431379
  CDS Start-End: 136-390
tggacctgtcctgaggcagaggccgagatgcgcgcaaccgcgggagcagccaagtggactggactcttttcttgacttagctaccaggagctagagatgctgttattctattgtatgtgagaagtcggcccagagatggaaaactttattctgtatgaggagatcggaagaggaagcaagactgttgtctataaagggcgacggaagggaacaatcaattttgtagccattctttgtactgataagtgcaaaaggcctgaaataaccaactgggtccgtctcacccgtgaaataaaacacaagaatattgtaacttttcatgaatggtatgaaacaagcaaccacctctggctagtggtggaactctgcacaggacaggattatggttgattacttccatggatgtacacatggacaaggtggttccttaaaaacagttattgctcaagatgaaaacctcccaga

SEQ ID NO: 198195 - DNA, 647 bp, Homo sapiens
  Payload ID: 19100
  Gene Name: unc-51 like kinase 4
  ENST ID: ENST00000414606
  CDS Start-End: 164-418
actgctttctcccccattcttgggcctgtggacctgtcctgaggcagaggccgagatgcgcgcaaccgcgggagcagccaagtggactggactcttttcttgacttagctaccaggagctagagatgctgttattctattgtatgtgagaagtcggcccagagatggaaaactttattctgtatgaggagatcggaagaggaagcaagactgttgtctataaagggcgacggaagggaacaatcaattttgtagccattctttgtactgataagtgcaaaaggcctgaaataaccaactgggtccgtctcacccgtgaaataaaacacaagaatattgtaacttttcatgaatggtatgaaacaagcaaccacctctggctagtggtggaactctgcacaggacaggattatggttgattacttccatggatgtacacatggacaaggttatcaagacacagtcctggaattagttttttgcttcagctgttgtttctgatctctgaccagatgtaatatcctaactgtaaaacatgcctacgtttgtaactgcacgtcacccaccaaaacaaaataaaaccccaaatacctcttcccttcatcatagtaattcatattcaacttttcaatgccagcagaaacttta

SEQ ID NO: 198196 - DNA, 577 bp, Homo sapiens
  Payload ID: 19100
  Gene Name: unc-51 like kinase 4
  ENST ID: ENST00000453224
  CDS Start-End: 149-403
attcttgggcctgtggacctgtcctgaggcagaggccgagatgcgcgcaaccgcgggagcagccaagtggactggactcttttcttgacttagctaccaggagctagagatgctgttattctattgtatgtgagaagtcggcccagagatggaaaactttattctgtatgaggagatcggaagaggaagcaagactgttgtctataaagggcgacggaagggaacaatcaattttgtagccattctttgtactgataagtgcaaaaggcctgaaataaccaactgggtccgtctcacccgtgaaataaaacacaagaatattgtaacttttcatgaatggtatgaaacaagcaaccacctctggctagtggtggaactctgcacaggacaggattatggttgattacttccatggatgtacacatggacaaggttatcaagacacagtcctggaattagttttttgcttcagctgttgtttctgatctctgaccagatgtggttccttaaaaacagttattgctcaagatgaaaacctcccagaagatgttgtgagagaatttggaattgacctgat

SEQ ID NO: 198197 - DNA, 1904 bp, Homo sapiens
  Payload ID: 19100
  Gene Name: unc-51 like kinase 4
  ENST ID: ENST00000420927
  CDS Start-End: 118-1860
agtagctacgagtctgagttcgtgtctgcctaagcggtcgcggaagagcgcgcaggcctgccggggcgggagctagagatgctgttattctattgtatgtgagaagtcggcccagagatggaaaactttattctgtatgaggagatcggaagaggaagcaagactgttgtctataaagggcgacggaagggaacaatcaattttgtagccattctttgtactgataagtgcaaaaggcctgaaataaccaactgggtccgtctcacccgtgaaataaaacacaagaatattgtaacttttcatgaatggtatgaaacaagcaaccacctctggctagtggtggaactctgcacaggtggttccttaaaaacagttattgctcaagatgaaaacctcccagaagatgttgtgagagaatttggaattgacctgattagtggattacatcatcttcataaacttggcattctcttttgtgacatttctcctaggaagatactcttggaagggcctggcacactgaagtttagcaacttttgcttggcaaaagtggaaggtgaaaatttggaagagttctttgctttggtggcagcagaggaaggaggaggtgataatggggaaaatgtcctgaagaaaagcatgaaaagtagagtcaaaggatctcctgtatatacagcaccagaagttgtgaggggtgctgacttttccatctccagtgacctctggtctttgggctgtctgctttatgaaatgttttcaggaaaacctccattcttctcagaaagtatttcagaattaactgaaaagatcttatgtgaagatcctttgccacctattccgaaagattcttctcgtcctaaagcttcttcagattttattaatttgcttgatgggttacttcaaagagatcctcagaaaagattgacttggacaaggctactgcagcattcattttggaagaaagcttttgctggagcagatcaggaatcaagcgtcgaagatctcagtctcagcagaaacactatggagtgttctgggccacaagattccaaggagcttttgcagaactctcagagtagacaagcaaaagggcacaagagtggtcaaccactaggtcactctttcagactagaaaatccaactgagtttcggcctaagagtactcttgagggtcaattgaatgaatccatgtttcttctcagttctcgtcctactcccagaactagcactgcagtggaagtaagtcctggtgaggatatgactcactgttcaccacagaagacttctcctctgaccaagattacaagtggacacctgagtcagcaggacctggaatcccagatgagagagcttatctacacggactcagatcttgttgtcacccccattatcgacaatccaaagataatgaaacagccaccagttaaatttgatgcaaaaatattgcatctaccaacatattcagtggataagttattatttctgaaagatcaagattggaatgactttttgcaacaagtgtgctcgcagatcgactccactgagaagagcatgggggcctcccgagccaagctgaatctcctttgctatttgtgcgtggtggctggtcaccaggaggtggccaccaggctcctccattcccccctgttccaattgctaatccagcatttgcggatagctccaaactgggatatacgggccaaggttgctcacgtaattggtttactggcttcgcacacagctgagctccaggaaaatacacctgttgttgagactacaagctccattggaatcgggattttgaactgtcttgttcaacactccactccagtgcctagacagtgccttgtgtatgtatagatactgacaaatatttcaaaataaataaaactgtatcagcattc

SEQ ID NO: 198198 - DNA, 8400 bp, Homo sapiens
  Payload ID: 19101
  Gene Name: unc-79 homolog (C. elegans)
  Uniprot ID: Q9P2D8
  ENST ID: ENST00000256339
  CDS Start-End: 656-8032
atttttgctcgtcggctgggagccgggcgtcgggtcgctgggagtttgcctcttgtggcagcatcctgcttagtccagcgaattgtgacacattattaaatgtatcagaatataagaactgtgtcactactacgtcaccagatggccatttccacgaattcatgtttccgttcggcggccggcgtccctcgggtggtcgcatgcaatgagtgcatctttctcgagaacaactcttccgcggaaagtcattgctgacagtcctggcattccggtggctgcttcttggcagtgagcacttgtctatcttgcttccaagatccggtacttgcaggaatatcataaccgggttctccacaacatttatcctgtaccatcaggaacagatattgcaaacaccttgaaatacttttctcagaccttgttaagcgtcctgcgagatgctccctcagaacgcggcccgcaaagtcgtgatgctcagttgtcagactacccttctttggactaccaaggcctctacgtgactttggtgaccctcctggatctagttcctttactacagcacggccaacacgatcttggacagtcgatattttatacaactacatgtttgctaccttttctcaatgatgatattctgagtactttgccctacacgatgatatcaacgttggctacctttcctccatttctgcacaaggatatcattgaatatcttagcacatcttttctaccaatggctatattgggctcctcaaggagagaaggtgtacctgcccatgttaacctctctgcatcatccatgctaatgattgcaatgcagtacacatccaatccagtgtatcattgtcaattactggaatgcctcatgaaatataaacaagaagtctggaaagatcttttgtatgtgattgcgtatgggccttcacaagtgaagcctccagctgtgcaaatgcttttccactactggcccaatttaaaacctcctggggcaataagcgagtacagggggttgcagtacacagcttggaatcccatccactgccagcacattgaatgccacaatgcaattaacaaaccagctgtgaagatgtgtatagacccttccctgtcagtagcgttgggtgataaaccacccccgttgtatctctgtgaagaatgcagcgagaggattgcaggggaccacagtgagtggctgattgatgttcttctgccacaagctgaaatatctgctatatgtcagaaaaagaactgcagttcccacgttagaagagcagttgtcacctgcttctcagcagggtgctgtggtcgtcacggaaacaggcctgttcggtactgcaagaggtgccactcaaatcatcacagtaatgaagtgggggccgctgcggagactcacctctatcagacctctcctccgcccatcaacacgcgggaatgcggcgctgaggagctggtctgcgccgtggaagccgtgatcagcttgttgaaagaagccgagttccatgctgagcagcgagaacatgagctgaaccggcggcggcagctgggcctctcctcttcccaccattccctggataatgctgactttgataacaaggacgatgataaacacgatcagaggctgctcagtcaattcggaatatggttcttagtgagcctctgcacacccagtgagaacacgcctacagaaagcttggcccggctggtggccatggtgtttcagtggtttcactccactgcgtatatgatggatgatgaagtgggaagtctggtggaaaagctgaagcctcagtttgtcaccaaatggctgaagaccgtatgtgatgttcgcttcgatgtcatggtcatgtgccttcttcctaaacccatggaatttgccagggttggtggctactgggataagtcctgtagcacagtgactcagctgaaggaaggtctcaaccgaatcctctgcctgatcccctataatgtgatcaatcaatctgtctgggagtgtattatgccggaatggctggaagccatcagaacagaagtcccagataatcagttaaaagaattcagggaagtattaagcaaaatgtttgacattgaactctgtcctctgcctttctcaatggaggagatgtttggttttattagttgtcggtttacaggatacccctcctctgtgcaggagcaagctttactgtggcttcatgtattatcggagttagatatcatggttccacttcaactactaataagtatgttttctgatggagttaattcagtcaaagagctggcaaatcaaagaaaatcaagagtcagtgaactggcagggaaccttgcatctcgaagggtgagtgttgcctctgatcctggccgacgagttcagcacaatatgcttagtccatttcatagtcctttccagagtccgtttcggagtcctttgcgtagtccgtttcgtagccctttcaagaattttggacacccaggaggaaggactattgactttgattgtgaagatgatgaaatgaatctaaattgtttcatcctcatgtttgatcttctcctgaagcagatggagttacaagatgatggaatcacgatgggtttagagcacagcttatcaaaggacattatttctattataaacaatgtcttccaagccccctgggggggatcccacacctgccagaaggacgaaaaagcaatcgagtgcaacttatgtcagtctagtatcctctgctatcagcttgcttgtgaactcctggagagactagctcctaaagaagaaagccggctggtggagcccacagacagcctggaggatagcctcctttcttccagaccagagtttatcataggccctgaaggggaggaggaggagaatcctgcaagcaagcatggggagaacccaggcaactgcaccgagcccgtggaacatgctgcagtaaagaatgataccgaaagaaaattttgctaccaacagcttccggtaacattgagactaatatataccattttccaggaaatggctaagtttgaagagccagacattctttttaatatgctcaattgcctgaagattctctgtctgcatggagaatgtttatacattgccagaaaagatcaccctcaatttttagcctacattcaggaccacatgttgattgcaagcctgtggagggtcgtcaaatccgagttctctcagctgtcttccctggcagtccctcttctcctccatgccctgtcacttcctcatggtgctgacatcttctggacaatcataaatggcaatttcaacagcaaagactggaagatgaggtttgaagcagtggaaaaagttgctgtaatttgtagatttctggatattcactcagtaaccaaaaaccacctgctgaagtactccctggcacatgccttctgctgcttcctgacagcagtggaggatgtcaaccccgcagtggctaccagagctggtctcctgcttgacaccataaagaggccagcattgcagggtctatgtctttgtcttgacttccagtttgatactgtggttaaagacagacccacaattttgagcaagcttttactcttgcactttcttaagcaggatattcctgctctgagctgggagttctttgtcaatagatttgagacgctttctttggaagcccagctacatttggattgtaacaaggaatttccttttcctacaaccatcactgctgtgaggaccaatgttgctaacctcagcgatgcagccttatggaagatcaagagagctcgctttgcaagaaaccgccagaagagtgtacgttccctgagggacagcgtgaaagggcctgtggaatccaagagggcgctctccctccctgagaccctgacctccaaaattcgacaacaatctcctgagaatgacaacaccatcaaggacctgctcccagaagacgctgggatcgaccaccagacagttcaccagctgattacagtgctcatgaagttcatggccaaggatgaaagcagcgctgagtcagacatcagcagtgcaaaggccttcaacacggtcaagcgacacctgtacgtcttactcggctatgaccagcaggaaggttgcttcatgattgcacctcaaaaaatgcgcctgtcaacttgctttaatgcattcattgcaggaattgcccaagttatggactataacattaacttgggaaaacaccttctccccttagtggttcaggtgctcaaatactgctcttgtcctcaactccggcattatttccaacagccgcctcgttgctccctctggtccctaaagcctcacatccggcagatgtggttgaaggccttgcttgtcatcctttacaagtatccataccgagactgtgatatcagcaagatcctgctgcatctgattcacataacagtcaatacactcaatgcgcagtatcatagctgcaagccccatgccacggcaggacctttgtacagtgacaacagtaacataagcagatacagcgaaaaagaaaaaggtgaaatagaactggctgaatatagagagacgggtgcattacaagacagccttctccactgtgtgagagaagaaagcattccgaaaaaaaagctacgctctttcaaacaaaaatctcttgatatagggaatgcagactcgcttttgtttacattagacgaacatcgtaggaagtcgtgcatagatcggtgtgacatagagaagcctccgacccaagctgcgtatatcgcacaaagaccaaacgaccctggacgttctagacagaactctgctacgaggcctgacaatagtgaaatccccgagaacccagctatggaagggtttccagatgctcgaaggcctgtcataccagaggttaggttaaactgtatggagactttcgaggtgaaagttgactcgccggtaaagcctgctcctaaagaggatttagatctgatagatctatcctcagattcaacctcggggcctgaaaaacactctatactctcaacctccgacagcgactctcttgtatttgagcctcttccccctctcagaatagtcgagagtgacgaagaagaggagacgatgaaccaaggcgatgacggcccctccggtaaaaatgctgcctcttctccctccgtccccagccatccctccgtcctcagcctgagcacagctccgcttgtacaagtaagtgtggaggattgttccaaagacttttcttctaaggactcaggaaataatcagtcagcagggaacactgactctgccctcatcactctggaagaccctatggacgccgaaggatcctcaaagccagaggagctgccagagttctcctgcggtagcccactgacgctgaagcaaaaacgagacctccttcagaagtcgtttgctctccccgagatgtcgctggatgatcaccctgacccgggcactgagggggagaagcctggggagctgatgccaagttcaggggcaaaaaccgtcctcctcaaagttcccgaagatgcagagaaccccacagaaagtgagaagcctgataccagtgcagaatctgatacagaacagaatcctgaaaggaaggtggaagaggatggagctgaggaatccgaatttaagattcagattgttcccaggcagaggaagcagaggaagattgctgtcagtgctatccagagagagtacctcgacatctccttcaacattctggacaaactgggagaacagaaagatccagatccttctactaaaggactttcaactttggaaatgccacgagaatcttcatctgcccctacgttagatgcaggtgtgccggaaacaagtagccattcctcaatatcaactcagtataggcagatgaaaaggggatccctgggagttctgacaatgagccagttaatgaagcggcagctggagcatcagtctagcgccccccataacatcagcaactgggacactgaacagatacagcctgggaaacgccagtgtaacgtgccaacgtgcctaaaccctgacctggagggacagccattgaggatgagaggtgccaccaaatccagcctgctatcagcaccaagcatagtcagtatgtttgtgcctgcacctgaagagttcactgacgagcagccgacggtgatgacggacaaatgccatgactgtggggccattcttgaagaatacgatgaagagacacttgggctagccatcgtggtcctctccacattcattcacttaagcccagacctggcagccccgctgctgctggatatcatgcagtctgtgggaagattggcatccagtactaccttttctaatcaagcagaaagcatgatggttcccggcaatgcggcgggggtggccaagcagttcctgcgctgcatcttccatcagttggcccccaacggcatcttcccgcagctgttccaaagcacgatcaaagatgggacttttttacggaccttagcctcgtctctgatggacttcaatgagctgagctccatcgcagctctcagtcagctcctagagggtctaaataacaaaaagaatttaccagcagggggtgctatgattcgctgtttggaaaacattgcaaccttcatggaagctttgcctatggattctcctagtagcctctggaccacaattagcaaccagtttcagacattttttgccaagctgccttgtgttttacctctgaagtgttctttagattccagtttaagaattatgatttgcctcttgaagatcccttctaccaatgctacaaggagtttgttggaaccattttcaaaactgctcagctttgtaattcagaatgccgtcttcactctggcctacctggtggagctgtgtggcttatgttaccgagctttcactaaggaacgagataaattctacttgtctcgtagtgttgttctagaacttctgcaggccctaaagctcaaatctcctttaccagatacaaaccttcttctgcttgttcagtttatttgtgcagatgctggaaccaaactagctgagtcaacaatcctgagcaagcagatgatagcctctgtacctggatgtgggactgcagcgatggagtgtgtgaggcagtacatcaacgaagtgctggatttcatggcagacatgcacacgctgaccaaactgaagagccacatgaagacatgttcccagcctctgcatgaagatacctttgggggacatctcaaagtggggctggcccagattgcagccatggacatctcacggggcaaccacagagataacaaagctgtgatccgctatctgccttggctttatcatcccccctctgcaatgcagcaaggacctaaagaattcattgagtgtgtctcccatatccgactgttgtcctggctgctgctgggttccctcactcacaatgcagtgtgcccaaatgcctcctctccctgcctgcccattcctctggatgcaggctcccacgttgcagaccatcttattgttatcctgattggatttccagagcaatcaaagacctccgtgctgcacatgtgctccctcttccacgcgttcatctttgctcagctgtggacagtttattgcgagcaaagtgccgtcgctacaaatctccaaaatcagaatgaattcagcttcacggcgatactgacagcactagaattttggagtagggtgacacccagcatccttcagctaatggcccataacaaagtgatggtagaaatggtgtgtctccatgtgattagtttaatggaggcattgcaggaatgcaattcgaccatttttgtcaagctgatacctatgtggttgccaatgattcagtcaaatatcaagcacttatctgcgggactccagcttcgcctccaggctattcagaaccacgtgaaccaccacagcctaaggacgctgccgggctcgggccagagcagtgctggcctggcagccctccgaaagtggttgcagtgcactcagttcaaaatggcccaggtggagatccagtcctcggaagcagcctctcaattttatcctctatgagtggactcctcggcgctcagtgtcaacactctggtttagcaataatgggtttaaaaacaaacaatttgatccaagcaggttggggaacatattggtactgtacattctctttctagtttagtaaaagatgtgcaaaggccagagagggccgaaaatgaagctttcttgctacacatatttctgatgactccttgggctatctgattaagtgtttccttacattattttttaaaaaccaaatcatttttctttaactaacttctattttttttaagaaaaaaaaatagactggtgggtactcacagaaaagttgtataagtccccctgttgctatttttgatgatagagaataaatagggtttttgaaa

SEQ ID NO: 198199 - DNA, 7908 bp, Homo sapiens
  Payload ID: 19101
  Gene Name: unc-79 homolog (C. elegans)
  Uniprot ID: Q9P2D8
  ENST ID: ENST00000393151
  CDS Start-End: 1-7908
atgtccaccaaagcggagcagtttgcttccaagatccggtacttgcaggaatatcataaccgggttctccacaacatttatcctgtaccatcaggaacagatattgcaaacaccttgaaatacttttctcagaccttgttaagcattttgtcccgcacagggaagaaggaaaaccaagatgcctccaatttgacagtgcccatgaccatgtgtctttttcctgtgccattcccactcaccccatctctaagaccgcaggtcagttccatcaaccctactgttactcgctccctcctttacagcgtcctgcgagatgctccctcagaacgcggcccgcaaagtcgtgatgctcagttgtcagactacccttctttggactaccaaggcctctacgtgactttggtgaccctcctggatctagttcctttactacagcacggccaacacgatcttggacagtcgatattttatacaactacatgtttgctaccttttctcaatgatgatattctgagtactttgccctacacgatgatatcaacgttggctacctttcctccatttctgcacaaggatatcattgaatatcttagcacatcttttctaccaatggctatattgggctcctcaaggagagaaggtgtacctgcccatgttaacctctctgcatcatccatgctaatgattgcaatgcagtacacatccaatccagtgtatcattgtcaattactggaatgcctcatgaaatataaacaagaagtctggaaagatcttttgtatgtgattgcgtatgggccttcacaagtgaagcctccagctgtgcaaatgcttttccactactggcccaatttaaaacctcctggggcaataagcgagtacagggggttgcagtacacagcttggaatcccatccactgccagcacattgaatgccacaatgcaattaacaaaccagctgtgaagatgtgtatagacccttccctgtcagtagcgttgggtgataaaccacccccgttgtatctctgtgaagaatgcagcgagaggattgcaggggaccacagtgagtggctgattgatgttcttctgccacaagctgaaatatctgctatatgtcagaaaaagaactgcagttcccacgttagaagagcagttgtcacctgcttctcagcagggtgctgtggtcgtcacggaaacaggcctgttcggtactgcaagaggtgccactcaaatcatcacagtaatgaagtgggggccgctgcggagactcacctctatcagacctctcctccgcccatcaacacgcgggaatgcggcgctgaggagctggtctgcgccgtggaagccgtgatcagcttgttgaaagaagccgagttccatgctgagcagcgagaacatgagctgaaccggcggcggcagctgggcctctcctcttcccaccattccctggataatgctgactttgataacaaggacgatgataaacacgatcagaggctgctcagtcaattcggaatatggttcttagtgagcctctgcacacccagtgagaacacgcctacagaaagcttggcccggctggtggccatggtgtttcagtggtttcactccactgcgtatatgatggatgatgaagtgggaagtctggtggaaaagctgaagcctcagtttgtcaccaaatggctgaagaccgtatgtgatgttcgcttcgatgtcatggtcatgtgccttcttcctaaacccatggaatttgccagggttggtggctactgggataagtcctgtagcacagtgactcagctgaaggaaggtctcaaccgaatcctctgcctgatcccctataatgtgatcaatcaatctgtctgggagtgtattatgccggaatggctggaagccatcagaacagaagtcccagataatcagttaaaagaattcagggaagtattaagcaaaatgtttgacattgaactctgtcctctgcctttctcaatggaggagatgtttggttttattagttgtcggtttacaggatacccctcctctgtgcaggagcaagctttactgtggcttcatgtattatcggagttagatatcatggttccacttcaactactaataagtatgttttctgatggagttaattcagtcaaagagctggcaaatcaaagaaaatcaagagtcagtgaactggcagggaaccttgcatctcgaagggtgagtgttgcctctgatcctggccgacgagttcagcacaatatgcttagtccatttcatagtcctttccagagtccgtttcggagtcctttgcgtagtccgtttcgtagccctttcaagaattttggacacccaggaggaaggactattgactttgattgtgaagatgatgaaatgaatctaaattgtttcatcctcatgtttgatcttctcctgaagcagatggagttacaagatgatggaatcacgatgggtttagagcacagcttatcaaaggacattatttctattataaacaatgtcttccaagccccctgggggggatcccacacctgccagaaggacgaaaaagcaatcgagtgcaacttatgtcagtctagtatcctctgctatcagcttgcttgtgaactcctggagagactagctcctaaagaagaaagccggctggtggagcccacagacagcctggaggatagcctcctttcttccagaccagagtttatcataggccctgaaggggaggaggaggagaatcctgcaagcaagcatggggagaacccaggcaactgcaccgagcccgtggaacatgctgcagtaaagaatgataccgaaagaaaattttgctaccaacagcttccggtaacattgagactaatatataccattttccaggaaatggctaagtttgaagagccagacattctttttaatatgctcaattgcctgaagattctctgtctgcatggagaatgtttatacattgccagaaaagatcaccctcaatttttagcctacattcaggaccacatgttgattgcaagcctgtggagggtcgtcaaatccgagttctctcagctgtcttccctggcagtccctcttctcctccatgccctgtcacttcctcatggtgctgacatcttctggacaatcataaatggcaatttcaacagcaaagactggaagatgaggtttgaagcagtggaaaaagttgctgtaatttgtagatttctggatattcactcagtaaccaaaaaccacctgctgaagtactccctggcacatgccttctgctgcttcctgacagcagtggaggatgtcaaccccgcagtggctaccagagctggtctcctgcttgacaccataaagaggccagcattgcagggtctatgtctttgtcttgacttccagtttgatactgtggttaaagacagacccacaattttgagcaagcttttactcttgcactttcttaagcaggatattcctgctctgagctgggagttctttgtcaatagatttgagacgctttctttggaagcccagctacatttggattgtaacaaggaatttccttttcctacaaccatcactgctgtgaggaccaatgttgctaacctcagcgatgcagccttatggaagatcaagagagctcgctttgcaagaaaccgccagaagagtgtacgttccctgagggacagcgtgaaagggcctgtggaatccaagagggcgctctccctccctgagaccctgacctccaaaattcgacaacaatctcctgagaatgacaacaccatcaaggacctgctcccagaagacgctgggatcgaccaccagacagttcaccagctgattacagtgctcatgaagttcatggccaaggatgaaagcagcgctgagtcagacatcagcagtgcaaaggccttcaacacggtcaagcgacacctgtacgtcttactcggctatgaccagcaggaaggttgcttcatgattgcacctcaaaaaatgcgcctgtcaacttgctttaatgcattcattgcaggaattgcccaagttatggactataacattaacttgggaaaacaccttctccccttagtggttcaggtgctcaaatactgctcttgtcctcaactccggcattatttccaacagccgcctcgttgctccctctggtccctaaagcctcacatccggcagatgtggttgaaggccttgcttgtcatcctttacaagtatccataccgagactgtgatatcagcaagatcctgctgcatctgattcacataacagtcaatacactcaatgcgcagtatcatagctgcaagccccatgccacggcaggacctttgtacagtgacaacagtaacataagcagatacagcgaaaaagaaaaaggtgaaatagaactggctgaatatagagagacgggtgcattacaagacagccttctccactgtgtgagagaagaaagcattccgaaaaaaaagctacgctctttcaaacaaaaatctcttgatatagggaatgcagactcgcttttgtttacattagacgaacatcgtaggaagtcgtgcatagatcggtgtgacatagagaagcctccgacccaagctgcgtatatcgcacaaagaccaaacgaccctggacgttctagacagaactctgctacgaggcctgacaatagtgaaatccccgagaacccagctatggaagggtttccagatgctcgaaggcctgtcataccagaggttaggttaaactgtatggagactttcgaggtgaaagttgactcgccggtaaagcctgctcctaaagaggatttagatctgatagatctatcctcagattcaacctcggggcctgaaaaacactctatactctcaacctccgacagcgactctcttgtatttgagcctcttccccctctcagaatagtcgagagtgacgaagaagaggagacgatgaaccaaggcgatgacggcccctccggtaaaaatgctgcctcttctccctccgtccccagccatccctccgtcctcagcctgagcacagctccgcttgtacaagtaagtgtggaggattgttccaaagacttttcttctaaggactcaggaaataatcagtcagcagggaacactgactctgccctcatcactctggaagaccctatggacgccgaaggatcctcaaagccagaggagctgccagagttctcctgcggtagcccactgacgctgaagcaaaaacgagacctccttcagaagtcgtttgctctccccgagatgtcgctggatgatcaccctgacccgggcactgagggggagaagcctggggagctgatgccaagttcaggggcaaaaaccgtcctcctcaaagttcccgaagatgcagagaaccccacagaaagtgagaagcctgataccagtgcagaatctgatacagaacagaatcctgaaaggaaggtggaagaggatggagctgaggaatccgaatttaagattcagattgttcccaggcagaggaagcagaggaagattgctgtcagtgctatccagagagagtacctcgacatctccttcaacattctggacaaactgggagaacagaaagatccagatccttctactaaaggactttcaactttggaaatgccacgagaatcttcatctgcccctacgttagatgcaggtgtgccggaaacaagtagccattcctcaatatcaactcagtataggcagatgaaaaggggatccctgggagttctgacaatgagccagttaatgaagcggcagctggagcatcagtctagcgccccccataacatcagcaactgggacactgaacagatacagcctgggaaacgccagtgtaacgtgccaacgtgcctaaaccctgacctggagggacagccattgaggatgagaggtgccaccaaatccagcctgctatcagcaccaagcatagtcagtatgtttgtgcctgcacctgaagagttcactgacgagcagccgacggtgatgacggacaaatgccatgactgtggggccattcttgaagaatacgatgaagagacacttgggctagccatcgtggtcctctccacattcattcacttaagcccagacctggcagccccgctgctgctggatatcatgcagtctgtgggaagattggcatccagtactaccttttctaatcaagcagaaagcatgatggttcccggcaatgcggcgggggtggccaagcagttcctgcgctgcatcttccatcagttggcccccaacggcatcttcccgcagctgttccaaagcacgatcaaagatgggacttttttacggaccttagcctcgtctctgatggacttcaatgagctgagctccatcgcagctctcagtcagctcctagagggtctaaataacaaaaagaatttaccagcagggggtgctatgattcgctgtttggaaaacattgcaaccttcatggaagctttgcctatggattctcctagtagcctctggaccacaattagcaaccagtttcagacattttttgccaagctgccttgtgttttacctctgaagtgttctttagattccagtttaagaattatgatttgcctcttgaagatcccttctaccaatgctacaaggagtttgttggaaccattttcaaaactgctcagctttgtaattcagaatgccgtcttcactctggcctacctggtggagctgtgtggcttatgttaccgagctttcactaaggaacgagataaattctacttgtctcgtagtgttgttctagaacttctgcaggccctaaagctcaaatctcctttaccagatacaaaccttcttctgcttgttcagtttatttgtgcagatgctggaaccaaactagctgagtcaacaatcctgagcaagcagatgatagcctctgtacctggatgtgggactgcagcgatggagtgtgtgaggcagtacatcaacgaagtgctggatttcatggcagacatgcacacgctgaccaaactgaagagccacatgaagacatgttcccagcctctgcatgaagatacctttgggggacatctcaaagtggggctggcccagattgcagccatggacatctcacggggcaaccacagagataacaaagctgtgatccgctatctgccttggctttatcatcccccctctgcaatgcagcaaggacctaaagaattcattgagtgtgtctcccatatccgactgttgtcctggctgctgctgggttccctcactcacaatgcagtgtgcccaaatgcctcctctccctgcctgcccattcctctggatgcaggctcccacgttgcagaccatcttattgttatcctgattggatttccagagcaatcaaagacctccgtgctgcacatgtgctccctcttccacgcgttcatctttgctcagctgtggacagtttattgcgagcaaagtgccgtcgctacaaatctccaaaatcagaatgaattcagcttcacggcgatactgacagcactagaattttggagtagggtgacacccagcatccttcagctaatggcccataacaaagtgatggtagaaatggtgtgtctccatgtgattagtttaatggaggcattgcaggaatgcaattcgaccatttttgtcaagctgatacctatgtggttgccaatgattcagtcaaatatcaagcacttatctgcgggactccagcttcgcctccaggctattcagaaccacgtgaaccaccacagcctaaggacgctgccgggctcgggccagagcagtgctggcctggcagccctccgaaagtggttgcagtgcactcagttcaaaatggcccaggtggagatccagtcctcggaagcagcctctcaattttatcctctatga

SEQ ID NO: 198200 - DNA, 8484 bp, Homo sapiens
  Payload ID: 19101
  Gene Name: unc-79 homolog (C. elegans)
  ENST ID: ENST00000555664
  CDS Start-End: 694-8484
ggaccgcagcgcacagggaagccatgctgagggttcctcctgcattttcttcctcgcggtcctcaggaacatcctcgcgccctccggccccggcgctccagcccgccccggatccgcctccctctccttcctccccgaggttgagacgaagcgtgggacgcacctgggtccctctctggtcaccctgctgaggctccgggggctgctccgggagcaggatttacaggcccggagaacgccaatgggagatccaaatggtcggggactccggcgctttaagaggcttttctctgggaaacacccgtcccctccgtgcgccttatgaatggaaatactcctcccccggtcgagcccattttcccatttcaccaggagccgcagcctgctctctcctttcggtctccccgcccacatcaacgcgggcagctccaggaggggacggacaggaagcctttggccgcctattaaatcccacccatttctccgggggcgatttcctaaccttccgggaccgaattctgcaatttgatgtgcgttttgtccgaatggtagcgacacgggcctaagggagggggaaagcgagggggtggggggtggggggtatgcactcttttcctcgcaacatcgctggcggagcgagggagctcacacgacacagattttggggcaaagcctttccaactggacagcaccatgtccaccaaagcggagcagtttgcttccaagatccggtacttgcaggaatatcataaccgggttctccacaacatttatcctgtaccatcaggaacagatattgcaaacaccttgaaatacttttctcagaccttgttaagcattttgtcccgcacagggaagaaggaaaaccaagatgcctccaatttgacagtgcccatgaccatgtgtctttttcctgtgccattcccactcaccccatctctaagaccgcaggtcagttccatcaaccctactgttactcgctccctcctttacagcgtcctgcgagatgctccctcagaacgcggcccgcaaagtcgtgatgctcagttgtcagactacccttctttggactaccaaggcctctacgtgactttggtgaccctcctggatctagttcctttactacagcacggccaacacgatcttggacagtcgatattttatacaactacatgtttgctaccttttctcaatgatgatattctgagtactttgccctacacgatgatatcaacgttggctacctttcctccatttctgcacaaggatatcattgaatatcttagcacatcttttctaccaatggctatattgggctcctcaaggagagaaggtgtacctgcccatgttaacctctctgcatcatccatgctaatgattgcaatgcagtacacatccaatccagtgtatcattgtcaattactggaatgcctcatgaaatataaacaagaagtctggaaagatcttttgtatgtgattgcgtatgggccttcacaagtgaagcctccagctgtgcaaatgcttttccactactggcccaatttaaaacctcctggggcaataagcgagtacagggggttgcagtacacagcttggaatcccatccactgccagcacattgaatgccacaatgcaattaacaaaccagctgtgaagatgtgtatagacccttccctgtcagtagcgttgggtgataaaccacccccgttgtatctctgtgaagaatgcagcgagaggattgcaggggaccacagtgagtggctgattgatgttcttctgccacaagctgaaatatctgctatatgtcagaaaaagaactgcagttcccacgttagaagagcagttgtcacctgcttctcagcagggtgctgtggtcgtcacggaaacaggcctgttcggtactgcaagaggtgccactcaaatcatcacagtaatgaagtgggggccgctgcggagactcacctctatcagacctctcctccgcccatcaacacgcgggaatgcggcgctgaggagctggtctgcgccgtggaagccgtgatcagcttgttgaaagaagccgagttccatgctgagcagcgagaacatgagctgaaccggcggcggcagctgggcctctcctcttcccaccattccctggataatgctgactttgataacaaggacgatgataaacacgatcagaggctgctcagtcaattcggaatatggttcttagtgagcctctgcacacccagtgagaacacgcctacagaaagcttggcccggctggtggccatggtgtttcagtggtttcactccactgcgtatatgatggatgatgaagtgggaagtctggtggaaaagctgaagcctcagtttgtcaccaaatggctgaagaccgtatgtgatgttcgcttcgatgtcatggtcatgtgccttcttcctaaacccatggaatttgccagggttggtggctactgggataagtcctgtagcacagtgactcagctgaaggaaggtctcaaccgaatcctctgcctgatcccctataatgtgatcaatcaatctgtctgggagtgtattatgccggaatggctggaagccatcagaacagaagtcccagataatcagttaaaagaattcagggaagtattaagcaaaatgtttgacattgaactctgtcctctgcctttctcaatggaggagatgtttggttttattagttgtcggtttacaggatacccctcctctgtgcaggagcaagctttactgtggcttcatgtattatcggagttagatatcatggttccacttcaactactaataagtatgttttctgatggagttaattcagtcaaagagctggcaaatcaaagaaaatcaagagtcagtgaactggcagggaaccttgcatctcgaagggtgagtgttgcctctgatcctggccgacgagttcagcacaatatgcttagtccatttcatagtcctttccagagtccgtttcggagtcctttgcgtagtccgtttcgtagccctttcaagaattttggacacccaggaggaaggactattgactttgattgtgaagatgatgaaatgaatctaaattgtttcatcctcatgtttgatcttctcctgaagcagatggagttacaagatgatggaatcacgatgggtttagagcacagcttatcaaaggacattatttctattataaacaatgtcttccaagccccctgggggggatcccacacctgccagaaggacgaaaaagcaatcgagtgcaacttatgtcagtctagtatcctctgctatcagcttgcttgtgaactcctggagagactagctcctaaagaagaaagccggctggtggagcccacagacagcctggaggatagcctcctttcttccagaccagagtttatcataggccctgaaggggaggaggaggagaatcctgcaagcaagcatggggagaacccaggcaactgcaccgagcccgtggaacatgctgcagtaaagaatgataccgaaagaaaattttgctaccaacagcttccggtaacattgagactaatatataccattttccaggaaatggctaagtttgaagagccagacattctttttaatatgctcaattgcctgaagattctctgtctgcatggagaatgtttatacattgccagaaaagatcaccctcaatttttagcctacattcaggaccacatgttgattgcaagcctgtggagggtcgtcaaatccgagttctctcagctgtcttccctggcagtccctcttctcctccatgccctgtcacttcctcatggtgctgacatcttctggacaatcataaatggcaatttcaacagcaaagactggaagatgaggtttgaagcagtggaaaaagttgctgtaatttgtagatttctggatattcactcagtaaccaaaaaccacctgctgaagtactccctggcacatgccttctgctgcttcctgacagcagtggaggatgtcaaccccgcagtggctaccagagctggtctcctgcttgacaccataaagaggccagcattgcagggtctatgtctttgtcttgacttccagtttgatactgtggttaaagacagacccacaattttgagcaagcttttactcttgcactttcttaagcaggatattcctgctctgagctgggagttctttgtcaatagatttgagacgctttctttggaagcccagctacatttggattgtaacaaggaatttccttttcctacaaccatcactgctgtgaggaccaatgttgctaacctcagcgatgcagccttatggaagatcaagagagctcgctttgcaagaaaccgccagaagagtgtacgttccctgagggacagcgtgaaagggcctgtggaatccaagagggcgctctccctccctgagaccctgacctccaaaattcgacaacaatctcctgagaatgacaacaccatcaaggacctgctcccagaagacgctgggatcgaccaccagacagttcaccagctgattacagtgctcatgaagttcatggccaaggatgaaagcagcgctgagtcagacatcagcagtgcaaaggccttcaacacggtcaagcgacacctgtacgtcttactcggctatgaccagcaggaaggttgcttcatgattgcacctcaaaaaatgcgcctgtcaacttgctttaatgcattcattgcaggaattgcccaagttatggactataacattaacttgggaaaacaccttctccccttagtggttcaggtgctcaaatactgctcttgtcctcaactccggcattatttccaacagccgcctcgttgctccctctggtccctaaagcctcacatccggcagatgtggttgaaggccttgcttgtcatcctttacaagtatccataccgagactgtgatatcagcaagatcctgctgcatctgattcacataacagtcaatacactcaatgcgcagtatcatagctgcaagccccatgccacggcaggacctttgtacagtgacaacagtaacataagcagatacagcgaaaaagaaaaaggtgaaatagaactggctgaatatagagagacgggtgcattacaagacagccttctccactgtgtgagagaagaaagcattccgaaaaaaaagctacgctctttcaaacaaaaatctcttgatatagggaatgcagactcgcttttgtttacattagacgaacatcgtaggaagtcgtgcatagatcggtgtgacatagagaagcctccgacccaagctgcgtatatcgcacaaagaccaaacgaccctggacgttctagacagaactctgctacgaggcctgacaatagtgaaatccccgagaacccagctatggaagggtttccagatgctcgaaggcctgtcataccagaggttaggttaaactgtatggagactttcgaggtgaaagttgactcgccggtaaagcctgctcctaaagaggatttagatctgatagatctatcctcagattcaacctcggggcctgaaaaacactctatactctcaacctccgacagcgactctcttgtatttgagcctcttccccctctcagaatagtcgagagtgacgaagaagaggagacgatgaaccaaggcgatgacggcccctccggtaaaaatgctgcctcttctccctccgtccccagccatccctccgtcctcagcctgagcacagctccgcttgtacaagtaagtgtggaggattgttccaaagacttttcttctaaggactcaggaaataatcagtcagcagggaacactgactctgccctcatcactctggaagaccctatggacgccgaaggatcctcaaagccagaggagctgccagagttctcctgcggtagcccactgacgctgaagcaaaaacgagacctccttcagaagtcgtttgctctccccgagatgtcgctggatgatcaccctgacccgggcactgagggggagaagcctggggagctgatgccaagttcaggggcaaaaaccgtcctcctcaaagttcccgaagatgcagagaaccccacagaaagtgagaagcctgataccagtgcagaatctgatacagaacagaatcctgaaaggaaggtggaagaggatggagctgaggaatccgaatttaagattcagattgttcccaggcagaggaagcagaggaagattgctgtcagtgctatccagagagagtacctcgacatctccttcaacattctggacaaactgggagaacagaaagatccagatccttctactaaaggactttcaactttggaaatgccacgagaatcttcatctgcccctacgttagatgcaggtgtgccggaaacaagtagccattcctcaatatcaaaacagatacagcctgggaaacgccagtgtaacgtgccaacgtgcctaaaccctgacctggagggacagccattgaggatgagaggtgccaccaaatccagcctgctatcagcaccaagcatagtcagtatgtttgtgcctgcacctgaagagttcactgacgagcagccgacggtgatgacggacaaatgccatgactgtggggccattcttgaagaatacgatgaagagacacttgggctagccatcgtggtcctctccacattcattcacttaagcccagacctggcagccccgctgctgctggatatcatgcagtctgtgggaagattggcatccagtactaccttttctaatcaagcagaaagcatgatggttcccggcaatgcggcgggggtggccaagcagttcctgcgctgcatcttccatcagttggcccccaacggcatcttcccgcagctgttccaaagcacgatcaaagatgggacttttttacggaccttagcctcgtctctgatggacttcaatgagctgagctccatcgcagctctcagtcagctcctagagggtctaaataacaaaaagaatttaccagcagggggtgctatgattcgctgtttggaaaacattgcaaccttcatggaagctttgcctatggattctcctagtagcctctggaccacaattagcaaccagtttcagacattttttgccaagctgccttgtgttttacctctgaagtgttctttagattccagtttaagaattatgatttgcctcttgaagatcccttctaccaatgctacaaggagtttgttggaaccattttcaaaactgctcagctttgtaattcagaatgccgtcttcactctggcctacctggtggagctgtgtggcttatgttaccgagctttcactaaggaacgagataaattctacttgtctcgtagtgttgttctagaacttctgcaggccctaaagctcaaatctcctttaccagatacaaaccttcttctgcttgttcagtttatttgtgcagatgctggaaccaaactagctgagtcaacaatcctgagcaagcagatgatagcctctgtacctggatgtgggactgcagcgatggagtgtgtgaggcagtacatcaacgaagtgctggatttcatggcagacatgcacacgctgaccaaactgaagagccacatgaagacatgttcccagcctctgcatgaagatacctttgggggacatctcaaagtggggctggcccagattgcagccatggacatctcacggggcaaccacagagataacaaagctgtgatccgctatctgccttggctttatcatcccccctctgcaatgcagcaaggacctaaagaattcattgagtgtgtctcccatatccgactgttgtcctggctgctgctgggttccctcactcacaatgcagtgtgcccaaatgcctcctctccctgcctgcccattcctctggatgcaggctcccacgttgcagaccatcttattgttatcctgattggatttccagagcaatcaaagacctccgtgctgcacatgtgctccctcttccacgcgttcatctttgctcagctgtggacagtttattgcgagcaaagtgccgtcgctacaaatctccaaaatcagaatgaattcagcttcacggcgatactgacagcactagaattttggagtagggtgacacccagcatccttcagctaatggcccataacaaagtgatggtagaaatggtgtgtctccatgtgattagtttaatggaggcattgcaggaatgcaattcgaccatttttgtcaagctgatacctatgtggttgccaatgattcagtcaaatatcaagcacttatctgcgggactccagcttcgcctccaggctattcagaaccacgtgaaccaccacagcctaaggacgctgccgggctcgggccagagcagtgctggcctggcagccctccgaaagtggttgcagtgcactcagttcaaaatggcccaggtggagatccagtcctcggaagcagcctctcaattttatcctctatga

SEQ ID NO: 198201 - DNA, 9100 bp, Homo sapiens
  Payload ID: 19101
  Gene Name: unc-79 homolog (C. elegans)
  Uniprot ID: Q9P2D8
  ENST ID: ENST00000553484
  CDS Start-End: 155-8128
gtccgaatggtagcgacacgggcctaagggagggggaaagcgagggggtggggggtggggggtatgcactcttttcctcgcaacatcgctggcggagcgagggagctcacacgacacagattttggggcaaagcctttccaactggacagcaccatgtccaccaaagcggagcagtttgcttccaagatccggtacttgcaggaatatcataaccgggttctccacaacatttatcctgtaccatcaggaacagatattgcaaacaccttgaaatacttttctcagaccttgttaagcattttgtcccgcacagggaagaaggaaaaccaagatgcctccaatttgacagtgcccatgaccatgtgtctttttcctgtgccattcccactcaccccatctctaagaccgcaggtcagttccatcaaccctactgttactcgctccctcctttacagcgtcctgcgagatgctccctcagaacgcggcccgcaaagtcgtgatgctcagttgtcagactacccttctttggactaccaaggcctctacgtgactttggtgaccctcctggatctagttcctttactacagcacggccaacacgatcttggacagtcgatattttatacaactacatgtttgctaccttttctcaatgatgatattctgagtactttgccctacacgatgatatcaacgttggctacctttcctccatttctgcacaaggatatcattgaatatcttagcacatcttttctaccaatggctatattgggctcctcaaggagagaaggtgtacctgcccatgttaacctctctgcatcatccatgctaatgattgcaatgcagtacacatccaatccagtgtatcattgtcaattactggaatgcctcatgaaatataaacaagaagtctggaaagatcttttgtatgtgattgcgtatgggccttcacaagtgaagcctccagctgtgcaaatgcttttccactactggcccaatttaaaacctcctggggcaataagcgagtacagggggttgcagtacacagcttggaatcccatccactgccagcacattgaatgccacaatgcaattaacaaaccagctgtgaagatgtgtatagacccttccctgtcagtagcgttgggtgataaaccacccccgttgtatctctgtgaagaatgcagcgagaggattgcaggggaccacagtgagtggctgattgatgttcttctgccacaagctgaaatatctgctatatgtcagaaaaagaactgcagttcccacgttagaagagcagttgtcacctgcttctcagcagggtgctgtggtcgtcacggaaacaggcctgttcggtactgcaagaggtgccactcaaatcatcacagtaatgaagtgggggccgctgcggagactcacctctatcagacctctcctccgcccatcaacacgcgggaatgcggcgctgaggagctggtctgcgccgtggaagccgtgatcagcttgttgaaagaagccgagttccatgctgagcagcgagaacatgagctgaaccggcggcggcagctgggcctctcctcttcccaccattccctggataatgctgactttgataacaaggacgatgataaacacgatcagaggctgctcagtcaattcggaatatggttcttagtgagcctctgcacacccagtgagaacacgcctacagaaagcttggcccggctggtggccatggtgtttcagtggtttcactccactgcgtatatgatggatgatgaagtgggaagtctggtggaaaagctgaagcctcagtttgtcaccaaatggctgaagaccgtatgtgatgttcgcttcgatgtcatggtcatgtgccttcttcctaaacccatggaatttgccagggttggtggctactgggataagtcctgtagcacagtgactcagctgaaggaaggtctcaaccgaatcctctgcctgatcccctataatgtgatcaatcaatctgtctgggagtgtattatgccggaatggctggaagccatcagaacagaagtcccagataatcagttaaaagaattcagggaagtattaagcaaaatgtttgacattgaactctgtcctctgcctttctcaatggaggagatgtttggttttattagttgtcggtttacaggatacccctcctctgtgcaggagcaagctttactgtggcttcatgtattatcggagttagatatcatggttccacttcaactactaataagtatgttttctgatggagttaattcagtcaaagagctggcaaatcaaagaaaatcaagagtcagtgaactggcagggaaccttgcatctcgaagggtgagtgttgcctctgatcctggccgacgagttcagcacaatatgcttagtccatttcatagtcctttccagagtccgtttcggagtcctttgcgtagtccgtttcgtagccctttcaagaattttggacacccaggaggaaggactattgactttgattgtgaagatgatgaaatgaatctaaattgtttcatcctcatgtttgatcttctcctgaagcagatggagttacaagatgatggaatcacgatgggtttagagcacagcttatcaaaggacattatttctattataaacaatgtcttccaagccccctgggggggatcccacacctgccagaaggacgaaaaagcaatcgagtgcaacttatgtcagtctagtatcctctgctatcagcttgcttgtgaactcctggagagactagctcctaaagaagaaagccggctggtggagcccacagacagcctggaggatagcctcctttcttccagaccagagtttatcataggccctgaaggggaggaggaggagaatcctgcaagcaagcatggggagaacccaggcaactgcaccgagcccgtggaacatgctgcagtaaagaatgataccgaaagaaaattttgctaccaacagcttccggtaacattgagactaatatataccattttccaggaaatggctaagtttgaagagccagacattctttttaatatgctcaattgcctgaagattctctgtctgcatggagaatgtttatacattgccagaaaagatcaccctcaatttttagcctacattcaggaccacatgttgattgcaagcctgtggagggtcgtcaaatccgagttctctcagctgtcttccctggcagtccctcttctcctccatgccctgtcacttcctcatggtgctgacatcttctggacaatcataaatggcaatttcaacagcaaagactggaagatgaggtttgaagcagtggaaaaagttgctgtaatttgtagatttctggatattcactcagtaaccaaaaaccacctgctgaagtactccctggcacatgccttctgctgcttcctgacagcagtggaggatgtcaaccccgcagtggctaccagagctggtctcctgcttgacaccataaagaggccagcattgcagggtctatgtctttgtcttgacttccagtttgatactgtggttaaagacagacccacaattttgagcaagcttttactcttgcactttcttaagcaggatattcctgctctgagctgggagttctttgtcaatagatttgagacgctttctttggaagcccagctacatttggattgtaacaaggaatttccttttcctacaaccatcactgctgtgaggaccaatgttgctaacctcagcgatgcagccttatggaagatcaagagagctcgctttgcaagaaaccgccagaagagtgtacgttccctgagggacagcgtgaaagggcctgtggaatccaagagggcgctctccctccctgagaccctgacctccaaaattcctatgaggttgaccaggcatgagcagtctgctccagctctcggtgggacacccgaacagacgccaggacaacaatctcctgagaatgacaacaccatcaaggacctgctcccagaagacgctgggatcgaccaccagacagttcaccagctgattacagtgctcatgaagttcatggccaaggatgaaagcagcgctgagtcagacatcagcagtgcaaaggccttcaacacggtcaagcgacacctgtacgtcttactcggctatgaccagcaggaaggttgcttcatgattgcacctcaaaaaatgcgcctgtcaacttgctttaatgcattcattgcaggaattgcccaagttatggactataacattaacttgggaaaacaccttctccccttagtggttcaggtgctcaaatactgctcttgtcctcaactccggcattatttccaacagccgcctcgttgctccctctggtccctaaagcctcacatccggcagatgtggttgaaggccttgcttgtcatcctttacaagtatccataccgagactgtgatatcagcaagatcctgctgcatctgattcacataacagtcaatacactcaatgcgcagtatcatagctgcaagccccatgccacggcaggacctttgtacagtgacaacagtaacataagcagatacagcgaaaaagaaaaaggtgaaatagaactggctgaatatagagagacgggtgcattacaagacagccttctccactgtgtgagagaagaaagcattccgaaaaaaaagctacgctctttcaaacaaaaatctcttgatatagggaatgcagactcgcttttgtttacattagacgaacatcgtaggaagtcgtgcatagatcggtgtgacatagagaagcctccgacccaagctgcgtatatcgcacaaagaccaaacgaccctggacgttctagacagaactctgctacgaggcctgacaatagtgaaatccccgagaacccagctatggaagggtttccagatgctcgaaggcctgtcataccagaggttaggttaaactgtatggagactttcgaggtgaaagttgactcgccggtaaagcctgctcctaaagaggatttagatctgatagatctatcctcagattcaacctcggggcctgaaaaacactctatactctcaacctccgacagcgactctcttgtatttgagcctcttccccctctcagaatagtcgagagtgacgaagaagaggagacgatgaaccaaggcgatgacggcccctccggtaaaaatgctgcctcttctccctccgtccccagccatccctccgtcctcagcctgagcacagctccgcttgtacaagtaagtgtggaggattgttccaaagacttttcttctaaggactcaggaaataatcagtcagcagggaacactgactctgccctcatcactctggaagaccctatggacgccgaaggatcctcaaagccagaggagctgccagagttctcctgcggtagcccactgacgctgaagcaaaaacgagacctccttcagaagtcgtttgctctccccgagatgtcgctggatgatcaccctgacccgggcactgagggggagaagcctggggagctgatgccaagttcaggggcaaaaaccgtcctcctcaaagttcccgaagatgcagagaaccccacagaaagtgagaagcctgataccagtgcagaatctgatacagaacagaatcctgaaaggaaggtggaagaggatggagctgaggaatccgaatttaagattcagattgttcccaggcagaggaagcagaggaagattgctgtcagtgctatccagagagagtacctcgacatctccttcaacattctggacaaactgggagaacagaaagatccagatccttctactaaaggactttcaactttggaaatgccacgagaatcttcatctgcccctacgttagatgcaggtgtgccggaaacaagtagccattcctcaatatcaactcagtataggcagatgaaaaggggatccctgggagttctgacaatgagccagttaatgaagcggcagctggagcatcagtctagcgccccccataacatcagcaactgggacactgaacagatacagcctgggaaacgccagtgtaacgtgccaacgtgcctaaaccctgacctggagggacagccattgaggatgagaggtgccaccaaatccagcctgctatcagcaccaagcatagtcagtatgtttgtgcctgcacctgaagagttcactgacgagcagccgacggtgatgacggacaaatgccatgactgtggggccattcttgaagaatacgatgaagagacacttgggctagccatcgtggtcctctccacattcattcacttaagcccagacctggcagccccgctgctgctggatatcatgcagtctgtgggaagattggcatccagtactaccttttctaatcaagcagaaagcatgatggttcccggcaatgcggcgggggtggccaagcagttcctgcgctgcatcttccatcagttggcccccaacggcatcttcccgcagctgttccaaagcacgatcaaagatgggacttttttacggaccttagcctcgtctctgatggacttcaatgagctgagctccatcgcagctctcagtcagctcctagagggtctaaataacaaaaagaatttaccagcagggggtgctatgattcgctgtttggaaaacattgcaaccttcatggaagctttgcctatggattctcctagtagcctctggaccacaattagcaaccagtttcagacattttttgccaagctgccttgtgttttacctctgaagtgttctttagattccagtttaagaattatgatttgcctcttgaagatcccttctaccaatgctacaaggagtttgttggaaccattttcaaaactgctcagctttgtaattcagaatgccgtcttcactctggcctacctggtggagctgtgtggcttatgttaccgagctttcactaaggaacgagataaattctacttgtctcgtagtgttgttctagaacttctgcaggccctaaagctcaaatctcctttaccagatacaaaccttcttctgcttgttcagtttatttgtgcagatgctggaaccaaactagctgagtcaacaatcctgagcaagcagatgatagcctctgtacctggatgtgggactgcagcgatggagtgtgtgaggcagtacatcaacgaagtgctggatttcatggcagacatgcacacgctgaccaaactgaagagccacatgaagacatgttcccagcctctgcatgaagatacctttgggggacatctcaaagtggggctggcccagattgcagccatggacatctcacggggcaaccacagagataacaaagctgtgatccgctatctgccttggctttatcatcccccctctgcaatgcagcaaggacctaaagaattcattgagtgtgtctcccatatccgactgttgtcctggctgctgctgggttccctcactcacaatgcagtgtgcccaaatgcctcctctccctgcctgcccattcctctggatgcaggctcccacgttgcagaccatcttattgttatcctgattggatttccagagcaatcaaagacctccgtgctgcacatgtgctccctcttccacgcgttcatctttgctcagctgtggacagtttattgcgagcaaagtgccgtcgctacaaatctccaaaatcagaatgaattcagcttcacggcgatactgacagcactagaattttggagtagggtgacacccagcatccttcagctaatggcccataacaaagtgatggtagaaatggtgtgtctccatgtgattagtttaatggaggcattgcaggaatgcaattcgaccatttttgtcaagctgatacctatgtggttgccaatgattcagtcaaatatcaagcacttatctgcgggactccagcttcgcctccaggctattcagaaccacgtgaaccaccacagcctaaggacgctgccgggctcgggccagagcagtgctggcctggcagccctccgaaagtggttgcagtgcactcagttcaaaatggcccaggtggagatccagtcctcggaagcagcctctcaattttatcctctatgagtggactcctcggcgctcagtgtcaacactctggtttagcaataatgggtttaaaaacaaacaatttgatccaagcaggttggggaacatattggtactgtacattctctttctagtttagtaaaagatgtgcaaaggccagagagggccgaaaatgaagctttcttgctacacatatttctgatgactccttgggctatctgattaagtgtttccttacattattttttaaaaaccaaatcatttttctttaactaacttctattttttttaagaaaaaaaaatagactggtgggtactcacagaaaagttgtataagtccccctgttgctatttttgatgatagagaataaatagggtttttgaaacctttgtagtgttttttcttaaaatccactcttggcaatgcaataaaaaaaaccgtcaccataagccagtgacacctgactgaagctttttgtctttatcctgggaaaagtggcagcttgcaaggaacattacaaagtgcacttagaaattaggtggttaaactgtgccaattgttttcgttgttttataatatcattttccaaaactgtccagtaagttttattatttttaaaactagtttttcaactcattagttctaggctgtactctcttgtaagctttatgataaccactttagttttgtgaataataaattttattcttttgttaatacttgtatacaatttaattgaaaactgtagcttgcacactggaccagatgagtccctcactggcacagtgccctgcacctggagtgatgtttcataaaacggaattttaatagtgtaagagcaccaagatttctctgcacctatacctagcgttggactgtgcattccaaatgaaattcctcctctttatccctgtaatgcactgactaacagaagacttactacacatttaaactgtatattgacatgctattaaatgcgttttttatta

SEQ ID NO: 198202 - DNA, 7377 bp, Homo sapiens
  Payload ID: 19101
  Gene Name: unc-79 homolog (C. elegans)
  Uniprot ID: Q9P2D8
  ENST ID: ENST00000615108
  CDS Start-End: 1-7377
atgatatcaacgttggctacctttcctccatttctgcacaaggatatcattgaatatcttagcacatcttttctaccaatggctatattgggctcctcaaggagagaaggtgtacctgcccatgttaacctctctgcatcatccatgctaatgattgcaatgcagtacacatccaatccagtgtatcattgtcaattactggaatgcctcatgaaatataaacaagaagtctggaaagatcttttgtatgtgattgcgtatgggccttcacaagtgaagcctccagctgtgcaaatgcttttccactactggcccaatttaaaacctcctggggcaataagcgagtacagggggttgcagtacacagcttggaatcccatccactgccagcacattgaatgccacaatgcaattaacaaaccagctgtgaagatgtgtatagacccttccctgtcagtagcgttgggtgataaaccacccccgttgtatctctgtgaagaatgcagcgagaggattgcaggggaccacagtgagtggctgattgatgttcttctgccacaagctgaaatatctgctatatgtcagaaaaagaactgcagttcccacgttagaagagcagttgtcacctgcttctcagcagggtgctgtggtcgtcacggaaacaggcctgttcggtactgcaagaggtgccactcaaatcatcacagtaatgaagtgggggccgctgcggagactcacctctatcagacctctcctccgcccatcaacacgcgggaatgcggcgctgaggagctggtctgcgccgtggaagccgtgatcagcttgttgaaagaagccgagttccatgctgagcagcgagaacatgagctgaaccggcggcggcagctgggcctctcctcttcccaccattccctggataatgctgactttgataacaaggacgatgataaacacgatcagaggctgctcagtcaattcggaatatggttcttagtgagcctctgcacacccagtgagaacacgcctacagaaagcttggcccggctggtggccatggtgtttcagtggtttcactccactgcgtatatgatggatgatgaagtgggaagtctggtggaaaagctgaagcctcagtttgtcaccaaatggctgaagaccgtatgtgatgttcgcttcgatgtcatggtcatgtgccttcttcctaaacccatggaatttgccagggttggtggctactgggataagtcctgtagcacagtgactcagctgaaggaaggtctcaaccgaatcctctgcctgatcccctataatgtgatcaatcaatctgtctgggagtgtattatgccggaatggctggaagccatcagaacagaagtcccagataatcagttaaaagaattcagggaagtattaagcaaaatgtttgacattgaactctgtcctctgcctttctcaatggaggagatgtttggttttattagttgtcggtttacaggatacccctcctctgtgcaggagcaagctttactgtggcttcatgtattatcggagttagatatcatggttccacttcaactactaataagtatgttttctgatggagttaattcagtcaaagagctggcaaatcaaagaaaatcaagagtcagtgaactggcagggaaccttgcatctcgaagggtgagtgttgcctctgatcctggccgacgagttcagcacaatatgcttagtccatttcatagtcctttccagagtccgtttcggagtcctttgcgtagtccgtttcgtagccctttcaagaattttggacacccaggaggaaggactattgactttgattgtgaagatgatgaaatgaatctaaattgtttcatcctcatgtttgatcttctcctgaagcagatggagttacaagatgatggaatcacgatgggtttagagcacagcttatcaaaggacattatttctattataaacaatgtcttccaagccccctgggggggatcccacacctgccagaaggacgaaaaagcaatcgagtgcaacttatgtcagtctagtatcctctgctatcagcttgcttgtgaactcctggagagactagctcctaaagaagaaagccggctggtggagcccacagacagcctggaggatagcctcctttcttccagaccagagtttatcataggccctgaaggggaggaggaggagaatcctgcaagcaagcatggggagaacccaggcaactgcaccgagcccgtggaacatgctgcagtaaagaatgataccgaaagaaaattttgctaccaacagcttccggtaacattgagactaatatataccattttccaggaaatggctaagtttgaagagccagacattctttttaatatgctcaattgcctgaagattctctgtctgcatggagaatgtttatacattgccagaaaagatcaccctcaatttttagcctacattcaggaccacatgttgattgcaagcctgtggagggtcgtcaaatccgagttctctcagctgtcttccctggcagtccctcttctcctccatgccctgtcacttcctcatggtgctgacatcttctggacaatcataaatggcaatttcaacagcaaagactggaagatgaggtttgaagcagtggaaaaagttgctgtaatttgtagatttctggatattcactcagtaaccaaaaaccacctgctgaagtactccctggcacatgccttctgctgcttcctgacagcagtggaggatgtcaaccccgcagtggctaccagagctggtctcctgcttgacaccataaagaggccagcattgcagggtctatgtctttgtcttgacttccagtttgatactgtggttaaagacagacccacaattttgagcaagcttttactcttgcactttcttaagcaggatattcctgctctgagctgggagttctttgtcaatagatttgagacgctttctttggaagcccagctacatttggattgtaacaaggaatttccttttcctacaaccatcactgctgtgaggaccaatgttgctaacctcagcgatgcagccttatggaagatcaagagagctcgctttgcaagaaaccgccagaagagtgtacgttccctgagggacagcgtgaaagggcctgtggaatccaagagggcgctctccctccctgagaccctgacctccaaaattcgacaacaatctcctgagaatgacaacaccatcaaggacctgctcccagaagacgctgggatcgaccaccagacagttcaccagctgattacagtgctcatgaagttcatggccaaggatgaaagcagcgctgagtcagacatcagcagtgcaaaggccttcaacacggtcaagcgacacctgtacgtcttactcggctatgaccagcaggaaggttgcttcatgattgcacctcaaaaaatgcgcctgtcaacttgctttaatgcattcattgcaggaattgcccaagttatggactataacattaacttgggaaaacaccttctccccttagtggttcaggtgctcaaatactgctcttgtcctcaactccggcattatttccaacagccgcctcgttgctccctctggtccctaaagcctcacatccggcagatgtggttgaaggccttgcttgtcatcctttacaagtatccataccgagactgtgatatcagcaagatcctgctgcatctgattcacataacagtcaatacactcaatgcgcagtatcatagctgcaagccccatgccacggcaggacctttgtacagtgacaacagtaacataagcagatacagcgaaaaagaaaaaggtgaaatagaactggctgaatatagagagacgggtgcattacaagacagccttctccactgtgtgagagaagaaagcattccgaaaaaaaagctacgctctttcaaacaaaaatctcttgatatagggaatgcagactcgcttttgtttacattagacgaacatcgtaggaagtcgtgcatagatcggtgtgacatagagaagcctccgacccaagctgcgtatatcgcacaaagaccaaacgaccctggacgttctagacagaactctgctacgaggcctgacaatagtgaaatccccgagaacccagctatggaagggtttccagatgctcgaaggcctgtcataccagaggttaggttaaactgtatggagactttcgaggtgaaagttgactcgccggtaaagcctgctcctaaagaggatttagatctgatagatctatcctcagattcaacctcggggcctgaaaaacactctatactctcaacctccgacagcgactctcttgtatttgagcctcttccccctctcagaatagtcgagagtgacgaagaagaggagacgatgaaccaaggcgatgacggcccctccggtaaaaatgctgcctcttctccctccgtccccagccatccctccgtcctcagcctgagcacagctccgcttgtacaagtaagtgtggaggattgttccaaagacttttcttctaaggactcaggaaataatcagtcagcagggaacactgactctgccctcatcactctggaagaccctatggacgccgaaggatcctcaaagccagaggagctgccagagttctcctgcggtagcccactgacgctgaagcaaaaacgagacctccttcagaagtcgtttgctctccccgagatgtcgctggatgatcaccctgacccgggcactgagggggagaagcctggggagctgatgccaagttcaggggcaaaaaccgtcctcctcaaagttcccgaagatgcagagaaccccacagaaagtgagaagcctgataccagtgcagaatctgatacagaacagaatcctgaaaggaaggtggaagaggatggagctgaggaatccgaatttaagattcagattgttcccaggcagaggaagcagaggaagattgctgtcagtgctatccagagagagtacctcgacatctccttcaacattctggacaaactgggagaacagaaagatccagatccttctactaaaggactttcaactttggaaatgccacgagaatcttcatctgcccctacgttagatgcaggtgtgccggaaacaagtagccattcctcaatatcaactcagtataggcagatgaaaaggggatccctgggagttctgacaatgagccagttaatgaagcggcagctggagcatcagtctagcgccccccataacatcagcaactgggacactgaacagatacagcctgggaaacgccagtgtaacgtgccaacgtgcctaaaccctgacctggagggacagccattgaggatgagaggtgccaccaaatccagcctgctatcagcaccaagcatagtcagtatgtttgtgcctgcacctgaagagttcactgacgagcagccgacggtgatgacggacaaatgccatgactgtggggccattcttgaagaatacgatgaagagacacttgggctagccatcgtggtcctctccacattcattcacttaagcccagacctggcagccccgctgctgctggatatcatgcagtctgtgggaagattggcatccagtactaccttttctaatcaagcagaaagcatgatggttcccggcaatgcggcgggggtggccaagcagttcctgcgctgcatcttccatcagttggcccccaacggcatcttcccgcagctgttccaaagcacgatcaaagatgggacttttttacggaccttagcctcgtctctgatggacttcaatgagctgagctccatcgcagctctcagtcagctcctagagggtctaaataacaaaaagaatttaccagcagggggtgctatgattcgctgtttggaaaacattgcaaccttcatggaagctttgcctatggattctcctagtagcctctggaccacaattagcaaccagtttcagacattttttgccaagctgccttgtgttttacctctgaagtgttctttagattccagtttaagaattatgatttgcctcttgaagatcccttctaccaatgctacaaggagtttgttggaaccattttcaaaactgctcagctttgtaattcagaatgccgtcttcactctggcctacctggtggagctgtgtggcttatgttaccgagctttcactaaggaacgagataaattctacttgtctcgtagtgttgttctagaacttctgcaggccctaaagctcaaatctcctttaccagatacaaaccttcttctgcttgttcagtttatttgtgcagatgctggaaccaaactagctgagtcaacaatcctgagcaagcagatgatagcctctgtacctggatgtgggactgcagcgatggagtgtgtgaggcagtacatcaacgaagtgctggatttcatggcagacatgcacacgctgaccaaactgaagagccacatgaagacatgttcccagcctctgcatgaagatacctttgggggacatctcaaagtggggctggcccagattgcagccatggacatctcacggggcaaccacagagataacaaagctgtgatccgctatctgccttggctttatcatcccccctctgcaatgcagcaaggacctaaagaattcattgagtgtgtctcccatatccgactgttgtcctggctgctgctgggttccctcactcacaatgcagtgtgcccaaatgcctcctctccctgcctgcccattcctctggatgcaggctcccacgttgcagaccatcttattgttatcctgattggatttccagagcaatcaaagacctccgtgctgcacatgtgctccctcttccacgcgttcatctttgctcagctgtggacagtttattgcgagcaaagtgccgtcgctacaaatctccaaaatcagaatgaattcagcttcacggcgatactgacagcactagaattttggagtagggtgacacccagcatccttcagctaatggcccataacaaagtgatggtagaaatggtgtgtctccatgtgattagtttaatggaggcattgcaggaatgcaattcgaccatttttgtcaagctgatacctatgtggttgccaatgattcagtcaaatatcaagcacttatctgcgggactccagcttcgcctccaggctattcagaaccacgtgaaccaccacagcctaaggacgctgccgggctcgggccagagcagtgctggcctggcagccctccgaaagtggttgcagtgcactcagttcaaaatggcccaggtggagatccagtcctcggaagcagcctctcaattttatcctctatga

SEQ ID NO: 198203 - DNA, 7377 bp, Homo sapiens; identical to SEQ ID NO: 198202
  Payload ID: 19101
  Gene Name: unc-79 homolog (C. elegans)
  Uniprot ID: Q9P2D8
  ENST ID: ENST00000621021
  CDS Start-End: 1-7377

SEQ ID NO: 198204 - DNA, 8400 bp, Homo sapiens; identical to SEQ ID NO: 198198
  Payload ID: 19101
  Gene Name: unc-79 homolog (C. elegans)
  Uniprot ID: Q9P2D8
  ENST ID: ENST00000627695
  CDS Start-End: 656-8032

SEQ ID NO: 198205 - DNA, 9100 bp, Homo sapiens; identical to SEQ ID NO: 198201
  Payload ID: 19101
  Gene Name: unc-79 homolog (C. elegans)
  Uniprot ID: Q9P2D8
  ENST ID: ENST00000629588
  CDS Start-End: 155-8128

SEQ ID NO: 198206 - DNA, 7908 bp, Homo sapiens; identical to SEQ ID NO: 198199
  Payload ID: 19101
  Gene Name: unc-79 homolog (C. elegans)
  Uniprot ID: Q9P2D8
  ENST ID: ENST00000627404
  CDS Start-End: 1-7908

SEQ ID NO: 198207 - DNA, 8484 bp, Homo sapiens; identical to SEQ ID NO: 198200
  Payload ID: 19101
  Gene Name: unc-79 homolog (C. elegans)
  ENST ID: ENST00000629205
  CDS Start-End: 694-8484

SEQ ID NO: 198208 - DNA, 13440 bp, Homo sapiens
  Payload ID: 19102
  Gene Name: unc-80 homolog (C. elegans)
  Uniprot ID: Q8N2C7
  ENST ID: ENST00000272845
  CDS Start-End: 35-9739
gggtcctgcagtaggactcccgggagccaccattatggtgaagaggaagagctccgagggccaggagcaggacggcggccgcggcatccccctgcccatccagaccttcctgtggcggcaaaccagtgcatttttgaggcccaaactggggaagcaatatgaagcttcttgtgtgtcctttgagcgagtgttggtagaaaacaagctgcatggcctctctccagctctctctgaagccatccagagcatttccagatgggaactggtgcaagctgctttgcctcatgtcctccactgcactgcaaccctgctttcaaaccgaaacaagctaggccaccaggataaattgggtgttgctgagacaaagctccttcacactctacactggatgcttctggaggccccccaggactgcaacaatgagcggtttgggggtacagaccgaggctccagctggggtggaagcagcagtgctttcatccaccaggttgaaaaccagggttctccagggcagccttgccaaagcagctctaatgacgaagaagagaacaaccgaagaaagatcttccagaactccatggctactgtggagctcttcgtgtttctgtttgctcccctggtacacaggatcaaggaatctgacctcaccttccgtctggccagtgggcttgttatatggcagcccatgtgggaacacagacagcccggagtctctggctttaccgcactggtgaagcccatcaggaacatcattacagctaagagaagttctcctatcaacagtcaaagccggacctgtgaatcaccaaatcaagatgcaagacacttagagggactccaggtggtttgtgaaacattccagtctgattccatctcacccaaggccaccatttcaggctgtcaccgaggaaactcctttgatggaagtctgtcctcccaaacttcccaggaaagaggcccatcacattccagggcctctcttgtgatacctccgtgccaaaggtcccgctatgccacctactttgacgttgctgttctgcgctgcctacttcagccccattggtctgaggaaggcactcagtggtctctgatgtactatctacaaaggctgcgacacatgttggaagagaagccagaaaagcctccggagccagatattcctctcctgcccagacccaggagtagctccatggtggcagcagctccctcactagtgaacacccacaaaacccaagatctcaccatgaagtgtaacgaggaggaaaaatctcttagctctgaggccttttccaaggtttcactgaccaatctgcgtagatctgcagtcccagatctttcttcagacctgggcatgaatatttttaaaaagttcaagagccgcaaagaagaccgagagaggaaaggctccattccattccaccacacaggcaagaggaggccacggagaatgggagtgcccttcctgcttcacgaggaccacctggatgtgtcccccacgcgcagcacattctcctttggaagtttctctgggctgggagaagacaggcgaggaattgagaaaggaggctggcaaaccaccattttagggaaattgacccggcgaggcagttcagatgcagccactgagatggagagtctgagcgccaggcattcccactcccatcacaccctggtaagcgacctgccggacccctccaacagccatggagaaaacaccgtcaaggaagtgcgatctcagatctccaccatcacagttgcgaccttcaataccactttggcgtcattcaacgtaggctatgcagactttttcaatgagcatatgaggaaactctgcaaccaggtgcctatcccggagatgccacatgaacctctggcatgtgctaacctacctcgaagcctcacagactcctgcataaactacagctacctagaggacacagaacatattgacgggaccaataactttgtccacaagaatggaatgcttgatctttctgtagttctgaaggctgtttatcttgtccttaatcatgacatcagctctcgtatctgtgacgtggcgctaaacattgtggaatgcttgcttcaacttggtgtggtgccctgtgtagaaaagaatagaaagaagagtgaaaacaaggaaaatgagaccttggaaaagaggccaagtgagggagctttccaattcaaaggagtatctggaagttccacctgtggattcggaggccctgctgttagtggagctggagatggtggaggagaagaaggaggaggtggagatggaggaggtggaggaggtgatggaggaggaggtggaggaggtggaggcggcccttatgagaagaatgataagaaccaagagaaggatgaaagtacacctgtaagcaaccataggcttgctctaacaatgctcatcaaaatagtgaagtctttgggatgtgcctatggttgtggtgaaggacaccgagggctctctggagatcgtctgagacaccaggcccagaactgcctcactaagctatacaagctagataagatgcagttccgacaaaccatgagggactatgtgaacaaggactctctcaataatgtagtggacttcttgcatgctttgctaggattttgtatggagccggtcactgacaacaaggctgggtttggaaataacttcaccacagtggacaacaaatccacagcccaaaatgtggaaggcattatcgtcagcgccatgtttaaatccctcatcacacgctgcgcttcaaccacacatgaattgcacagccctgagaatctgggactgtattgtgacattcgtcagctggtccagtttatcaaagaggctcatgggaatgtcttcaggagagtggccctcagcgctctgcttgacagtgccgagaagttagcaccagggaaaaaggtggaggagaatgaacaggaatctaagcctgcaggcagtaaaaggtcagaggcgggaagcattgtggataaaggccaggtatcctctgcacctgaggaatgtcgcagcttcatgtctggtcgcccctcacagactccagagcacgatgaacaaatgcaaggagccaacttggggcggaaagatttctggcgtaagatgttcaagtcccagagtgcagcaagtgacaccagcagccagtctgaacaggacacttcagaatgcacgactgcccactcagggaccacctctgaccgacgtgcccgctcacgatcccgcagaatttccctccgaaagaagcttaaactccccataggtaaaaggaactggctgaagagatcatccctctcaggcctggcagatggtgtggaggacctcctggacattagctctgtggaccgactctctttcatcaggcaaagctccaaggtcaaattcactagtgctgtgaagctttctgaaggtgggccaggaagtggcatggaaaatggaagagatgaagaggagaatttcttcaagcgtcttggttgccacagttttgatgatcatctctctcccaaccaagatggtggaaaaagcaaaaacgtggtgaatcttggagcaatccgacaaggcatgaaacgcttccaatttctgttaaactgctgtgagccagggacaattcctgatgcctccatcctagcagctgccttggatctagaagcccctgtggtggccagagcagccttgttcctggaatgtgctcgttttgttcaccgctgcaaccgtggcaactggccagagtggatgaaagggcaccacgtgaacatcaccaagaaaggactttcccggggacgctctcccattgtgggcaacaagcgaaaccagaagctgcagtggaatgcagccaagctcttctaccaatggggagacgcaattggcgtccgattgaatgagctgtgccacggggaaagtgagagcccagccaacctgctgggtctcatttacgatgaagagaccaagaggagacttagaaaggaggatgaggaggaagactttttagatgacagtactgtgaacccctctaaatgcggttgcccctttgccttgaagatggcagcatgtcagcttcttctggagattaccaccttcctgcgagagaccttttcttgcctgcccagacctcgcactgagcctctggtggacttggagagctgcagacttcgtttggatcccgagttggaccggcacagatatgagaggaagatcagctttgctggggtcctggacgaaaatgaagactcaaaagattctctccacagcagcagccacactctcaaatcagatgcaggagtcgaggagaagaaagaagggagtccttggagtgcaagcgagcccagcattgagccagagggaatgagtaatgccggcgcggaggagaattaccacagaaacatgtcgtggcttcatgtgatgatcttgctgtgcaatcagcagagtttcatctgcactcacgttgactactgccatccccactgctacctgcaccacagccgctcctgtgcccgactggtcagagccatcaagctactctatggagacagtgtggactccctgagggaaagcagcaacatcagcagtgtggctctccggggcaagaaacagaaagaatgctcagataagtcatgcctgaggacaccttctctaaagaagagagtttcagatgccaatctggaaggaaaaaaagattccggaatgctgaagtacatcagacttcaggtgatgagcttgtcgcctgctcccttatctctgttaatcaaggcagcaccaattctgacagaggagatgtacggagacatccagccagctgcctgggagctcctgctcagcatggatgagcacatggcaggggcagcagctgccatgttcctgctgtgtgcagtgaaggtgcctgaggccgtgtccgacatgctgatgtcagagttccaccacccggagactgtgcagaggctgaacgctgtcctcaagttccacacgctctggaggtttcgctatcaggtctggccccggatggaggaaggggcacagcagatttttaagattccgcctcccagtatcaatttcacccttccctcgccggtgcttggaatgccatccgtcccaatgtttgacccaccgtgggttcctcagtgcagcgggagtgtccaggaccccattaatgaagaccagtctaaatccttttcagcccgggctgtgtcccgctcccatcaaagggcagaacacatcttaaagaacttgcagcaggaggaagaaaagaaacgacttggtagagaagccagcctcatcactgccatccccatcacccaggaggcttgctatgagcccacatgcacgcccaactcagaaccggaagaagaagtagaagaagtcaccaatctggcatcccgtcgactgtctgtgagtccatcctgcacctccagcacttcccacaggaattattccttccgccgcgggtcagtctggtcagtgcgttcagccgtcagtgctgaagatgaggaacataccactgaacacacgccgaaccaccatgtgcctcagcccccacaagcagtgttcccagcatgcatctgtgcagcagtacttcccattgttcatctgatggaggatggtgaggtgcgggaagatggagtagcagtgagtgctgtggctcaacaagtcttatggaactgtctaattgaagatccatcaacggttcttcgacattttctggaaaaactgaccatcagcaatagacaagatgagttaatgtacatgctgcgcaaacttctcttgaatattggagactttcctgctcagacatctcacatcctattcaactatttggtaggattaatcatgtactttgtgcggaccccctgcgagtgggggatggatgccatttcagccaccctgacattcctgtgggaggtggtgggttacgtggagggcctcttcttcaaggatctcaagcagacgatgaagaaggagcagtgtgaggtgaagctcctggtgaccgcttcaatgccaggtactaaaaccttggtagttcatggacagaatgagtgcgatatcccaacccagttaccagtccatgaagacactcaatttgaagccctgttgaaggagtgtctggagttttttaatatcccagaatcccagtcaacacattattttcttatggataaacgatggaaccttatccactacaataagacctatgttcgagatatttatcctttccggaggtcagtatctccccagctgaatcttgtacatatgcatccagagaagggacaggagctcattcagaaacaggtgttcacccgaaagctggaagaagtagggcgggtgttgtttctcatctccctaacccagaagatccccacagcccacaaacagtcccacgtctccatgcttcaggaagacctcctccgcctgccctcattccctcgtagtgctattgatgctgagttttcactcttcagtgatcctcaagctggaaaggaactgtttggcctcgacactcttcagaaaagcttgtggatccagctgctggaggaaatgttcctgggcatgccgagcgagtttccatggggagacgaaatcatgcttttcctcaacgtttttaacggggctctgatcctccacccggaagacagtgccctgctcaggcagtatgctgccaccgtcatcaacaccgcggtgcacttcaaccacctcttctctctcagcggctaccagtggattctccccaccatgctgcaggtgtactccgactatgaaagcaatccccagctgcgtcaagccatcgaatttgcctgtcaccagttctatattctacaccggaagccctttgtgctccagctgtttgctagtgtggcccctctcctggaatttcctgatgctgccaataatgggcccagcaaaggtgtgtcagctcagtgcctgtttgacttgctgcagtccctagagggagagaccaccgacatattagacatcttagagctggtcaaagctgagaagcctctcaagtcattagatttctgctatggaaacgaagatctgacattttctatcagtgaagccattaagctctgtgtcactgtggtggcgtatgctcccgaatcattcagaagtcttcagatgctgatggtcttagaagccttagttccatgttacctacaaaagctaaagaggcagacatcacaggtggagacagtacctgctgcccgagaggagattgcggccactgctgctcttgcgacgtccctacaggcccttttgtacagtgtagaggtcctcaccaggcccatgacagccccacagatgagcaggtgtgaccaaggtcataagggaaccaccacagccaatcacaccatgtcgtctggggtgaacaccaggtaccaggaacaaggagccaaactgcactttatcagggaaaaccttcatttactggaggaagggcaaggcattcccagagaggaactggatgaacgaattgctcgggaagagttcagaagaccccgggagtccttactgaatatttgcactgagttctataagcactgtgggccacggctgaagatcttgcaaaatctggctggggagcctcgggtcattgccttggaactgctggatgtgaagtctcacatgaggttggcagaaattgcacactcccttctgaagctggcaccatatgacactcagacaatggagagtcgtgggcttcggcgctacatcatggagatgctacccattactgactggacagctgaggcagtgaggccggccctcatcctcattttaaaaagattggatagaatgttcaacaaaattcataagatgcctactttgaggcgacaggttgagtgggagcctgccagcaatttgattgaaggggtttgtttgacacttcagaggcagccaatcatatccttcctgcctcaccttaggtcactgatcaatgtctgtgtcaatctggtgatgggagtggtaggaccttccagtgttgctgatggattaccccttcttcatctcagcccttatctctcaccacctctgcccttcagcacagctgttgtccggcttgtagcattgcagatacaggctttaaaagaagattttcctttaagccatgtgatctccccattcaccaatcaagagcgaagggaggggatgcttttaaatctgctcatcccatttgtgctcacagtaggatctggaagcaaagatagcccatggctggagcagcctgaggtgcagctgctgctgcagacagtcatcaatgtactcctcccaccgcggatcatcagcacatccaggagcaagaacttcatgttagagagctccccagcccactgctccacccctggggatgcggggaaagacttgcgcagggaagggctggctgagtccaccagccaagcagcatacttggcgctgaaggtgattctcgtctgctttgagaggcagctcggaagccagtggtactggctgagcctccaggtgaaggagatggctctgcggaaggtgggaggcctggccctttgggatttcctcgacttcatcgtgcggacccgaatacccatctttgtgcttttgcgccctttcatccagtgcaagctgctggcccaaccagcagagaatcatgaagagctttccgcccggcaacatattgccgaccagctggagcggcgcttcataccacgccctttgtgtaagagctcgctcattgctgagttcaacagtgaactaaaaattctaaaagaggcagttcatagtggatcagcctaccaaggcaagacatccatcagtaccgtgggcacctccacctctgcttaccgcctgagcttggccaccatgtcccgctctaacacgggcacgggcactgtctgggagcaggacagtgagccatcccagcaggcttcgcaggacaccctgagtcggactgatgaggaagatgaggaaaatgactctataagcatgcccagcgtggtaagtgaacaagaagcttacctcctgagtgccattggaaggaggcgattctccagccatgtctccagcatgtctgtacctcaggctgaggtgggcatgctacccagccagagggtggcaagtatacagagtgaacctggtcaacagaacctccttgttcagcagccgctggggaggaagaggggcctgaggcagctaagacgtcctctactatcacgtcagaaaactcagactgaacccagaaatcgccaaggggctcggctgtcaaccactcgcaggagcattcaacctaaaacgaagccgtctgcggatcagaaacgatctgtgaccttcattgaggctcagccagagccagcagctgccccaacagatgcgcttcctgcaacaggccaactacagggctgtagcccagccccttctaggaaaccagaagcaatggacgaaccagtcctcacatcttctcccgccatagttgttgcggatctccacagcgtgtctcccaagcagagtgagaacttccccactgaagaaggagaaaaggaggaggacacagaagcacaaggtgctactgcacacagtccactctctgcccaactctctgaccctgatgacttcacaggcctcgagacatccagcctcctacagcatggagacactgtccttcatatcagtgaggaaaatggcatggagaacccgctactatctagtcagttcacctttactcccactgagctggggaaaacggatgcagtattagatgagtctcatgtttaattctgtatcttgtaagctctgcaggtatagagaagacatgaaagtgatctctctactacaagttcaatacttttgcttgaaaaagattaattacaaaatagcactttacttctaatgggtggcacaaatctgaataggttttgctgccaatacacatgatgtttcataaacatcttaaaagtcaatggctaaaaggatttagttgtgtgaaaatcacaaaaccagggaggaataaggggaaagagccatttcactgcacattgtttatgattcaagaagccttcagcagttaaaaatatatactattcattgctgctttcatagaaatattaacaaatgatatgatctaaaaatagaatgcaattttttgagattactcacattatacatctcatgcaaatatttatttttatagtttaaaaaatatcaattcaggttggctatacaagtagcaatttacataaaaaaataattaataggaaaaatattactttggggagactaaataacaagcctgcagccatttttgttttgagtaacaatacagccatttagaagaagaaaaaaatactatatagagagctgtggacttttagatatttatttttcaactatcattttcattgcatgttgtaaatcaaaatgcagatggcataagatcatcccatttcataatctatcacattagaatattacagaatattctagaaatcatcagaaataattctgaattaagaacctaaacagcctatacaattataaaaactaaatgtatatataatcacttaaaagagatggtattcctattcctagccctgactacatcaataccaagattagaagctattggaaaatgtgattagtaatacttttccttatagtatcctgtgcctgccctggagggcatattttcagatattaaggttagtgttgttagaatcggtttaataaaataacattttcctaatagaaacaatattcttatgatacttggaacatctaagtttataaggaaaaatgtataaagtaagcaatttcttcatagacacctccagtttatatattttgcaaataggcctttaacttgaagttcaattacttcaagaaaagtgtaacacttagaaggcttgtgaggccaacacctagtgtgttactgatcctatggtagggctgtgcatcacgtggttcacaattgaatttcaaaattttaacagtttacattagaaaactgttacctaacaaccaagcatatacaaactcatatacatacttaaattggtacggtggtgtatgtgtgcgtgcgtgtgtgtgtgtatgtgttgtagtcctcaagatgaagttaaatatagactttaattaccctgcaatgaatttaaaacacattctgtatgcttaaactttgagtgcgttggctgtgaaatgtatacatatataaagaggatacctactaaacccaccttaatcataaaggaaaattattttttgttagaattgcttattaaataggcatactttatactgtggtttataatttcaaatataacttggggttatggtcctattcactaagagaatgaaagatatccatgagttaaaagaacaaaactaaaaatttcagatctaacaattgaaagaaaattgaggcagtaaatgacctcttttactcttttatgttttacaatattatcatgttatttacagttaatgctgaaataattctcaagtgcaggaatataaatgttaagtggttttatgattccaagctgatatatttcacctgttaaaaattatgctgctaaattagcattagaggccttatgtttggtaattacaagtgtctgggctattggcgcgtctctatatatgtgtgtgctttgttccagtttcttcaaattatctatgtataattgtatgaaatatttaaatagcaaagaagtcaaagaagattgttaaatattcaacaagaatcataaatacctttatatgtattttaaaagtattgggctgttctgaacatgattatgctggtctgtctgtcttttagcctgactccttcactcttgtgtgtgaagtctattagcaactttcaataagctaagcaatgttgtaacttgcaaaaaagcctccactctgagaaacagggccttatagagtaggaatgttttcatactgggactactgaaattttgcagatgtgtgcatctgttccatttaaggtgcccttaaatgtgttgaatgtaatgtgttgaatgtttatgtgtaatggctaaagtatctatatgtatgtgcataaaactgtcacaagatgtattctcaggaatactgttacctggagtttgaaaggaataactattaaaaaaaaaagttggggaagattagaaaaaagctcaagataaatgttcaaaatattattaagtacatgactaaaagctaattactacatatgataaatgcagtgttggtaatagtagatcatttcttaagccatgatacttaatgatatttatcttattcagaggaaaaacaaaaaaggtacccacttcccatgtagaaaaaattagactcagcaaagaggttgcttcttctgaaattagcttttgagagaccttggaataaaccatgtgttatccatgatagtatgactcagatccaattaaaacagtttaaattctggatataggatctcctatagcaaaacattttactttcatttttcagtatttgctgctttctagaattctattagataagctatgtcatttttctgaaaaagaaactgagttattgagtgtattaagacaaggcactgagaactacagtgtcaaaatcaaagggcataaatgggcatggcagtgctggtggaaaaatctgtggtactggtgatctggttagggcctgttgcacaggctgggagtaactggtttgctgtttcaagcctccaagagtaccttaaacaaggtgatagctcctctcttctttagcattatattcctttagtcaacaaagaactttctccactctgctgcccagctctgagagtatctgagatgagaataggatgtgtgtggaggggcttttagggaagaaagggtcataaatgaatagaagtacagtctgaaacatgaattaaatatccttcctcaagttataaaggatactttaatagaacacagtctccagaattcgctgctatcacaccaagtcatgctgttgccctgtgacctcacacttcccattccatggccttgtcttggcagggagtaaaaaatcccacttctttttactttagtgggtctcaactgcagcatttcagaaacaaattttgatttgacactcaggagaataaaaacaagttgagggcagaatgtatttggaaaagcttaagacaaatttactgatattattttatgatcatttaggattacagatcaatttacctccataaatctttgaattgtcactgtgaccacaggatgaaaatcctttattagccattttataggttaaaacaaaaaattgactacacagccgacttccctcagataactatgaagtctattatgagtactgaatgaccaaagaacatggaaaaaatgcatatgaataaatactgaaatgtttatgaaagatatttatgaaagatattaagacttctgtgtttaggtatgcacatatgataaaataaatctaaaaacattaaa

SEQ ID NO: 198209 - DNA, 2253 bp, Homo sapiens
  Payload ID: 19102
  Gene Name: unc-80 homolog (C. elegans)
  ENST ID: ENST00000333907
  CDS Start-End: 1-1641
attcccagagaggaactggatgaacgaattgctcgggaagagttcagaagaccccgggagtccttactgaatatttgcactgagttctataagcactgtgggccacggctgaagatcttgcaaaatctggctggggagcctcgggtcattgccttggaactgctggatgtgaagtctcacatgaggttggcagaaattgcacactcccttctgaagctggcaccatatgacactcagacaatggagagtcgtgggcttcggcgctacatcatggagatgctacccattactgactggacagctgaggcagtgaggccggccctcatcctcattttaaaaagattggatagaatgttcaacaaaattcataagatgcctactttgaggcgacaggttgagtgggagcctgccagcaatttgattgaaggggtttgtttgacacttcagaggcagccaatcatatccttcctgcctcaccttaggtcactgatcaatgtctgtgtcaatctggtgatgggagtggtaggaccttccagtgttgctgatggattaccccttcttcatctcagcccttatctctcaccacctctgcccttcagcacagctgttgtccggcttgtagcattgcagatacaggctttaaaagaagattttcctttaagccatgtgatctccccattcaccaatcaagagcgaagggaggggatgcttttaaatctgctcatcccatttgtgctcacagtaggatctggaagcaaagatagcccatggctggagcagcctgaggtgcagctgctgctgcagacagtcatcaatgtactcctcccaccgcggatcatcagcacatccaggagcaagaacttcatgttagagagctccccagcccactgctccacccctggggatgcggggaaagacttgcgcagggaagggctggctgagtccaccagccaagcagcatacttggcgctgaaggtgattctcgtctgctttgagaggcagctcggaagccagtggtactggctgagcctccaggtgaaggagatggctctgcggaaggtgggaggcctggccctttgggatttcctcgacttcatcgtgcggacccgaatacccatctttgtgcttttgcgccctttcatccagtgcaagctgctggcccaaccagcagagaatcatgaagagctttccgcccggcaacatattgccgaccagctggagcggcgcttcataccacgccctttgtgtaagagctcgctcattgctgagttcaacagtgaactaaaaattctaaaagaggcagttcatagtggatcagcctaccaaggcaagacatccatcagtaccgtgggcacctccacctctgcttaccgcctgagcttggccaccatgtcccgctctaacacgggcacgggcactgtctgggagcaggacagtgagccatcccagcaggcttcgcaggacaccctgagtcggactgatgaggaagatgaggaaaatgactctataagcatgcccagcgtggtaagtgaacaagaagcttacctcctgagtgccattggaaggaggcgattctccagccatgtctccagcatgtctgtacctcaggctgaggtgggcatgctacccagccagaggtaaacagctatggttatactgtactctgcatttgggggcaaagttagaaattctgaaaatacactcctgttattctacaaagacagaaagagaagcaagcaatggtaatgtttttagatagatcattccacaaaggatttgtcaactaggttcctgcaggcaacactttgcagttttctaagccaagctagtagaagggatcccaatttccaagtattgtctctccttaaaaattttccatagacacatggtcttctttctgttgtcaaatggcattcttgtatttcagatttatcattagctaagctaatgatgggtacttggcaagagtttggaccatctttatgtttttggtaaagtttaggcttctgatatattattagtattcagttgtaggtagtgacacttaaccaagcagaaaaggatctatgccactgagtgtgaccttgggcaggtcatttaaccgtaatccacagttctccctctgtaaaatgaagaggtttgctaaaatgatctttaagataacttctcatctatagttctatgattccatgacaaaacccctttaaatattttgtgtgttctctgtctcttaagaatataagtaaaaaaaaa

SEQ ID NO: 198210 - DNA, 13562 bp, Homo sapiens
  Payload ID: 19102
  Gene Name: unc-80 homolog (C. elegans)
  Uniprot ID: Q8N2C7
  ENST ID: ENST00000439458
  CDS Start-End: 81-9857
agcagcgggaggaggcggcggcggcggctagcgaggagacagagctgggtcctgcagtaggactcccgggagccaccattatggtgaagaggaagagctccgagggccaggagcaggacggcggccgcggcatccccctgcccatccagaccttcctgtggcggcaaaccagtgcatttttgaggcccaaactggggaagcaatatgaagcttcttgtgtgtcctttgagcgagtgttggtagaaaacaagctgcatggcctctctccagctctctctgaagccatccagagcatttccagatgggaactggtgcaagctgctttgcctcatgtcctccactgcactgcaaccctgctttcaaaccgaaacaagctaggccaccaggataaattgggtgttgctgagacaaagctccttcacactctacactggatgcttctggaggccccccaggactgcaacaatgagcggtttgggggtacagaccgaggctccagctggggtggaagcagcagtgctttcatccaccaggttgaaaaccagggttctccagggcagccttgccaaagcagctctaatgacgaagaagagaacaaccgaagaaagatcttccagaactccatggctactgtggagctcttcgtgtttctgtttgctcccctggtacacaggatcaaggaatctgacctcaccttccgtctggccagtgggcttgttatatggcagcccatgtgggaacacagacagcccggagtctctggctttaccgcactggtgaagcccatcaggaacatcattacagctaagagaagttctcctatcaacagtcaaagccggacctgtgaatcaccaaatcaagatgcaagacacttagagggactccaggtggtttgtgaaacattccagtctgattccatctcacccaaggccaccatttcaggctgtcaccgaggaaactcctttgatggaagtctgtcctcccaaacttcccaggaaagaggcccatcacattccagggcctctcttgtgatacctccgtgccaaaggtcccgctatgccacctactttgacgttgctgttctgcgctgcctacttcagccccattggtctgaggaaggcactcagtggtctctgatgtactatctacaaaggctgcgacacatgttggaagagaagccagaaaagcctccggagccagatattcctctcctgcccagacccaggagtagctccatggtggcagcagctccctcactagtgaacacccacaaaacccaagatctcaccatgaagtgtaacgaggaggaaaaatctcttagctctgaggccttttccaaggtttcactgaccaatctgcgtagatctgcagtcccagatctttcttcagacctgggcatgaatatttttaaaaagttcaagagccgcaaagaagaccgagagaggaaaggctccattccattccaccacacaggcaagaggaggccacggagaatgggagtgcccttcctgcttcacgaggaccacctggatgtgtcccccacgcgcagcacattctcctttggaagtttctctgggctgggagaagacaggcgaggaattgagaaaggaggctggcaaaccaccattttagggaaattgacccggcgaggcagttcagatgcagccactgagatggagagtctgagcgccaggcattcccactcccatcacaccctggtaagcgacctgccggacccctccaacagccatggagaaaacaccgtcaaggaagtgcgatctcagatctccaccatcacagttgcgaccttcaataccactttggcgtcattcaacgtaggctatgcagactttttcaatgagcatatgaggaaactctgcaaccaggtgcctatcccggagatgccacatgaacctctggcatgtgctaacctacctcgaagcctcacagactcctgcataaactacagctacctagaggacacagaacatattgacgggaccaataactttgtccacaagaatggaatgcttgatctttctgtagttctgaaggctgtttatcttgtccttaatcatgacatcagctctcgtatctgtgacgtggcgctaaacattgtggaatgcttgcttcaacttggtgtggtgccctgtgtagaaaagaatagaaagaagagtgaaaacaaggaaaatgagaccttggaaaagaggccaagtgagggagctttccaattcaaaggagtatctggaagttccacctgtggattcggaggccctgctgttagtggagctggagatggtggaggagaagaaggaggaggtggagatggaggaggtggaggaggtgatggaggaggaggtggaggaggtggaggcggcccttatgagaagaatgataagaaccaagagaaggatgaaagtacacctgtaagcaaccataggcttgctctaacaatgctcatcaaaatagtgaagtctttgggatgtgcctatggttgtggtgaaggacaccgagggctctctggagatcgtctgagacaccaggtattccgagagaatgcccagaactgcctcactaagctatacaagctagataagatgcagttccgacaaaccatgagggactatgtgaacaaggactctctcaataatgtagtggacttcttgcatgctttgctaggattttgtatggagccggtcactgacaacaaggctgggtttggaaataacttcaccacagtggacaacaaatccacagcccaaaatgtggaaggcattatcgtcagcgccatgtttaaatccctcatcacacgctgcgcttcaaccacacatgaattgcacagccctgagaatctgggactgtattgtgacattcgtcagctggtccagtttatcaaagaggctcatgggaatgtcttcaggagagtggccctcagcgctctgcttgacagtgccgagaagttagcaccagggaaaaaggtggaggagaatgaacaggaatctaagcctgcaggcagtaaaaggtcagaggcgggaagcattgtggataaaggccaggtatcctctgcacctgaggaatgtcgcagcttcatgtctggtcgcccctcacagactccagagcacgatgaacaaatgcaaggagccaacttggggcggaaagatttctggcgtaagatgttcaagtcccagagtgcagcaagtgacaccagcagccagtctgaacaggacacttcagaatgcacgactgcccactcagggaccacctctgaccgacgtgcccgctcacgatcccgcagaatttccctccgaaagaagcttaaactccccataggtaaaaggaactggctgaagagatcatccctctcaggcctggcagatggtgtggaggacctcctggacattagctctgtggaccgactctctttcatcaggcaaagctccaaggtcaaattcactagtgctgtgaagctttctgaaggtgggccaggaagtggcatggaaaatggaagagatgaagaggagaatttcttcaagcgtcttggttgccacagttttgatgatcatctctctcccaaccaagatggtggaaaaagcaaaaacgtggtgaatcttggagcaatccgacaaggcatgaaacgcttccaatttctgttaaactgctgtgagccagggacaattcctgatgcctccatcctagcagctgccttggatctagaagcccctgtggtggccagagcagccttgttcctggaatgtgctcgttttgttcaccgctgcaaccgtggcaactggccagagtggatgaaagggcaccacgtgaacatcaccaagaaaggactttcccggggacgctctcccattgtgggcaacaagcgaaaccagaagctgcagtggaatgcagccaagctcttctaccaatggggagacgcaattggcgtccgattgaatgagctgtgccacggggaaagtgagagcccagccaacctgctgggtctcatttacgatgaagagaccaagaggagacttagaaaggaggatgaggaggaagactttttagatgacagtactgtgaacccctctaaatgcggttgcccctttgccttgaagatggcagcatgtcagcttcttctggagattaccaccttcctgcgagagaccttttcttgcctgcccagacctcgcactgagcctctggtggacttggagagctgcagacttcgtttggatcccgagttggaccggcacagatatgagaggaagatcagctttgctggggtcctggacgaaaatgaagactcaaaagattctctccacagcagcagccacactctcaaatcagatgcaggagtcgaggagaagaaagaagggagtccttggagtgcaagcgagcccagcattgagccagagggaatgagtaatgccggcgcggaggagaattaccacagaaacatgtcgtggcttcatgtgatgatcttgctgtgcaatcagcagagtttcatctgcactcacgttgactactgccatccccactgctacctgcaccacagccgctcctgtgcccgactggtcagagccatcaagctactctatggagacagtgtggactccctgagggaaagcagcaacatcagcagtgtggctctccggggcaagaaacagaaagaatgctcagataagtcatgcctgaggacaccttctctaaagaagagagtttcagatgccaatctggaaggaaaaaaagattccggaatgctgaagtacatcagacttcaggtgatgagcttgtcgcctgctcccttatctctgttaatcaaggcagcaccaattctgacagaggagatgtacggagacatccagccagctgcctgggagctcctgctcagcatggatgagcacatggcaggggcagcagctgccatgttcctgctgtgtgcagtgaaggtgcctgaggccgtgtccgacatgctgatgtcagagttccaccacccggagactgtgcagaggctgaacgctgtcctcaagttccacacgctctggaggtttcgctatcaggtctggccccggatggaggaaggggcacagcagatttttaagattccgcctcccagtatcaatttcacccttccctcgccggtgcttggaatgccatccgtcccaatgtttgacccaccgtgggttcctcagtgcagcgggagtgtccaggaccccattaatgaagaccagtctaaatccttttcagcccgggctgtgtcccgctcccatcaaagggcagaacacatcttaaagaacttgcagcaggaggaagaaaagaaacgacttggtagagaagccagcctcatcactgccatccccatcacccaggaggcttgctatgagcccacatgcacgcccaactcagaaccggaagaagaagtagaagaagtcaccaatctggcatcccgtcgactgtctgtgagtccatcctgcacctccagcacttcccacaggaattattccttccgccgcgggtcagtctggtcagtgcgttcagccgtcagtgctgaagatgaggaacataccactgaacacacgccgaaccaccatgtgcctcagcccccacaagcagtgttcccagcatgcatctgtgcagcagtacttcccattgttcatctgatggaggatggtgaggtgcgggaagatggagtagcagtgagtgctgtggctcaacaagtcttatggaactgtctaattgaagatccatcaacggttcttcgacattttctggaaaaactgaccatcagcaatagacaagatgagttaatgtacatgctgcgcaaacttctcttgaatattggagactttcctgctcagacatctcacatcctattcaactatttggtaggattaatcatgtactttgtgcggaccccctgcgagtgggggatggatgccatttcagccaccctgacattcctgtgggaggtggtgggttacgtggagggcctcttcttcaaggatctcaagcagacgatgaagaaggagcagtgtgaggtgaagctcctggtgaccgcttcaatgccaggtactaaaaccttggtagttcatggacagaatgagtgcgatatcccaacccagttaccagtccatgaagacactcaatttgaagccctgttgaaggagtgtctggagttttttaatatcccagaatcccagtcaacacattattttcttatggataaacgatggaaccttatccactacaataagacctatgttcgagatatttatcctttccggaggtcagtatctccccagctgaatcttgtacatatgcatccagagaagggacaggagctcattcagaaacaggtgttcacccgaaagctggaagaagtagggcgggtgttgtttctcatctccctaacccagaagatccccacagcccacaaacagtcccacgtctccatgcttcaggaagacctcctccgcctgccctcattccctcgtagtgctattgatgctgagttttcactcttcagtgatcctcaagctggaaaggaactgtttggcctcgacactcttcagaaaagcttgtggatccagctgctggaggaaatgttcctgggcatgccgagcgagtttccatggggagacgaaatcatgcttttcctcaacgtttttaacggggctctgatcctccacccggaagacagtgccctgctcaggcagtatgctgccaccgtcatcaacaccgcggtgcacttcaaccacctcttctctctcagcggctaccagtggattctccccaccatgctgcaggtgtactccgactatgaaagcaatccccagctgcgtcaagccatcgaatttgcctgtcaccagttctatattctacaccggaagccctttgtgctccagctgtttgctagtgtggcccctctcctggaatttcctgatgctgccaataatgggcccagcaaaggtgtgtcagctcagtgcctgtttgacttgctgcagtccctagagggagagaccaccgacatattagacatcttagagctggtcaaagctgagaagcctctcaagtcattagatttctgctatggaaacgaagatctgacattttctatcagtgaagccattaagctctgtgtcactgtggtggcgtatgctcccgaatcattcagaagtcttcagatgctgatggtcttagaagccttagttccatgttacctacaaaagctaaagaggcagacatcacaggtggagacagtacctgctgcccgagaggagattgcggccactgctgctcttgcgacgtccctacaggcccttttgtacagtgtagaggtcctcaccaggcccatgacagccccacagatgagcaggtgtgaccaaggtcataagggaaccaccacagccaatcacaccatgtcgtctggggtgaacaccaggtaccaggaacaaggagccaaactgcactttatcagggaaaaccttcatttactggaggaagggcaaggcattcccagagaggaactggatgaacgaattgctcgggaagagttcagaagaccccgggagtccttactgaatatttgcactgagttctataagcactgtgggccacggctgaagatcttgcaaaatctggctggggagcctcgggtcattgccttggaactgctggatgtgaagtctcacatgaggttggcagaaattgcacactcccttctgaagctggcaccatatgacactcagacaatggagagtcgtgggcttcggcgctacatcatggagatgctacccattactgactggacagctgaggcagtgaggccggccctcatcctcattttaaaaagattggatagaatgttcaacaaaattcataagatgcctactttgaggcgacaggttgagtgggagcctgccagcaatttgattgaaggggtttgtttgacacttcagaggcagccaatcatatccttcctgcctcaccttaggtcactgatcaatgtctgtgtcaatctggtgatgggagtggtaggaccttccagtgttgctgatggattaccccttcttcatctcagcccttatctctcaccacctctgcccttcagcacagctgttgtccggcttgtagcattgcagatacaggctttaaaagaagattttcctttaagccatgtgatctccccattcaccaatcaagagcgaagggaggggatgcttttaaatctgctcatcccatttgtgctcacagtaggatctggaagcaaagatagcccatggctggagcagcctgaggtgcagctgctgctgcagacagtcatcaatgtactcctcccaccgcggatcatcagcacatccaggagcaagaacttcatgttagagagctccccagcccactgctccacccctggggatgcggggaaagacttgcgcagggaagggctggctgagtccaccagccaagcagcatacttggcgctgaaggtgattctcgtctgctttgagaggcagctcggaagccagtggtactggctgagcctccaggtgaaggagatggctctgcggaaggtgggaggcctggccctttgggatttcctcgacttcatcgtgcggacccgaatacccatctttgtgcttttgcgccctttcatccagtgcaagctgctggcccaaccagcagagaatcatgaagagctttccgcccggcaacatattgccgaccagctggagcggcgcttcataccacgccctttgtgtaagagctcgctcattgctgagttcaacagtgaactaaaaattctaaaagaggcagttcatagtggatcagcctaccaaggcaagacatccatcagtaccgtgggcacctccacctctgcttaccgcctgagcttggccaccatgtcccgctctaacacgggcacgggcactgtctgggagcaggacagtgagccatcccagcaggcttcgcaggacaccctgagtcggactgatgaggaagatgaggaaaatgactctataagcatgcccagcgtggtaagtgaacaagaagcttacctcctgagtgccattggaaggaggcgattctccagccatgtctccagcatgtctgtacctcaggctgaggtgggcatgctacccagccagagtgaacctaatgtcctcgatgactcccagggcctggccgccgagggcagcctctctagggtggcaagtatacagagtgaacctggtcaacagaacctccttgttcagcagccgctggggaggaagaggggcctgaggcagctaagacgtcctctactatcacgtcagaaaactcagactgaacccagaaatcgccaaggggctcggctgtcaaccactcgcaggagcattcaacctaaaacgaagccgtctgcggatcagaaacgatctgtgaccttcattgaggctcagccagagccagcagctgccccaacagatgcgcttcctgcaacaggccaactacagggctgtagcccagccccttctaggaaaccagaagcaatggacgaaccagtcctcacatcttctcccgccatagttgttgcggatctccacagcgtgtctcccaagcagagtgagaacttccccactgaagaaggagaaaaggaggaggacacagaagcacaaggtgctactgcacacagtccactctctgcccaactctctgaccctgatgacttcacaggcctcgagacatccagcctcctacagcatggagacactgtccttcatatcagtgaggaaaatggcatggagaacccgctactatctagtcagttcacctttactcccactgagctggggaaaacggatgcagtattagatgagtctcatgtttaattctgtatcttgtaagctctgcaggtatagagaagacatgaaagtgatctctctactacaagttcaatacttttgcttgaaaaagattaattacaaaatagcactttacttctaatgggtggcacaaatctgaataggttttgctgccaatacacatgatgtttcataaacatcttaaaagtcaatggctaaaaggatttagttgtgtgaaaatcacaaaaccagggaggaataaggggaaagagccatttcactgcacattgtttatgattcaagaagccttcagcagttaaaaatatatactattcattgctgctttcatagaaatattaacaaatgatatgatctaaaaatagaatgcaattttttgagattactcacattatacatctcatgcaaatatttatttttatagtttaaaaaatatcaattcaggttggctatacaagtagcaatttacataaaaaaataattaataggaaaaatattactttggggagactaaataacaagcctgcagccatttttgttttgagtaacaatacagccatttagaagaagaaaaaaatactatatagagagctgtggacttttagatatttatttttcaactatcattttcattgcatgttgtaaatcaaaatgcagatggcataagatcatcccatttcataatctatcacattagaatattacagaatattctagaaatcatcagaaataattctgaattaagaacctaaacagcctatacaattataaaaactaaatgtatatataatcacttaaaagagatggtattcctattcctagccctgactacatcaataccaagattagaagctattggaaaatgtgattagtaatacttttccttatagtatcctgtgcctgccctggagggcatattttcagatattaaggttagtgttgttagaatcggtttaataaaataacattttcctaatagaaacaatattcttatgatacttggaacatctaagtttataaggaaaaatgtataaagtaagcaatttcttcatagacacctccagtttatatattttgcaaataggcctttaacttgaagttcaattacttcaagaaaagtgtaacacttagaaggcttgtgaggccaacacctagtgtgttactgatcctatggtagggctgtgcatcacgtggttcacaattgaatttcaaaattttaacagtttacattagaaaactgttacctaacaaccaagcatatacaaactcatatacatacttaaattggtacggtggtgtatgtgtgcgtgcgtgtgtgtgtgtatgtgttgtagtcctcaagatgaagttaaatatagactttaattaccctgcaatgaatttaaaacacattctgtatgcttaaactttgagtgcgttggctgtgaaatgtatacatatataaagaggatacctactaaacccaccttaatcataaaggaaaattattttttgttagaattgcttattaaataggcatactttatactgtggtttataatttcaaatataacttggggttatggtcctattcactaagagaatgaaagatatccatgagttaaaagaacaaaactaaaaatttcagatctaacaattgaaagaaaattgaggcagtaaatgacctcttttactcttttatgttttacaatattatcatgttatttacagttaatgctgaaataattctcaagtgcaggaatataaatgttaagtggttttatgattccaagctgatatatttcacctgttaaaaattatgctgctaaattagcattagaggccttatgtttggtaattacaagtgtctgggctattggcgcgtctctatatatgtgtgtgctttgttccagtttcttcaaattatctatgtataattgtatgaaatatttaaatagcaaagaagtcaaagaagattgttaaatattcaacaagaatcataaatacctttatatgtattttaaaagtattgggctgttctgaacatgattatgctggtctgtctgtcttttagcctgactccttcactcttgtgtgtgaagtctattagcaactttcaataagctaagcaatgttgtaacttgcaaaaaagcctccactctgagaaacagggccttatagagtaggaatgttttcatactgggactactgaaattttgcagatgtgtgcatctgttccatttaaggtgcccttaaatgtgttgaatgtaatgtgttgaatgtttatgtgtaatggctaaagtatctatatgtatgtgcataaaactgtcacaagatgtattctcaggaatactgttacctggagtttgaaaggaataactattaaaaaaaaaagttggggaagattagaaaaaagctcaagataaatgttcaaaatattattaagtacatgactaaaagctaattactacatatgataaatgcagtgttggtaatagtagatcatttcttaagccatgatacttaatgatatttatcttattcagaggaaaaacaaaaaaggtacccacttcccatgtagaaaaaattagactcagcaaagaggttgcttcttctgaaattagcttttgagagaccttggaataaaccatgtgttatccatgatagtatgactcagatccaattaaaacagtttaaattctggatataggatctcctatagcaaaacattttactttcatttttcagtatttgctgctttctagaattctattagataagctatgtcatttttctgaaaaagaaactgagttattgagtgtattaagacaaggcactgagaactacagtgtcaaaatcaaagggcataaatgggcatggcagtgctggtggaaaaatctgtggtactggtgatctggttagggcctgttgcacaggctgggagtaactggtttgctgtttcaagcctccaagagtaccttaaacaaggtgatagctcctctcttctttagcattatattcctttagtcaacaaagaactttctccactctgctgcccagctctgagagtatctgagatgagaataggatgtgtgtggaggggcttttagggaagaaagggtcataaatgaatagaagtacagtctgaaacatgaattaaatatccttcctcaagttataaaggatactttaatagaacacagtctccagaattcgctgctatcacaccaagtcatgctgttgccctgtgacctcacacttcccattccatggccttgtcttggcagggagtaaaaaatcccacttctttttactttagtgggtctcaactgcagcatttcagaaacaaattttgatttgacactcaggagaataaaaacaagttgagggcagaatgtatttggaaaagcttaagacaaatttactgatattattttatgatcatttaggattacagatcaatttacctccataaatctttgaattgtcactgtgaccacaggatgaaaatcctttattagccattttataggttaaaacaaaaaattgactacacagccgacttccctcagataactatgaagtctattatgagtactgaatgaccaaagaacatggaaaaaatgcatatgaataaatactgaaatgtttatgaaagatatttatgaaagatattaagacttctgtgtttaggtatgcacatatgataaaataaatctaaaaacattaaagatg

SEQ ID NO: 198211 - DNA, 2116 bp, Homo sapiens
  Payload ID: 19103
  Gene Name: unc-93 homolog A (C. elegans)
  Uniprot ID: Q86WB7
  ENST ID: ENST00000230256
  CDS Start-End: 176-1549
attaacgagtgacagtcttaatgactaacacacctctaacatttcacctctagctcagatgagagagagaatgggacttcttggtactgattgtttttcccatgcctcaattggtttcttttagggagctacaaatttacgtgttcactggtgattgatcttttcatccagcacaatggacagaagtctaaggaacgtccttgtggtttcctttgggttcctgcttctctttacagcctatggaggtctgcagagcctgcagagcagcctgtacagcgaggagggcctgggtgtcacagcgctcagcaccctctatggaggcatgctcctgtcctccatgttcctcccaccgctcctcatcgagaggctgggctgcaaggggaccatcatcctctccatgtgtggctacgtggccttctccgtgggcaacttcttcgccagctggtacactttgatccccacctccatactgctgggactcggggccgccccgctgtggtctgcacagtgcacatacctcacgatcacgggaaacacacatgcagagaaggcgggaaagcgtggcaaagacatggtgaaccagtattttggcatcttcttcctcatattccagtcatccggtgtgtggggcaacttgatctcatcgctggtatttggccagactcccagccaagagacccttccagaagagcagctcacgtcctgtggggccagtgactgcctgatggccaccacaaccaccaacagcacccagaggccctcccagcagctggtctacaccctcctgggcatctacactgggagtggtgtcctggctgtcctgatgatagctgcgttcctccaacccatacgagatgttcagcgggaaagtgaaggagagaagaaatcagtacctttctggtccactttactgtcgactttcaagctatatagagataaacgtctgtgcctcttaattctgctgccgctgtacagtggattgcagcaaggattcctctccagcgaatacacaaggtcctatgtcacctgcaccctgggcatccagttcgtcggctacgtgatgatctgcttctcggccactgacgcgctgtgctccgtgttgtatggaaaggtctcgcagtacacgggcagggctgtgctgtacgtgctgggcgcggtgacccacgtgtcctgcatgattgccctactgctgtggagacctcgtgctgaccatctggcagtgttcttcgtattctctggcctgtggggcgtggcagatgccgtctggcagacacaaaacaatgctctctacggcgttctgtttgagaagagcaaggaagctgccttcgccaattaccgcctgtgggaggccctgggcttcgtcattgccttcgggtacagcatgtttttgtgcgtgcacgtcaagctctacattctgctgggggtcctgagcctgaccatggtggcgtatgggcttgtggagtgcgtggagtccaagaacccgatcagaccccacgctccaggacaggtcaaccaggcagaggatgaagaaatacaaacaaaaatgtgagagcagtgaggtccgaggaggatgaactcagaaagcaccagccagagaattttcttagaagatgcctcaggacatagagcggctcctcatcaccatctcagcacaatttggccattctgaagagatcatgttatttcactcttcatgtattttttttctattctaacaaatttttcgtccaccatcttaacagagatcaagtgtatacatgaaggtatcagttcatttaattttagatgcaaaagaaaaaggtctaacgtacaatcagccaattagaatttgcctgaaatcatagactcaccctagttttattgctgtagttgtttttaagaattggaagcctgcttaaaaaatgtagttgagccccataattttacaaatgggcgaacttttaaacttctaactctacttggatcaaaacctcatacattttacaaaggggtcctgacaagtcagctgactcaacctcacagagtcagggggtgacaaagccagactggggctcaggattcctgaaacgtgtggggtctgcgtttctaaataaagacggttatttaatggacttac

SEQ ID NO: 198212 - DNA, 1810 bp, Homo sapiens
  Payload ID: 19103
  Gene Name: unc-93 homolog A (C. elegans)
  Uniprot ID: Q86WB7
  ENST ID: ENST00000366829
  CDS Start-End: 27-1274
ggtgattgatcttttcatccagcacaatggacagaagtctaaggaacgtccttgtggtttcctttgggttcctgcttctctttacagcctatggaggtctgcagagcctgcagagcagcctgtacagcgaggagggcctgggtgtcacagcgctcagcaccctctatggaggcatgctcctgtcctccatgttcctcccaccgctcctcatcgagaggctgggctgcaaggggaccatcatcctctccatgtgtggctacgtggccttctccgtgggcaacttcttcgccagctggtacactttgatccccacctccatactgctgggactcggggccgccccgctgtggtctgcacagtgcacatacctcacgatcacgggaaacacacatgcagagaaggcgggaaagcgtggcaaagacatggtgaaccagtattttggcatcttcttcctcatattccagtcatccggtgtgtggggcaacttgatctcatcgctggtatttggccagactcccagccaagggagtggtgtcctggctgtcctgatgatagctgcgttcctccaacccatacgagatgttcagcgggaaagtgaaggagagaagaaatcagtacctttctggtccactttactgtcgactttcaagctatatagagataaacgtctgtgcctcttaattctgctgccgctgtacagtggattgcagcaaggattcctctccagcgaatacacaaggtcctatgtcacctgcaccctgggcatccagttcgtcggctacgtgatgatctgcttctcggccactgacgcgctgtgctccgtgttgtatggaaaggtctcgcagtacacgggcagggctgtgctgtacgtgctgggcgcggtgacccacgtgtcctgcatgattgccctactgctgtggagacctcgtgctgaccatctggcagtgttcttcgtattctctggcctgtggggcgtggcagatgccgtctggcagacacaaaacaatgctctctacggcgttctgtttgagaagagcaaggaagctgccttcgccaattaccgcctgtgggaggccctgggcttcgtcattgccttcgggtacagcatgtttttgtgcgtgcacgtcaagctctacattctgctgggggtcctgagcctgaccatggtggcgtatgggcttgtggagtgcgtggagtccaagaacccgatcagaccccacgctccaggacaggtcaaccaggcagaggatgaagaaatacaaacaaaaatgtgagagcagtgaggtccgaggaggatgaactcagaaagcaccagccagagaattttcttagaagatgcctcaggacatagagcggctcctcatcaccatctcagcacaatttggccattctgaagagatcatgttatttcactcttcatgtattttttttctattctaacaaatttttcgtccaccatcttaacagagatcaagtgtatacatgaaggtatcagttcatttaattttagatgcaaaagaaaaaggtctaacgtacaatcagccaattagaatttgcctgaaatcatagactcaccctagttttattgctgtagttgtttttaagaattggaagcctgcttaaaaaatgtagttgagccccataattttacaaatgggcgaacttttaaacttctaactctacttggatcaaaacctcatacattttacaaaggggtcctgacaagtcagctgactcaacctcacagagtcagggggtgacaaagccagactggggctcaggattcctgaaacgtgtggggtctgcgttt

SEQ ID NO: 198213 - DNA, 775 bp, Homo sapiens
  Payload ID: 19103
  Gene Name: unc-93 homolog A (C. elegans)
  ENST ID: ENST00000503433
  CDS Start-End: 342-775
gagggccagagttaagacagagcttaagacagagaacctcaacaggaggcctgaaggaaagcacctgggagtcattaggcagcaagggagggaattgcaattctgggcggggctcagctgtgcagagtttagcaaggtctccaggtgcttctgctgagggccagagttaagaaagagcgagaacctcatcaggaggactgaaggaaaggagccaggctgcagccctctgcctgcccttccgtgccatcatctccaggattaatgaaagggccattcaggaaacagcacagggagctacaaatttacgtgttcactggtgattgatcttttcatccagcacaatggacagaagtctaaggaacgtccttgtggtttcctttgggttcctgcttctctttacagcctatggaggtctgcagagcctgcagagcagcctgtacagcgaggagggcctgggtgtcacagcgctcagcaccctctatggaggcatgctcctgtcctccatgttcctcccaccgctcctcatcgagaggctgggctgcaaggggaccatcatcctctccatgtgtggctacgtggccttctccgtgggcaacttcttcgccagctggtacactttgatccccacctccatactgctgggactcggggccgccccgctgtggtctgcacagtgcacatacctcacgatcacgggaaacacacatgcagagaaggcgggaaagcgtggcaaagacatggtgaaccagtattttggcatcttcttcctcatatt

SEQ ID NO: 198214 - DNA, 2316 bp, Homo sapiens
  Payload ID: 19104
  Gene Name: unc-93 homolog B1 (C. elegans)
  Uniprot ID: Q9H1C4
  ENST ID: ENST00000227471
  CDS Start-End: 81-1874
gtcccggccgccgggaggaagtggccgggcggtcgcagggactccggggcgaccgccgcgagtccgcagtagttcgggccatggaggcggagccgccgctctacccgatggcgggggctgcggggccgcagggcgacgaggacctgctcggggtcccggacgggcccgaggccccgctggacgagctggtgggcgcgtaccccaactacaacgaggaggaggaggagcgccgctactaccgccgcaagcgcctgggcgtgctcaagaacgtgctggctgccagcgccgggggcatgctcacctacggcgtctacctgggcctcctgcagatgcagctgatcctgcactacgacgagacctaccgcgaggtgaagtatggcaacatggggctgcccgacatcgacagcaaaatgctgatgggcatcaacgtgactcccatcgccgccctgctctacacacctgtgctcatcaggttttttggaacgaagtggatgatgttcctcgctgtgggcatctacgccctctttgtctccaccaactactgggagcgctactacacgcttgtgccctcggctgtggccctgggcatggccatcgtgcctctttgggcttccatgggcaactacatcaccaggatggcgcagaagtaccatgagtactcccactacaaggagcaggatgggcaggggatgaagcagcggcctccgcggggctcccacgcgccctatctcctggtcttccaagccatcttctacagcttcttccatctgagcttcgcctgcgcccagctgcccatgatttatttcctgaaccactacctgtatgacctgaaccacacgctgtacaatgtgcagagctgcggcaccaacagccacgggatcctcagcggcttcaacaagacggttctgcggacgctcccgcggagcggaaacctcattgtggtggagagcgtgctcatggcagtggccttcctggccatgctgctggtgctgggtttgtgcggagccgcttaccggcccacggaggagatcgatctgcgcagcgtgggctggggcaacatcttccagctgcccttcaagcacgtgcgtgactaccgcctgcgccacctcgtgcctttctttatctacagcggcttcgaggtgctctttgcctgcactggtatcgccttgggctatggcgtgtgctcggtggggctggagcggctggcttacctcctcgtggcttacagcctgggcgcctcagccgcctcactcctgggcctgctgggcctgtggctgccacgcccggtgcccctggtggccggagcaggggtgcacctgctgctcaccttcatcctctttttctgggcccctgtgcctcgggtcctgcaacacagctggatcctctatgtggcagctgccctttggggtgtgggcagtgccctgaacaagactggactcagcacactcctgggaatcttgtacgaagacaaggagagacaggacttcatcttcaccatctaccactggtggcaggctgtggccatcttcaccgtgtacctgggctcgagcctgcacatgaaggctaagctggcggtgctgctggtgacgctggtggcggccgcggtctcctacctgcggatggagcagaagctgcgccggggcgtggccccgcgccagccccgcatcccgcggccccagcacaaggtgcgcggttaccgctacttggaggaggacaactcggacgagagcgacgcggagggcgagcatggggacggcgcggaggaggaggcgccgcccgcagggcccaggcctggccccgagcccgctggactcggccgccggccctgcccgtacgaacaggcgcaggggggagacgggccggaggagcagtgaggggccgcctggtccccggactcagcctccctcctcgccggcctcagtttaccacgtctgaggtcggggggaccccctccgagtcccgcgctgtcttcaaaggcccctgtctcccctcccccacgttggggacgcccctcccagagcccaggtcacctccgggcttccgcagccccctccaaggcggagtggagccttgggaacccctcggccaagcacaggggttcgaaaatacagctgaaaccccgcgggcccttagcacgcgccccagcgccggagcacggtcagggtcttcttgcgacccggcccgctccagatccccacagctctcggccgcggacccgggccgcgtgtgagcgcactttgcacctcctatccccagggtccgccgagagccacgattttttacagaaaatgagcaataaagagattttgtactgtc

SEQ ID NO: 198215 - DNA, 836 bp, Homo sapiens
  Payload ID: 19104
  Gene Name: unc-93 homolog B1 (C. elegans)
  ENST ID: ENST00000524455
  CDS Start-End: 4-648
gccatggaggcggagccgccgctctacccgatggcgggggctgcggggccgcagggcgacgaggacctgctcggggtcccggacgggcccgaggccccgctggacgagctggtgggcgcgtaccccaactacaacgaggaggaggaggagcgccgctactaccgccgcaagcgcctgggcgtgctcaagaacgtgctggctgccagcgccgggggcatgctcacctacggcgtctacctgggcctcctgcagatgcagctgatcctgcactacgacgagacctaccgcgaggtgaagtatggcaacatggggctgcccgacatcgacagcaaaatgctgatgggcatcaacgtgactcccatcgccgccctgctctacacacctgtgctcatcaggttttttggaacgaagtggatgatgttcctcgctgtgggcatctacgccctctttgtctccaccaactactgggagcgctactacacgcttgtgccctcggctgtggccctgggcatggccatcgtgcctctttgggcttccatgggcaactacatcaccagctctgggtgcaggacacacaggagtggcacaggtcgggctggggagagccttctctcctttgtggtccaggatggcgcagaagtaccatgagtactcccactacaaggagcaggatgggcaggggatgaagcagcggcctccgcggggctcccacgcgccctatctcctggtcttccaagccatcttctacagcttcttccatctgagcttcgcctgcgcccagctgcccatgatttatttcctgaaccactacctgtatgacctgaaccacacgctgt

SEQ ID NO: 198216 - DNA, 833 bp, Homo sapiens
  Payload ID: 19104
  Gene Name: unc-93 homolog B1 (C. elegans)
  ENST ID: ENST00000528423
  CDS Start-End: 294-833
ggaaaaccagaagggaagtgaagggactgcattctctgcagggatggtctcttgttctgagagctgagtgggaaggaagccacctgggaggcgcagcaggaagagcattcaaaccagaaggaacccaggggagagaatctggatattttcaaaagtggccccgtggctccagccagctggacgagctggtgggcgcgtaccccaactacaacgaggaggaggaggagcgccgctactaccgccgcaagcgcctgggcgtgctcaagaacgtgctggctgccagcgccgggggcatgctcacctacggcgtctacctgggcctcctgcagatgcagctgatcctgcactacgacgagacctaccgcgaggtgaagtatggcaacatggggctgcccgacatcgacagcaaaatgctgatgggcatcaacgtgactcccatcgccgccctgctctacacacctgtgctcatcaggttttttggaacgaagtggatgatgttcctcgctgtgggcatctacgccctctttgtctccaccaactactgggagcgctactacacgcttgtgccctcggctgtggccctgggcatggccatcgtgcctctttgggcttccatgggcaactacatcaccaggatggcgcagaagtaccatgagtactcccactacaaggagcaggatgggcaggggatgaagcagcggcctccgcggggctcccacgcgccctatctcctggtcttccaagccatcttctacagcttcttccatctgagcttcgcctgcgcccagctgcccatgatttatttcctgaaccactacctgtatgacctgaac

SEQ ID NO: 198217 - DNA, 538 bp, Homo sapiens
  Payload ID: 19105
  Gene Name: uncharacterized LOC150527 [Source:EntrezGene
  Acc:150527]
  ENST ID: ENST00000409793
  CDS Start-End: 229-528
cgtcggggacgcccaggccaccggcctgatgagggaagcaggggcagagcgctcaggccagggccggcgggggcactgcgcactggccgcctccctcctctggccaatcctcctgccgctgcgcgtctagtccacctcgtccctctctgcaggtccactaacccatctgattaccggatcctgcttgggtatgaccagcaaagccatcccacagagcacagcaagcagatgacagtgaataagatcatggtgcacgctgactataacgagttgcaccgcatggggagtgacatcaccctgctgcagctgcaccgtcatgtggaattcagctcccacatcctccccgcctgccttccggaaccaaccacgtggctggcccctgacagctcctgctggatatctggttggggaatggtcaccgaggatgcaggcatgttcctacgtgaagcatggagttacgcaatggcctgcctgtccatgaagttcctctggcctcctccgattctgtggctgcaaatccacacctaggagctccgca

SEQ ID NO: 198218 - DNA, 1039 bp, Homo sapiens
  Payload ID: 19105
  Gene Name: uncharacterized LOC150527 [Source:EntrezGene
  Acc:150527]
  ENST ID: ENST00000409982
  CDS Start-End: 172-654
ccagggccggcgggggcactgcgcactggccgcctccctcctctggccaatcctcctgccgctgcgcgtctagtccacctcgtccctctctgcaggtccactaacccatctgattaccggatcctgcttgggtatgaccagcaaagccatcccacagagcacagcaagcagatgacagtgaataagatcatggtgcacgctgactataacgagttgcaccgcatggggagtgacatcaccctgctgcagctgcaccgtcatgtggaattcagctcccacatcctccccgcctgccttccggaaccaaccacgtggctggcccctgacagctcctgctggatatctggttggggaatggtcaccgaggatgtcttcctgcctgagcccttccaacttcaggaggcagaggtcggtgtcatggacaacactgtctgcggatcctttttccagccccagtaccccggccagccaagcagcagtgactacaccatccacgaggacatgctgtgcgctggggacctcataacaggaaaggccatttgccgagtgagtgggctcactctctctcccctgtgctgccctgggcctctgccacagggtctcctctggaccctgccccagccccgacttcttcctgagcccagccaagcctgaggtgtcggagccaggacagaaactcccaacaagcactggcccatctgttttttttgtatcttttaagaaacgttgttggtagggtacagtggctcacgtctgtaatcccagcgctttgggaggtcgaggcgggtggatcacctgaggtcaggagtttgagaccagcctgaccaacatggtgaaaccccatctctactaaaaatacaaaaatcagccgggcatggtggcacgtgcctataatcccagctacttgggaggctgaggcaggagaatcgcttgaacccgggaggcggcagttgcagtgagctgagatcatgccaccgcactccagcctgggtgacagagtgagactccgtctcaaaaaaaaaaaaaaaaaaagaaaaaa

SEQ ID NO: 198219 - DNA, 543 bp, Homo sapiens
  Payload ID: 19105
  Gene Name: uncharacterized LOC150527 [Source:EntrezGene
  Acc:150527]
  ENST ID: ENST00000440359
  CDS Start-End: 23-448
tcccacagagcacagcaagcagatgacagtgaataagatcatggtgcacgctgactataacgagttgcaccgcatggggagtgacatcaccctgctgcagctgcaccgtcatgtggaattcagctcccacatcctccccgcctgccttccggaaccaaccacgtggctggcccctgacagctcctgctggatatctggttggggaatggtcaccgaggatgtcttcctgcctgagcccttccaacttcaggaggcagaggtcggtgtcatggacaacactgtctgcggatcctttttccagccccagtaccccggccagccaagcagcagtgactacaccatccacgaggacatgctgtgcgctggggacctcataacaggaaaggccatttgccgagcatgttcctacgtgaagcatggagttacgcaatggcctgcctgtccatgaagttcctctggcctcctccgattctgtggctgcaaatccacacctaggagctccgcaggcctgctggagcacagcgcctgtaggtttctgcgcct

SEQ ID NO: 198220 - DNA, 1653 bp, Homo sapiens
  Payload ID: 19105
  Gene Name: uncharacterized LOC150527 [Source:EntrezGene
  Acc:150527]
  ENST ID: ENST00000623376
  CDS Start-End: 197-646
gggaagcaggggcagagcgctcaggccagggccggcgggggcactgcgcactggccgcctccctcctctggccaatcctcctgccgctgcgcgtctagtccacctcgtccctctctgcaggtccactaacccatctgattaccggatcctgcttgggtatgaccagcaaagccatcccacagagcacagcaagcagatgacagtgaataagatcatggtgcacgctgactataacgagttgcaccgcatggggagtgacatcaccctgctgcagctgcaccgtcatgtggaattcagctcccacatcctccccgcctgccttccggaaccaaccacgtggctggcccctgacagctcctgctggatatctggttggggaatggtcaccgaggatgtcttcctgcctgagcccttccaacttcaggaggcagaggtcggtgtcatggacaacactgtctgcggatcctttttccagccccagtaccccggccagccaagcagcagtgactacaccatccacgaggacatgctgtgcgctggggacctcataacaggaaaggccatttgccgatgcggggaactgaggcccagagaggaagtgtatcacccaagcgagactccaggggtcccctcgtctgcccattaaatggcacctggttcctgatggggctgtctagttggagcctcgactgctgctcacccgtcggtcccagggtcttcaccaggctcccctacttcaccaactggatcagccagaagaagagggagagcacccctccagatcccgccttggctcctcctcaggaaacacccccagccctggacagcatgacctctcagggcatcgtccacaagcccgggctctgcgcagcccttctggctgctcacatgttcctcctgctgctgattctcctggggagcctgtgaagggccagggcccctggcctcttaccacaagcatgcccacctcaggccggcctccttgctgagctctgcacactcctgacgtgtttccatctctgagctctcctgtccacccaaggccacccctgcctcaggcctgacaaactaaaaaccacccaagaagcttctggctctggtttctggcccaccagagccatctcccatgctccactgtgtctccagctcctcagggagggaaggtctccctcctccctgggcagggtccaggctgaccatatgggagccaagtcactctccttgggaagttgggtcgcgcagactcaggccccattcgggtcctccagggcatgcagtcttccagaaaaatggggccagggcctccccacatggaagaagctgcctgtcctcctggagctgggtgttgtgcaccggtcagggatgaagcggcatcttccaggtgcgcaggtcacagaggctctcctcgacagcttgcaagtaaactgtgaagggggctgaggtcttcggtcagcagtaccagagctgtgtcccatgggtcagctctcagctgactgccccctgtacccgctgccctgccctctccctgcctccagaaacccagcccccatccctgtggcttgctccagcttgtaggggttgtggcttagctgacccaggacttgctggtccagcactgagcccataaaccagactctgagttgcccctgtaaa

SEQ ID NO: 198221 - DNA, 348 bp, Homo sapiens
  Payload ID: 19106
  Gene Name: Uncharacterized protein C12orf79 [Source:UniProtKB/Swiss-Prot
  Acc:G3V211]
  Uniprot ID: G3V211
  ENST ID: ENST00000611108
  CDS Start-End: 1-348
atgaatgtctgctgttcaagccacccagtcaatgaaaaagtttggaaaccttcatctagaaagtggtctagcaaagtgtggtccatggatgagtttgatctgcaaactgcttgttattggttcatgacaaggtgtcagaaggaggctggcaaatttggcactcacagagggaaacctatgtgcttcgtgaggtcattgcttagagtacaactgctaccaagaacattccctgcaaactcttttgtgatcagtttcttcccttctctcatataccctctgcaggtctaccaattgcattttgagagctcagataagcagagagcaatgcaatttgtcacagaaggatga

SEQ ID NO: 198222 - DNA, 532 bp, Homo sapiens
  Payload ID: 19107
  Gene Name: Uncharacterized protein FLJ43738 [Source:UniProtKB/Swiss-Prot
  Acc:Q6ZUG5]
  ENST ID: ENST00000511204
  CDS Start-End: 145-532
gattgccttttgactttaaaaacagaagttccgatcatgaccgaggagcaaaagcaggatttaaatcccctgaccataaagatcaagtgtgcttcctgccttccatcacagcctgtacccattcaggaactagagaggctgtgcatgcctgtgtactgcaagtaccagttccataagactccagttcacaagaccaagggggagccccatggaacccacgtttatttccaggacatcaacgtcatcttccttggggcactgcaccccagtgacctaagggaatacctggagggcccccccatggtggtggaagttcacgaccgggaccgcaagtcagaggagtgttctcagaagcccgtgctgtttggggaggaccctctggattcatacctcaacttccaggccctcatctctcccagagagacagagaacaacccctttgagtcccagaacaagatgtggtacccttatggcatcgcccaggtcagttttgctgacctcctccttggccacaagtacttgaatctggccg

SEQ ID NO: 198223 - DNA, 2291 bp, Homo sapiens
  Payload ID: 19107
  Gene Name: Uncharacterized protein FLJ43738 [Source:UniProtKB/Swiss-Prot
  Acc:Q6ZUG5]
  Uniprot ID: Q6ZUG5
  ENST ID: ENST00000508239
  CDS Start-End: 148-1866
gagcgctttctccatccagctggccgtcatgccgctccttgccgagatggggtttcacaattttggccaggctggtcttgaactcctgacctcgtgattgtcttacatgtccgtgtgaagagaccaaacaggctttgtaggctgtgcatgcctgtgtactgcaagtaccagttccataagactccagttcacaagaccaagggggagccccatggaacccacgtttatttccaggacatcaacgtcatcttccttggggcactgcaccccagtgacctaagggaatacctggagggcccccccatggtggtggaagttcacgaccgggaccgcaagtcagaggagtgttctcagaagcccgtgctgtttggggaggaccctctggattcatacctcaacttccaggccctcatctctcccagagagacagagaacaacccctttgagtcccagaacaagatgtggtacccttatggcatcgcccaggtcagttttgctgacctcctccttggccacaagtacttgaatctggccgtccccatccacagctgtgaggttcagcccacacactgcggccaggacagcaggagaaggaaggttgtggggcttggggtccccagagatggccaccagcacggcccaatgcccaggggcaactacctagaggctgactcccagctcaagttgcgagtggacatcgcggtgccactgagggccggggccagagctgctgatcctgaccttgggggctcccagtttggccgcatcatcttcgtctttgactttaagaaggtctccctgctccacagcctgctgcaggacatcaccatgatcaacgctaaggccctcggcctggactcctaccctgtcaggaccctgcagcagatcctgtcagccttcaaggtgcgtgtgcgggtccaggagcagcagcacctggatgtgctcactggcttccacctgctggacgggaagacacaccttttcatcctggaaggcctggccgaccaaggcttgaggcagctgtgggagaaccaccaaagctggattcccaggtcagaacacaggaaatacaaggtgctgtacaactcacagctgctgttccgcagccggctctatggggacctggaggccatcctgtaccacgtgcacctcttccagcccacggagctgctgctgcagcaggcggtgttcttcctgcgagacactgagcggaggcgggtcttccaggctctagccaggatccacgacatctgctataacagcaccaccctctgggacgtgacggtgagggacctgctgccctcctctgctatgataaaagacttgagccaagagtttgggatgcccctttcgcaagaagaactcacagatgagaaactgtttgccctaccacctcagcctgcccccaatcttgaggactaccacagtcggaactccaccctcaccttagagatccacgcccaccaggagccaagaaagagattcacgtactcacaggattacctctcagccatggtggagcccctggacttgaaggaagaggagaagaaagcccagaagaaatcccgccaggcctggctcacagccaggggattccaagtgacaggtcttcagagcgacaccgaaagcagctttcaggatctcaagctgccacccatcaaagagctgaatgaggagtggaaggaaaactccctgtttgctaatgtactggagcctgtgttggatcgagacaggtggagctgggacaggcaccacgtggactttgatctgtacaagaaaccaccacctttcctcgagctgctcccttcgcccgcaccaaagcctgtaacagtcaggaagaagaaagggaacagccccatctcctgagcagcacagaccctcccacggccaccgcatggtgaacctgcacagcctcccccacacccgaccacaccctcctcaacaatcaacttcattaaagtgcagcaggacagatggcagcagccaggccctgtgtgaggctgggctgggctcacctcgtggtcgtggttgcggagcccaatgcggatggagcggctggcccgcgacagcacggccgtcatgccatacaggttgatgaggatgttggccacccgcttcagtaccagctgctcctccatgatggtctgggatcacagaggctccaagtggggactcactacctagaccagtcccccacatggtccctccctgggctgcatctttgcctgtcttagtctcctgtgttccttgagaaagtggagtcaataacacctttctcttcaggttgtggg

SEQ ID NO: 198224 - DNA, 1989 bp, Homo sapiens
  Payload ID: 19108
  Gene Name: uncharacterized protein LOC100288966 [Source:RefSeq peptide
  Acc:NP_001244291]
  ENST ID: ENST00000616157
  CDS Start-End: 373-1518
agtcgctttgcctggtgtttcttgcttggattggcgttttctccctcgcattcctttgctgggcctgactttttctctgctgggtttggcattcccttgactgggctgggtgtttccttcggaggggggggcttggcctttcctggggtgggcctggggtccccctggtgggcgtgggctttccccgggtgggtgtgggttttccctgggtggggtgggctgggctcccttgctggggttggcaagttttggctgggattgacctttctcttcaaacagattggaaacccaaggtttcctgctagttggtgaaactggttggtagacgcgatctgttcgctactaccggcctcccctggctgttaaaagcagatggtggctgaggtttgttcaatgcccactgcctctactgtgaagaagccatttgatctcaggagcaagatgggcaagtggtgccaccaccgcttcccctgctgcagggggagcggcaagagcaacatgggcacttctggagaccacgacgactcctttatgaagatgctcaggagcaagatgggcaagtgttgccgccactgcttcccctgctgcagggggagcggcacgagcaacgtgggcacttctggagaccatgaaaactcctttatgaagatgctcaggagcaagatgggcaagtggtgctgtcactgcttcccctgctgcagggggagcagcaagagcaacgtgggcgcttggggagactacgaccacagcgccttcatggagccgaggtaccacgtccgtcgagaagatctggacaagctccacagagctgcctggtggggtaaagtccccagaaaggatctcatcgtcatgctcagggacactgacatgaacaagagggacaaggaaaagaggactgctctacatttggcctctgccaatggaaattcagaagtagtacaactcctgctggacagacgatgtcaacttaatgtccttgacaacaaaaaaaggacagctctgataaaggccatacaatgccaggaagatgaatgtgtgttaatgttgctggaacatggcgctgatcgaaatattccagatgagtatggaaataccgctctacactatgctatctacaatgaagataaattaatggccaaagcactgctcttatatggtgctgatattgaatcaaaaaacaagtgtggcctcacaccacttttgcttggcgtacatgaacaaaaacagcaagtggtgaaatttttaatcaagaaaaaagctaatttaaatgtacttgatagatatggaagaactgccctcatacttgctgtatgttgtggatcagcaagtatagtcaatcttctacttgagcaaaatgttgatgtatcttctcaagatctatctggacagacggccagagagtatgctgtttctagtcatcatcatgtaatttgtgaattactttctgactataaagaaaaacagatgctaaaaatctcttctgaaaacagcaatccaggtaaagaagcagaagaataatgtttggcagaaggaacacgcaacaagattgtgtgtttgccagaagaacatctaatgagattgcctgtttggcaggaagagcagcaagtgcaaaacacaagatgctgagtgaactttgcagggtttctgagcagttcacttttgctagtaccaaaagtgtgagacaccagaggttgggaataaggtgaatacttagctaagtgtgaaagccaccatgattatatgtaagcaaacaggcatgactgagctcctataaaactttatttacaaagccaaaaggcagattggatttggcctgtggcctatagtttgctgggattgatggaagataaccatgtaaagaaaccaggagaaaaaggaagcttttgcagtagtcagctatagtttccatgtcacacatccttggactagtatcaatgtattctaaggttttcacctgcccatggcaaaataaagtttggaatctcagtt

SEQ ID NO: 198225 - DNA, 2142 bp, Homo sapiens
  Payload ID: 19108
  Gene Name: uncharacterized protein LOC100288966 [Source:RefSeq peptide
  Acc:NP_001244291]
  ENST ID: ENST00000616049
  CDS Start-End: 369-2123
gctttgcctggtgtttcttgcttggattggcgttttctccctcgcattcctttgctgggcctgactttttctctgctgggtttggcattcccttgactgggctgggtgtttccttcggaggggggggcttggcctttcctggggtgggcctggggtccccctggtgggcgtgggctttccccgggtgggtgtgggttttccctgggtggggtgggctgggctcccttgctggggttggcaagttttggctgggattgacctttctcttcaaacagattggaaacccaaggtttcctgctagttggtgaaactggttggtagacgcgatctgttcgctactaccggcctcccctggctgttaaaagcagatggtggctgaggtttgttcaatgcccactgcctctactgtgaagaagccatttgatctcaggagcaagatgggcaagtggtgccaccaccgcttcccctgctgcagggggagcggcaagagcaacatgggcacttctggagaccacgacgactcctttatgaagatgctcaggagcaagatgggcaagtgttgccgccactgcttcccctgctgcagggggagcggcacgagcaacgtgggcacttctggagaccatgaaaactcctttatgaagatgctcaggagcaagatgggcaagtggtgctgtcactgcttcccctgctgcagggggagcagcaagagcaacgtgggcgcttggggagactacgaccacagcgccttcatggagccgaggtaccacgtccgtcgagaagatctggacaagctccacagagctgcctggtggggtaaagtccccagaaaggatctcatcgtcatgctcagggacactgacatgaacaagagggacaaggaaaagaggactgctctacatttggcctctgccaatggaaattcagaagtagtacaactcctgctggacagacgatgtcaacttaatgtccttgacaacaaaaaaaggacagctctgataaaggccatacaatgccaggaagatgaatgtgtgttaatgttgctggaacatggcgctgatcgaaatattccagatgagtatggaaataccgctctacactatgctatctacaatgaagataaattaatggccaaagcactgctcttatatggtgctgatattgaatcaaaaaacaagtgtggcctcacaccacttttgcttggcgtacatgaacaaaaacagcaagtggtgaaatttttaatcaagaaaaaagctaatttaaatgtacttgatagatatggaagaactgccctcatacttgctgtatgttgtggatcagcaagtatagtcaatcttctacttgagcaaaatgttgatgtatcttctcaagatctatctggacagacggccagagagtatgctgtttctagtcatcatcatgtaatttgtgaattactttctgactataaagaaaaacagatgctaaaaatctcttctgaaaacagcaatccagaacaagacttaaagctgacatcagaggaagagtcacaaaggcttaaagtcagtgaaaatagccagccagagaaaatgtctcaagaaccagaaataaataaggactgtgatagagaggttgaagaagaaataaagaagcatggaagtaatcctgtgggattaccagaaaacctgactaatggtgccagtgctggcaatggtgatgatggattaattccacaaaggaggagcagaaaacctgaaaatcagcaatttcctgacactgagaatgaagagtatcacagtgacgaacaaaatgatacccggaaacaactttctgaagaacagaacactggaatatcacaagatgagattctgactaataaacaaaagcagatagaagtggctgaacagaaaatgaattctgagctttctcttagtcataagaaagaagaagatctcttgcgtgaaaacagcgtgttgcaggaagaaattgccgtgctaagactggaactagatgaaacaaaacatcagaaccagctaagggaaaataaaattttggaggaaattgaaagtgtgaaagaaaagactgataaacttctaagggctatgcaattgaatgaagaagcattaacgaaaaccaatatttaagtacagtggacagcttagg

SEQ ID NO: 198226 - DNA, 1424 bp, Homo sapiens
  Payload ID: 19109
  Gene Name: Uncharacterized protein LOC113230 [Source:UniProtKB/Swiss-Prot
  Acc:Q96FF7]
  ENST ID: ENST00000269720
  CDS Start-End: 1-1086
atggccccccagagagcggggccgggtctagggaagccctcttccaagaagtcccgtgccctgagaggagggccaggagtccccagggccagacagcgaagccccagagctgctgcggagctgaacaccgaggtccccaagccctccgcaaaggacgtggagatcctggagcaagagagcgaagtcctcgagccatcagtcgagcaggacgcagagagccccgggctgtccacagctgcgggctttgagagtcctgagccaggcagagacgaccctgggccgtccgaagcgcaaagggcggaggtccaggggcagcatccccctccaggccctaagacctcctcctccaggtcaggctcggaagccccccacctgcgttttccgccgtgccccgaggctccccagcgtcccccggaggagcggttcatggagacgcccatcgagcgcgaaatccgccgcagctgcgaacgcgaggagagcctgcgccggagccggggcctgagcccgggccgcgcaggccgtgaactcgtcgagctgcgcgtgcggccggtgctcaacctgccgggtcctggccccgcgctcccgcgcgccctggagcgggcgcgggcgggcgcgcagatgcagcgggacatcgagcgggaggcccaccggcaggcggcgctggcgcgccccgcggtccccgagccgcgcgcccggtcgccgccgcagccgctgggcgaactcaagcgcttcttcgaggccgcggcggggagcggctcctcggcgggggcgggggacggcgcgggcccgcagaggctgccagagcctgggggacggccgcgctcggccgtgcagggcgggtgccgggtgctgggcagcgccccgccgcctttcactccgtcactgctggagcaggaggtgcgcgccgtgcgcgagcgcgagcaggaactgcagcgccagcggcgcagcgtctatggcaccgcggagttcaaggagcctacgccgagcctcaccgcgagcaggggcgacggaaagttggtggtgatctggcccccccgcagaaaggtctcggagaacggcctggagcaggaggagcgcaaaccttgaggtttgaaaaggctgggacccccggccggaagtaacgtacgcgtcagaggaacagggcggggggcgtctagcattaggcctggagaagggtcggctctctgcattggggaagatgaaatcgacttgcctttgtgaaattgaccagccccctctataaaacttacagtcccccattgggaaactgaccaccacccacaactccgccagtgaaactgcccagcccttctctgcctaattgcaaactgaactaccctctcccttgactgttaagagggccggagttaccgcctcgattgccccactccccccacccccaataaagcctcttctttcagggc

SEQ ID NO: 198227 - DNA, 1535 bp, Homo sapiens
  Payload ID: 19109
  Gene Name: Uncharacterized protein LOC113230 [Source:UniProtKB/Swiss-Prot
  Acc:Q96FF7]
  Uniprot ID: Q96FF7
  ENST ID: ENST00000587086
  CDS Start-End: 537-1196
gggcgacgccttggaacccacggccgccactgccgccacaggtgcctcacagtgccctctgtcctcgctctgggaatcaaaaccccggttgggaactgaggcttccgaactgcttccaaccctggacacgaaggcccccaccggccggagaacgaaaccctggggtcgtctgaagaggagggccaggagtccccagggccagacagcgaagccccagagctgctgcggagctgaacaccgaggtccccaagccctccgcaaaggacgtggagatcctggagcaagagagcgaagtcctcgagccatcagtcgagcaggacgcagagagccccgggctgtccacagctgcgggctttgagagtcctgagccaggcagagacgaccctgggccgtccgaagcgcaaagggcggaggtccaggggcagcatccccctccaggccctaagacctcctcctccaggtcaggctcggaagccccccacctgcgttttccgccgtgccccgaggctccccagcgtcccccggaggagcggttcatggagacgcccatcgagcgcgaaatccgccgcagctgcgaacgcgaggagagcctgcgccggagccggggcctgagcccgggccgcgcaggccgtgaactcgtcgagctgcgcgtgcggccggtgctcaacctgccgggtcctggccccgcgctcccgcgcgccctggagcgggcgcgggcgggcgcgcagatgcagcgggacatcgagcgggaggcccaccggcaggcggcgctggcgcgccccgcggtccccgagccgcgcgcccggtcgccgccgcagccgctgggcgaactcaagcgcttcttcgaggccgcggcggggagcggctcctcggcgggggcgggggacggcgcgggcccgcagaggctgccagagcctgggggacggccgcgctcggccgtgcagggcgggtgccgggtgctgggcagcgccccgccgcctttcactccgtcactgctggagcaggaggtgcgcgccgtgcgcgagcgcgagcaggaactgcagcgccagcggcgcagcgtctatggcaccgcggagttcaaggagcctacgccgagcctcaccgcgagcaggggcgacggaaagttggtggtgatctggcccccccgcagaaaggtctcggagaacggcctggagcaggaggagcgcaaaccttgaggtttgaaaaggctgggacccccggccggaagtaacgtacgcgtcagaggaacagggcggggggcgtctagcattaggcctggagaagggtcggctctctgcattggggaagatgaaatcgacttgcctttgtgaaattgaccagccccctctataaaacttacagtcccccattgggaaactgaccaccacccacaactccgccagtgaaactgcccagcccttctctgcctaattgcaaactgaactaccctctcccttgactgttaagagggccggagttaccgcctcgattgccccactccccccacccccaataaagcctcttctttcagggca

SEQ ID NO: 198228 - DNA, 708 bp, Homo sapiens
  Payload ID: 19109
  Gene Name: Uncharacterized protein LOC113230 [Source:UniProtKB/Swiss-Prot
  Acc:Q96FF7]
  ENST ID: ENST00000590772
  CDS Start-End: 1-453
gccgccgcagccgctgggcgaactcaagcgcttcttcgaggccgcggcggggagcggctcctcggcgggggcgggggacggcgcgggcccgcagaggctgccagagcctgggggacggccgcgctcggccgtgcagggcgggtgccgggtgctgggcagcgccccgccgcctttcactccgtcactgctggagcaggaggtgcgcgccgtgcgcgagcgcgagcaggaactgcagcgccagcggcgcagcgtctatggcaccgcggagttcaaggagcctacgccgagcctcaccggggtgcggccggcctttcatcctggctgccgccagctggtgagctgagcgccccttcccccgcagcgagcaggggcgacggaaagttggtggtgatctggcccccccgcagaaaggtctcggagaacggcctggagcaggaggagcgcaaaccttgaggtttgaaaaggctgggacccccggccggaagtaacgtacgcgtcagaggaacagggcggggggcgtctagcattaggcctggagaagggtcggctctctgcattggggaagatgaaatcgacttgcctttgtgaaattgaccagccccctctataaaacttacagtcccccattgggaaactgaccaccacccacaactccgccagtgaaactgcccagcccttctctgcctaattgcaaactgaactaccctc

SEQ ID NO: 198229 - DNA, 2195 bp, Homo sapiens
  Payload ID: 19110
  Gene Name: uncharacterized protein LOC389831 [Source:RefSeq peptide
  Acc:NP_001229409]
  ENST ID: ENST00000612465
  CDS Start-End: 48-410
taaatttatgtaatttgacaattaatctacctcatgtgcttgcagatatgtattcatttcctaccaccgtagtggaagagatactatccctatctttacaactgatagcatttccaacagtaagctgtgagattctgcttgaaatcacctctcaaacaaataaaaaacagacctgggagacatgctacgctcattctgctgaagaaataggcatcatagctgggaaacggattcacaagacccaggctgttccctacatatgtttcctcctccgacatcagttcatcagtcaatcaagccatgtgagagtggaggccttgtattccctattattcttgggcactctactccaagtaggaaaaggccaggaggtcctgttaaaggatgcactcagagcccgggctccctaacatatgagagtgctaaccagcaggtgtagacttttcaggagtgaagaatgaggcaggcattccaaacctggaccttcatcaccttttgtttcatctcaagacaattctgagggactgttttggagcgtgtctggaaggtgaaccttgaagaagagtgtgggttttgatgtgactcagttgagatctttcatggggaggcaggaattcaatgcccagaatctgggctggtgtctttgaggtcagtaggttgcgtctttgtatccaagtccattgttactaggttggaggctggagattctaaatggcttccagaccatctctctgattctctttgggagatggggtctgaaagacaatgtcagtagttttgggaaattctagaaagtgtgcttggaaacgtgggaagagctcttgcctagtgcctaaatgctccatttgcagctctagccaagtagatacttggtaggtatagagccgggtttgcgtttatattagcaaaacctatgtcagagttgaagaagtagtcaggaaaaagcgtcttggtcgcaggccggggaacatcttaaaagcaaacttctagcctgctgactcttggcaatgagtgttggatcctggctaaagtgccttgaatgcagcatgaggccaatccatgaatccaacttctcatggagaaatgttaatattttttcagtttgaatcaatcagggtgaaactaccatgctattggtttgcttactttttattatttcatgtaaaatctaagacaaaatacattaaatgcttattgacatatgtatttattcttcaccaggctgataatatctgcctaattttaaactttcttccattttgtaggtttcaacttattctattgtaagatactgttaaatctaatagaggcattgtcacttttacgtataattttattttatttcatatatttcctattggttttttacatttaaattatggagcacttcatcatataaaaaacttcaattatatttaaacagtaagtctttggatttttttgccttttaatttccatattacataataatgagataaacattaatgttttcagggtactttaaattttagataattactcattgtattcatgtgaaatttgtttttactgcatgtgtgggttggaggacggttttcacttctgattcatctttactcttatctcatcagagctcatacctcttgtagttgggggattgcagtttataattccaataaatggggcaaattcaataataacataatacaaatgagtttgaatgcaggacaggtcttcaaagcatacacaacatgggcctacatatgtacaacaataataatttataagttactgtttggatggaaagtaaaagtacagaaaatttgttaaaggaaattaaaatggagatcatgtctcaataatctctgagcagacaaaattagttaggtctcataagtgatctcaacctcgcttgatttgcaaatacaaacaaaacttacattatttcttgtagctgcatattgaaaaaagagaaatgaagctcaaccagtcagaagtagccaacaaccttatataaatagaaactgtccaacaaggtaaacagacaaacaaaaaacaataaaaaaagttgtgctaccaccaaatgatttctttgtttctacatttttcaaataaatacttgcttcttacactgtcaatgaagcactcaatatctttccgtctgatattttataatttatcaattgctcttactcaaataaacactttgcaatttc

SEQ ID NO: 198230 - DNA, 1380 bp, Homo sapiens
  Payload ID: 19111
  Gene Name: Uncharacterized protein UNQ6126/PRO20091 [Source:UniProtKB/Swiss-Prot
  Acc:Q6UXV3]
  Uniprot ID: Q6UXV3
  ENST ID: ENST00000623531
  CDS Start-End: 624-1097
ccgtccctgctcgtcttttcatattgctcatggctgcttatattctagctgccaatccacccgcggcgccaagttcaccaaatcacttcacattgcagagcaggctgttacaaatccactgttacgggaaggccaccccatcctctctttgcctcgctccccaactggctcccctctcccccatctatcacttctattccctggtccctgcccacctgccgacccccgcagagcagtcccttcatgcacctgcccctcccgactcgccctgccccttgagagcagaacctgacagcacagggcctggctcagggcgagggttccaggggcattcaatgaaggaatgaacagaccagctgaggctgtgaagcccacggtcacaaagccagactgagcccctcaacctaggcactgcacacacctgtgtgtgtttggcttccccactgagcagctggcagattcacacaactcagtcccagagccaaaggggacaaaggtgaaggctcccaggctgggcagctcgggctggcacctgctggtccttcccatgcagcccatccagcagctggggctcccacagagatgcagggcccagggccaggcggccacagactgcccggagcatgcttccagagcaagggccccagccttccacgatgccgctctggtgcctcctcgccgcctgcaccagcctcccaaggcaggcagccaccatgctggaggaagctgcttctcccaacgaggctgtccacgcatcaacatcaggcagtggcgcactcactgatcagacatttacagacctctcagctgccgaggcctcctcagaggaggttcctgacttcatggaggtgccacactctgttcaccataaaattaactgctttttctacttagaaaaacaactctgccaactgccgtccccactgtgtctaagcagcttgcttactttaaaattaaaaacaacggtcccagctcctggcaggtggtggagcttccagcctcacaaggcattcccacttctggtgggcactcctggaagctggcagagcacaatcgatcccgcgtgggcggccccctctcagccaagcccagggtgagggcagtggggctccaaggaggggaagctggcgaggatgggggccggcggggagagggcggcctgcagggcgtttagcagttggacccccagtcccctgggaagccaaactgagaggtttagacttggggggtaaaatggataaatgaagatgttccgggatagcttattttctaattttacaatgccgtgcttattaatcaggaaaagatcccagtaatgccgacatcaggcacttaaactacacccccagccggtcagaatgggcacaggacatggctcag

SEQ ID NO: 198231 - DNA, 1233 bp, Homo sapiens
  Payload ID: 19112
  Gene Name: uncharacterized serine/threonine-protein kinase SgK494 [Source:EntrezGene
  Acc:124923]
  ENST ID: ENST00000301037
  CDS Start-End: 1-1233
atgggagcagtaagctgtcggcaggggcagcacacccagcagggggaacacacccgggtggctgtccctcacaagcagggtggcaacatccggggtccctgggcccgaggctggaagagcctctggacaggtttgggaaccatcaggtcagatctggaagaactctgggaactacgggggcaccactatctgcaccaggaatccctaaagccagccccagtactggtagagaagcctctgccagagtggccagtgcctcagttcatcaacctctttctaccagagtttcccattaggcccattagggggcagcagcagctgaagattttaggcctcgtggctaaaggctcctttggaactgtcctcaaggtgctagattgcacccagaaagctgtatttgcagtgaaggtggtgcccaaggtaaaggtcctacagagggataccgtgaggcagtgcaaagaggaggttagcatccagcgacagatcaaccatccctttgtacacagcttgggggacagctggcagggaaaacggcaccttttcattatgtgtagctactgcagcacagatctgtactccctttggtcggctgttggctgctttcctgaggcttccatccgtctctttgctgccgagttggtgctggtactgtgttatctccatgacttgggcatcatgcatcgagatgtgaagatggagaatattcttctagatgaacgaggccatctgaaactgacagactttggtctgtcccgccacgtgccccagggagctcaagcctacactatctgtggcactcttcagtacatggccccagaggtcctaagtggaggaccttacaaccatgctgctgattggtggtccctgggtgtcttgcttttctctctggcgactggaaagtttccagtggctgcagagagagatcatgtggccatgttggcaagtgtgacccacagtgactctgagatcccagcttctcttaaccagggcctctcactcctgctccatgagctcttatgccagaaccccctccatcgtctacgttatctgcatcacttccaggtccaccctttctttcggggtgtggccttcgacccagagctcctacagaagcagccagtgaactttgtcacggagacacaagctacccagcccagttcagcggagaccatgccctttgacgactttgactgtgatctggagtccttcttgctctaccctatccctgcttga

SEQ ID NO: 198232 - DNA, 581 bp, Homo sapiens
  Payload ID: 19112
  Gene Name: uncharacterized serine/threonine-protein kinase SgK494 [Source:EntrezGene
  Acc:124923]
  ENST ID: ENST00000530121
  CDS Start-End: 23-581
agagaggaggcagaggctgggaatgggagcagtaagctgtcggcaggggcagcacacccagcagggggaacacacccgggtggctgtccctcacaagcagggtggcaacatccggggtccctgggcccgaggctggaagagcctctggacaggtttgggaaccatcaggtcagatctggaagaactctgggaactacgggggcaccactatctgcaccaggaatccctaaagccagccccagtactggtagagaagcctctgccagagtggccagtgcctcagttcatcaacctctttctaccagagtttcccattaggcccattagggggcagcagcagctgaagattttaggcctcgtggctaaaggctcctttggaactgtcctcaaggtgctagattgcacccagaaagctgtatttgcagtgaaggtggtgcccaaggtaaaggtcctacagagggataccgtgaggcagtgcaaagaggagcgacagatcaaccatccctttgtacacagcttgggggacagctggcagggaaaacggcaccttttcattatgtgtagctactgcagcacagatc

SEQ ID NO: 198233 - DNA, 921 bp, Homo sapiens
  Payload ID: 19112
  Gene Name: uncharacterized serine/threonine-protein kinase SgK494 [Source:EntrezGene
  Acc:124923]
  ENST ID: ENST00000578956
  CDS Start-End: 1-441
gtatctttgaaatctgtagccccagaggtcctaagtggaggaccttacaaccatgctgctgattggtggtccctgggtgtcttgcttttctctctggcgactggaaagtttccagtggctgcagagagagatcatgtggccatgttggcaagtgtgacccacagtgactctgagatcccagcttctcttaaccagggcctctcactcctgctccatgagctcttatgccagaaccccctccatcgtctacgttatctgcatcacttccaggtccaccctttctttcggggtgtggccttcgacccagagctcctacagaagcagccagtgaactttgtcacggagacacaagctacccagcccagttcagcggagaccatgccctttgacgactttgactgtgatctggagtccttcttgctctaccctatccctgcttgagcctctctactgtaaattggggcccggctgggagcctgaagatctccatccctgcctactcagtatgaccaccttgataatccagtttgtttttattttgtagcctcttaccgttctgctctcctaggctttagaccagagttccaacctggacattctgctactggcagccacagctggccctattccttccctatcatacaacctacctctcaattcaacatgtcagatcagggtggtgaccttttccttttctttacttctccagtgctctttaccctcaggctgtcagccagagctgcttctgcttgtttctctgccatgtttcctttcttgagcaataataatacttcatgggctcccagggtgctattgatgtgtttaataggcttgtcagaagcaatatgaattttttttttttttttgagacagagtctcactctgttgcccaggctggagtgcagtggtgcgttctcagct

SEQ ID NO: 198234 - DNA, 559 bp, Homo sapiens
  Payload ID: 19112
  Gene Name: uncharacterized serine/threonine-protein kinase SgK494 [Source:EntrezGene
  Acc:124923]
  ENST ID: ENST00000525510
  CDS Start-End: 40-559
gacagcagatttagcagagagaggaggcagaggctgggaatgggagcagtaagctgtcggcaggggcagcacacccagcagggggaacacacccgggtggctgtccctcacaagggtggcaacatccggggtccctgggcccgaggctggaagagcctctggacaggtttgggaaccatcaggtcagatctggaagaactctgggaactacgggggcaccactatctgcaccaggaatccctaaagccagccccagtactggtagagaagcctctgccagagtggccagtgcctcagttcatcaacctctttctaccagagtttcccattaggcccattagggggcagcagcagctgaagattttaggcctcgtggctaaaggctcctttggaactgtcctcaaggtgctagattgcacccagaaagctgtatttgcagtgaaggtggtgcccaaggtaaaggtcctacagagggataccgtgaggcagtgcaaagaggaggttagcatccaggtatgcacagagtcctggaaaggattgtgggaagagctaggccaca

SEQ ID NO: 198235 - DNA, 829 bp, Homo sapiens
  Payload ID: 19112
  Gene Name: uncharacterized serine/threonine-protein kinase SgK494 [Source:EntrezGene
  Acc:124923]
  ENST ID: ENST00000494272
  CDS Start-End: 1-278
tgtgtagctactgcagcacagatctgtactccctttggtcggctgttggctgctttcctgaggcttccatccgtctctttgctgccgagttggtgctggtactgtgttatctccatgacttgggcatcatgcatcgagatgtgaagatggagaatattcttctagatgaacgaggccatctgaaactgacagactttggtctgtcccgccacgtgccccagggagctcaagcctacactatctgtggcactcttcagtacatgggtgagagaggttaaagctgatgggtaagcattgggcaggaggatagctaaaggatgtctgtgatgagtatctttgaaatctgtagccccagaggtcctaagtggaggaccttacaaccatgctgctgattggtggtccctgggtgtcttgcttttctctctggcgactggaaagtttccagtggctgcagagagagatcatgtggccatgttggcaagtgtgacccacagtgactctgagatcccagcttctcttaaccagggcctctcactcctgctccatgagctcttatgccagaaccccctccatcgtctacgttatctgcatcacttccaggtccaccctttctttcggggtgtggccttcgacccagagctcctacagaagcagccagtgaactttgtcacggagacacaagctacccagcccagttcagcggagaccatgccctttgacgactttgactgtgatctggagtccttcttgctctaccctatccctgcttgagcctctctactgtaaattggggcccggctgggagcctgaagatctccatccctgccta

SEQ ID NO: 198236 - DNA, 843 bp, Homo sapiens
  Payload ID: 19113
  Gene Name: unconventional SNARE in the ER 1 homolog (S. cerevisiae)
  Uniprot ID: Q9NZ43
  ENST ID: ENST00000263897
  CDS Start-End: 48-827
ctcttaacatggagccggcggaaggggtggtgtagggccgggcgataatggcggcgtcgaggctggagctaaacctggtgcggctgctatcccgctgcgaggcgatggcagcggagaaacgggacccggacgagtggcgcctggagaagtacgtgggagccctagaggacatgttgcaggccctgaaggtccacgcgagcaaaccggcctctgaggtgatcaatgaatattcctggaaggtggattttctgaaggggatgctgcaagccgagaagctgacctcctcctcagagaaagcactggccaaccagttcctggcccctggccgtgtgccaaccacagccagagagcgagtgcccgccacaaagacggtgcatctgcagtcacgggcgcggtacaccagcgagatgcggagtgagctactaggcacggactctgcagagcctgagatggacgtaaggaagagaactggagtggcagggtcccagccagtgagtgagaagcagttggcagctgagctagacctcgtcctgcagcgacatcagaacctccaggaaaagctggcggaagagatgctaggactggcccggagcctcaagaccaataccctggccgcccagagtgtcatcaagaaggacaaccagaccctgtcacactcactgaaaatggcggaccagaacctggagaaactgaagacggagtcagagcgtctggagcagcacacgcagaagtcagtcaactggctgctctgggccatgctcattatcgtctgcttcatcttcattagcatgatcctcttcattcgaatcatgcctaaactcaaataaagacccccgcccacct

SEQ ID NO: 198237 - DNA, 795 bp, Homo sapiens
  Payload ID: 19113
  Gene Name: unconventional SNARE in the ER 1 homolog (S. cerevisiae)
  ENST ID: ENST00000445667
  CDS Start-End: 9-779
gggcgataatggcggcgtcgaggctggagctaaacctggtgcggctgctatcccgctgcgaggcgatggcagcggagaaacgggacccggacgagtggcgcctggagaagtacgtgggagccctagaggacatgttgcaggccctgaaggtccacgcgagcaaaccggcctctgaggtgatcaatgaatattcctggaaggtggattttctgaaggggatgctgcaagccgagaagctgacctcctcctcagagaaagcactggccaaccagttcctggcccctggccgtgtgccaaccacagccagagagcgagtgcccgccacaaagacggtgcatctgcagtcacgggcgcggtacaccagcgagatgcggagtgagctactaggcacggagcctgagatggacgtaaggaagagaactggagtggcagggtcccagccagtgagtgagaagcagttggcagctgagctagacctcgtcctgcagcgacatcagaacctccaggaaaagctggcggaagagatgctaggactggcccggagcctcaagaccaataccctggccgcccagagtgtcatcaagaaggacaaccagaccctgtcacactcactgaaaatggcggaccagaacctggagaaactgaagacggagtcagagcgtctggagcagcacacgcagaagtcagtcaactggctgctctgggccatgctcattatcgtctgcttcatcttcattagcatgatcctcttcattcgaatcatgcctaaactcaaataaagacccccgcccacct

SEQ ID NO: 198238 - DNA, 559 bp, Homo sapiens
  Payload ID: 19113
  Gene Name: unconventional SNARE in the ER 1 homolog (S. cerevisiae)
  ENST ID: ENST00000601662
  CDS Start-End: 61-177
gcacttccgccctctcttaacatggagccggcggaaggggtggtgtagggccgggcgataatggcggcgtcgaggctggagctaaacctggtgcggctgctatcccgctgcgaggcgatggcagcggagaaacgggacccggacgagtggcgcctggagaagcaaaccggcctctgaggtgatcaatgaatattcctggaaggtggattttctgaaggggatgctgcaagccgagaagctgacctcctcctcagagaaagcactggccaaccagttcctggcccctggccgtgtgccaaccacagccagagagcgagtgcccgccacaaagacggtgcatctgcagtcacgggcgcggtacaccagcgagatgcggagtgagctactaggcacggactctgcaggtgagtcaccatgaacacaacaggacttgagggccagctgactaggacaagacatgtatccttgctgccccggggcctccatgccgagactccatgccctgactccaacaggagcatcaccaaactacacctggaggaagagccaggacagagga

SEQ ID NO: 198239 - DNA, 587 bp, Homo sapiens
  Payload ID: 19113
  Gene Name: unconventional SNARE in the ER 1 homolog (S. cerevisiae)
  ENST ID: ENST00000593597
  CDS Start-End: 104-587
catttgtcggccccgcccccccgactcccatgatcaggacatgggaaagacccccgggtgacaatccacttttcctccccagtacgtgggagccctagaggacatgttgcaggccctgaaggtccacgcgagcaaaccggcctctgaggtgatcaatgaatattcctggaaggtggattttctgaaggggatgctgcaagccgagaagctgacctcctcctcagagaaagcactggccaaccagttcctggcccctggccgtgtgccaaccacagccagagagcgagtgcccgccacaaagacggtgcatctgcagtcacgggcgcggtacaccagcgagatgcggagtgagctactaggcacggactctgcagagcctgagatggacgtaaggaagagaactggagtggcagggtcccagccagtgagtgagaagcagttggcagctgagctagacctcgtcctgcagcgacatcagaacctccaggaaaagctggcggaagagatgctaggactggcccggagcctcaagaccaataccctggccgcccagagtgtcatcaagaaggacaaccagaccctgtcac

SEQ ID NO: 198240 - DNA, 826 bp, Homo sapiens
  Payload ID: 19113
  Gene Name: unconventional SNARE in the ER 1 homolog (S. cerevisiae)
  ENST ID: ENST00000600970
  CDS Start-End: 32-433
ggcggaaggggtggtgtagggccgggcgataatggcggcgtcgaggctggagctaaacctggtgcggctgctatcccgctgcgaggcgatggcagcggagaaacgggacccggacgagtggcgcctggagaagtacgtgggagccctagaggacatgttgcaggccctgaaggtccacgcgagcaaaccggcctctgaggtgatcaatgaatattcctggaaggtggattttctgaaggggatgctgcaagccgagaagctgacctcctcctcagagaaagcactggccaaccagttcctggcccctggccgtgtgccaaccacagccagagagcgagtgcccgccacaaagacggtgcatctgcagtcacgggcgcggtacaccagcgagatgcggagtgagctactaggcacggtagggctccttccctgatggacgtaaggaagagaactggagtggcagggtcccagccagtgagtgagaagcagttggcagctgagctagacctcgtcctgcagcgacatcagaacctccaggaaaagctggcggaagagatgctaggactggcccggagcctcaagaccaataccctggccgcccagagtgtcatcaagaaggacaaccagaccctgtcacactcactgaaaatggcggaccagaacctggagaaactgaagacggagtcagagcgtctggagcagcacacgcagaagtcagtcaactggctgctctgggccatgctcattatcgtctgcttcatcttcattagcatgatcctcttcattcgaatcatgcctaaactcaaataaagacccccgcccacct

SEQ ID NO: 198241 - DNA, 744 bp, Homo sapiens
  Payload ID: 19113
  Gene Name: unconventional SNARE in the ER 1 homolog (S. cerevisiae)
  ENST ID: ENST00000594724
  CDS Start-End: 9-125
gggcgataatggcggcgtcgaggctggagctaaacctggtgcggctgctatcccgctgcgaggcgatggcagcggagaaacgggacccggacgagtggcgcctggagaagcaaaccggcctctgaggtgatcaatgaatattcctggaaggtggattttctgaaggggatgctgcaagccgagaagctgacctcctcctcagagaaagcactggccaaccagttcctggcccctggccgtgtgccaaccacagccagagagcgagtgcccgccacaaagacggtgcatctgcagtcacgggcgcggtacaccagcgagatgcggagtgagctactaggcacggactctgcagagcctgagatggacgtaaggaagagaactggagtggcagggtcccagccagtgagtgagaagcagttggcagctgagctagacctcgtcctgcagcgacatcagaacctccaggaaaagctggcggaagagatgctaggactggcccggagcctcaagaccaataccctggccgcccagagtgtcatcaagaaggacaaccagaccctgtcacactcactgaaaatggcggaccagaacctggagaaactgaagacggagtcagagcgtctggagcagcacacgcagaagtcagtcaactggctgctctgggccatgctcattatcgtctgcttcatcttcattagcatgatcctcttcattcgaatcatgcctaaactcaaataaagaccc

SEQ ID NO: 198242 - DNA, 1776 bp, Homo sapiens
  Payload ID: 19113
  Gene Name: unconventional SNARE in the ER 1 homolog (S. cerevisiae)
  Uniprot ID: Q9NZ43
  ENST ID: ENST00000595101
  CDS Start-End: 19-426
gtgtagggccgggcgataatggcggcgtcgaggctggagctaaacctggtgcggctgctatcccgctgcgaggcgatggcagcggagaaacgggacccggacgagtggcgcctggagaagtacgtgggagccctagaggacatgttgcaggccctgaaggtccacgcgagcaaaccggcctctgaggtgatcaatgaatattcctggaaggtggattttctgaaggggatgctgcaagccgagaagctgacctcctcctcagagaaagcactggccaaccagttcctggcccctggccgtgtgccaaccacagccagagagcgagtgcccgccacaaagacggtgcatctgcagtcacgggcgcggtacaccagcgagatgcggagtgagctactaggcacggactctgcaggtgagtcaccatgaacacaacaggacttgagggccagctgactaggacaagacatgtatccttgctgccccggggcctccatgccgagactccatgccctgactccaacaggagcatcaccaaactacacctggaggaagagccaggacagaggaaatggccccgagaggaaacaaagctaggcacagtggctcacacctgtaatttcggaggctgaggcaggtggatcacctgaggtcaggagtttgagaccaacctggccaacatgacaaaaccatgtctctactaaaaatacaaaacttagccggatgcagtgccacgtgtctgtagtcccagctactcgggaggctgaggcaggagaattgcttgaacccaggaggtggaggttgcaatgagctgagatcacaccactgcactccagccggggcgacagagcaagactccgtctcaaaaaaaaaaaaagcaaaaaaattagccaggcgtggtgacgcacacctgtagtcccagcatacttgggaggctgaggcaggaggattgcttgagcctgggaggtagaggttgcagtgagctgagattgcgccagtgcactccagcctagttgacagagagagactctgtctcaaaaataagcaaataaataaattttttaaagctaggcactcccagcctatgggaccaaggctaggctggagggagggacctggggtctgagggaaccgagacaggagtaaggagaccctcctagaagagggggtattcaagcatggtcagaagccaacggggcagcagacaagatgaggaaacagcattccaagcagtagacccagcacaggcaatgctcaggatgccggaaacgggaaaccaacactcgccttttttgcttggcctgttttgctttcagagcctgagatggacgtaaggaagagaacgtgagtgtctgcggccctggggcagtagtggcaattgggcggtgcggcagggacggggtagcagtggccaaaccctggaccaccgaggcactaccacaaggatctaaaccaaccagaagccacttctgtggatgctcttcccagaagtcaaaggccaggcgcagtggctcacgcctgtaatcccaatactttgggaggctgaggcaggcagatcacctgaggccaggagttcaagaccagtctggccaacatggcaaaaccctgtctctactaaaaatacaaaaaattagccgggcatggtggcatgcgcctgtagtcccagctactcaggaggctgaggcaggagaactgcttgaacctgggaggtggaggttacagtgagccgagatcacgccattgcactccagcctgggtgacagagcgagatgctgtctc

SEQ ID NO: 198243 - DNA, 637 bp, Homo sapiens
  Payload ID: 19113
  Gene Name: unconventional SNARE in the ER 1 homolog (S. cerevisiae)
  Uniprot ID: Q9NZ43
  ENST ID: ENST00000596136
  CDS Start-End: 17-457
gtagggccgggcgataatggcggcgtcgaggctggagctaaacctggtgcggctgctatcccgctgcgaggcgatggcagcggagaaacgggacccggacgagtggcgcctggagaagtacgtgggagccctagaggacatgttgcaggccctgaaggtccacgcgagcaaaccggcctctgaggtgatcaatgaatattcctggaaggtggattttctgaaggggatgctgcaagccgagaagctgacctcctcctcagagaaagcactggccaaccagttcctggcccctggccgtgtgccaaccacagccagagagcgagtgcccgccacaaagacggtgcatctgcagtcacgggcgcggtacaccagcgagatgcggagtgagctactaggcacggactctgcagagcctgagatggacgtaaggaagagaacaccctgtcacactcactgaaaatggcggaccagaacctggagaaactgaagacggagtcagagcgtctggagcagcacacgcagaagtcagtcaactggctgctctgggccatgctcattatcgtctgcttcatcttcattagcatgatcctcttcattcgaatcatgcctaaactcaaataaagacccccgcccacct

SEQ ID NO: 198244 - DNA, 1462 bp, Homo sapiens
  Payload ID: 19114
  Gene Name: uncoupling protein 1 (mitochondrial, proton carrier)
  Uniprot ID: P25874
  ENST ID: ENST00000262999
  CDS Start-End: 77-1000
agagcaagggaaaggaacttcctccaccttcggggctggagcccttttcctctgcatctccagtctctgagtgaagatggggggcctgacagcctcggacgtacacccgaccctgggggtccagctcttctcagctggaatagcggcgtgcttggcggacgtgatcaccttcccgctggacacggccaaagtccggctccaggtccaaggtgaatgcccgacgtccagtgttattaggtataaaggtgtcctgggaacaatcaccgctgtggtaaaaacagaagggcggatgaaactctacagcgggctgcctgcggggcttcagcggcaaatcagctccgcctctctcaggatcggcctctacgacacggtccaggagttcctcaccgcagggaaagaaacagcacctagtttaggaagcaagattttagctggtctaacgactggaggagtggcagtattcattgggcaacccacagaggtcgtgaaagtcagacttcaagcacagagccatctccacggaatcaaacctcgctacacggggacttataatgcgtacagaataatagcaacaaccgaaggcttgacgggtctttggaaagggactactcccaatctgatgagaagtgtcatcatcaattgtacagagctagtaacatatgatctaatgaaggaggcctttgtgaaaaacaacatattagcagatgacgtcccctgccacttggtgtcggctcttatcgctggattttgcgcaacagctatgtcctccccggtggatgtagtaaaaaccagatttattaattctccaccaggacagtacaaaagtgtgcccaactgtgcaatgaaagtgttcactaacgaaggaccaacggctttcttcaaggggttggtaccttccttcttgcgacttggatcctggaacgtcattatgtttgtgtgctttgaacaactgaaacgagaactgtcaaagtcaaggcagactatggactgtgccacataatcagcttcaagaaaatgatgtaacataccagtgggaatcttgctgactggatcataaaaacaaacaaaacttattcacttattttaacctaaaaagataaaggaattttggcagagaattttggacttttttatataaaaaagaggaaaattaatgcctatttcatataactttttttttttctcagtgtcttaagaaggggaaagcaaaacattcagcatataccctggcaaatgtaatgcagataagctactgcatttgaccatttctggagtgcaattgtgtgaatgaatgtgaagaactttaacatgttttaattacaattccaactggtggaaaagaaactgagtgaaatgcagtttatatttataaatacttaaaaatgaagttattaaaaatattagtttttattaaccacagttgtcagttaatatattcaataaagtattgctaatacctttt

SEQ ID NO: 198245 - DNA, 2113 bp, Homo sapiens
  Payload ID: 19115
  Gene Name: uncoupling protein 2 (mitochondrial, proton carrier)
  Uniprot ID: P55851
  ENST ID: ENST00000310473
  CDS Start-End: 844-1773
agccgcgcgctcgctcgcaggagggtgggtagtttgcccagcgtaggggggctgggcccataaaagaggaagtgcacttaagacacggccccgctggacgctgttagaaaccgtcctggctgggaaggcaagaggtgtgtgactggacaagacttgtttctggcggtcagtcttgccatcctcacagaggttggcggcccgagagagtgtgaggcagaggcggggagtggcaagggagtgaccatctcggggaacgaaggagtaaacgcggtgatgggacgcacggaaacgggagtggagaaagtcatggagagaaccctaggcggggcggtccccgcggaaaggcggctgctccagggtctccgcacccaagtaggagctggcaggcccggccccgccccgcaggccccaccccgggccccgcccccgaggcttaagccgcgccgccgcctgcgcggagccccactgcgaagcccagctgcgcgcgccttgggattgactgtccacgctcgcccggctcgtccgacgcgccctccgccagccgacagacacagccgcacgcactgccgtgttctccctgcggctcggacacatagtatgaccattaggtgtttcgtctcccacccattttctatggaaaaccaaggggatcgggccatgatagccactggcagctttgaagaacgggacacctttagagaagcttgatcttggaggcctcaccgtgagaccttacaaagccggattccggcagagttcctctatctcgtcttgttgctgattaaaggtgcccctgtctccagtttttctccatctcctgggacgtagcaggaaatcagcatcatggttgggttcaaggccacagatgtgccccctactgccactgtgaagtttcttggggctggcacagctgcctgcatcgcagatctcatcacctttcctctggatactgctaaagtccggttacagatccaaggagaaagtcaggggccagtgcgcgctacagccagcgcccagtaccgcggtgtgatgggcaccattctgaccatggtgcgtactgagggcccccgaagcctctacaatgggctggttgccggcctgcagcgccaaatgagctttgcctctgtccgcatcggcctgtatgattctgtcaaacagttctacaccaagggctctgagcatgccagcattgggagccgcctcctagcaggcagcaccacaggtgccctggctgtggctgtggcccagcccacggatgtggtaaaggtccgattccaagctcaggcccgggctggaggtggtcggagataccaaagcaccgtcaatgcctacaagaccattgcccgagaggaagggttccggggcctctggaaagggacctctcccaatgttgctcgtaatgccattgtcaactgtgctgagctggtgacctatgacctcatcaaggatgccctcctgaaagccaacctcatgacagatgacctcccttgccacttcacttctgcctttggggcaggcttctgcaccactgtcatcgcctcccctgtagacgtggtcaagacgagatacatgaactctgccctgggccagtacagtagcgctggccactgtgcccttaccatgctccagaaggaggggccccgagccttctacaaagggttcatgccctcctttctccgcttgggttcctggaacgtggtgatgttcgtcacctatgagcagctgaaacgagccctcatggctgcctgcacttcccgagaggctcccttctgagcctctcctgctgctgacctgatcacctctggctttgtctctagccgggccatgctttccttttcttccttctttctcttccctccttcccttctctccttccctctttccccacctcttccttccgctcctttacctaccaccttccctctttctacattctcatctactcattgtctcagtgctggtggagttgacatttgacagtgtgggaggcctcgtaccagccaggatcccaagcgtcccgtcccttggaaagttcagccagaatcttcgtcctgcccccgacagcccagcctagcccacttgtcatccataaagcaagctcaaccttggcgtc

SEQ ID NO: 198246 - DNA, 464 bp, Homo sapiens
  Payload ID: 19115
  Gene Name: uncoupling protein 2 (mitochondrial, proton carrier)
  ENST ID: ENST00000539764
  CDS Start-End: 367-464
gggcagcagctgggtcttattcttctctggccttcacaacatcctgcaacccagctcaaggtcaggaatgtgacagactcatgtcatcatatctctgatgcccagagaagggataccatttgcctgagccttctcagtactgtttaatcagcctgtgagaactttccttgtgaaaggccctgtctgtgcctggggctgataaaacagcaagaacgaactgaggagctgggcagcagtgcaaagcaaatactaccagctttggtgcctattccggcagagttcctctatctcgtcttgttgctgattaaaggtgcccctgtctccagtttttctccatctcctgggacgtagcaggaaatcagcatcatggttgggttcaaggccacagatgtgccccctactgccactgtgaagtttcttggggctggcacagctgcctgcatcgcagatctcatcacctttcc

SEQ ID NO: 198247 - DNA, 389 bp, Homo sapiens
  Payload ID: 19115
  Gene Name: uncoupling protein 2 (mitochondrial, proton carrier)
  ENST ID: ENST00000545212
  CDS Start-End: 1-389
gggagccgcctcctagcaggcagcaccacaggtgccctggctgtggctgtggcccagcccacggatgtggtaaaggtccgattccaagctcaggcccgggctggaggtggtcggagataccaaagcaccgtcaatgcctacaagaccattgcccgagaggaagggttccggggcctctggaaagggacctctcccaatgttgctcgtaatgccattgtcaactgtgctgagctggtgacctatgacctcatcaaggatgccctcctgaaagccaacctcatgacaggcttctgcaccactgtcatcgcctcccctgtagacgtggtcaagacgagatacatgaactctgccctgggccagtacagtagcgctggccactgtgcccttac

SEQ ID NO: 198248 - DNA, 1004 bp, Homo sapiens
  Payload ID: 19115
  Gene Name: uncoupling protein 2 (mitochondrial, proton carrier)
  ENST ID: ENST00000544615
  CDS Start-End: 1-849
gggcaacatgcttatccctgtagctaccctgtcttggccttgcagatccaaggagaaagtcaggggccagtgcgcgctacagccagcgcccagtaccgcggtgtgatgggcaccattctgaccatggtgcgtactgagggcccccgaagcctctacaatgggctggttgccggcctgcagcgccaaatgagctttgcctctgtccgcatcggcctgtatgattctgtcaaacagttctacaccaagggctctgagcatgccagcattgggagccgcctcctagcaggcagcaccacaggtgccctggctgtggctgtggcccagcccacggatgtggtaaaggtccgattccaagctcaggcccgggctggaggtggtcggagataccaaagcaccgtcaatgcctacaagaccattgcccgagaggaagggttccggggcctctggaaagggacctctcccaatgttgctcgtaatgccattgtcaactgtgctgagctggtgacctatgacctcatcaaggatgccctcctgaaagccaacctcatgacagatgacctcccttgccacttcacttctgcctttggggcaggcttctgcaccactgtcatcgcctcccctgtagacgtggtcaagacgagatacatgaactctgccctgggccagtacagtagcgctggccactgtgcccttaccatgctccagaaggaggggccccgagccttctacaaagggttcatgccctcctttctccgcttgggttcctggaacgtggtgatgttcgtcacctatgagcagctgaaacgagccctcatggctgcctgcacttcccgagaggctcccttctgagcctctcctgctgctgacctgatcacctctggctttgtctctagccgggccatgctttccttttcttccttctttctcttccctccttcccttctctccttccctctttccccacctcttccttccgctcctttacctaccaccttccctctttc

SEQ ID NO: 198249 - DNA, 1413 bp, Homo sapiens
  Payload ID: 19115
  Gene Name: uncoupling protein 2 (mitochondrial, proton carrier)
  ENST ID: ENST00000536983
  CDS Start-End: 367-1044
gctgcgcgcgccttgggattgactgtccacgctcgcccggctcgtccgacgcgccctccgccagccgacagacacagccgcacgcactgccgtgttctccctgcggctcggacacatagtatgaccattaggtgtttcgtctcccacccattttctatggaaaaccaaggggatcgggccatgatagccactggcagctttgaagaacgggacacctttagagaagcttgatcttggaggcctcaccgtgagaccttacaaagccggattccggcagagttcctctatctcgtcttgttgctgattaaaggtgcccctgtctccagtttttctccatctcctgggacgtagcaggaaatcagcatcatggttgggttcaaggccacagatgtgccccctactgccactgtgaagtttcttggggctggcacagctgcctgcatcgcagatctcatcacctttcctctggatactgctaaagtccggttacagatccaaggagaaagtcaggggccagtgcgcgctacagccagcgcccagtaccgcggtgtgatgggcaccattctgaccatggtgcgtactgagggcccccgaagcctctacaatgggctggttgccggcctgcagcgccaaatgagctttgcctctgtccgcatcggcctgtatgattctgtcaaacagttctacaccaagggctctgagcatgccagcattgggagccgcctcctagcaggcagcaccacaggtgccctggctgtggctgtggcccagcccacggatgtggtaaaggtccgattccaagctcaggcccgggctggaggtggtcggagataccaaagcaccgtcaatgcctacaagaccattgcccgagaggaagggttccggggcctctggaaagggacctctcccaatgttgctcgtaatgccattgtcaactgtgctgagctggtgacctatgacctcatcaaggatgccctcctgaaagccaacctcatgacaggttcatgccctcctttctccgcttgggttcctggaacgtggtgatgttcgtcacctatgagcagctgaaacgagccctcatggctgcctgcacttcccgagaggctcccttctgagcctctcctgctgctgacctgatcacctctggctttgtctctagccgggccatgctttccttttcttccttctttctcttccctccttcccttctctccttccctctttccccacctcttccttccgctcctttacctaccaccttccctctttctacattctcatctactcattgtctcagtgctggtggagttgacatttgacagtgtgggaggcctcgtaccagccaggatcccaagcgtcccgtcccttggaaagttcagccagaatcttcgtcctgcccccgacagcccagcc

SEQ ID NO: 198250 - DNA, 2623 bp, Homo sapiens
  Payload ID: 19116
  Gene Name: uncoupling protein 3 (mitochondrial, proton carrier)
  Uniprot ID: P55916
  ENST ID: ENST00000314032
  CDS Start-End: 554-1492
atatttagcacatagtaggcacaaagaaatgacattattattaagagacctgggagagctgtgcccagcctatcgtgggaggccttgacctttggactcaaaagtggcagcaggtccacccccccatacacccttgtcaccaaggaagcgtccacagcttaaaggagctatattaaagcaccccaagtcaagaggactgaaccagatctggaactcactcacctcccctctcacctcactgccctcaccagccagcctcttgtcaagtgatcaggctgtcaaccaacttctctaggataaggtttcaggtcagcccgtgtgtataagaccagtgccaagccagaagcagcagagacaacagtgaatgacaaggaggggccatccaatccctgctgccacctcctgggatggagccctagggagcccctgtgctgcccctgccgtggcaggactcacagccccaccgctgcactgaagcccagggctgtggagcagcctctctccttggacctcctctcggccctaaagggactgggcagagccttccaggactatggttggactgaagccttcagacgtgcctcccaccatggctgtgaagttcctgggggcaggcacagcagcctgttttgctgacctcgttacctttccactggacacagccaaggtccgcctgcagatccagggggagaaccaggcggtccagacggcccggctcgtgcagtaccgtggcgtgctgggcaccatcctgaccatggtgcggactgagggtccctgcagcccctacaatgggctggtggccggcctgcagcgccagatgagcttcgcctccatccgcatcggcctctatgactccgtcaagcaggtgtacacccccaaaggcgcggacaactccagcctcactacccggattttggccggctgcaccacaggagccatggcggtgacctgtgcccagcccacagatgtggtgaaggtccgatttcaggccagcatacacctcgggccatccaggagcgacagaaaatacagcgggactatggacgcctacagaaccatcgccagggaggaaggagtcaggggcctgtggaaaggaactttgcccaacatcatgaggaatgctatcgtcaactgtgctgaggtggtgacctacgacatcctcaaggagaagctgctggactaccacctgctcactgacaacttcccctgccactttgtctctgcctttggagccggcttctgtgccacagtggtggcctccccggtggacgtggtgaagacccggtatatgaactcacctccaggccagtacttcagccccctcgactgtatgataaagatggtggcccaggagggccccacagccttctacaagggatttacaccctcctttttgcgtttgggatcctggaacgtggtgatgttcgtaacctatgagcagctgaaacgggccctgatgaaagtccagatgttacgggaatcaccgttttgaacaagacaagaaggccactggtagctaacgtgtccgaaaccagttaagaatggaagaaaacggtgcatccacgcacacatggacacagacccacacatgtttacagaactgttgtttacttgttgctgattcaagaaacagaagtagaagaggaggagggattctggtcttcactgccatgcctcaagaacacctttgttttgcactgacaagatggaaaataaattatattaatttttgaaacccattaggcatgcctaatatttaggcaagagaaaataaaccaagatagatccatttggacaaaatggaaggttggagacgtgtatccccgtgaaatctggttagataatgaatgataagcaggaaggatggcaagcacgggacaggaggggcccacaatggagtgggagatcagccacggagcctggagggatgccacccagcaacacagagctggcgactgcagctgcaccatcacacatgcatcatcagcctatttgtaatatgtctgccacagagagtcctttgggattctaggaaacccaaggaacaagagaaaaaactagagcctgtgctaaagaagccctgctgggcccatgtgaggctggggctcgtaaatattccctgacgacactgaagaatcaagagggcagcccccactttcctacaaaatggagggagccatcccttccctgtccacctcaccaggggtgctatgacatgcaagtgagaagctgggcatgaacgcactttataaaagcaaaagctctgtgtaaatctaactacaaggacaatgccttgggagagattttgtcgggacagagaggagttgccagggaagaaggtttgaaagatacggttgtctagaggtgagaccaaaggatccagagacttggggaccagaggtgacagtggatgacgtgaagccacaggagccccacccccatgcagcctcttccccaccccccccaccacgtgctcaatcatgagtacctcaaaggattgttgggcttgggggaaaagaggtggattcctgggcaagaacctaaagtagcaggactcggaattctcgggaaattattatgactcaataaaagaattcacaccttaggtgtgggagtaagaaca

SEQ ID NO: 198251 - DNA, 1406 bp, Homo sapiens
  Payload ID: 19116
  Gene Name: uncoupling protein 3 (mitochondrial, proton carrier)
  Uniprot ID: P55916
  ENST ID: ENST00000426995
  CDS Start-End: 204-1031
agagacaacagtgaatgacaaggaggggccatccaatccctgctgccacctcctgggatggagccctagggagcccctgtgctgcccctgccgtggcaggactcacagccccaccgctgcactgaagcccagggctgtggagcagcctctctccttggacctcctctcggccctaaagggactgggcagagccttccaggactatggttggactgaagccttcagacgtgcctcccaccatggctgtgaagttcctgggggcaggcacagcagcctgttttgctgacctcgttacctttccactggacacagccaaggtccgcctgcagatccagggggagaaccaggcggtccagacggcccggctcgtgcagtaccgtggcgtgctgggcaccatcctgaccatggtgcggactgagggtccctgcagcccctacaatgggctggtggccggcctgcagcgccagatgagcttcgcctccatccgcatcggcctctatgactccgtcaagcaggtgtacacccccaaaggcgcggacaactccagcctcactacccggattttggccggctgcaccacaggagccatggcggtgacctgtgcccagcccacagatgtggtgaaggtccgatttcaggccagcatacacctcgggccatccaggagcgacagaaaatacagcgggactatggacgcctacagaaccatcgccagggaggaaggagtcaggggcctgtggaaaggaactttgcccaacatcatgaggaatgctatcgtcaactgtgctgaggtggtgacctacgacatcctcaaggagaagctgctggactaccacctgctcactgacaacttcccctgccactttgtctctgcctttggagccggcttctgtgccacagtggtggcctccccggtggacgtggtgaagacccggtatatgaactcacctccaggccagtacttcagccccctcgactgtatgataaagatggtggcccaggagggccccacagccttctacaaggggtgagcctcctcctgcctccagcactccctcccagagaacaggggcttctttcttttcgaatgtggctaccgtgggtcaacctgggatgtagcggtgaagagtacagatgtaaatgccacaaagaagaagtttaaaaaaccatgcaagtaaaagaaaaaaagtgaaccatacctgatggggagggttagggaagcctgactgagaacaaacactccaggaataggtaaaagtactgcctgtctccagaggaagttagcaatcctgagacctcctggacctcctgccatggccattgagcaccacactgaccatggccagtgccttcctcactgtctccacacgctccacgttttcttgcacttactgctccctctgcgt

SEQ ID NO: 198252 - DNA, 551 bp, Homo sapiens
  Payload ID: 19116
  Gene Name: uncoupling protein 3 (mitochondrial, proton carrier)
  ENST ID: ENST00000544614
  CDS Start-End: 263-551
attcaagggataggaacgtgacctgtttttataggccaaattcatgcagcttaagtatggcaccacccaggcttctccctttctaaagcccctcctgggtaaggaagagttcctgggagccaggccagacatcactccatcagccttctctggcctgtctcctgcagccccaccgctgcactgaagcccagggctgtggagcagcctctctccttggacctcctctcggccctaaagggactgggcagagccttccaggactatggttggactgaagccttcagacgtgcctcccaccatggctgtgaagttcctgggggcaggcacagcagcctgttttgctgacctcgttacctttccactggacacagccaaggtccgcctgcagatccagggggagaaccaggcggtccagacggcccggctcgtgcagtaccgtggcgtgctgggcaccatcctgaccatggtgcggactgagggtccctgcagcccctacaatgggctggtggccggcctgcagcgccagatgagcttcgcctccatccgcatcg

SEQ ID NO: 198253 - DNA, 1157 bp, Homo sapiens
  Payload ID: 19117
  Gene Name: undifferentiated embryonic cell transcription factor 1
  Uniprot ID: Q5T230
  ENST ID: ENST00000304477
  CDS Start-End: 16-1041
cgccccagccccgggatgctgctccggccccgcaggccgcccccgctcgcgccccccgcgccgccctcgcccgccagccccgaccccgagccgcggacacccggagacgccccggggaccccgccccggaggcccgcctcgcccagcgcgctgggggaactcgggttgccggtgtccccgggctcggcgcagcgcacgccctggagcgcccgggagacggagctgctgctggggacgctgctgcaaccggccgtgtggcgcgcgctgctcctggaccgccgccaggccctgcccacctaccgccgcgtgtcggccgcgctggcccagcagcaggtgcgccgcacccccgcgcagtgccgccgccgctacaagttccttaaagacaagtttcgcgaggcgcacggccagccgcccgggcccttcgacgagcagatccggaagctcatggggctgctgggcgacaacgggcgcaaacggcctcgccgccgctccccggggtccgggcgcccccagcgcgcccgccgcccggtccccaacgcgcacgcgccggctcccagcgaaccagacgccaccccgctgcccaccgcccgcgaccgcgacgcggaccccacctggacgctccgcttcagcccgtccccaccgaagtctgcggacgcctcccccgcccccggctccccgccagctcccgccccgaccgccctcgccacctgcatccccgaggaccgcgcgcccgtccgcggccccgggtccccgccgccacccccggcccgcgaagaccccgactcgccgcccggccgccccgaggactgcgcgccccctccggccgcgcccccgtcgctgaacaccgccctgctgcagaccctggggcacctgggcgacatcgcgaacatcctgggcccgctgcgcgaccagctgctgaccttgaaccagcacgtggagcagctgcgcggcgccttcgaccagacagtgtccctggccgtgggcttcattctgggcagcgcggccgccgagcgaggggtcctcagggacccgtgccagtgagtcccggctgcggccagtctcccctctccaggccgaggcccctccgccctgacccctcctgctgccttcccacccccgttcttgggtatgttcaataaaaggattgttttcctaga

SEQ ID NO: 198254 - DNA, 3925 bp, Homo sapiens
  Payload ID: 19118
  Gene Name: unkempt family zinc finger
  Uniprot ID: Q9C0B0
  ENST ID: ENST00000589666
  CDS Start-End: 111-2543
ggggggtcttcacgttctcgtggcgcggcgcaggcgcactgggtcctcggcgcggaccgcgcagactgaataataaaaggggagcggcgaagaggcaggaagacaagaccatgtcgaagggccccgggcccggcggctccgcagcttcctcggcgcccccggccgctaccgctcaggtgctgcaggcacagcccgagaaaccgcagcactacacgtacctgaaagaattccgcacagagcagtgcccactctttgtgcaacacaaatgcacgcagcatcggccctacacctgcttccactggcacttcgtgaaccagcggcgccgccggtccatccgccgtcgggacggcaccttcaattacagccctgacgtctactgcaccaagtacgacgaggctacaggcctctgcccggagggcgacgagtgcccattcctgcacagaaccacaggggacactgagcgcaggtaccaccttcgttactacaaaactggaatctgcatccacgagacagactcgaaaggcaactgcaccaaaaacggcctgcactgcgcttttgcccacgggccccatgacctccgctcccctgtctacgacatcagggagcttcaggccatggaggccttgcagaatggccagaccacggtagaggggagcatagagggccagtcggctggggctgcgagccatgccatgatagaaaagatcctcagcgaggagcctcggtggcaagagactgcttatgtgctggggaactataagacggagccttgcaagaagcccccgcggctgtgccgccaaggctatgcctgtccctactaccacaacagcaaggaccggcggcggagcccccggaagcacaaatacaggtcgtctccatgtccaaacgtcaagcacggggatgagtggggagaccctggcaagtgtgagaacggagacgcctgccagtactgccacacccgcaccgagcagcagttccaccccgagatctacaagtccaccaagtgcaacgacatgcagcagtcgggcagctgtccccgaggacccttctgcgcctttgcccacgtagaacagccacccctgagtgacgacctgcagccttcctcagctgtgtccagccccacccagccaggtcctgtcctgtacatgccatctgccgccggagactcggtgcctgtgagcccctccagcccgcatgcccctgacctcagtgccctcctctgtagaaacagcagcctaggcagcccgtctaacctctgcggctccccaccgggctccatcaggaagcccccaaacctggagggcatcgtcttccctggggagtctggcctggcccctggcagctataagaaggctcccggcttcgagagggaagaccaggtgggagccgagtacctgaaaaatttcaaatgccaggccaaattaaaaccccactcattagagcccaggagtcaagagcagcctctgcttcagcccaaacaggacatgctgggcatcctccccgcaggcagccccctgacctcaagcatctcttctagtatcacctccagcctggcagctaccccccctagcccagtgggcaccagcagcgtccccggcatgaatgcaaacgctctgcccttctaccccaccagcgacacggtagagtcagtcatagagtctgctttggatgacctggacctgaatgagtttggcgtggccgccctggagaagactttcgataacagcacagtgccccacccaggaagcatcaccatcggcggcagcttgctgcagagctctgcacccgtgaacatccccggctccttgggcagctctgcctccttccactcagcatccccgtcccctcccgtcagcctctcctcgcatttcctgcagcagccccagggccacctgagtcagtcggaaaacacatttttgggaacctcagcatcacatggatctttgggtctgaacgggatgaacagcagcatctgggagcattttgcctctggaagcttctccccgggcacttcccccgctttcctatcagggccaggggctgccgagctggcccgacttcggcaagagctggatgaagccaacagcaccatcaagcagtgggaggagtcctggaagcaggccaagcaggcttgtgatgcctggaagaaagaggcggaggaggctggtgagcgggccagtgcggcgggcgccgagtgcgagctggcccgggagcagcgggatgcactggaggtgcaggtgaagaagctccaggaggagctggagcggctacacgcggggcctgagccccaggccctgcccgccttctccgacctggaggcgctctcactctccaccctctactccctccagaaacaactgcgggcccacctggaacaagtggacaaggccgtgttccacatgcagtcggtgaaatgccttaagtgtcaggaacagaagcgggcagtgctgccgtgccaacacgctgcgctgtgtgagctctgcgctgagggcagcgagtgccccatctgccagcctggccgggcccacaccctccagtcgtgaccctgcaggcctggcccagcctggcccagatcttctcacctaggactttttaaagtatatatatatatatgaatatatatatatatgtgtatgtatgtatgtatatgtatatgattatgtatatgtatacatttccgtatgtatgtatatgtatacatttccgtatgtgtgcaggtatgcgtggtggtgtggacagtgtctgtgtgtatatctgtacatagatatagacacacactttaaaagacttaccaagcactttttaaaagaagaaactattttgcagtcctcccctacccactccctgcccttcccactgcagagatgacatcccctcttctcccactggccttttggcagagaatctggttctgtctcttttttaatgtaggaactaactatttttaacttcttcctggggcctgagcagggaagggtgggactggaaggcactaaggggaagggagaagccctcagggcaggccctgctccccctacctccttgccagggcaagggtggagtgtggaagacgtgggtcccccagagcaggcctggcccccagctgtgagggcctcagggaggcccgagggggagtgctgggggtctcagctggcttagctcctaagtttaccaaatgttaatttagtcttggggagaacagcaagggctggaggccagtgctgcagggccagccccactcctgacacctgggcccttgaagctccttgaggggcaaggcccaggagttccagccctcaggttcctgagggtccaccctcagtccttccccccgccgcccctccccggactccccacaagagcctccctggccccagggccgcctaccaggctggtactcattctatgaccaccgcccccaaccagctgcccccagctctccctgccccctcccctctctggcagctagcagggcaattggcggggaggagtgcggactgaggactgaggaccaagggggcccaggccctgccctcctacccggaggggctccgtttgcattccttggtgctctctgagtgcagctggtgtcccgccctgttctgggcggacgcctgtgtgcgtgtgtgtgtgcctgtccagtgtatattgtgtcttagcttccattttaaaaattgttctgtacagagagagatgcagcaggggcgggagggcagagtgggcggaggggagcagccgcacccccagcaccgggtgtctgcggtaggaacaagagggctgagagggtctggtcctggcccaggctcccccttgggctcagcacgaaagggctttcaatgaattaagtgaaaactttttccttttttacaaaaatgcaaaaatcaacaaagctccaaacctattggaaataaaatatgaacttgca

SEQ ID NO: 198255 - DNA, 984 bp, Homo sapiens
  Payload ID: 19118
  Gene Name: unkempt family zinc finger
  ENST ID: ENST00000587501
  CDS Start-End: 33-146
ggggagcggcgaagaggcaggaagacaagaccatgtcgaagggccccgggcccggcggctccgcagcttcctcggcgcccccggccgctaccgctcaggtgctgcaggcacagcccgagaaaccgcagcactacacctatggttgatactaaaggaggttttcccactatccgtatgcatcttctctgttttgagattgcaactatggacagttatggctaatcctagtagattgtcttcccttttaacatcttggatgaatttgggtcacactaattgttatgtgaagatggatgttgaattgtgtagaatttgacagcagtatcaagagctgaggagaaggagaagatggaaaggagtctagcaacttaaaaatctcacagcattctctgtgaggtgaccttttttcctgttggtggctcaatttctttaggacataaagaagatactgaggcctgtgacagcctgtgacagtatcatcaagtcgtatctgaacttattgaactgtttcctccccttccttattctttattcacagtttgcttttcatgtgcataagttgactcatttgtttcctgttagcatttgaaacaccatatagccaccataagtcctgacaaaatgacttttaataaggagggggaaggtccatgtcccaccttcctatgaaattttggcctattcacaagtctacccccacataagagaagtagttatgttctgtaaagaagaggttgataaaaacctttagcatggtgttttgtgacttagaagttttaagtagtcgttcttatatctaagcatttattaattttggtaagaacattactatacgtttctgatgtcacttttactgttaagaggtgccaggcatctggtgacctgtcacttcaggatttgtgtgaatcagaccatctaaatataatataaattagagactggtacttgtatttcctgattaaaaacaaagtaacgtctgtttta

SEQ ID NO: 198256 - DNA, 651 bp, Homo sapiens
  Payload ID: 19118
  Gene Name: unkempt family zinc finger
  ENST ID: ENST00000586217
  CDS Start-End: 1-208
gcgcaggtaccaccttcgttactacaaaactggaatctgcatccacgagacagactcgaaaggcaactgcaccaaaaacggcctgcactgcgcttttgcccacgggccccatgacctccgctcccctgtctacgacatcaggtgggctgggtgctgggctgggctgatggcagtaggctggggtccagggcaggggcctggcggctaatgatgggagcttcaggccatggaggccttgcagaatggccagaccacggtagaggggagcatagagggccagtcggctggggctgcgagccatgccatgatagaaaagatcctcagcgaggagcctcggtggcaagagactgcttatgtgctggggaactataagacggagccttgcaagaagcccccgcggctgtgccgccaaggctatgcctgtccctactaccacaacagcaaggaccggcggcggagcccccggaagcacaaatacaggtcgtctccatgtccaaacgtcaagcacggggatgagtggggagaccctggcaagtgtgagaacggagacgcctgccagtactgccacacccgcaccgagcagcagttccaccccgagatctacaagtccaccaagtgcaacgacatgcagcagtcgggcagctgtccccg

SEQ ID NO: 198257 - DNA, 633 bp, Homo sapiens
  Payload ID: 19118
  Gene Name: unkempt family zinc finger
  ENST ID: ENST00000592629
  CDS Start-End: 20-145
gaggcaggaagacaagaccatgtcgaagggccccgggcccggcggctccgcagcttcctcggcgcccccggccgctaccgctcaggtgctgcaggcacagcccgagaaaccgcagcactacacggcagaggagagagaccagtgaaggttgggaggaggcggccaaaaggagacagcttcatgcccccaggacataaatagcccggctgctgcaggtacctgaaagaattccgcacagagcagtgcccactctttgtgcaacacaaatgcacgcagcatcggccctacacctgcttccactggcacttcgtgaaccagcggcgccgccggtccatccgccgtcgggacggcaccttcaattacagccctgacgtctactgcaccaagtacgacgaggctacaggcctctgcccggagggcgacgagtgcccattcctgcacagaaccacaggggacactgagcgcaggtaccaccttcgttactacaaaactggaatctgcatccacgagacagactcgaaaggcaactgcaccaaaaacggcctgcactgcgcttttgcccacgggccccatgacctccgctcccctgtctacgacatcaggtgggctgggtgctgggctgggctgatggca

SEQ ID NO: 198258 - DNA, 660 bp, Homo sapiens
  Payload ID: 19118
  Gene Name: unkempt family zinc finger
  ENST ID: ENST00000587258
  CDS Start-End: 1-660
gactttcgataacagcacagtgccccacccaggaagcatcaccatcggcggcagcttgctgcagagctctgcacccgtgaacatccccggctccttgggcagctctgcctccttccactcagcatccccgtcccctcccgtcagcctctcctcgcatttcctgcagcagccccagggccacctgagtcagtcggaaaacacatttttgggaacctcagcatcacatggatctttggggccaggggctgccgagctggcccgacttcggcaagagctggatgaagccaacagcaccatcaagcagtgggaggagtcctggaagcaggccaagcaggcttgtgatgcctggaagaaagaggcggaggaggctggtgagcgggccagtgcggcgggcgccgagtgcgagctggcccgggagcagcgggatgcactggaggtgcaggtgaagaagctccaggaggagctggagcggctacacgcggggcctgagccccaggccctgcccgccttctccgacctggaggcgctctcactctccaccctctactccctccagaaacaactgcgggcccacctggaacaagtggacaaggccgtgttccacatgcagtcggtgaaatgccttaagtgtcaggaacagaagcgggcagtgctgccgtg

SEQ ID NO: 198259 - DNA, 1312 bp, Homo sapiens
  Payload ID: 19118
  Gene Name: unkempt family zinc finger
  ENST ID: ENST00000586527
  CDS Start-End: 27-146
cggcgaagaggcaggaagacaagaccatgtcgaagggccccgggcccggcggctccgcagcttcctcggcgcccccggccgctaccgctcaggtgctgcaggcacagcccgagaaaccgcagcactacacctatgttagatactaaagaaggcttccccacaacccatatgcatctgctttgactggtggtttctatcatcctacaaagactgtgacttattggtgagggcagctggacaactctgagagcaacttagagaaatccatcttgggcacactctataaaggagctccttctctgcaaatagcaccccagataagtgcacaaaagcaagataccctcgtggacctacacgtcctcccgcttttcaacaccctgatgcctgaagctatggttgatactaaaggaggttttcccactatccgtatgcatcttctctgttttgagattgcaactatggacagttatggctaatcctagtagattgtcttcccttttaacatcttggatgaatttgggtcacactaattgttatgtgaagatggatgttgaattgtgtagaatttgacagcagtatcaagagctgaggagaaggagaagatggaaaggagtctagcaacttaaaaatctcacagcattctctgtgaggtgaccttttttcctgttggtggctcaatttctttaggacataaagaagatactgaggcctgtgacagcctgtgacagtatcatcaagtcgtatctgaacttattgaactgtttcctccccttccttattctttattcacagtttgcttttcatgtgcataagttgactcatttgtttcctgttagcatttgaaacaccatatagccaccataagtcctgacaaaatgacttttaataaggagggggaaggtccatgtcccaccttcctatgaaattttggcctattcacaagtctacccccacataagagaagtagttatgttctgtaaagaagaggttgataaaaacctttagcatggtgttttgtgacttagaagttttaagtagtcgttcttatatctaagcatttattaattttggtaagaacattactatacgtttctgatgtcacttttactgttaagaggtgccaggcatctggtgacctgtcacttcaggatttgtgtgaatcagaccatctaaatataatataaattagagactggtacttgtatttcctgattaaaaacaaagtaacgtctgttttactattgaagtaagagtactttataatgaatacaaaaatgtatattaaatatccagtagagcatgctaaagtgaa

SEQ ID NO: 198260 - DNA, 4320 bp, Homo sapiens
  Payload ID: 19119
  Gene Name: unkempt family zinc finger-like
  Uniprot ID: Q9H9P5
  ENST ID: ENST00000248104
  CDS Start-End: 596-1285
tttgaatccccggcggcggcgcggggcggccgcggaccgtgagtcagcattggcggcggccccagcgcgtggcagccgtgcgccgccaaggtgcgggtctcgttactcggcggtcaggagcgggccctcccttaggtgcgccccccgccaggttctgcgttagacctgcatcttagcaatgtgaatattgcatccctagagaaggacctggaagagcaagacggccacgacctgggagcagcaggtcccaggtcgctggccggctctgcacctgtcgccatccccggctccctgcccagagcaccatcgctacactcgccatcctctgcgtccacctcgccgctcggttcgctgtcccagcccctcccagggccggtgggctcctcagccatgacgcctccccagcagccgccacccctgcgttcagagccgggcacactgggctctgcagcctcatcctacagccccctaggtgagtgccggctccctccatgctggcgttgccgtgaagcctccgtggggctccctcccagatgccgtcctgactgaggggcctcacacggaaccttgtgccctatctgtggtggcaaaccacatgacctgctgctcacaggttcccccacgccgcagaccgagtctcgctctgtcgcccaggttggactgcaatggtttgaacggtgtccccgggagcatctgggactttgtttccggcagcttctcccccagcccctcccccatcctgagtgccggccccccatcctcttcgagtgcaagtccaaacggagctgagctggcccgggtcaggcggcagctggacgaggccaagaggaagatccggcagtgggaggagtcctggcagcaggtgaagcaggtctgcgatgcctggcagcgagaggcgcaggaggccaaggagcgtgcccgtgtggccgatagcgaccggcagctggcgctgcagaagaaggaggaggtggaggcacaggtgaagcagctgcaggaggagctggagggcctgggcgtagcctccacactgccggggctgcggggctgtggggacatcggcaccattcccctgccgaagctgcactcgctgcagagtcagctgcgcctggacctggaggcggtggacggcgtgatcttccagctccgcgccaagcagtgtgtggcctgccgggagcgggcccacggtgctgtcctgcggccctgtcagcaccacatcctctgtgagccgtgtgcggccaccgcacctgagtgcccctactgcaagggccagcccctgcagtggtgacctcagcggggacagccacctcctgctgggcaccctggctccagcgctcctcctgaccacggacatgtcgtcactcgcttctggtgccaccgacgtgaggaccgaggctgggagcccttcctgttacacgttatcatgaggctgggagccccgcctgcgcttggcctgacagcctttcctgtcacacgttgtcacctatctagtcctaccgacggtttcaaggtattttcctcaaaaaccttaaatgcaaacccacagaacccgcctgcctgtccctgaggggcctggtgcctccgggatccacgcggcgctgtgatcacagcagtttgtggtcctgacactactgtgactaggccactgggagctggggtctttcaaagcactttgtaaaccgaggaatttagttagaggttataaattgctctaagctgctttctgtttttttttaatatgcgataatatgaagctttatatgtgtactgtgaacttaaatatttcatatcagtttattgtcaattcatagtatgctaaatatattagatttcatattctgaaactagtacttatgaaatgagtgtttatctagtagtaagacctaggatttttacattttccaattaagtgcaaatagtatttataagcagagtgattatggattgagatgtttttaacttgatggaaggagctagttttcctgagcctgtgtgtgcaccaggcactggggctgatgttccagcctcgtggcgtgggagcaggagagctccgtcctgcatttctgtggtccgtggccgctgtttctgtgcgcctgcgcctcggagagcaagtgaaggagcatcatgggttttgttttctcccttaaccctctgaaagacagtttgatactaacaaaaaacgcagcagaggggatccgacgtcagagcttttagaattacttttttaagcagctgtcttctggctgggtgcggtggctcatgcctgtgatcccagcactttgggaggcgggtggatcacctaaggtcaggagttcaagaccagcctggccaacatggtgcaaccccgtcttagtaaaaatacaaaaattggcctggcgtgagagcgggcacctgtagtcccagctactcgggaggctgaggcaggagaatcgcttgaacctgggaggcagaggttgcagtgagccgagatcgcgccaccgcactccagcccgggtgacagagcgagactctggctcaaaaaaaaaaaaaaaaagctgttttctgattactcagagctgtcctaggcaatggtgctttgtagctccttggagatgtcgctgggcgtcctggcaggggtcaggcagtgaactgggagagtggttgcctccccagcacccgtgaccaccctggtcctgctcgtgtgggagatgctcgggccgtgtgtgcgccagggtccggggtgccgggtgtatgtggcagtcacctgacccgcgctgccagttatcatcggagctcatccatgtggccagtgaggtcacaggagaggacccggccacagcctctcagtggcctggagcacacgggggaagcgaccccccccaggtcccggctctgctgtggtcccctgtcccgtctgcccctggagcgacagtgtggtttcggccgcagcagaaacgtgactgagaacgcatccccgcgatgacctgacccttctgctcagggctgggactgtccctaggagttgagcaggaacaggcatctgtggtttacggcgacctggctctccgcgggccacgtgggtggtgagggcacacgagtgggaagcggcaccgacgtgtttctccccgaccgtggctttgccaaagacttttaatagcattttttaagtgcaaaacgtctaggtaaaaatctttatcatcagtgaccaaattagaatgtatttaatatagtaggtggtttaagaactgttttaacgtaagacaaactgatagcaacattctgttgttttaaaggaagtgggtccgtgacattctgcagctagtccactactccaaggtaactatcgacttggtttcagtgaatctattttgtttttaactacagtgatttattagctcagtatctagaaattacgtatattttgtgctactgtcatcgatgtgtaaactctgtttttatttgtatttatgcacttggttcccatttggagcctctggtcttttctgggataagtggtgtctgccgagacatctcccggttgtcagtggtcaggagcagctgagctctagtctgccagctgctctgctctttctgggaaggaggtggcgcccgcccctcagggtgtctccagggctcagcttccggggtggtagagctggggagccccaggggtggggggacagctgggagatggaggtggcacctgctcccctagatcagtactggctctgaggacaggtgagcagtgggaagaccaaagaatggctggcagcgctgccagggttggaaatgggggcaagatcctggggctgtgtgccctggggcctccctcacctgtcttggtggccatggcctcagggatggctcctaggtggctgaggcacagcagtggctggaaggtgccccgtggaggctgaggtggaggcgcgcccagcagctcccccctgtggccatggcgggcacggggcgtaggagctggctggcggccggctctgcatgttcttgttgcctgtcgtctgtaactctagtgttcgacattcgccgtgatacagtggtgtcacgacgtgtgtaactgtggtcagcagaccttgttccgcgtggacgcctcaagtggattaatttctggaagcctcaatctgtatgtttgagtatttacatgagaatgttatttgaatggaattttcttaacccagaaggtagtatttataatcatttacttgtagcgaactgtttaaagttaacacttgtttaaatttttttacactatagcatttatgcaatggtttacagaattcatggagttatttttatcagtatgggaattaattaaaaccttgaatcttt

SEQ ID NO: 198261 - DNA, 1431 bp, Homo sapiens
  Payload ID: 19119
  Gene Name: unkempt family zinc finger-like
  Uniprot ID: Q9H9P5
  ENST ID: ENST00000301712
  CDS Start-End: 61-894
ggatatccgggggcgggggcgccggcgcggcgcatgcgcgctgcattgttttgactgaaaatgccgtcggtttcgaaagcggcggcagcggcgctgagcgggtcccccccgcagactgagaagccgacccactacaggtacctgaaggagttcaggacggagcagtgccccctgttttcacagcacaagtgcgcgcagcaccggccgttcacctgcttccactggcacttcctcaaccagcggcgccgcaggcccctccgcaggcgcgacggcaccttcaactacagccccgacgtgtactgctccaagtacaacgaagccaccggcgtgtgccccgacggcgacgagtgtccctacctgcaccggacgacgggggacacagaacgcaagtaccacctgcgttactacaaaacaggaacctgcatccacgagacagacgcacgtggccactgcgtgaagaatgggctgcactgtgccttcgcgcacggccccctggacctgcggccgcccgtgtgtgacgtcagggagctgcaggcccaggaagccttgcagaacggccagctgggcggcggggaaggggtcccggatctgcagcctggggtcttggccagccaggccatgattgagaagatcctgagcgaggacccccggtggcaagatgccaacttcgtgctgggcagctacaagacggagcagtgcccgaagccgccacgcctgtgccgccagggctatgcgtgcccacactaccacaatagccgggacaggcggcgcaacccccggcggttccagtacagctggcagctgggacgccgggtccttaggctgagtcccagggccaacaacccaagggtcgccctgcccagggtgcacacaggaccttcctccaccgcctgagccccagctgtcccctgggtctggcttgtgggtttggcacctcgcagcctgcttgcctctgaagcccctttctcctccttgctccagcccggccttctggttgtgcctggcctggcttgcctcctgtctgcagtttgcacctgagaggggggtgggggggtgcagaccccacagggtgtctggatgcctgggccatggccttggcctccctgaggccctgtctgtgtccagctcttcctttgagcagagagccaccctcgcctcttttgaatgacctggtgctgcctcgcatgccccggagagcacctgtgcttcctttgggaaggacgccccactccttgttgttatgccacgttcagtctccctctgagcagcttccgagtaaaggacctgaacggctgtagaacaaaccacaaattagtgtctgagattttgtcatcgcccgtcatggaaagaaaataaaaattattttttcaacaggcacttaatgtgtcccataaatacaaatcagttacaataaagcagctagagattcca

SEQ ID NO: 198262 - DNA, 897 bp, Homo sapiens
  Payload ID: 19119
  Gene Name: unkempt family zinc finger-like
  ENST ID: ENST00000382757
  CDS Start-End: 7-357
ctgaaaatgccgtcggtttcgaaagcggcggcagcggcgctgagcgggtcccccccgcagactgagaagccgacccactacagcacaagtgcgcgcagcaccggccgttcacctgcttccactggcacttcctcaaccagcggcgccgcaggcccctccgcaggcgcgacggcaccttcaactacagccccgacgtgtactgctccaagtacaacgaagccaccggcgtgtgccccgacggcgacgagtgtccctacctgcaccggacgacgggggacacagaacgcaagtaccacctgcgttactacaaaacaggaacctgcatccacgagacagacgcacgtggccactgcgtgaagaatgggctgcactgtgccttcgcgcacggccccctggacctgcggccgcccgtgtgtgacgtcagggagctgcaggcccaggaagccttgcagaacggccagctgggcggcggggaaggggtcccggatctgcagcctggggtcttggccagccaggccatgattgagaagatcctgagcgaggacccccggtggcaagatgccaacttcgtgctgggcagctacaagacggagcagtgcccgaagccgccacgcctgtgccgccagggctatgcgtgcccacactaccacaatagccgggacaggcggcgcaacccccggcggttccagtacaggtccacgccctgccccagtgtgaagcacggggatgagtggggggaaccctcacgctgcgatggcggcgacggctgccagtattgccactcccgcacggagcagcagttccatcccgagatctacaaatctacaaaatgcaacgacatgcgccaaaccgggtactgcccgcgcggccccttctgtgcctttgcacacgttgaga

SEQ ID NO: 198263 - DNA, 5116 bp, Homo sapiens
  Payload ID: 19119
  Gene Name: unkempt family zinc finger-like
  ENST ID: ENST00000389221
  CDS Start-End: 30-2081
gcatgcgcgctgcattgttttgactgaaaatgccgtcggtttcgaaagcggcggcagcggcgctgagcgggtcccccccgcagactgagaagccgacccactacaggtacctgaaggagttcaggacggagcagtgccccctgttttcacagcacaagtgcgcgcagcaccggccgttcacctgcttccactggcacttcctcaaccagcggcgccgcaggcccctccgcaggcgcgacggcaccttcaactacagccccgacgtgtactgctccaagtacaacgaagccaccggcgtgtgccccgacggcgacgagtgtccctacctgcaccggacgacgggggacacagaacgcaagtaccacctgcgttactacaaaacaggaacctgcatccacgagacagacgcacgtggccactgcgtgaagaatgggctgcactgtgccttcgcgcacggccccctggacctgcggccgcccgtgtgtgacgtcagggagctgcaggcccaggaagccttgcagaacggccagctgggcggcggggaaggggtcccggatctgcagcctggggtcttggccagccaggccatgattgagaagatcctgagcgaggacccccggtggcaagatgccaacttcgtgctgggcagctacaagacggagcagtgcccgaagccgccacgcctgtgccgccagggctatgcgtgcccacactaccacaatagccgggacaggcggcgcaacccccggcggttccagtacaggtccacgccctgccccagtgtgaagcacggggatgagtggggggaaccctcacgctgcgatggcggcgacggctgccagtattgccactcccgcacggagcagcagttccatcccgagatctacaaatctacaaaatgcaacgacatgcgccaaaccgggtactgcccgcgcggccccttctgtgcctttgcacacgttgagaagagcctggggatggtgaatgaatggggctgtcacgacctccacctcacgagtccttcctccacgggcagcggccagccgggaaatgccaagcggagagactcgccggccgagggtggccctaggggcagcgagcaagacagcaagcagaaccacctggccgtgtttgcagcggtccacccgccggcccccagcgtgagctccagcgtggcgtccagcctggcgtccagcgccggctccggcagctcctcccccactgcgctgcccgcgccccccgcccgtgccctcccgctcggccccgccagcagcactgtggaggccgtcctcggttctgcgttagacctgcatcttagcaatgtgaatattgcatccctagagaaggacctggaagagcaagacggccacgacctgggagcagcaggtcccaggtcgctggccggctctgcacctgtcgccatccccggctccctgcccagagcaccatcgctacactcgccatcctctgcgtccacctcgccgctcggttcgctgtcccagcccctcccagggccggtgggctcctcagccatgacgcctccccagcagccgccacccctgcgttcagagccgggcacactgggctctgcagcctcatcctacagccccctaggtttgaacggtgtccccgggagcatctgggactttgtttccggcagcttctcccccagcccctcccccatcctgagtgccggccccccatcctcttcgagtgcaagtccaaacggagctgagctggcccgggtcaggcggcagctggacgaggccaagaggaagatccggcagtgggaggagtcctggcagcaggtgaagcaggtctgcgatgcctggcagcgagaggcgcaggaggccaaggagcgtgcccgtgtggccgatagcgaccggcagctggcgctgcagaagaaggaggaggtggaggcacaggtgatcttccagctccgcgccaagcagtgtgtggcctgccgggagcgggcccacggtgctgtcctgcggccctgtcagcaccacatcctctgtgagccgtgtgcggccaccgcacctgagtgcccctactgcaagggccagcccctgcagtggtgacctcagcggggacagccacctcctgctgggcaccctggctccagcgctcctcctgaccacggacatgtcgtcactcgcttctggtgccaccgacgtgaggaccgaggctgggagcccttcctgttacacgttatcatgaggctgggagccccgcctgcgcttggcctgacagcctttcctgtcacacgttgtcacctatctagtcctaccgacggtttcaaggtattttcctcaaaaaccttaaatgcaaacccacagaacccgcctgcctgtccctgaggggcctggtgcctccgggatccacgcggcgctgtgatcacagcagtttgtggtcctgacactactgtgactaggccactgggagctggggtctttcaaagcactttgtaaaccgaggaatttagttagaggttataaattgctctaagctgctttctgtttttttttaatatgcgataatatgaagctttatatgtgtactgtgaacttaaatatttcatatcagtttattgtcaattcatagtatgctaaatatattagatttcatattctgaaactagtacttatgaaatgagtgtttatctagtagtaagacctaggatttttacattttccaattaagtgcaaatagtatttataagcagagtgattatggattgagatgtttttaacttgatggaaggagctagttttcctgagcctgtgtgtgcaccaggcactggggctgatgttccagcctcgtggcgtgggagcaggagagctccgtcctgcatttctgtggtccgtggccgctgtttctgtgcgcctgcgcctcggagagcaagtgaaggagcatcatgggttttgttttctcccttaaccctctgaaagacagtttgatactaacaaaaaacgcagcagaggggatccgacgtcagagcttttagaattacttttttaagcagctgtcttctggctgggtgcggtggctcatgcctgtgatcccagcactttgggaggcgggtggatcacctaaggtcaggagttcaagaccagcctggccaacatggtgcaaccccgtcttagtaaaaatacaaaaattggcctggcgtgagagcgggcacctgtagtcccagctactcgggaggctgaggcaggagaatcgcttgaacctgggaggcagaggttgcagtgagccgagatcgcgccaccgcactccagcccgggtgacagagcgagactctggctcaaaaaaaaaaaaaaaaagctgttttctgattactcagagctgtcctaggcaatggtgctttgtagctccttggagatgtcgctgggcgtcctggcaggggtcaggcagtgaactgggagagtggttgcctccccagcacccgtgaccaccctggtcctgctcgtgtgggagatgctcgggccgtgtgtgcgccagggtccggggtgccgggtgtatgtggcagtcacctgacccgcgctgccagttatcatcggagctcatccatgtggccagtgaggtcacaggagaggacccggccacagcctctcagtggcctggagcacacgggggaagcgaccccccccaggtcccggctctgctgtggtcccctgtcccgtctgcccctggagcgacagtgtggtttcggccgcagcagaaacgtgactgagaacgcatccccgcgatgacctgacccttctgctcagggctgggactgtccctaggagttgagcaggaacaggcatctgtggtttacggcgacctggctctccgcgggccacgtgggtggtgagggcacacgagtgggaagcggcaccgacgtgtttctccccgaccgtggctttgccaaagacttttaatagcattttttaagtgcaaaacgtctaggtaaaaatctttatcatcagtgaccaaattagaatgtatttaatatagtaggtggtttaagaactgttttaacgtaagacaaactgatagcaacattctgttgttttaaaggaagtgggtccgtgacattctgcagctagtccactactccaaggtaactatcgacttggtttcagtgaatctattttgtttttaactacagtgatttattagctcagtatctagaaattacgtatattttgtgctactgtcatcgatgtgtaaactctgtttttatttgtatttatgcacttggttcccatttggagcctctggtcttttctgggataagtggtgtctgccgagacatctcccggttgtcagtggtcaggagcagctgagctctagtctgccagctgctctgctctttctgggaaggaggtggcgcccgcccctcagggtgtctccagggctcagcttccggggtggtagagctggggagccccaggggtggggggacagctgggagatggaggtggcacctgctcccctagatcagtactggctctgaggacaggtgagcagtgggaagaccaaagaatggctggcagcgctgccagggttggaaatgggggcaagatcctggggctgtgtgccctggggcctccctcacctgtcttggtggccatggcctcagggatggctcctaggtggctgaggcacagcagtggctggaaggtgccccgtggaggctgaggtggaggcgcgcccagcagctcccccctgtggccatggcgggcacggggcgtaggagctggctggcggccggctctgcatgttcttgttgcctgtcgtctgtaactctagtgttcgacattcgccgtgatacagtggtgtcacgacgtgtgtaactgtggtcagcagaccttgttccgcgtggacgcctcaagtggattaatttctggaagcctcaatctgtatgtttgagtatttacatgagaatgttatttgaatggaattttcttaacccagaaggtagtatttataatcatttacttgtagcgaactgtttaaagttaacacttgtttaaatttttttacactatagcatttatgcaatggtttacagaattcatggagttatttttatcagtatgggaattaattaaaaccttgaatcttt

SEQ ID NO: 198264 - DNA, 2180 bp, Homo sapiens
  Payload ID: 19119
  Gene Name: unkempt family zinc finger-like
  Uniprot ID: Q9H9P5
  ENST ID: ENST00000397464
  CDS Start-End: 391-939
tttgaatccccggcggcggcgcggggcggccgcggaccgtgagtcagcattggcggcggccccagcgcgtggcagccgtgcgccgccaaggtgcgggtctcgttactcggcggtcaggagcgggccctcccttaggtgcgccccccgccaggttctgcgttagacctgcatcttagcaatgtgaatattgcatccctagagaaggacctggaagagcaagacggccacgacctgggagcagcaggtcccaggtcgctggccggctctgcacctgtcgccatccccggctccctgcccagagcaccatcgctacactcgccatcctctgcgtccacctcgccgctcggttcgctgtcccagcccctcccagggccggtgggctcctcagccatgacgcctccccagcagccgccacccctgcgttcagagccgggcacactgggctctgcagcctcatcctacagccccctaggtttgaacggtgtccccgggagcatctgggactttgtttccggcagcttctcccccagcccctcccccatcctgagtgccggccccccatcctcttcgagtgcaagtccaaacggagctgagctggcccgggtcaggcggcagctggacgaggccaagaggaagatccggcagtgggaggagtcctggcagcaggtgaagcaggtctgcgatgcctggcagcgagaggcgcaggaggccaaggagcgtgcccgtgtggccgatagcgaccggcagctggcgctgcagaagaaggaggaggtggaggcacaggtgatcttccagctccgcgccaagcagtgtgtggcctgccgggagcgggcccacggtgctgtcctgcggccctgtcagcaccacatcctctgtgagccgtgtgcggccaccgcacctgagtgcccctactgcaagggccagcccctgcagtggtgacctcagcggggacagccacctcctgctgggcaccctggctccagcgctcctcctgaccacggacatgtcgtcactcgcttctggtgccaccgacgtgaggaccgaggctgggagcccttcctgttacacgttatcatgaggctgggagccccgcctgcgcttggcctgacagcctttcctgtcacacgttgtcacctatctagtcctaccgacggtttcaaggtattttcctcaaaaaccttaaatgcaaacccacagaacccgcctgcctgtccctgaggggcctggtgcctccgggatccacgcggcgctgtgatcacagcagtttgtggtcctgacactactgtgactaggccactgggagctggggtctttcaaagcactttgtaaaccgaggaatttagttagaggttataaattgctctaagctgctttctgtttttttttaatatgcgataatatgaagctttatatgtgtactgtgaacttaaatatttcatatcagtttattgtcaattcatagtatgctaaatatattagatttcatattctgaaactagtacttatgaaatgagtgtttatctagtagtaagacctaggatttttacattttccaattaagtgcaaatagtatttataagcagagtgattatggattgagatgtttttaacttgatggaaggagctagttttcctgagcctgtgtgtgcaccaggcactggggctgatgttccagcctcgtggcgtgggagcaggagagctccgtcctgcatttctgtggtccgtggccgctgtttctgtgcgcctgcgcctcggagagcaagtgaaggagcatcatgggttttgttttctcccttaaccctctgaaagacagtttgatactaacaaaaaacgcagcagaggggatccgacgtcagagcttttagaattacttttttaagcagctgtcttctggctgggtgcggtggctcatgcctgtgatcccagcactttgggaggcgggtggatcacctaaggtcaggagttcaagaccagcctggccaacatggtgcaaccccgtcttagtaaaaatacaaaaattggcctggcgtgagagcgggcacctgtagtcccagctactcgggaggctgaggcaggagaatcgcttgaacctgggaggcagaggttgcagtgagccgagatcgcgccaccgcactccagcccgggtgacagagcgagactctggctcaaaaaaaaaaaaa

SEQ ID NO: 198265 - DNA, 669 bp, Homo sapiens
  Payload ID: 19119
  Gene Name: unkempt family zinc finger-like
  ENST ID: ENST00000402641
  CDS Start-End: 327-669
gaatccccggcggcggcgcggggcggccgcggaccgtgagtcagcattggcggcggccccagcgcgtggcagccgtgcgccgccaaggttctgcgttagacctgcatcttagcaatgtgaatattgcatccctagagaaggacctggaagagcaagacggccacgacctgggagcagcaggtcccaggtcgctggccggctctgcacctgtcgccatccccggctccctgcccagagcaccatcgctacactcgccatcctctgcgtccacctcgccgctcggttcgctgtcccagcccctcccagggccggtgggctcctcagccatgacgcctccccagcagccgccacccctgcgttcagagccgggcacactgggctctgcagcctcatcctacagccccctaggtttgaacggtgtccccgggagcatctgggactttgtttccggcagcttctcccccagcccctcccccatcctgagtgccggccccccatcctcttcgagtgcaagtccaaacggagctgagctggcccgggtcaggcggcagctggacgaggccaagaggaagatccggcagtgggaggagtcctggcagcaggtgaagcaggtctgcgatgcctggcagcgagaggcgcaggaggccaaggagcgtgcccgtgtggccg

SEQ ID NO: 198266 - DNA, 4281 bp, Homo sapiens
  Payload ID: 19119
  Gene Name: unkempt family zinc finger-like
  ENST ID: ENST00000403703
  CDS Start-End: 353-511
gtgagtcagcattggcggcggccccagcgcgtggcagccgtgcgccgccaaggtgcgggtctcgttactcggcggtcaggagcgggccctcccttaggtgcgccccccgccaggttctgcgttagacctgcatcttagcaatgtgaatattgcatccctagagaaggacctggaagagcaagacggccacgacctgggagcagcaggtcccaggtcgctggccggctctgcacctgtcgccatccccggctccctgcccagagcaccatcgctacactcgccatcctctgcgtccacctcgccgctcggttcgctgtcccagcccctcccagggccggtgggctcctcagccatgacgcctccccagcagccgccacccctgcgttcagagccgggcacactgggctctgcagcctcatcctacagccccctaggtgagtgccggctccctccatgctggcgttgccgtgaagcctccgtggggctccctcccagatgccgtcctgactgaggggcctcacacggaaccttgtgccctatctgtggtggcaaaccacatgacctgctgctcacaggttcccccacgccgcagaccgagtctcgctctgtcgcccaggttggactgcaatggtttgaacggtgtccccgggagcatctgggactttgtttccggcagcttctcccccagcccctcccccatcctgagtgccggccccccatcctcttcgagtgcaagtccaaacggagctgagctggcccgggtcaggcggcagctggacgaggccaagaggaagatccggcagtgggaggagtcctggcagcaggtgaagcaggtctgcgatgcctggcagcgagaggcgcaggaggccaaggagcgtgcccgtgtggccgatagcgaccggcagctggcgctgcagaagaaggaggaggtggaggcacaggtgaagcagctgcaggaggagctggagggcctgggcgtagcctccacactgccggggctgcggggctgtggggacatcggcaccattcccctgccgaagctgcactcgctgcagagtcagctgcgcctggacctggaggcggtggacggcgtgatcttccagctccgcgccaagcagtgtgtggcctgccgggagcgggcccacggtgctgtcctgcggccctgtcagcaccacatcctctgtgagccgtgtgcggccaccgcacctgagtgcccctactgcaagggccagcccctgcagtggtgacctcagcggggacagccacctcctgctgggcaccctggctccagcgctcctcctgaccacggacatgtcgtcactcgcttctggtgccaccgacgtgaggaccgaggctgggagcccttcctgttacacgttatcatgaggctgggagccccgcctgcgcttggcctgacagcctttcctgtcacacgttgtcacctatctagtcctaccgacggtttcaaggtattttcctcaaaaaccttaaatgcaaacccacagaacccgcctgcctgtccctgaggggcctggtgcctccgggatccacgcggcgctgtgatcacagcagtttgtggtcctgacactactgtgactaggccactgggagctggggtctttcaaagcactttgtaaaccgaggaatttagttagaggttataaattgctctaagctgctttctgtttttttttaatatgcgataatatgaagctttatatgtgtactgtgaacttaaatatttcatatcagtttattgtcaattcatagtatgctaaatatattagatttcatattctgaaactagtacttatgaaatgagtgtttatctagtagtaagacctaggatttttacattttccaattaagtgcaaatagtatttataagcagagtgattatggattgagatgtttttaacttgatggaaggagctagttttcctgagcctgtgtgtgcaccaggcactggggctgatgttccagcctcgtggcgtgggagcaggagagctccgtcctgcatttctgtggtccgtggccgctgtttctgtgcgcctgcgcctcggagagcaagtgaaggagcatcatgggttttgttttctcccttaaccctctgaaagacagtttgatactaacaaaaaacgcagcagaggggatccgacgtcagagcttttagaattacttttttaagcagctgtcttctggctgggtgcggtggctcatgcctgtgatcccagcactttgggaggcgggtggatcacctaaggtcaggagttcaagaccagcctggccaacatggtgcaaccccgtcttagtaaaaatacaaaaattggcctggcgtgagagcgggcacctgtagtcccagctactcgggaggctgaggcaggagaatcgcttgaacctgggaggcagaggttgcagtgagccgagatcgcgccaccgcactccagcccgggtgacagagcgagactctggctcaaaaaaaaaaaaaaaaagctgttttctgattactcagagctgtcctaggcaatggtgctttgtagctccttggagatgtcgctgggcgtcctggcaggggtcaggcagtgaactgggagagtggttgcctccccagcacccgtgaccaccctggtcctgctcgtgtgggagatgctcgggccgtgtgtgcgccagggtccggggtgccgggtgtatgtggcagtcacctgacccgcgctgccagttatcatcggagctcatccatgtggccagtgaggtcacaggagaggacccggccacagcctctcagtggcctggagcacacgggggaagcgaccccccccaggtcccggctctgctgtggtcccctgtcccgtctgcccctggagcgacagtgtggtttcggccgcagcagaaacgtgactgagaacgcatccccgcgatgacctgacccttctgctcagggctgggactgtccctaggagttgagcaggaacaggcatctgtggtttacggcgacctggctctccgcgggccacgtgggtggtgagggcacacgagtgggaagcggcaccgacgtgtttctccccgaccgtggctttgccaaagacttttaatagcattttttaagtgcaaaacgtctaggtaaaaatctttatcatcagtgaccaaattagaatgtatttaatatagtaggtggtttaagaactgttttaacgtaagacaaactgatagcaacattctgttgttttaaaggaagtgggtccgtgacattctgcagctagtccactactccaaggtaactatcgacttggtttcagtgaatctattttgtttttaactacagtgatttattagctcagtatctagaaattacgtatattttgtgctactgtcatcgatgtgtaaactctgtttttatttgtatttatgcacttggttcccatttggagcctctggtcttttctgggataagtggtgtctgccgagacatctcccggttgtcagtggtcaggagcagctgagctctagtctgccagctgctctgctctttctgggaaggaggtggcgcccgcccctcagggtgtctccagggctcagcttccggggtggtagagctggggagccccaggggtggggggacagctgggagatggaggtggcacctgctcccctagatcagtactggctctgaggacaggtgagcagtgggaagaccaaagaatggctggcagcgctgccagggttggaaatgggggcaagatcctggggctgtgtgccctggggcctccctcacctgtcttggtggccatggcctcagggatggctcctaggtggctgaggcacagcagtggctggaaggtgccccgtggaggctgaggtggaggcgcgcccagcagctcccccctgtggccatggcgggcacggggcgtaggagctggctggcggccggctctgcatgttcttgttgcctgtcgtctgtaactctagtgttcgacattcgccgtgatacagtggtgtcacgacgtgtgtaactgtggtcagcagaccttgttccgcgtggacgcctcaagtggattaatttctggaagcctcaatctgtatgtttgagtatttacatgagaatgttatttgaatggaattttcttaacccagaaggtagtatttataatcatttacttgtagcgaactgtttaaagttaacacttgtttaaatttttttacactatagcatttatgcaatggtttacagaattcatggagttatttttatcagtatgggaattaattaaaaccttgaatctt

SEQ ID NO: 198267 - DNA, 3430 bp, Homo sapiens
  Payload ID: 19119
  Gene Name: unkempt family zinc finger-like
  ENST ID: ENST00000508903
  CDS Start-End: 1-2202
atgccgtcggtttcgaaagcggcggcagcggcgctgagcgggtcccccccgcagactgagaagccgacccactacaggtacctgaaggagttcaggacggagcagtgccccctgttttcacagcacaagtgcgcgcagcaccggccgttcacctgcttccactggcacttcctcaaccagcggcgccgcaggcccctccgcaggcgcgacggcaccttcaactacagccccgacgtgtactgctccaagtacaacgaagccaccggcgtgtgccccgacggcgacgagtgtccctacctgcaccggacgacgggggacacagaacgcaagtaccacctgcgttactacaaaacaggaacctgcatccacgagacagacgcacgtggccactgcgtgaagaatgggctgcactgtgccttcgcgcacggccccctggacctgcggccgcccgtgtgtgacgtcagggagctgcaggcccaggaagccttgcagaacggccagctgggcggcggggaaggggtcccggatctgcagcctggggtcttggccagccaggccatgattgagaagatcctgagcgaggacccccggtggcaagatgccaacttcgtgctgggcagctacaagacggagcagtgcccgaagccgccacgcctgtgccgccagggctatgcgtgcccacactaccacaatagccgggacaggcggcgcaacccccggcggttccagtacaggtccacgccctgccccagtgtgaagcacggggatgagtggggggaaccctcacgctgcgatggcggcgacggctgccagtattgccactcccgcacggagcagcagttccatcccgagatctacaaatctacaaaatgcaacgacatgcgccaaaccgggtactgcccgcgcggccccttctgtgcctttgcacacgttgagaagagcctggggatggtgaatgaatggggctgtcacgacctccacctcacgagtccttcctccacgggcagcggccagccgggaaatgccaagcggagagactcgccggccgagggtggccctaggggcagcgagcaagacagcaagcagaaccacctggccgtgtttgcagcggtccacccgccggcccccagcgtgagctccagcgtggcgtccagcctggcgtccagcgccggctccggcagctcctcccccactgcgctgcccgcgccccccgcccgtgccctcccgctcggccccgccagcagcactgtggaggccgtcctcggttctgcgttagacctgcatcttagcaatgtgaatattgcatccctagagaaggacctggaagagcaagacggccacgacctgggagcagcaggtcccaggtcgctggccggctctgcacctgtcgccatccccggctccctgcccagagcaccatcgctacactcgccatcctctgcgtccacctcgccgctcggttcgctgtcccagcccctcccagggccggtgggctcctcagccatgacgcctccccagcagccgccacccctgcgttcagagccgggcacactgggctctgcagcctcatcctacagccccctaggtttgaacggtgtccccgggagcatctgggactttgtttccggcagcttctcccccagcccctcccccatcctgagtgccggccccccatcctcttcgagtgcaagtccaaacggagctgagctggcccgggtcaggcggcagctggacgaggccaagaggaagatccggcagtgggaggagtcctggcagcaggtgaagcaggtctgcgatgcctggcagcgagaggcgcaggaggccaaggagcgtgcccgtgtggccgatagcgaccggcagctggcgctgcagaagaaggaggaggtggaggcacaggtgaagcagctgcaggaggagctggagggcctgggcgtagcctccacactgccggggctgcggggctgtggggacatcggcaccattcccctgccgaagctgcactcgctgcagagtcagctgcgcctggacctggaggcggtggacggcgtgatcttccagctccgcgccaagcagtgtgtggcctgccgggagcgggcccacggtgctgtcctgcggccctgtcagcaccacatcctctgtgagccgtgtgcggccaccgcacctgagtgcccctactgcaagggccagcccctgcagtggtgacctcagcggggacagccacctcctgctgggcaccctggctccagcgctcctcctgaccacggacatgtcgtcactcgcttctggtgccaccgacgtgaggaccgaggctgggagcccttcctgttacacgttatcatgaggctgggagccccgcctgcgcttggcctgacagcctttcctgtcacacgttgtcacctatctagtcctaccgacggtttcaaggtattttcctcaaaaaccttaaatgcaaacccacagaacccgcctgcctgtccctgaggggcctggtgcctccgggatccacgcggcgctgtgatcacagcagtttgtggtcctgacactactgtgactaggccactgggagctggggtctttcaaagcactttgtaaaccgaggaatttagttagaggttataaattgctctaagctgctttctgtttttttttaatatgcgataatatgaagctttatatgtgtactgtgaacttaaatatttcatatcagtttattgtcaattcatagtatgctaaatatattagatttcatattctgaaactagtacttatgaaatgagtgtttatctagtagtaagacctaggatttttacattttccaattaagtgcaaatagtatttataagcagagtgattatggattgagatgtttttaacttgatggaaggagctagttttcctgagcctgtgtgtgcaccaggcactggggctgatgttccagcctcgtggcgtgggagcaggagagctccgtcctgcatttctgtggtccgtggccgctgtttctgtgcgcctgcgcctcggagagcaagtgaaggagcatcatgggttttgttttctcccttaaccctctgaaagacagtttgatactaacaaaaaacgcagcagaggggatccgacgtcagagcttttagaattacttttttaagcagctgtcttctggctgggtgcggtggctcatgcctgtgatcccagcactttgggaggcgggtggatcacctaaggtcaggagttcaagaccagcctggccaacatggtgcaaccccgtcttagtaaaaatacaaaaattggcctggcgtgagagcgggcacctgtagtcccagctactcgggaggctgaggcaggagaatcgcttgaacctgggaggcagaggttgcagtgagccgagatcgcgccaccgcactccagcccgggtgacagagcgagactctggctc

SEQ ID NO: 198268 - DNA, 582 bp, Homo sapiens
  Payload ID: 19119
  Gene Name: unkempt family zinc finger-like
  ENST ID: ENST00000513783
  CDS Start-End: 355-582
aatgtgctgtgtcacggcagagccgggctgtgtcgcggtgactcagcggggccggtggtttcctaacgcccggggctgaggcagcctggcctgacccagctgtactcgcttaggtgaccagcctcacctagattttgcctctgcacaagggtcagctctttctttgagaatgtttcagaagatctgggtctaaccttgaaacagtgaggtcccaggtcgctggccggctctgcacctgtcgccatccccggctccctgcccagagcaccatcgctacactcgccatcctctgcgtccacctcgccgctcggttcgctgtcccagcccctcccagggccggtgggctcctcagccatgacgcctccccagcagccgccacccctgcgttcagagccgggcacactgggctctgcagcctcatcctacagccccctaggtttgaacggtgtccccgggagcatctgggactttgtttccggcagcttctcccccagcccctcccccatcctgagtgccggccccccatcctcttcgagtgcaagtccaaacggagctgagctggcccgggtcaggcggcagctg

SEQ ID NO: 198269 - DNA, 2301 bp, Homo sapiens
  Payload ID: 19120
  Gene Name: UPF0704 protein C6orf165 [Source:UniProtKB/Swiss-Prot
  Acc:Q8IYR0]
  Uniprot ID: Q8IYR0
  ENST ID: ENST00000507897
  CDS Start-End: 84-1952
caactgctccgaccgtcgcggtgagggccccaggacagaagcagacagacacggctcctgctgtcgattccgatccagccagaatgcctccaactcaggccgaaagtgttataaggagtattatacgagaaataggacaagaatgtgcagcccatggagagattgtttctgaaactctgattgcttttatggtgaaagctgttgtcctggatccaagtaatggctttaacatggatagaaccctcatgaaaagtgatgtgcagaatcttgttaagctttgtatgactcggctattggatactaaaaatccatccctggacactattaagatgcaagtctacttcgatatgaattatacgaatcgagtggaatttctcgaagaacatcaccgggtcctagagtctagattaggctctgttacccgagaaattacagataacagagcatgtgctaaagaagaattggaaagcctctaccggaagattatcagctatgtgttactccgctctggccttggatcccctacagacatcaagactgtcagagaggtaacagctgctctacagagtgtttttcctcaggcagagcttgggacatttctaactctttctaagaaggacaaagaacgccagctgaaagaactcaccatgattgttactggaattcgtttatttaacagagactgtggaaaaggaggagaaggcattgatgatttgccagctgttctccatgtagcaatcccagccaccatgcagcatattgattaccagcttgagactgcccggagccaggtataccgctacacagccatccttgagaaggcagccaacgacccactcatgagggctgaacttcagccatatatgttaaaagaagcgctatataatatacgacaatatgaggtcttccttcagatcattttgtcagatataattactggtgctcaagaagtggaaatgatgacaaaacagttaggagcccatctggaacaactaaaaatgaccataaaatcaaagatagcggtcccaacatcacaagtctttcctatcttcattgcactttctactctgtggaccagcttgcaagacgaaactattgtggttggtgtcctcagtaatttattcactcacattcagccattcttgggtgctcacgaactatactttcctgagagagtgatgcaatgtcatcttaatggagcgactgtgaaaactgatgtgtgtagaatgaaagaacacatggaagatagagtaaatgtggcagatttcagaaaactagaatggcttttcccagaaacaacagcaaattttgataaactgttaattcaatatcggggattttgtgcttacacgtttgctgcaacagatggtcttctccttccaggaaatccagcaattggaattttaaaatataaagaaaaatattacacattcaatagtaaagatgctgcatattcatttgcagaaaatcctgaacattatattgacatagttagagaaaaggccaaaaaaaatacagagttaattcaactattggaacttcatcaacagtttgaaacatttattccatattctcagatgagagatgctgacaaacattatataaaaccaattacaaaatgtgaaagtagcacacagacgaatacacacatactgccaccaacgattgtgagatcatatgagtggaatgaatgggaattaagaagaaaagctataaaattggctaatttgcgccagaaagttactcactcagtacaaactgatcttagtcacttgagaagagaaaattgttcccaagtgtaccctccaaaggacactagcacccagtccatgagggaagacagcactggggtgcccaggcctcagatttacttggctggtcttcgtggaggaaagagcgaaatcaccgatgaggtcaaggtgaacttaactagagatgtggatgaaacctaattacagacaacgttttaaaatagatgctactcaattatgaacaatagcaagtacttaaagacaatgtcactttattattcaagttatactgcttggcagtgatgaccctgatggctgcagtctataccatagctttaagatacacaaggacatcagacaaagaactctacttttcaaccacagccgtgtgtatcacagaagttataaagttattgctaagtgtgggaattttagctaagaaaaacagatttgggggaaaaagatatcaacagtttgattttggtgacttggtaacctagccaaggattttatgcctcctagtagttcttgttagatcagtagctggaag

SEQ ID NO: 198270 - DNA, 5348 bp, Homo sapiens
  Payload ID: 19121
  Gene Name: UPF1 regulator of nonsense transcripts homolog (yeast)
  Uniprot ID: Q92900
  ENST ID: ENST00000262803
  CDS Start-End: 273-3629
ggcgacggcggcggtggcggcagttcctgctctaggctgcgagcggctggcggcttcgaggggagctgaggcgcggaggggctcggcggcagcggcggcggctcggcactgttacctctcggtccggctggcgccggggcgcgcggtttggtcctttccgggcgcgcgggggcgacagcggcagcgacccgaggcctgcggcctaggcctcagcgcggcggcgggctcgagtgcagcgcggaaccggcccgagggccctacccggaggcaccatgagcgtggaggcgtacgggcccagctcgcagactctcactttcctggacacggaggaggccgagctgcttggcgccgacacacagggctccgagttcgagttcaccgactttactcttcctagccagacgcagacgccccccggcggccccggcggcccgggcggtggcggcgcgggaggcccgggcggcgcgggcgcgggcgctgcggcgggacagctcgacgcgcaggttgggcccgaaggcatcctgcagaacggggctgtggacgacagtgtagccaagaccagccagttgttggctgagttgaacttcgaggaagatgaagaagacacctattacacgaaggacctccccatacacgcctgcagttactgtggaatacacgatcctgcctgcgtggtttactgtaataccagcaagaagtggttctgcaacggacgtggaaatacttctggcagccacattgtaaatcaccttgtgagggcaaaatgcaaagaggtgaccctgcacaaggacgggcccctgggggagacagtcctggagtgctacaactgcggctgtcgcaacgtcttcctcctcggcttcatcccggccaaagctgactcagtggtggtgctgctgtgcaggcagccctgtgccagccagagcagcctcaaggacatcaactgggacagctcgcagtggcagccgctgatccaggaccgctgcttcctgtcctggctggtcaagatcccctccgagcaggagcagctgcgggcacgccagatcacggcacagcagatcaacaagctggaggagctgtggaaggaaaacccttctgccacgctggaggacctggagaagccgggggtggacgaggagccgcagcatgtcctcctgcggtacgaggacgcctaccagtaccagaacatattcgggcccctggtcaagctggaggccgactacgacaagaagctgaaggagtcccagactcaagataacatcactgtcaggtgggacctgggccttaacaagaagagaatcgcctacttcactttgcccaagactgactctgacatgcggctcatgcagggggatgagatatgcctgcggtacaaaggggaccttgcgcccctgtggaaagggatcggccacgtcatcaaggtccctgataattatggcgatgagatcgccattgagctgcggagcagcgtgggtgcacctgtggaggtgactcacaacttccaggtggattttgtgtggaagtcgacctcctttgacaggatgcagagcgcattgaaaacgtttgccgtggatgagacctcggtgtctggctacatctaccacaagctgttgggccacgaggtggaggacgtaatcatcaagtgccagctgcccaagcgcttcacggcgcagggcctccccgacctcaaccactcccaggtttatgccgtgaagactgtgctgcaaagaccactgagcctgatccagggcccgccaggcacggggaagacggtgacgtcggccaccatcgtctaccacctggcccggcaaggcaacgggccggtgctggtgtgtgctccgagcaacatcgccgtggaccagctaacggagaagatccaccagacggggctaaaggtcgtgcgcctctgcgccaagagccgtgaggccatcgactccccggtgtcttttctggccctgcacaaccagatcaggaacatggacagcatgcctgagctgcagaagctgcagcagctgaaagacgagactggggagctgtcgtctgccgacgagaagcggtaccgggccttgaagcgcaccgcagagagagagctgctgatgaacgcagatgtcatctgctgcacatgtgtgggcgccggtgacccgaggctggccaagatgcagttccgctccattttaatcgacgaaagcacccaggccaccgagccggagtgcatggttcccgtggtcctcggggccaagcagctgatccttgtaggcgaccactgccagctgggcccagtggtgatgtgcaagaaggcggccaaggccgggctgtcacagtcgctcttcgagcgcctggtggtgctgggcatccggcccatccgcctgcaggtccagtaccggatgcaccctgcactcagcgccttcccatccaacatcttctacgagggctccctccagaatggtgtcactgcagcggatcgtgtgaagaagggatttgacttccagtggccccaacccgataaaccgatgttcttctacgtgacccagggccaagaggagattgccagctcgggcacctcctacctgaacaggaccgaggctgcgaacgtggagaagatcaccacgaagttgctgaaggcaggcgccaagccggaccagattggcatcatcacgccctacgagggccagcgctcctacctggtgcagtacatgcagttcagcggctccctgcacaccaagctctaccaggaggtggagatcgccagtgtggacgcctttcagggacgcgagaaggacttcatcatcctgtcctgtgtgcgggccaacgagcaccaaggcattggctttttaaatgaccccaggcgtctgaacgtggccctgaccagagcaaggtatggcgtcatcattgtgggcaacccgaaggcactatcaaagcagccgctctggaaccacctgctgaactactataaggagcagaaggtgctggtggaggggccgctcaacaacctgcgtgagagcctcatgcagttcagcaagccacggaagctggtcaacactatcaacccgggagcccgcttcatgaccacagccatgtatgatgcccgggaggccatcatcccaggctccgtctatgatcggagcagccagggccggccttccagcatgtacttccagacccatgaccagattggcatgatcagtgccggccctagccacgtggctgccatgaacattcccatccccttcaacctggtcatgccacccatgccaccgcctggctattttggacaagccaacgggcctgctgcagggcgaggcaccccgaaaggcaagactggtcgtgggggacgccagaagaaccgctttgggcttcctggacccagccagactaacctccccaacagccaagccagccaggatgtggcgtcacagcccttctctcagggcgccctgacgcagggctacatctccatgagccagccttcccagatgagccagcccggcctctcccagccggagctgtcccaggacagttaccttggtgacgagtttaaatcacaaatcgacgtggcgctctcacaggactccacgtaccagggagagcgggcttaccagcatggcggggtgacggggctgtcccagtattaaaaggtggcggcggaagagctaagcaacgtggcttagtccatcagcatcttattctgggtaataaaaaataaaaataaacggatacctgttttccactgctaaaactgaagcaccactgtgtgagcaacaggaagggagagcgcacgagggagaggagccgaggccgagcgccccctgctggcccgcggcggcgaggagcagagggagcggaggaggggccggcccgcgggagccgcggccaccaggaggccccgctccgtcccatcggggctgcggccagggcggagggaggaagaccctcatctcagagtagccctttcctctgttcttttatttctttttctctttgattgaaaggggactacgtcttagcaggaaaaaaaacttcgcatttctgtgcccgagcaggctccttgcaaagacagcagcgtgcggggcagagccccgggagggcgcgtctgtccacgcctaccggacgcgccgaggtcgcgctgcctgtgttctccgagggccttcatttaaagaaaataagggtgttttgggtttttctctttgtttttttcaagattcttttaaaggagtactgaagaatactttcctaagtttgtctgtaaaatcttagcggtggacctgggagatttgagaagcttccagaaacagtttaaacaagccagcgctactggagaagaggagcaacacctgtgccgcggccggaggagttttgttgttggttttagcttccagtggcttctttctgcggggcatcaggctgctggggtagccgcccgccgagcctggaagctgctcgttctccgctggactcagaagccaagctgcttcccgcctagactcggcgcagggccccgcaccggtgaggaaggtgcttttggccccattgcgaggggccttggccaggactggccctgtggccaggaggcgagaaggtggctgttcccggattgacggctttttcccgggggcctttggaagatttggtggaaggacaagagggcctgtccctgtccccgtccccaggaggtaccgacagtccctgtgctggttagacacggagcgctgcacaccgaaagcccaaattgggagctctgcctgccggcaactttgctgatggggtgattgctgcttctggggggtaaggaaacaagttacagaaattaccgcgttctgtgtgaagggactgagggtgtggtgtcattggcagagggtcattttaggagagctgccccagcccctcgaacgcctggcttggggtgtcattctgcctggcggccaggcctccagcttcccctgccccgggcctggggctgtcactggccctgatccgaacacctccagattccggcttctacatgggacagacggggacgcacaggccaccttccttctggcagggactcttatttattcccattgctctagggctttcggtttccccttcttccggtaggccgcgtagaggcatgcaccgggtaggtttccgcggtgaccccgcggcggcctgagggacgctccctgccccatcccggctgttgggctgggccgctttgcctctgcttcgccctgtgctgtgttctccagctttgtagcagcagccttgacaaacccaggcgcactgtaccaaggcaatgtaacttttgattttcggtcaatttaagttcttttgtcaccaaatattaataaacagttttgacttcacaccaa

SEQ ID NO: 198271 - DNA, 5311 bp, Homo sapiens
  Payload ID: 19121
  Gene Name: UPF1 regulator of nonsense transcripts homolog (yeast)
  Uniprot ID: Q92900
  ENST ID: ENST00000599848
  CDS Start-End: 210-3599
agctgaggcgcggaggggctcggcggcagcggcggcggctcggcactgttacctctcggtccggctggcgccggggcgcgcggtttggtcctttccgggcgcgcgggggcgacagcggcagcgacccgaggcctgcggcctaggcctcagcgcggcggcgggctcgagtgcagcgcggaaccggcccgagggccctacccggaggcaccatgagcgtggaggcgtacgggcccagctcgcagactctcactttcctggacacggaggaggccgagctgcttggcgccgacacacagggctccgagttcgagttcaccgactttactcttcctagccagacgcagacgccccccggcggccccggcggcccgggcggtggcggcgcgggaggcccgggcggcgcgggcgcgggcgctgcggcgggacagctcgacgcgcaggttgggcccgaaggcatcctgcagaacggggctgtggacgacagtgtagccaagaccagccagttgttggctgagttgaacttcgaggaagatgaagaagacacctattacacgaaggacctccccatacacgcctgcagttactgtggaatacacgatcctgcctgcgtggtttactgtaataccagcaagaagtggttctgcaacggacgtggaaatacttctggcagccacattgtaaatcaccttgtgagggcaaaatgcaaagaggtgaccctgcacaaggacgggcccctgggggagacagtcctggagtgctacaactgcggctgtcgcaacgtcttcctcctcggcttcatcccggccaaagctgactcagtggtggtgctgctgtgcaggcagccctgtgccagccagagcagcctcaaggacatcaactgggacagctcgcagtggcagccgctgatccaggaccgctgcttcctgtcctggctggtcaagatcccctccgagcaggagcagctgcgggcacgccagatcacggcacagcagatcaacaagctggaggagctgtggaaggaaaacccttctgccacgctggaggacctggagaagccgggggtggacgaggagccgcagcatgtcctcctgcggtacgaggacgcctaccagtaccagaacatattcgggcccctggtcaagctggaggccgactacgacaagaagctgaaggagtcccagactcaagataacatcactgtcaggtgggacctgggccttaacaagaagagaatcgcctacttcactttgcccaagactgactctggtaatgaggatttagtcataatttggttaagagacatgcggctcatgcagggggatgagatatgcctgcggtacaaaggggaccttgcgcccctgtggaaagggatcggccacgtcatcaaggtccctgataattatggcgatgagatcgccattgagctgcggagcagcgtgggtgcacctgtggaggtgactcacaacttccaggtggattttgtgtggaagtcgacctcctttgacaggatgcagagcgcattgaaaacgtttgccgtggatgagacctcggtgtctggctacatctaccacaagctgttgggccacgaggtggaggacgtaatcatcaagtgccagctgcccaagcgcttcacggcgcagggcctccccgacctcaaccactcccaggtttatgccgtgaagactgtgctgcaaagaccactgagcctgatccagggcccgccaggcacggggaagacggtgacgtcggccaccatcgtctaccacctggcccggcaaggcaacgggccggtgctggtgtgtgctccgagcaacatcgccgtggaccagctaacggagaagatccaccagacggggctaaaggtcgtgcgcctctgcgccaagagccgtgaggccatcgactccccggtgtcttttctggccctgcacaaccagatcaggaacatggacagcatgcctgagctgcagaagctgcagcagctgaaagacgagactggggagctgtcgtctgccgacgagaagcggtaccgggccttgaagcgcaccgcagagagagagctgctgatgaacgcagatgtcatctgctgcacatgtgtgggcgccggtgacccgaggctggccaagatgcagttccgctccattttaatcgacgaaagcacccaggccaccgagccggagtgcatggttcccgtggtcctcggggccaagcagctgatccttgtaggcgaccactgccagctgggcccagtggtgatgtgcaagaaggcggccaaggccgggctgtcacagtcgctcttcgagcgcctggtggtgctgggcatccggcccatccgcctgcaggtccagtaccggatgcaccctgcactcagcgccttcccatccaacatcttctacgagggctccctccagaatggtgtcactgcagcggatcgtgtgaagaagggatttgacttccagtggccccaacccgataaaccgatgttcttctacgtgacccagggccaagaggagattgccagctcgggcacctcctacctgaacaggaccgaggctgcgaacgtggagaagatcaccacgaagttgctgaaggcaggcgccaagccggaccagattggcatcatcacgccctacgagggccagcgctcctacctggtgcagtacatgcagttcagcggctccctgcacaccaagctctaccaggaggtggagatcgccagtgtggacgcctttcagggacgcgagaaggacttcatcatcctgtcctgtgtgcgggccaacgagcaccaaggcattggctttttaaatgaccccaggcgtctgaacgtggccctgaccagagcaaggtatggcgtcatcattgtgggcaacccgaaggcactatcaaagcagccgctctggaaccacctgctgaactactataaggagcagaaggtgctggtggaggggccgctcaacaacctgcgtgagagcctcatgcagttcagcaagccacggaagctggtcaacactatcaacccgggagcccgcttcatgaccacagccatgtatgatgcccgggaggccatcatcccaggctccgtctatgatcggagcagccagggccggccttccagcatgtacttccagacccatgaccagattggcatgatcagtgccggccctagccacgtggctgccatgaacattcccatccccttcaacctggtcatgccacccatgccaccgcctggctattttggacaagccaacgggcctgctgcagggcgaggcaccccgaaaggcaagactggtcgtgggggacgccagaagaaccgctttgggcttcctggacccagccagactaacctccccaacagccaagccagccaggatgtggcgtcacagcccttctctcagggcgccctgacgcagggctacatctccatgagccagccttcccagatgagccagcccggcctctcccagccggagctgtcccaggacagttaccttggtgacgagtttaaatcacaaatcgacgtggcgctctcacaggactccacgtaccagggagagcgggcttaccagcatggcggggtgacggggctgtcccagtattaaaaggtggcggcggaagagctaagcaacgtggcttagtccatcagcatcttattctgggtaataaaaaataaaaataaacggatacctgttttccactgctaaaactgaagcaccactgtgtgagcaacaggaagggagagcgcacgagggagaggagccgaggccgagcgccccctgctggcccgcggcggcgaggagcagagggagcggaggaggggccggcccgcgggagccgcggccaccaggaggccccgctccgtcccatcggggctgcggccagggcggagggaggaagaccctcatctcagagtagccctttcctctgttcttttatttctttttctctttgattgaaaggggactacgtcttagcaggaaaaaaaacttcgcatttctgtgcccgagcaggctccttgcaaagacagcagcgtgcggggcagagccccgggagggcgcgtctgtccacgcctaccggacgcgccgaggtcgcgctgcctgtgttctccgagggccttcatttaaagaaaataagggtgttttgggtttttctctttgtttttttcaagattcttttaaaggagtactgaagaatactttcctaagtttgtctgtaaaatcttagcggtggacctgggagatttgagaagcttccagaaacagtttaaacaagccagcgctactggagaagaggagcaacacctgtgccgcggccggaggagttttgttgttggttttagcttccagtggcttctttctgcggggcatcaggctgctggggtagccgcccgccgagcctggaagctgctcgttctccgctggactcagaagccaagctgcttcccgcctagactcggcgcagggccccgcaccggtgaggaaggtgcttttggccccattgcgaggggccttggccaggactggccctgtggccaggaggcgagaaggtggctgttcccggattgacggctttttcccgggggcctttggaagatttggtggaaggacaagagggcctgtccctgtccccgtccccaggaggtaccgacagtccctgtgctggttagacacggagcgctgcacaccgaaagcccaaattgggagctctgcctgccggcaactttgctgatggggtgattgctgcttctggggggtaaggaaacaagttacagaaattaccgcgttctgtgtgaagggactgagggtgtggtgtcattggcagagggtcattttaggagagctgccccagcccctcgaacgcctggcttggggtgtcattctgcctggcggccaggcctccagcttcccctgccccgggcctggggctgtcactggccctgatccgaacacctccagattccggcttctacatgggacagacggggacgcacaggccaccttccttctggcagggactcttatttattcccattgctctagggctttcggtttccccttcttccggtaggccgcgtagaggcatgcaccgggtaggtttccgcggtgaccccgcggcggcctgagggacgctccctgccccatcccggctgttgggctgggccgctttgcctctgcttcgccctgtgctgtgttctccagctttgtagcagcagccttgacaaacccaggcgcactgtaccaaggcaatgtaacttttgattttcggtcaatttaagttcttttgtcaccaaatattaataaacagttttgacttc

SEQ ID NO: 198272 - DNA, 5569 bp, Homo sapiens
  Payload ID: 19122
  Gene Name: UPF2 regulator of nonsense transcripts homolog (yeast)
  Uniprot ID: Q9HAU5
  ENST ID: ENST00000356352
  CDS Start-End: 475-4293
gctgaaatactgacattgaatattatatgaaatagtgaactgccatctttcatggttgtcaaatgctagggttaaagctgactcaaaatgttcacagatatattctgaagtatttacaattaaatgacatattgttttggagttgatagtggctgaatctgagtgatgggtacgtggaggttccttatattatgctctctacttttgtctgggcttggatttttccttataaaaagtaaaaaacaagtacttagacataggcctaactaataatgataggatgtggaatgtgatgaataacttattttgtaacagaaatagtattcattttacctgcctttatttactcttttacaattgccaagttgcattaatatgttctgtttaaaaaaatagtgtgatatcattttaaaaagtcactgcatctatggtactgacattctttccctcttacagattgtcctgggtcacataatgccagctgagcgtaaaaagccagcaagtatggaagaaaaagactctttaccaaacaacaaggaaaaagactgcagtgaaaggcggacagtgagcagcaaggagaggccaaaagacgatatcaagctcactgccaagaaggaggtcagcaaggcccctgaagacaagaagaagagactggaagatgataagagaaaaaaggaagacaaggaacgcaagaaaaaagacgaagaaaaggtgaaggcagaggaagaatcaaagaaaaaagaagaggaagaaaaaaagaaacatcaagaggaagagagaaagaagcaagaagagcaggccaaacgtcagcaagaagaagaagcagctgctcagatgaaagaaaaagaagaatccattcagcttcatcaggaagcttgggaacgacatcatttaagaaaggaacttcgtagcaaaaaccaaaatgctccggacagccgaccagaggaaaacttcttcagccgcctcgactcaagtttgaagaaaaatactgcttttgtcaagaaactaaaaactattacagaacaacagagagactccttgtcccatgattttaatggcctaaatttaagcaaatacattgcagaagctgtagcttccatcgtggaagcaaaactaaaaatctctgatgtgaactgtgctgtgcacctctgctctctctttcaccagcgttatgctgactttgccccatcacttcttcaggtctggaaaaaacattttgaagcaaggaaagaggagaaaacacctaacatcaccaagttaagaactgatttgcgttttattgcagaattgacaatagttgggattttcactgacaaggaaggtctttccttaatctatgaacagctaaaaaatattattaatgctgatcgggagtcccacactcatgtctctgtagtgattagtttctgtcgacattgtggagatgatattgctggacttgtaccaaggaaagtaaagagtgctgcagagaagtttaatttgagttttcctcctagtgagataattagtccagagaaacaacagcccttccagaatcttttaaaagagtactttacgtctttgaccaaacacctgaaaagggaccacagggagctccagaatactgagagacaaaacaggcgcattctacattctaaaggggagctcagtgaagatagacataaacagtatgaggaatttgctatgtcttaccagaagctgctggcaaattctcaatccttagcagaccttttggatgaaaatatgccagatcttcctcaagacaaaccaacaccagaagaacatgggcctggaattgatatattcacacctggtaaacctggagaatatgacttggaaggtggtatatgggaagatgaagatgctcggaatttttatgagaacctcattgatttgaaggcttttgtcccagccatcttgtttaaagacaatgaaaaaagttgtcagaataaagagtccaacaaagatgataccaaagaggcaaaagaatctaaggagaataaggaggtatcaagtcccgatgatttggaacttgagttggagaatctagaaattaatgatgacaccttagaattagagggtggagatgaagctgaagatcttacaaagaaacttcttgatgaacaagaacaagaagatgaggaagccagcactggatctcatctcaagctcatagtagatgctttcctacagcagttacccaactgtgtcaaccgagatctgatagacaaggcagcaatggatttttgcatgaacatgaacacaaaagcaaacaggaagaagttggtacgggcactcttcatagttcctagacaaaggttggatttgctaccattttatgcaagattggttgctacattgcatccctgcatgtctgatgtagcagaggatctttgttccatgctgaggggggatttcagatttcatgtacggaaaaaggaccagatcaatattgaaacaaagaataaaactgttcgttttataggagaactaactaagtttaagatgttcaccaaaaatgacacactgcattgtttaaagatgcttctgtcagacttctctcatcaccatattgaaatggcatgcaccctgctggagacatgtggacggtttcttttcagatctccagaatctcacctgaggaccagtgtacttttggagcaaatgatgagaaagaagcaagcaatgcatcttgatgcgagatacgtcacaatggtagagaatgcatattactactgcaacccacctccagctgaaaaaaccgtgaaaaagaaacgtcctcctctccaggaatatgtccggaaacttttgtacaaggatctctctaaggttaccaccgagaaggttttgagacagatgcgaaagctgccctggcaggaccaagaagtgaaagactatgttatttgttgtatgataaacatctggaatgtgaaatataatagtattcattgtgtagccaacctcttagcaggactagtgctctaccaagaggatgttgggatccacgttgtggatggagtgttagaagatattcgattaggaatggaggttaatcaacctaaatttaatcagaggcgcatcagcagtgccaagttcttaggagaactttacaattaccgaatggtggaatcagctgttattttcagaactctgtattcttttacctcatttggtgttaatcctgatggctctccaagttccctggacccacctgagcatcttttcagaattagactcgtatgcactattctggacacatgtggccagtactttgacagaggttccagtaaacgaaaacttgattgtttccttgtatattttcagcgttatgtttggtggaagaaaagtttggaggtttggacaaaagaccatccatttcctattgatatagattacatgatcagtgatacactagaactgctaagaccaaagatcaaactctgtaattctctggaagaatccatcaggcaggtacaagacttggaacgagaattcttaataaaactaggcctagtaaatgacaaagactcaaaagattctatgacagaaggagaaaatcttgaagaggatgaagaagaagaagaaggtggggctgaaacagaagaacaatctggaaatgaaagtgaagtaaatgagccagaagaagaggagggttctgataatgatgatgatgagggagaagaagaggaggaagagaatacagattaccttacagattccaataaggaaaatgaaaccgatgaagagaatactgaggtaatgattaaaggcggtggacttaagcatgtaccttgtgtagaagatgaggacttcattcaagctctggataaaatgatgctagaaaatctacagcaacgaagtggtgaatctgttaaagtgcaccaactagatgttgccattcctttgcatctcaaaagccagctgaggaaagggcccccactgggaggtggggaaggagaggctgagtctgcagacacaatgccgtttgtcatgttaacaagaaaaggcaataaacagcagtttaagatccttaatgtacccatgtcctctcaacttgctgcaaatcactggaaccagcaacaggcagaacaagaagagaggatgagaatgaaaaagctcacactagatatcaatgaacggcaagaacaagaagattatcaagaaatgttgcagtctcttgcacagcgcccagctccagcaaacaccaatcgtgagaggcggcctcgctaccaacatccgaagggagcacctaatgcagatctaatctttaagactggtgggaggagacgttgatccagcagcacgtgtcatttcattaggtcctgtatctgatgttgtggttagtggagtcctccagcaattgaatgagagcagtggacacatctcagcaggtcggtctagagagttgcgaatctaaacctgggacaggctggggccaggaggcagaaacaccagcctctgccaacaccggaacaagccgacgcttccagacaaggcggaaaaggccttttgtaatggaaatctcgcgagggttaatcttctcttgagaatggcagtcaagaaatgagatggttcacttgactactgagcagttacaccaaggagagcgtgaaggagatgattgagccagagaagaaacgggttgtgatggtaatggtgtgggggaaatgaacttgagctttaaacttgatttgagtttcagtgtctctgaattgaacatcccacgttggaagaagatacatttgggggctccaggactacagtagaaaagtatagagcaagcaggaaaatcttctagtaaaacttacatgcaggacaacaaaatgatgaaagatatccaaataccagataatccaccaggaaggcttttgtttaggaatttgtttcaagaggaacaagggatgagggagaaaaatccgttttatccatcagagtcagtgctataaaattgcctattaaggtaaaagaaaaatgtggagactattttactatacagagagcattaattcagatggcttagaaaagtgataccagcccaagaacagggatctaggtgagcccattgtaagtatcattgaaaacaaaacatgcccgtcaacatgtcacagaaaacgaacgaaggacaacaagaagtggatgagaatattttgttgaccttcatgggtttacagcctctgtctctaaacaaagtatggaaacaagtagagcttttattttgcttttgtttttgttttgtttttttttttgttttcccccactaaatagaaatgagggtccttagtctgtttctgacaatctgttaatttcttaggacagctgtctttggtttgctttccagcaggcgtagtatatttagtcggagagcacatctgtatgcgacaacttgattacatctttttttctagctattttgcattttttcttttaccatgtttcagtttctgcatgtagatttaaataaaaaacaaaacttgtaaagttgtaacatttcacatggaaatgctgcccaatcttcaccagcttcagaaatctgacctttgccgatgctgcaataaagtgttgtaattta

SEQ ID NO: 198273 - DNA, 5193 bp, Homo sapiens
  Payload ID: 19122
  Gene Name: UPF2 regulator of nonsense transcripts homolog (yeast)
  Uniprot ID: Q9HAU5
  ENST ID: ENST00000357604
  CDS Start-End: 99-3917
gtggggggaggggaggggagagcccgagcgctggagttggtgctgggaaacccggggctaatgttgacaacaggctcgagattgtcctgggtcacataatgccagctgagcgtaaaaagccagcaagtatggaagaaaaagactctttaccaaacaacaaggaaaaagactgcagtgaaaggcggacagtgagcagcaaggagaggccaaaagacgatatcaagctcactgccaagaaggaggtcagcaaggcccctgaagacaagaagaagagactggaagatgataagagaaaaaaggaagacaaggaacgcaagaaaaaagacgaagaaaaggtgaaggcagaggaagaatcaaagaaaaaagaagaggaagaaaaaaagaaacatcaagaggaagagagaaagaagcaagaagagcaggccaaacgtcagcaagaagaagaagcagctgctcagatgaaagaaaaagaagaatccattcagcttcatcaggaagcttgggaacgacatcatttaagaaaggaacttcgtagcaaaaaccaaaatgctccggacagccgaccagaggaaaacttcttcagccgcctcgactcaagtttgaagaaaaatactgcttttgtcaagaaactaaaaactattacagaacaacagagagactccttgtcccatgattttaatggcctaaatttaagcaaatacattgcagaagctgtagcttccatcgtggaagcaaaactaaaaatctctgatgtgaactgtgctgtgcacctctgctctctctttcaccagcgttatgctgactttgccccatcacttcttcaggtctggaaaaaacattttgaagcaaggaaagaggagaaaacacctaacatcaccaagttaagaactgatttgcgttttattgcagaattgacaatagttgggattttcactgacaaggaaggtctttccttaatctatgaacagctaaaaaatattattaatgctgatcgggagtcccacactcatgtctctgtagtgattagtttctgtcgacattgtggagatgatattgctggacttgtaccaaggaaagtaaagagtgctgcagagaagtttaatttgagttttcctcctagtgagataattagtccagagaaacaacagcccttccagaatcttttaaaagagtactttacgtctttgaccaaacacctgaaaagggaccacagggagctccagaatactgagagacaaaacaggcgcattctacattctaaaggggagctcagtgaagatagacataaacagtatgaggaatttgctatgtcttaccagaagctgctggcaaattctcaatccttagcagaccttttggatgaaaatatgccagatcttcctcaagacaaaccaacaccagaagaacatgggcctggaattgatatattcacacctggtaaacctggagaatatgacttggaaggtggtatatgggaagatgaagatgctcggaatttttatgagaacctcattgatttgaaggcttttgtcccagccatcttgtttaaagacaatgaaaaaagttgtcagaataaagagtccaacaaagatgataccaaagaggcaaaagaatctaaggagaataaggaggtatcaagtcccgatgatttggaacttgagttggagaatctagaaattaatgatgacaccttagaattagagggtggagatgaagctgaagatcttacaaagaaacttcttgatgaacaagaacaagaagatgaggaagccagcactggatctcatctcaagctcatagtagatgctttcctacagcagttacccaactgtgtcaaccgagatctgatagacaaggcagcaatggatttttgcatgaacatgaacacaaaagcaaacaggaagaagttggtacgggcactcttcatagttcctagacaaaggttggatttgctaccattttatgcaagattggttgctacattgcatccctgcatgtctgatgtagcagaggatctttgttccatgctgaggggggatttcagatttcatgtacggaaaaaggaccagatcaatattgaaacaaagaataaaactgttcgttttataggagaactaactaagtttaagatgttcaccaaaaatgacacactgcattgtttaaagatgcttctgtcagacttctctcatcaccatattgaaatggcatgcaccctgctggagacatgtggacggtttcttttcagatctccagaatctcacctgaggaccagtgtacttttggagcaaatgatgagaaagaagcaagcaatgcatcttgatgcgagatacgtcacaatggtagagaatgcatattactactgcaacccacctccagctgaaaaaaccgtgaaaaagaaacgtcctcctctccaggaatatgtccggaaacttttgtacaaggatctctctaaggttaccaccgagaaggttttgagacagatgcgaaagctgccctggcaggaccaagaagtgaaagactatgttatttgttgtatgataaacatctggaatgtgaaatataatagtattcattgtgtagccaacctcttagcaggactagtgctctaccaagaggatgttgggatccacgttgtggatggagtgttagaagatattcgattaggaatggaggttaatcaacctaaatttaatcagaggcgcatcagcagtgccaagttcttaggagaactttacaattaccgaatggtggaatcagctgttattttcagaactctgtattcttttacctcatttggtgttaatcctgatggctctccaagttccctggacccacctgagcatcttttcagaattagactcgtatgcactattctggacacatgtggccagtactttgacagaggttccagtaaacgaaaacttgattgtttccttgtatattttcagcgttatgtttggtggaagaaaagtttggaggtttggacaaaagaccatccatttcctattgatatagattacatgatcagtgatacactagaactgctaagaccaaagatcaaactctgtaattctctggaagaatccatcaggcaggtacaagacttggaacgagaattcttaataaaactaggcctagtaaatgacaaagactcaaaagattctatgacagaaggagaaaatcttgaagaggatgaagaagaagaagaaggtggggctgaaacagaagaacaatctggaaatgaaagtgaagtaaatgagccagaagaagaggagggttctgataatgatgatgatgagggagaagaagaggaggaagagaatacagattaccttacagattccaataaggaaaatgaaaccgatgaagagaatactgaggtaatgattaaaggcggtggacttaagcatgtaccttgtgtagaagatgaggacttcattcaagctctggataaaatgatgctagaaaatctacagcaacgaagtggtgaatctgttaaagtgcaccaactagatgttgccattcctttgcatctcaaaagccagctgaggaaagggcccccactgggaggtggggaaggagaggctgagtctgcagacacaatgccgtttgtcatgttaacaagaaaaggcaataaacagcagtttaagatccttaatgtacccatgtcctctcaacttgctgcaaatcactggaaccagcaacaggcagaacaagaagagaggatgagaatgaaaaagctcacactagatatcaatgaacggcaagaacaagaagattatcaagaaatgttgcagtctcttgcacagcgcccagctccagcaaacaccaatcgtgagaggcggcctcgctaccaacatccgaagggagcacctaatgcagatctaatctttaagactggtgggaggagacgttgatccagcagcacgtgtcatttcattaggtcctgtatctgatgttgtggttagtggagtcctccagcaattgaatgagagcagtggacacatctcagcaggtcggtctagagagttgcgaatctaaacctgggacaggctggggccaggaggcagaaacaccagcctctgccaacaccggaacaagccgacgcttccagacaaggcggaaaaggccttttgtaatggaaatctcgcgagggttaatcttctcttgagaatggcagtcaagaaatgagatggttcacttgactactgagcagttacaccaaggagagcgtgaaggagatgattgagccagagaagaaacgggttgtgatggtaatggtgtgggggaaatgaacttgagctttaaacttgatttgagtttcagtgtctctgaattgaacatcccacgttggaagaagatacatttgggggctccaggactacagtagaaaagtatagagcaagcaggaaaatcttctagtaaaacttacatgcaggacaacaaaatgatgaaagatatccaaataccagataatccaccaggaaggcttttgtttaggaatttgtttcaagaggaacaagggatgagggagaaaaatccgttttatccatcagagtcagtgctataaaattgcctattaaggtaaaagaaaaatgtggagactattttactatacagagagcattaattcagatggcttagaaaagtgataccagcccaagaacagggatctaggtgagcccattgtaagtatcattgaaaacaaaacatgcccgtcaacatgtcacagaaaacgaacgaaggacaacaagaagtggatgagaatattttgttgaccttcatgggtttacagcctctgtctctaaacaaagtatggaaacaagtagagcttttattttgcttttgtttttgttttgtttttttttttgttttcccccactaaatagaaatgagggtccttagtctgtttctgacaatctgttaatttcttaggacagctgtctttggtttgctttccagcaggcgtagtatatttagtcggagagcacatctgtatgcgacaacttgattacatctttttttctagctattttgcattttttcttttaccatgtttcagtttctgcatgtagatttaaataaaaaacaaaacttgtaaagttgtaacatttcacatggaaatgctgcccaatcttcaccagcttcagaaatctgacctttgccgatgctgcaataaagtgttgtaattta

SEQ ID NO: 198274 - DNA, 5369 bp, Homo sapiens
  Payload ID: 19122
  Gene Name: UPF2 regulator of nonsense transcripts homolog (yeast)
  Uniprot ID: Q9HAU5
  ENST ID: ENST00000397053
  CDS Start-End: 276-4094
gctggtagtggctaccttacgtattgccagtctgaaaaattcgctcttctcatcgactggggaatttgaaagagctgttaagtgaatggcactcatatgagcctttgccccggacccgccaccccagagtcaagctgagggcatcggcatgccgcagggaagacgatcaggactgtttttaatcgggcagtcgcgcggatggccttttccctctcgcctccttccgccccgcccccactctcagcccggccgcgctgattgtcctgggtcacataatgccagctgagcgtaaaaagccagcaagtatggaagaaaaagactctttaccaaacaacaaggaaaaagactgcagtgaaaggcggacagtgagcagcaaggagaggccaaaagacgatatcaagctcactgccaagaaggaggtcagcaaggcccctgaagacaagaagaagagactggaagatgataagagaaaaaaggaagacaaggaacgcaagaaaaaagacgaagaaaaggtgaaggcagaggaagaatcaaagaaaaaagaagaggaagaaaaaaagaaacatcaagaggaagagagaaagaagcaagaagagcaggccaaacgtcagcaagaagaagaagcagctgctcagatgaaagaaaaagaagaatccattcagcttcatcaggaagcttgggaacgacatcatttaagaaaggaacttcgtagcaaaaaccaaaatgctccggacagccgaccagaggaaaacttcttcagccgcctcgactcaagtttgaagaaaaatactgcttttgtcaagaaactaaaaactattacagaacaacagagagactccttgtcccatgattttaatggcctaaatttaagcaaatacattgcagaagctgtagcttccatcgtggaagcaaaactaaaaatctctgatgtgaactgtgctgtgcacctctgctctctctttcaccagcgttatgctgactttgccccatcacttcttcaggtctggaaaaaacattttgaagcaaggaaagaggagaaaacacctaacatcaccaagttaagaactgatttgcgttttattgcagaattgacaatagttgggattttcactgacaaggaaggtctttccttaatctatgaacagctaaaaaatattattaatgctgatcgggagtcccacactcatgtctctgtagtgattagtttctgtcgacattgtggagatgatattgctggacttgtaccaaggaaagtaaagagtgctgcagagaagtttaatttgagttttcctcctagtgagataattagtccagagaaacaacagcccttccagaatcttttaaaagagtactttacgtctttgaccaaacacctgaaaagggaccacagggagctccagaatactgagagacaaaacaggcgcattctacattctaaaggggagctcagtgaagatagacataaacagtatgaggaatttgctatgtcttaccagaagctgctggcaaattctcaatccttagcagaccttttggatgaaaatatgccagatcttcctcaagacaaaccaacaccagaagaacatgggcctggaattgatatattcacacctggtaaacctggagaatatgacttggaaggtggtatatgggaagatgaagatgctcggaatttttatgagaacctcattgatttgaaggcttttgtcccagccatcttgtttaaagacaatgaaaaaagttgtcagaataaagagtccaacaaagatgataccaaagaggcaaaagaatctaaggagaataaggaggtatcaagtcccgatgatttggaacttgagttggagaatctagaaattaatgatgacaccttagaattagagggtggagatgaagctgaagatcttacaaagaaacttcttgatgaacaagaacaagaagatgaggaagccagcactggatctcatctcaagctcatagtagatgctttcctacagcagttacccaactgtgtcaaccgagatctgatagacaaggcagcaatggatttttgcatgaacatgaacacaaaagcaaacaggaagaagttggtacgggcactcttcatagttcctagacaaaggttggatttgctaccattttatgcaagattggttgctacattgcatccctgcatgtctgatgtagcagaggatctttgttccatgctgaggggggatttcagatttcatgtacggaaaaaggaccagatcaatattgaaacaaagaataaaactgttcgttttataggagaactaactaagtttaagatgttcaccaaaaatgacacactgcattgtttaaagatgcttctgtcagacttctctcatcaccatattgaaatggcatgcaccctgctggagacatgtggacggtttcttttcagatctccagaatctcacctgaggaccagtgtacttttggagcaaatgatgagaaagaagcaagcaatgcatcttgatgcgagatacgtcacaatggtagagaatgcatattactactgcaacccacctccagctgaaaaaaccgtgaaaaagaaacgtcctcctctccaggaatatgtccggaaacttttgtacaaggatctctctaaggttaccaccgagaaggttttgagacagatgcgaaagctgccctggcaggaccaagaagtgaaagactatgttatttgttgtatgataaacatctggaatgtgaaatataatagtattcattgtgtagccaacctcttagcaggactagtgctctaccaagaggatgttgggatccacgttgtggatggagtgttagaagatattcgattaggaatggaggttaatcaacctaaatttaatcagaggcgcatcagcagtgccaagttcttaggagaactttacaattaccgaatggtggaatcagctgttattttcagaactctgtattcttttacctcatttggtgttaatcctgatggctctccaagttccctggacccacctgagcatcttttcagaattagactcgtatgcactattctggacacatgtggccagtactttgacagaggttccagtaaacgaaaacttgattgtttccttgtatattttcagcgttatgtttggtggaagaaaagtttggaggtttggacaaaagaccatccatttcctattgatatagattacatgatcagtgatacactagaactgctaagaccaaagatcaaactctgtaattctctggaagaatccatcaggcaggtacaagacttggaacgagaattcttaataaaactaggcctagtaaatgacaaagactcaaaagattctatgacagaaggagaaaatcttgaagaggatgaagaagaagaagaaggtggggctgaaacagaagaacaatctggaaatgaaagtgaagtaaatgagccagaagaagaggagggttctgataatgatgatgatgagggagaagaagaggaggaagagaatacagattaccttacagattccaataaggaaaatgaaaccgatgaagagaatactgaggtaatgattaaaggcggtggacttaagcatgtaccttgtgtagaagatgaggacttcattcaagctctggataaaatgatgctagaaaatctacagcaacgaagtggtgaatctgttaaagtgcaccaactagatgttgccattcctttgcatctcaaaagccagctgaggaaagggcccccactgggaggtggggaaggagaggctgagtctgcagacacaatgccgtttgtcatgttaacaagaaaaggcaataaacagcagtttaagatccttaatgtacccatgtcctctcaacttgctgcaaatcactggaaccagcaacaggcagaacaagaagagaggatgagaatgaaaaagctcacactagatatcaatgaacggcaagaacaagaagattatcaagaaatgttgcagtctcttgcacagcgcccagctccagcaaacaccaatcgtgagaggcggcctcgctaccaacatccgaagggagcacctaatgcagatctaatctttaagactggtgggaggagacgttgatccagcagcacgtgtcatttcattaggtcctgtatctgatgttgtggttagtggagtcctccagcaattgaatgagagcagtggacacatctcagcaggtcggtctagagagttgcgaatctaaacctgggacaggctggggccaggaggcagaaacaccagcctctgccaacaccggaacaagccgacgcttccagacaaggcggaaaaggccttttgtaatggaaatctcgcgagggttaatcttctcttgagaatggcagtcaagaaatgagatggttcacttgactactgagcagttacaccaaggagagcgtgaaggagatgattgagccagagaagaaacgggttgtgatggtaatggtgtgggggaaatgaacttgagctttaaacttgatttgagtttcagtgtctctgaattgaacatcccacgttggaagaagatacatttgggggctccaggactacagtagaaaagtatagagcaagcaggaaaatcttctagtaaaacttacatgcaggacaacaaaatgatgaaagatatccaaataccagataatccaccaggaaggcttttgtttaggaatttgtttcaagaggaacaagggatgagggagaaaaatccgttttatccatcagagtcagtgctataaaattgcctattaaggtaaaagaaaaatgtggagactattttactatacagagagcattaattcagatggcttagaaaagtgataccagcccaagaacagggatctaggtgagcccattgtaagtatcattgaaaacaaaacatgcccgtcaacatgtcacagaaaacgaacgaaggacaacaagaagtggatgagaatattttgttgaccttcatgggtttacagcctctgtctctaaacaaagtatggaaacaagtagagcttttattttgcttttgtttttgttttgtttttttttttgttttcccccactaaatagaaatgagggtccttagtctgtttctgacaatctgttaatttcttaggacagctgtctttggtttgctttccagcaggcgtagtatatttagtcggagagcacatctgtatgcgacaacttgattacatctttttttctagctattttgcattttttcttttaccatgtttcagtttctgcatgtagatttaaataaaaaacaaaacttgtaaagttgtaacatttcacatggaaatgctgcccaatcttcaccagcttcagaaatctgacctttgccgatgctgcaataaagtgttgtaattt

SEQ ID NO: 198275 - DNA, 2235 bp, Homo sapiens
  Payload ID: 19123
  Gene Name: UPF3 regulator of nonsense transcripts homolog A (yeast)
  Uniprot ID: Q9H1J1
  ENST ID: ENST00000351487
  CDS Start-End: 13-1344
ggagagtgcggcatgcgctcggaaaaggagggggccggaggccttcgggcggccgttgccgcgcggggcccgagcgggagggagaagctgtcggccctagaagtgcagttccaccgcgactcgcagcagcaggaggctgagacgccgccaacttcgtcctccggttgcgggggcggtgcgggcaaacctcgcgaggagaagaggacggccctgagcaaggtggtcatccgccgcctgcctccgggcctcaccaaggagcagctggaggagcagctgcgcccgctgccagcacacgactacttcgagttcttcgccgccgacctgagtctttatcctcatctctactcaagagcatacattaattttaggaatcctgatgacatccttctttttagagatcgttttgatggatatatcttccttgacagcaaagatccagaatataagaagtttttagaaacctactgtgtggaggaagagaagaccagtgccaaccctgagactctgctgggggagatggaggcgaagacaagagagctcattgctagaagaaccacacctcttttggaatatattaaaaatagaaaattagaaaagcagagaattcgagaagagaagcgagaagaacggaggaggagagagttagaaaagaaacgtttgcgggaagaggaaaaaagaagaagaagagaagaagaaagatgcaaaaaaaaagagacagataaacagaagaaaattgcagagaaagaagtaaggattaagcttcttaagaaaccagaaaagggagaggaaccaaccacagagaaaccaaaagaaagaggagaggagattgatactggaggtggcaagcaggaatcctgtgcccccggtgcagtcgtaaaagccaggcccatggaaggctcgctggaggagccccaggagacgtcacacagcggcagtgataaagagcacagggatgtggagagatctcaagaacaagaatctgaagcacaaagataccatgtggatgacggcaggaggcacagagctcaccacgagcctgaacggctttccagaaggagtgaggatgagcagagatgggggaaaggacctggccaagacagagggaagaaggggagccaggacagcggggctccgggggaggccatggagagactgggaagagcgcagaggtgtgacgacagtccagcacccagaaaagagcgactggcaaacaaggaccggccagccttgcagctgtatgatccaggagctcgcttccgagcgcgagagtgtggcggaaacaggaggatctgcaaggcagaaggttcggggactggtcctgagaagagggaagaggcagagtgagtcactgcacgcacctggcctccatggacgagcaagggcatcccagaaacgtgtaaatgaccccgagtgtgactgggaaggagaacttattccttaccaggaaactggaagctaaaaatacagagggtgacgtagaaacacgcagaaaccattctaaagaaagtagtgatcttgtattaaattgagcagaattctcacagattttaccattcctgttataaactagtatttgttgtttagccaaaacagaaaatgatttccactggacagtagaaaaatatgtgtaaaatagggaagaaagttagtattggatcagtgtgagtcctgaagcactttcagtgctgtgagaacgacatccactttgggtttcattcgtttgtaagcagaggagctgtcagtcactcgtgcttctcggtggcctctgagccatggtgtcgagtgaagagtagttcttgtttgttacaacctttgtgagtcagccatgcccgcaaagcgtgctgtgttttagtcctggtaggaatatttatcagagttcacactatataaaacccaacagcttcaactattgccctttcaacagttttgccactgaccggatagaaacggtttcagtctctggatggatgtgtttgtggtttgtaaccattacggtttaaaccatggtttaagaatttgcccaaataacagaaattttgttcgggaagggataaactagatatagcatacagagcctgtttttgagttttagatactttatttgtaaataacttaaaatagctttctgaaaccgtgcattctgtagtttcttcctttcagtgaaattgctaaatgtcaatgtatttttggcactgcgattttaaccatttattaaataaaaattttgttaaagaa

SEQ ID NO: 198276 - DNA, 2387 bp, Homo sapiens
  Payload ID: 19123
  Gene Name: UPF3 regulator of nonsense transcripts homolog A (yeast)
  Uniprot ID: Q9H1J1
  ENST ID: ENST00000375299
  CDS Start-End: 57-1487
agctctcgcgaggtttcgtcgggggctggcggctgcggctcggcggagagtgcggcatgcgctcggaaaaggagggggccggaggccttcgggcggccgttgccgcgcggggcccgagcgggagggagaagctgtcggccctagaagtgcagttccaccgcgactcgcagcagcaggaggctgagacgccgccaacttcgtcctccggttgcgggggcggtgcgggcaaacctcgcgaggagaagaggacggccctgagcaaggtggtcatccgccgcctgcctccgggcctcaccaaggagcagctggaggagcagctgcgcccgctgccagcacacgactacttcgagttcttcgccgccgacctgagtctttatcctcatctctactcaagagcatacattaattttaggaatcctgatgacatccttctttttagagatcgttttgatggatatatcttccttgacagcaaaggcctagaatatcctgcagtggtagagtttgctccattccagaagatagccaaaaagaagctgagaaaaaaagatgccaagactggaagcatcgaagatgatccagaatataagaagtttttagaaacctactgtgtggaggaagagaagaccagtgccaaccctgagactctgctgggggagatggaggcgaagacaagagagctcattgctagaagaaccacacctcttttggaatatattaaaaatagaaaattagaaaagcagagaattcgagaagagaagcgagaagaacggaggaggagagagttagaaaagaaacgtttgcgggaagaggaaaaaagaagaagaagagaagaagaaagatgcaaaaaaaaagagacagataaacagaagaaaattgcagagaaagaagtaaggattaagcttcttaagaaaccagaaaagggagaggaaccaaccacagagaaaccaaaagaaagaggagaggagattgatactggaggtggcaagcaggaatcctgtgcccccggtgcagtcgtaaaagccaggcccatggaaggctcgctggaggagccccaggagacgtcacacagcggcagtgataaagagcacagggatgtggagagatctcaagaacaagaatctgaagcacaaagataccatgtggatgacggcaggaggcacagagctcaccacgagcctgaacggctttccagaaggagtgaggatgagcagagatgggggaaaggacctggccaagacagagggaagaaggggagccaggacagcggggctccgggggaggccatggagagactgggaagagcgcagaggtgtgacgacagtccagcacccagaaaagagcgactggcaaacaaggaccggccagccttgcagctgtatgatccaggagctcgcttccgagcgcgagagtgtggcggaaacaggaggatctgcaaggcagaaggttcggggactggtcctgagaagagggaagaggcagagtgagtcactgcacgcacctggcctccatggacgagcaagggcatcccagaaacgtgtaaatgaccccgagtgtgactgggaaggagaacttattccttaccaggaaactggaagctaaaaatacagagggtgacgtagaaacacgcagaaaccattctaaagaaagtagtgatcttgtattaaattgagcagaattctcacagattttaccattcctgttataaactagtatttgttgtttagccaaaacagaaaatgatttccactggacagtagaaaaatatgtgtaaaatagggaagaaagttagtattggatcagtgtgagtcctgaagcactttcagtgctgtgagaacgacatccactttgggtttcattcgtttgtaagcagaggagctgtcagtcactcgtgcttctcggtggcctctgagccatggtgtcgagtgaagagtagttcttgtttgttacaacctttgtgagtcagccatgcccgcaaagcgtgctgtgttttagtcctggtaggaatatttatcagagttcacactatataaaacccaacagcttcaactattgccctttcaacagttttgccactgaccggatagaaacggtttcagtctctggatggatgtgtttgtggtttgtaaccattacggtttaaaccatggtttaagaatttgcccaaataacagaaattttgttcgggaagggataaactagatatagcatacagagcctgtttttgagttttagatactttatttgtaaataacttaaaatagctttctgaaaccgtgcattctgtagtttcttcctttcagtgaaattgctaaatgtcaatgtatttttggcactgcgattttaaccatttattaaataaaaattttgttaaagaagtactgaaa

SEQ ID NO: 198277 - DNA, 494 bp, Homo sapiens
  Payload ID: 19123
  Gene Name: UPF3 regulator of nonsense transcripts homolog A (yeast)
  ENST ID: ENST00000492270
  CDS Start-End: 38-355
cgggggctggcggctgcggctcggcggagagtgcggcatgcgctcggaaaaggagggggccggaggccttcgggcggccgttgccgcgcggggcccgagcgggagggagaagctgtcggccctagaagtgcagttccaccgcgactcgcagcagcaggaggctgagacgccgccaacttcgtcctccggttgcgggggcggtgcgggcaaacctcgcgaggagaagaggacggccctgagcaaggtggtcatccgccgcctgcctccgggcctcaccaaggagcagctggaggagcagctgcgcccgctgccagcacacgactacttcgagttcttcgccgccgacctgaggtgaggcccgccccgaggggaggaagagagggcggaacccagagctcggcggcggtggccgtctcgttgccttacgttccttaccctgatttctcctatatgggagtcgtgtgagctttttgaataaatacatttcagtaaaa

SEQ ID NO: 198278 - DNA, 2335 bp, Homo sapiens
  Payload ID: 19124
  Gene Name: UPF3 regulator of nonsense transcripts homolog B (yeast)
  Uniprot ID: Q9BZI7
  ENST ID: ENST00000345865
  CDS Start-End: 71-1483
gcttcccgggagccgtttgtgcccggggtaaccccgttccggccaagccgcttcagcgggggacgtagccatgaaggaagagaaggagcacaggcctaaggagaagcgagtaaccctgttaacccccgccggggccacaggcagcggtggtgggacctcgggggacagctccaagggggaagataagcaggatcgcaacaaggagaagaaagaagcgctgagcaaggtggtaattcgaagattacctcccactttgaccaaggagcagcttcaggaacatcttcaacctatgcctgagcatgattattttgagtttttttctaatgatacgagtttgtatcctcatatgtatgccagagcatacatcaactttaaaaaccaagaggacattattttgttcagggatcgctttgatggttatgtattccttgacaataaaggtcaggaatatcccgctatagtagaatttgcaccttttcaaaaagctgcaaaaaagaagactaagaaaagagataccaaagtcgggactatcgatgatgatccagaatatagaaagtttttggaaagttatgccacagataatgagaaaatgacatctactccagagacactgctagaggaaatagaagcaaaaaatagagaattaatagctaaaaagacaaccccacttttgagcttcctgaaaaacaagcagagaatgagagaagaaaagagagaagaaaggaggaggagagaaatagaaagaaaaagacaaagagaagaagagaggaggaaatggaaagaagaagagaaacgaaaaaggaaagatatagaaaagctaaagaagatagacagaattccagaaagggacaaattaaaggatgaaccaaagattaagctgctcaagaagccagaaaaaggagatgaaaaagaattggacaaaagagaaaaagccaagaaattggacaaagagaatctcagtgatgaaagagccagtgggcaaagttgtacattgcccaagcgttctgatagcgaacttaaagatgaaaaaccaaagagacctgaagatgagagcggcagagactatagggagagggaacgggaatatgaacgagatcaggagcgcatacttcgagaaagagagaggctgaagcggcaagaagaagagcgccgtaggcagaaggagcgctatgagaaagagaagacttttaagagaaaagaagaagaaatgaaaaaagagaaagacacacttcgggataaaggaaagaaggctgaaagtacagaatcaataggcagctcagaaaaaactgaaaagaaagaagaagtggtcaagagagatcgaataagaaacaaggatcgtccagcgatgcagctttaccaaccaggagctcgaagccgaaatcgactctgtccccctgatgacagcaccaagtctggagattcagcagcagaaaggaagcaggaaagtggtattagccatagaaaagaaggaggagaggagtgataagtccagatggccttaggtgtcctgactgtctaggcagccaaagagcacacgttaagcaatccagaggtgccttcagggcaaagaatagagagaaagggagccgctgtgctggtggggtacactgcagaggagtaagtcttgtgtcaaagcaggaatctgatcagaggttcagaattggaagtacaatttcattgcttttgcaatttctacaaattaattttaaagtgtcagaaaaaggtgacggcaaggacatgcattgcaatttgcagggggaattgtcaagtgaggacttcatcacatatgacacgagagaaaagtaagagctggttctaaaatcaaaagctgttgttcatcctgaattgaattttctgaatttgggtggagcagagtcgctttgaagccttgttccgatctaattctattgtattgttgatgataagtgttgacattgggtagtgtagaagcaacaagcatgtccttgtagtacaggtacagtgaaggatagaacacactttcgttgatacaaaaatttaaatagttatgttacttctgtatccagtgtcctaaagttttaggattagttttagttttttgtttgcttatatgagcttagcgtaaagaatatttttaaacttcgtgttttgtcatcagcatcttttctattaagaggtaaaatgtagtccttgtttgactcttgacaatccagtgtgtttgatcttaggtctcatgatctgagtgcataccctctccaggaaggaaactgcaccagtgtctattcctgttaaatagcaacttttagtctcagcttgtttcgttttgatgtcaataaatagtaacagcattcaagtg

SEQ ID NO: 198279 - DNA, 2378 bp, Homo sapiens
  Payload ID: 19124
  Gene Name: UPF3 regulator of nonsense transcripts homolog B (yeast)
  Uniprot ID: Q9BZI7
  ENST ID: ENST00000276201
  CDS Start-End: 71-1522
gcttcccgggagccgtttgtgcccggggtaaccccgttccggccaagccgcttcagcgggggacgtagccatgaaggaagagaaggagcacaggcctaaggagaagcgagtaaccctgttaacccccgccggggccacaggcagcggtggtgggacctcgggggacagctccaagggggaagataagcaggatcgcaacaaggagaagaaagaagcgctgagcaaggtggtaattcgaagattacctcccactttgaccaaggagcagcttcaggaacatcttcaacctatgcctgagcatgattattttgagtttttttctaatgatacgagtttgtatcctcatatgtatgccagagcatacatcaactttaaaaaccaagaggacattattttgttcagggatcgctttgatggttatgtattccttgacaataaaggtcaggaatatcccgctatagtagaatttgcaccttttcaaaaagctgcaaaaaagaagactaagaaaagagataccaaagtcgggactatcgatgatgatccagaatatagaaagtttttggaaagttatgccacagataatgagaaaatgacatctactccagagacactgctagaggaaatagaagcaaaaaatagagaattaatagctaaaaagacaaccccacttttgagcttcctgaaaaacaagcagagaatgagagaagaaaagagagaagaaaggaggaggagagaaatagaaagaaaaagacaaagagaagaagagaggaggaaatggaaagaagaagagaaacgaaaaaggaaagatatagaaaagctaaagaagatagacagaattccagaaagggacaaattaaaggatgaaccaaagattaaggtacacaggtttctgttacaagctgtgaatcagaaaaatctgctcaagaagccagaaaaaggagatgaaaaagaattggacaaaagagaaaaagccaagaaattggacaaagagaatctcagtgatgaaagagccagtgggcaaagttgtacattgcccaagcgttctgatagcgaacttaaagatgaaaaaccaaagagacctgaagatgagagcggcagagactatagggagagggaacgggaatatgaacgagatcaggagcgcatacttcgagaaagagagaggctgaagcggcaagaagaagagcgccgtaggcagaaggagcgctatgagaaagagaagacttttaagagaaaagaagaagaaatgaaaaaagagaaagacacacttcgggataaaggaaagaaggctgaaagtacagaatcaataggcagctcagaaaaaactgaaaagaaagaagaagtggtcaagagagatcgaataagaaacaaggatcgtccagcgatgcagctttaccaaccaggagctcgaagccgaaatcgactctgtccccctgatgacagcaccaagtctggagattcagcagcagaaaggaagcaggaaagtggtattagccatagaaaagaaggaggagaggagtgataagtccagatggccttaggtgtcctgactgtctaggcagccaaagagcacacgttaagcaatccagaggtgccttcagggcaaagaatagagagaaagggagccgctgtgctggtggggtacactgcagaggagtaagtcttgtgtcaaagcaggaatctgatcagaggttcagaattggaagtacaatttcattgcttttgcaatttctacaaattaattttaaagtgtcagaaaaaggtgacggcaaggacatgcattgcaatttgcagggggaattgtcaagtgaggacttcatcacatatgacacgagagaaaagtaagagctggttctaaaatcaaaagctgttgttcatcctgaattgaattttctgaatttgggtggagcagagtcgctttgaagccttgttccgatctaattctattgtattgttgatgataagtgttgacattgggtagtgtagaagcaacaagcatgtccttgtagtacaggtacagtgaaggatagaacacactttcgttgatacaaaaatttaaatagttatgttacttctgtatccagtgtcctaaagttttaggattagttttagttttttgtttgcttatatgagcttagcgtaaagaatatttttaaacttcgtgttttgtcatcagcatcttttctattaagaggtaaaatgtagtccttgtttgactcttgacaatccagtgtgtttgatcttaggtctcatgatctgagtgcataccctctccaggaaggaaactgcaccagtgtctattcctgttaaatagcaacttttagtctcagcttgtttcgttttgatgtcaataaatagtaacagcattcaagtgtgaa

SEQ ID NO: 198280 - DNA, 1385 bp, Homo sapiens
  Payload ID: 19124
  Gene Name: UPF3 regulator of nonsense transcripts homolog B (yeast)
  ENST ID: ENST00000619445
  CDS Start-End: 44-697
gtaaccccgttccggccaagccgcttcagcgggggacgtagccatgaaggaagagaaggagcacaggcctaaggagaagcgagtaaccctgttaacccccgccggggccacaggcagcggtggtgggacctcgggggacagctccaagggggaagataagcaggatcgcaacaaggagaagaaagaagcgctgagcaaggtggtaattcgaagattacctcccactttgaccaaggagcagcttcaggaacatcttcaacctatgcctgagcatgattattttgagtttttttctaatgatacgagtttgtatcctcatatgtatgccagagcatacatcaactttaaaaaccaagaggacattattttgttcagggatcgctttgatggttatgtattccttgacaataaaggtcaggaatatcccgctatagtagaatttgcaccttttcaaaaagctgcaaaaaagaagactaagaaaagagataccaaagtcgggactatcgatgatgatccagaatatagaaagtttttggaaagttatgccacagataatgagaaaatgacatctactccagagacactgctagaggaaatagaagcaaaaaatagagaattaatagctaaaaagacaaccccacttttgagcttcctgaaaaacaagcagagaaggagcgctgaaagagaagacttttaagagaaaagaagaagaaatgaaaaaagagaaagacacacttcgggataaaggaaagaaggctgaaagtacagaatcaataggcagctcagaaaaaactgaaaagaaagaagaagtggtcaagagagatcgaataagaaacaaggatcgtccagcgatgcagctttaccaaccaggagctcgaagccgaaatcgactctgtccccctgatgacagcaccaagtctggagattcagcagcagaaaggaagcaggaaagtggtattagccatagaaaagaaggaggagaggagtgataagtccagatggccttaggtgtcctgactgtctaggcagccaaagagcacacgttaagcaatccagaggtgccttcagggcaaagaatagagagaaagggagccgctgtgctggtggggtacactgcagaggagtaagtcttgtgtcaaagcaggaatctgatcagaggttcagaattggaagtacaatttcattgcttttgcaatttctacaaattaattttaaagtgtcagaaaaaggtgacggcaaggacatgcattgcaatttgcagggggaattgtcaagtgaggacttcatcacatatgacacgagagaaaagtaagagctggttctaaaatcaaaagctgttgttcatcctgaattgaattttctgaatttgggtggagcagagtcgc

SEQ ID NO: 198281 - DNA, 826 bp, Homo sapiens
  Payload ID: 19125
  Gene Name: upper zone of growth plate and cartilage matrix associated
  Uniprot ID: Q8WVF2
  ENST ID: ENST00000378681
  CDS Start-End: 74-490
agtggggacccaaagggtgcaggacgcctggtctgccttgtgggtcctggacggagcccctacctctgcaaagatgacttggagacaggccgtcctgctgtcttgcttctccgccgtggtgctcctgtctatgctgagagagggaaccagtgtatctgtgggcaccatgcagatggcgggagaagaggcgagtgaagatgcaaaacagaagattttcatgcaggaatcagatgcctcgaatttcctcaagaggcgcggcaagcggtcccccaagtccagagatgaggtcaatgtggaaaacaggcagaagcttcgggttgatgagctgcggagagaatattacgaggaacaaaggaatgaatttgagaacttcgtggaggaacaaaacgatgagcaggaagagaggagccgggaggctgtggagcagtggcgccagtggcactatgacggcctgcacccatcctatctctacaaccgccaccacacctgatcccatcctgaagccggccaagaagacaaagcttgtagcaccattggcatccccgtgttccagcaatctttcccatgcaaaccggcccttcagagggtctcagcttggggtctgcagtggccagcagctcttgaaaagacgcatgcctttccttccagtgtgtgaaagtgtcctgactttcacctctttgcagaccatcttctgaggtgagcaactgcctgcagggcctcctagtaccaaacctacagtggcttcccctggcttcgttcccaagcaaaagaatcagtcaagaatcacatgtttgcttatggcttacaaataaaaacgctgaatcaa

SEQ ID NO: 198282 - DNA, 763 bp, Homo sapiens
  Payload ID: 19125
  Gene Name: upper zone of growth plate and cartilage matrix associated
  ENST ID: ENST00000463405
  CDS Start-End: 77-427
agaagtggggacccaaagggtgcaggacgcctggtctgccttgtgggtcctggacggagcccctacctctgcaaagatgacttggagacaggccgtcctgctgtcttgcttctccgccgtggtgctcctgtctaatgcaaaacagaagattttcatgcaggaatcagatgcctcgaatttcctcaagaggcgcggcaagcggtcccccaagtccagagatgaggtcaatgtggaaaacaggcagaagcttcgggttgatgagctgcggagagaatattacgaggaacaaaggaatgaatttgagaacttcgtggaggaacaaaacgatgagcaggaagagaggagccgggaggctgtggagcagtggcgccagtggcactatgacggcctgcacccatcctatctctacaaccgccaccacacctgatcccatcctgaagccggccaagaagacaaagcttgtagcaccattggcatccccgtgttccagcaatctttcccatgcaaaccggcccttcagagggtctcagcttggggtctgcagtggccagcagctcttgaaaagacgcatgcctttccttccagtgtgtgaaagtgtcctgactttcacctctttgcagaccatcttctgaggtgagcaactgcctgcagggcctcctagtaccaaacctacagtggcttcccctggcttcgttcccaagcaaaagaatcagtcaagaatcacatgtttgcttatggcttacaaataaaaacgctgaatcaa

SEQ ID NO: 198283 - DNA, 364 bp, Homo sapiens
  Payload ID: 19126
  Gene Name: up-regulated during skeletal muscle growth 5 homolog (mouse)
  Uniprot ID: Q96IX5
  ENST ID: ENST00000309579
  CDS Start-End: 68-244
ccgagaggtggttacattcgttgaaggacaccagctgcggaatttgcggctttggcagattgaaatcatggcaggtccagaaagtgatgcgcaataccagttcactggtattaaaaaatatttcaactcttatactctcacaggtagaatgaactgtgtactggccacatatggaagcattgcattgattgtcttatatttcaagttaaggtccaaaaaaactccagctgtgaaagcaacataaatggattttaaactgtctacggttcttaacctcatctgttaagttcccatgcctggagaagctaatgccaactcatcatgtgataattcaatttgtacaataaattatgaacctggaaaa

SEQ ID NO: 198284 - DNA, 560 bp, Homo sapiens
  Payload ID: 19126
  Gene Name: up-regulated during skeletal muscle growth 5 homolog (mouse)
  Uniprot ID: Q96IX5
  ENST ID: ENST00000337003
  CDS Start-End: 264-440
ccgagaggtggttacattcgttgaaggacaccagctgcggaatttgcggctttggcagacccagctgagtcactgtcactgcctaccaatctcgaccggacctcgaccggctcgtctgtgttgccaatcgactcggcgtggcgtcggtcgtggtagataggcggtcatgcatacgaattttcagctcttgttctggtgaccttttgaatacgtcttgtctataaaagaaattcatgcctttgtaaaatacacagattgaaatcatggcaggtccagaaagtgatgcgcaataccagttcactggtattaaaaaatatttcaactcttatactctcacaggtagaatgaactgtgtactggccacatatggaagcattgcattgattgtcttatatttcaagttaaggtccaaaaaaactccagctgtgaaagcaacataaatggattttaaactgtctacggttcttaacctcatctgttaagttcccatgcctggagaagctaatgccaactcatcatgtgataattcaatttgtacaataaattatgaacctggaaaa

SEQ ID NO: 198285 - DNA, 635 bp, Homo sapiens
  Payload ID: 19126
  Gene Name: up-regulated during skeletal muscle growth 5 homolog (mouse)
  Uniprot ID: Q96IX5
  ENST ID: ENST00000369811
  CDS Start-End: 339-515
atcaccggccgaattaacctcttttcttctgtatgtccatagctgtttgttcccaccgagctgtgctttaggaagctggccagccgggcctcctttaggtgcgctgcagcctttttcaaagcgagtgaatgtggcccggcccctacagttcgccaggcccgctgtaaaagggttagatttcagtctatagacgatcagtgggaaggcctttcctaggaggtaaccagaacagagagctgtaaactccgtgaatgcaagaggctgcttctgttacctgagtggttctcactcatctttgccttccttacctcgtgatctcaccattccagattgaaatcatggcaggtccagaaagtgatgcgcaataccagttcactggtattaaaaaatatttcaactcttatactctcacaggtagaatgaactgtgtactggccacatatggaagcattgcattgattgtcttatatttcaagttaaggtccaaaaaaactccagctgtgaaagcaacataaatggattttaaactgtctacggttcttaacctcatctgttaagttcccatgcctggagaagctaatgccaactcatcatgtgataattcaatttgtacaataaattatgaacctggaaaa

SEQ ID NO: 198286 - DNA, 626 bp, Homo sapiens
  Payload ID: 19126
  Gene Name: up-regulated during skeletal muscle growth 5 homolog (mouse)
  Uniprot ID: Q96IX5
  ENST ID: ENST00000369815
  CDS Start-End: 330-506
ggacaccagctgcggaatttgcggctttggcagctgtttgttcccaccgagctgtgctttaggaagctggccagccgggcctcctttaggtgcgctgcagcctttttcaaagcgagtgaatgtggcccggcccctacagttcgccaggcccgctgtaaaagggttagatttcagtctatagacgatcagtgggaaggcctttcctaggaggtaaccagaacagagagctgtaaactccgtgaatgcaagaggctgcttctgttacctgagtggttctcactcatctttgccttccttacctcgtgatctcaccattccagattgaaatcatggcaggtccagaaagtgatgcgcaataccagttcactggtattaaaaaatatttcaactcttatactctcacaggtagaatgaactgtgtactggccacatatggaagcattgcattgattgtcttatatttcaagttaaggtccaaaaaaactccagctgtgaaagcaacataaatggattttaaactgtctacggttcttaacctcatctgttaagttcccatgcctggagaagctaatgccaactcatcatgtgataattcaatttgtacaataaattatgaacctggaaaa

SEQ ID NO: 198287 - DNA, 789 bp, Homo sapiens
  Payload ID: 19126
  Gene Name: up-regulated during skeletal muscle growth 5 homolog (mouse)
  Uniprot ID: Q96IX5
  ENST ID: ENST00000369825
  CDS Start-End: 484-660
cccaccgagctgtgctttaggaagctggccagccgggcctcctttaggtgcgctgcagcctttttcaaagcgagtgaatgtggcccggcccctacagttcgccaggcccgctgtaaaagggttagatttcagtctatagacgatcagtgggaaggcctttcctaggaggtaaccagaacagagagctgtaaactccgtgaatgcaagaggctgcttctgttacctgagtggttctcactcatctttgccttccttacctcgtgatctcaccattccagacccagctgagtcactgtcactgcctaccaatctcgaccggacctcgaccggctcgtctgtgttgccaatcgactcggcgtggcgtcggtcgtggtagataggcggtcatgcatacgaattttcagctcttgttctggtgaccttttgaatacgtcttgtctataaaagaaattcatgcctttgtaaaatacacagattgaaatcatggcaggtccagaaagtgatgcgcaataccagttcactggtattaaaaaatatttcaactcttatactctcacaggtagaatgaactgtgtactggccacatatggaagcattgcattgattgtcttatatttcaagttaaggtccaaaaaaactccagctgtgaaagcaacataaatggattttaaactgtctacggttcttaacctcatctgttaagttcccatgcctggagaagctaatgccaactcatcatgtgataattcaatttgtacaataaattatgaacctggaaaagctggttgt

SEQ ID NO: 198288 - DNA, 5658 bp, Homo sapiens
  Payload ID: 19127
  Gene Name: upregulator of cell proliferation
  Uniprot ID: Q8TCY9
  ENST ID: ENST00000336086
  CDS Start-End: 2238-4904
ataattttcaaacatatgacaggaaagcatttttatgatactttcttgtattttacatgtgtcttatttttggaatcagaaaaacatatatggtgatattagtaattttcaaaaactgcactgcagagagctcccttgcccctgagtagggccgttggaagtgctgttctctgccgtcttggtccgactccgcctgatacacagacaggaaacttagcaaggcttagaagtgggctggagcccgagttgacagattggctggtgttataatttttaaaattactggctatagggtacagtggctcattattttttgttgagatgaggttttgccatgttgcccaggctagtcttgaactcctgggctcaagtgatccccttgctttggcctcccagatgctggaattacaggcatgagtcactgcaccctgctctaaaatgatactattctgactgcagcatccccctccacatttcatgttctgatgtgagcaagagagccttctctttctgcccatgtatttattatccatgtggactcactaattgctggttttcaatggttttaaatcagttactgtgtttatgtttgtgctcacattgtcctagatttgaccagtgagagttcctcaggctggctcctgtgcccatcatgttttcgagcatttccttactttctgaaataagatgctcaggctcctcctgttctttccttgccccagccatcattcaggatctccaaggagtccgtttcttttagcgtggaaggtattaaagggtgctaggcatgcccattgccacaacagtgtctttgcttcttggccctttccgtggacagttaggaaatagatgcatgtgtacactcgtatacacacagagatatgtgtgcacacctacatctacacacttaaacacatatgcacataagcatgcatatagaaatcacagttcacacgagtgcctccagttccattgcgcctctgcaagttctgctgtaactctccattctatgtttgtatgtcctttcttcagcagttagttagcaccctggctcctggcagaatcaatacatttactcatttgctcactctatgatacatctaaaatagtttagtctttttttttttttttttgagatggagttttgttcttgtcacccaggctggagtgcagtggtgcgatctcggctcactgcaactctgcctcctgtgttcaagtgattctcctgccttagcctccgaagtagctgggattacaggcgcctgccaccacgcctggctaatttttatatttttagtagagacagggtttcaccatgttggccaggccagtctcgaactcctgacctcaagtaatccgcccgcctcagccttccaaagtgctggaattgcaggcgtgagccaccacaccaggcctaaaatagtttattcttaattagactgcacttatcatagctatttaaaataattcaggatcaccccttccagaccacagtgttaacttcagatgaacatccttctagagttctgtatatatacctatagataaacatacacaattttattaaattgtaatcatactgtgcatacttttctgtagcctgactttcccccgactaattaatataacagctttccctaatatctcatccagcatctttttgtccacaaaagaaatccatagcgtattttttaatggctgcagaatttgaccataattccgttattgcactttgattttaaaaggcatcagtttttcgctattatatataaagctggcatcaacatctttgtaactaaatcttaattatttccttaggatagaagtggaattactgggcaaagggtatgtatatttttctgtctttctgaatgactgtatttgtgctctggccagcagttttggagagtgctggttttctagaccagtgtttctcaactgtgggtgcatatcagaatcattgagggcacttttaaaagcagtgatacccaggaccagctcccagagattctggtttcatggatctggggtgtgacccagggtttatagtttttaaaagctctccaagagattttatatgcggccagtttgataggtgaaagtggtattccatttttttaattataattttcttctgaaattgtttcaggcattcagatttgggagaagtagccccagaaataaaagcatcagagagacgaacagctgtggccattgcagatttggaatggagagaaatggaaggagatgattgcgagttccgttatggagatggtacaaatgaggctcaggacaatgattttccaacagtggagagaagcaggcttcaagaaatgctgtcacttttgggcctagagacgtaccaggtccagaaactcagcctccaggactctctgcagatcagttttgacagtatgaagaactgggcccctcaggttcccaaagacttgccctggaatttcctcaggaagttgcaggccctcaatgctgatgccaggaataccactatggtgctggacgtgctcccagacgccaggcctgtggagaaggagagccagatggaagaggagatcatctactgggacccagctgatgaccttgctgccgacatttattccttttctgagctgcccacccctgatacgccagtgaaccccttagaccttctctgtgccctgctgctctcctcagacagtttcctgcaacaagaaatagcgttgaaaatggccctctgccagtttgcactcccactcgtgttgcctgactcggagaaccactaccatacatttctgctgtgggccatgcggggcattgtgaggacatggtggtcccagcccccaaggggcatggggagcttccgggaagacagcgtggtcttgtccagggcgcccgccttcgccttcgtgcgcatggacgtcagtagcaactccaagtcccagcttctcaacgccgtcctcagcccgggccacaggcagtgggactgcttctggcatcgggacctcaacttgggcaccaatgcccgggagatttcggatgggttggtagaaatttcctggttttttcccagcggaagggaggacttggacattttcccagaacctgtggcctttctgaacctgagaggtgacatcgggtctcactggctgcagtttaagctcttgacagaaatctcctccgctgtgtttatattgactgacaatatcagtaagaaggaatacaaattgctgtactccatgaaggagtcaaccacaaaatactacttcatcctgagtccctaccgtgggaagcgcaacacaaacctgagatttctgaataagttaattcctgtgctgaaaatagaccactcacatgtcctggtaaaggtcagcagcactgacagcgacagcttcgtgaagaggatccgggccatcgttgggaatgtgctgcgggcaccctgcaggcgggtatctgtggaggacatggcgcacgcagcccgcaaactgggcctaaaggtcgacgaggactgtgaggagtgtcagaaagcgaaagaccggatggagaggattaccaggaaaatcaaagactcggatgcctacagaagggacgagctgaggctgcagggggacccctggagaaaggcagcccaagtggagaaggagttctgccagctccagtgggccgtggacccccctgagaagcacagggctgagctgaggcggcggctgctagaacttcgaatgcagcagaacggccatgatccctcctcgggggtgcaggagttcatctcggggatcagcagcccctccttgagtgagaagcagtacttcctgaggtggatggagtggggcctggcacgggtggcccagccgcgactgagacagcctccggagacgcttctcaccctgagaccaaagcatgggggcaccacagacgtgggggagccgctctggcctgagcccctaggggtggaacacttcttgcgggagatgggacagttttatgaggctgagagctgtcttgtggaggcagggaggctgccggcaggccagaggcgttttgcccacttcccaggcttggcctcggagctgctgctgacagggctgcctctggagctaatcgatgggagcacgctgagcatgcccgtccgctgggtcacagggctcctgaaggagctgcacgtccgactggagagacggtcaaggctggtggttctgtcaaccgtcggggtgccaggcacgggcaagtccacactcctcaacaccatgtttgggctgcggtttgccacagggaagagctgcggtcctcgaggggccttcatgcagctcatcacagtggctgagggcttcagccaggacctgggctgtgaccacatcctggtgatagactccgggggcttgataggtggggccttgacgtcagctggggacagatttgagctggaggcttccttggccactctgctcatgggactgagcaatgtcaccgtgatcagtctagctgaaaccaaggacattccagcagctattctgcatgcatttctgaggttagaaaaaacggggcacatgcccaactaccagtttgtataccagaaccttcatgatgtatctgttcccggccctaggcccagagacaagagacagctcctggatccacctggtgacctgagcagggctgcagcccagatggagaaacagggcgacggcttccgggcactggcaggcctggccttctgcgaccctgagaagcagcacatctggcacatcccaggcctgtggcacggagcacctcccatggccgcagtgagcttggcctacagtgaagccatatttgaattgaagagatgcctactcgaaaacatcaggaacggcttgtcgaaccaaaacaaaaacatccagcagctcattgagctggtgagacggctgtgagtgtgcagagaaacccagttcaggtgtaggaggctgctgtgggcagccctgtctgatggggcacccgtgtggggctgtgctctggtgcctgagaatggctggtgcccaatcgacatgagaagacgaggaaaagacagggtttggagtctcctcaacagtgttaaaagaggaagtgacctcacagaccagctcagagatgttaccaagaatatcacagcccccagggtagggagacaagcagcagtttgttctgtctcagctcctgtcaaggatcctgcggggtgggccctctgtatagctgctctctgtcactggcccctggagtgggagcagcgtccttagtcactgcaggcccaggcgggcaggtggtcccaggacagaggtggggaagttgtcctgaggaagcagaagtaggccttgctcccgcccaacccaagggcctccagtggaccagcattcaagatgtgagtgcccgtggtgtgcaaggcactcccatggcaccgtatttattgactgatctgtgaaggcttccctgacccctgcccaggaagagttcactggtcgctctgttgtgccccacagcactttgttatacctctgccacacacttcacgcagcgcgttgtaactcatgtgtttacatgtctgtccccccagactgtgagctccttgagggcagggactgtacattctccagctctgtgtccccagggcctggcacattgtagacgcttaataaatgtctgttaaatgaa

SEQ ID NO: 198289 - DNA, 3563 bp, Homo sapiens
  Payload ID: 19127
  Gene Name: upregulator of cell proliferation
  Uniprot ID: Q8TCY9
  ENST ID: ENST00000402306
  CDS Start-End: 41-2809
aggaagcgaaggaggcgggagcggagacctcgctgcgctcatggcgtcgcccgggcattcagatttgggagaagtagccccagaaataaaagcatcagagagacgaacagctgtggccattgcagatttggaatggagagaaatggaaggagatgattgcgagttccgttatggagatggtacaaatgaggctcaggacaatgattttccaacagtggagagaagcaggcttcaagaaatgctgtcacttttgggcctagagacgtaccaggtccagaaactcagcctccaggactctctgcagatcagttttgacagtatgaagaactgggcccctcaggttcccaaagacttgccctggaatttcctcaggaagttgcaggccctcaatgctgatgccaggaataccactatggtgctggacgtgctcccagacgccaggcctgtggagaaggagagccagatggaagaggagatcatctactgggacccagctgatgaccttgctgccgacatttattccttttctgagctgcccacccctgatacgccagtgaaccccttagaccttctctgtgccctgctgctctcctcagacagtttcctgcaacaagaaatagcgttgaaaatggccctctgccagtttgcactcccactcgtgttgcctgactcggagaaccactaccatacatttctgctgtgggccatgcggggcattgtgaggacatggtggtcccagcccccaaggggcatggggagcttccgggaagacagcgtggtcttgtccagggcgcccgccttcgccttcgtgcgcatggacgtcagtagcaactccaagtcccagcttctcaacgccgtcctcagcccgggccacaggcagtgggactgcttctggcatcgggacctcaacttgggcaccaatgcccgggagatttcggatgggttggtagaaatttcctggttttttcccagcggaagggaggacttggacattttcccagaacctgtggcctttctgaacctgagaggtgacatcgggtctcactggctgcagtttaagctcttgacagaaatctcctccgctgtgtttatattgactgacaatatcagtaagaaggaatacaaattgctgtactccatgaaggagtcaaccacaaaatactacttcatcctgagtccctaccgtgggaagcgcaacacaaacctgagatttctgaataagttaattcctgtgctgaaaatagaccactcacatgtcctggtaaaggtcagcagcactgacagcgacagcttcgtgaagaggatccgggccatcgttgggaatgtgctgcgggcaccctgcaggcgggtatctgtggaggacatggcgcacgcagcccgcaaactgggcctaaaggtcgacgaggactgtgaggagtgtcagaaagcgaaagaccggatggagaggattaccaggaaaatcaaagactcggatgcctacagaagggacgagctgaggctgcagggggacccctggagaaaggcagcccaagtggagaaggagttctgccagctccagtgggccgtggacccccctgagaagcacagggctgagctgaggcggcggctgctagaacttcgaatgcagcagaacggccatgatccctcctcgggggtgcaggagttcatctcggggatcagcagcccctccttgagtgagaagcagtacttcctgaggtggatggagtggggcctggcacgggtggcccagccgcgactgagacagcctccggagacgcttctcaccctgagaccaaagcatgggggcaccacagacgtgggggagccgctctggcctgagcccctaggggtggaacacttcttgcgggagatgggacagttttatgaggctgagagctgtcttgtggaggcagggaggctgccggcaggccagaggcgttttgcccacttcccaggcttggcctcggagctgctgctgacagggctgcctctggagctaatcgatgggagcacgctgagcatgcccgtccgctgggtcacagggctcctgaaggagctgcacgtccgactggagagacggtcaaggctggtggttctgtcaaccgtcggggtgccaggcacgggcaagtccacactcctcaacaccatgtttgggctgcggtttgccacagggaagagctgcggtcctcgaggggccttcatgcagctcatcacagtggctgagggcttcagccaggacctgggctgtgaccacatcctggtgatagactccgggggcttgataggtggggccttgacgtcagctggggacagatttgagctggaggcttccttggccactctgctcatgggactgagcaatgtcaccgtgatcagtctagctgaaaccaaggacattccagcagctattctgcatgcatttctgaggttagaaaaaacggggcacatgcccaactaccagtttgtataccagaaccttcatgatgtatctgttcccggccctaggcccagagacaagagacagctcctggatccacctggtgacctgagcagggctgcagcccagatggagaaacagggcgacggcttccgggcactggcaggcctggccttctgcgaccctgagaagcagcacatctggcacatcccaggcctgtggcacggagcacctcccatggccgcagtgagcttggcctacagtgaagccatatttgaattgaagagatgcctactcgaaaacatcaggaacggcttgtcgaaccaaaacaaaaacatccagcagctcattgagctggtgagacggctgtgagtgtgcagagaaacccagttcaggtgtaggaggctgctgtgggcagccctgtctgatggggcacccgtgtggggctgtgctctggtgcctgagaatggctggtgcccaatcgacatgagaagacgaggaaaagacagggtttggagtctcctcaacagtgttaaaagaggaagtgacctcacagaccagctcagagatgttaccaagaatatcacagcccccagggtagggagacaagcagcagtttgttctgtctcagctcctgtcaaggatcctgcggggtgggccctctgtatagctgctctctgtcactggcccctggagtgggagcagcgtccttagtcactgcaggcccaggcgggcaggtggtcccaggacagaggtggggaagttgtcctgaggaagcagaagtaggccttgctcccgcccaacccaagggcctccagtggaccagcattcaagatgtgagtgcccgtggtgtgcaaggcactcccatggcaccgtatttattgactgatctgtgaaggcttccctgacccctgcccaggaagagttcactggtcgctctgttgtgccccacagcactttgttatacctctgccacacacttcacgcagcgcgttgtaactcatgtgtttacatgtctgtccccccagactgtgagctccttgagggcagggactgtacattctccagctctgtgtccccagggcctggcacattgtagacgcttaataaatgtctgttaaatgaa

SEQ ID NO: 198290 - DNA, 885 bp, Homo sapiens
  Payload ID: 19127
  Gene Name: upregulator of cell proliferation
  ENST ID: ENST00000426198
  CDS Start-End: 396-885
actgtggggccgtcgtcgccgcgtgccgagcgtcctggcgcggccgaggggaagcagcggggctgcccgggttacgctggccacccgcacctggtcctgtggcttcgaccactagtcagcaaggccccggagaggccagcgaagaggaggggctcgttggctttacggagacgcgcggagcaccctcaaggtgccacacgctcgcctgctccctgttcctacatcctgggcgtcttcccaggctgtcatataactcctgagaatagtggttcttaactctgatagaagtggaattactgggcaaagggcattcagatttgggagaagtagccccagaaataaaagcatcagagagacgaacagctgtggccattgcagatttggaatggagagaaatggaaggagatgattgcgagttccgttatggagatggtacaaatgaggctcaggacaatgattttccaacagtggagagaagcaggcttcaagaaatgctgtcacttttgggcctagagacgtaccaggtccagaaactcagcctccaggactctctgcagatcagttttgacagtatgaagaactgggcccctcaggttcccaaagacttgccctggaatttcctcaggaagttgcaggccctcaatgctgatgccaggaataccactatggtgctggacgtgctcccagacgccaggcctgtggagaaggagagccagatggaagaggagatcatctactgggacccagctgatgaccttgctgccgacatttattccttttctgagctgcccacccctgatacgccagtgaaccccttagaccttctctgtgccctgctgctctcctcagacagtttcctgcaacaagaaatagcgttgaaaatgg

SEQ ID NO: 198291 - DNA, 3596 bp, Homo sapiens
  Payload ID: 19127
  Gene Name: upregulator of cell proliferation
  Uniprot ID: Q8TCY9
  ENST ID: ENST00000443736
  CDS Start-End: 176-2842
cggccgcgcggaggaagcgaaggaggcgggagcggagacctcgctgcgctcatggcgtcgcccggaagtggaattactgggcaaagggcattcagatttgggagaagtagccccagaaataaaagcatcagagagacgaacagctgtggccattgcagatttggaatggagagaaatggaaggagatgattgcgagttccgttatggagatggtacaaatgaggctcaggacaatgattttccaacagtggagagaagcaggcttcaagaaatgctgtcacttttgggcctagagacgtaccaggtccagaaactcagcctccaggactctctgcagatcagttttgacagtatgaagaactgggcccctcaggttcccaaagacttgccctggaatttcctcaggaagttgcaggccctcaatgctgatgccaggaataccactatggtgctggacgtgctcccagacgccaggcctgtggagaaggagagccagatggaagaggagatcatctactgggacccagctgatgaccttgctgccgacatttattccttttctgagctgcccacccctgatacgccagtgaaccccttagaccttctctgtgccctgctgctctcctcagacagtttcctgcaacaagaaatagcgttgaaaatggccctctgccagtttgcactcccactcgtgttgcctgactcggagaaccactaccatacatttctgctgtgggccatgcggggcattgtgaggacatggtggtcccagcccccaaggggcatggggagcttccgggaagacagcgtggtcttgtccagggcgcccgccttcgccttcgtgcgcatggacgtcagtagcaactccaagtcccagcttctcaacgccgtcctcagcccgggccacaggcagtgggactgcttctggcatcgggacctcaacttgggcaccaatgcccgggagatttcggatgggttggtagaaatttcctggttttttcccagcggaagggaggacttggacattttcccagaacctgtggcctttctgaacctgagaggtgacatcgggtctcactggctgcagtttaagctcttgacagaaatctcctccgctgtgtttatattgactgacaatatcagtaagaaggaatacaaattgctgtactccatgaaggagtcaaccacaaaatactacttcatcctgagtccctaccgtgggaagcgcaacacaaacctgagatttctgaataagttaattcctgtgctgaaaatagaccactcacatgtcctggtaaaggtcagcagcactgacagcgacagcttcgtgaagaggatccgggccatcgttgggaatgtgctgcgggcaccctgcaggcgggtatctgtggaggacatggcgcacgcagcccgcaaactgggcctaaaggtcgacgaggactgtgaggagtgtcagaaagcgaaagaccggatggagaggattaccaggaaaatcaaagactcggatgcctacagaagggacgagctgaggctgcagggggacccctggagaaaggcagcccaagtggagaaggagttctgccagctccagtgggccgtggacccccctgagaagcacagggctgagctgaggcggcggctgctagaacttcgaatgcagcagaacggccatgatccctcctcgggggtgcaggagttcatctcggggatcagcagcccctccttgagtgagaagcagtacttcctgaggtggatggagtggggcctggcacgggtggcccagccgcgactgagacagcctccggagacgcttctcaccctgagaccaaagcatgggggcaccacagacgtgggggagccgctctggcctgagcccctaggggtggaacacttcttgcgggagatgggacagttttatgaggctgagagctgtcttgtggaggcagggaggctgccggcaggccagaggcgttttgcccacttcccaggcttggcctcggagctgctgctgacagggctgcctctggagctaatcgatgggagcacgctgagcatgcccgtccgctgggtcacagggctcctgaaggagctgcacgtccgactggagagacggtcaaggctggtggttctgtcaaccgtcggggtgccaggcacgggcaagtccacactcctcaacaccatgtttgggctgcggtttgccacagggaagagctgcggtcctcgaggggccttcatgcagctcatcacagtggctgagggcttcagccaggacctgggctgtgaccacatcctggtgatagactccgggggcttgataggtggggccttgacgtcagctggggacagatttgagctggaggcttccttggccactctgctcatgggactgagcaatgtcaccgtgatcagtctagctgaaaccaaggacattccagcagctattctgcatgcatttctgaggttagaaaaaacggggcacatgcccaactaccagtttgtataccagaaccttcatgatgtatctgttcccggccctaggcccagagacaagagacagctcctggatccacctggtgacctgagcagggctgcagcccagatggagaaacagggcgacggcttccgggcactggcaggcctggccttctgcgaccctgagaagcagcacatctggcacatcccaggcctgtggcacggagcacctcccatggccgcagtgagcttggcctacagtgaagccatatttgaattgaagagatgcctactcgaaaacatcaggaacggcttgtcgaaccaaaacaaaaacatccagcagctcattgagctggtgagacggctgtgagtgtgcagagaaacccagttcaggtgtaggaggctgctgtgggcagccctgtctgatggggcacccgtgtggggctgtgctctggtgcctgagaatggctggtgcccaatcgacatgagaagacgaggaaaagacagggtttggagtctcctcaacagtgttaaaagaggaagtgacctcacagaccagctcagagatgttaccaagaatatcacagcccccagggtagggagacaagcagcagtttgttctgtctcagctcctgtcaaggatcctgcggggtgggccctctgtatagctgctctctgtcactggcccctggagtgggagcagcgtccttagtcactgcaggcccaggcgggcaggtggtcccaggacagaggtggggaagttgtcctgaggaagcagaagtaggccttgctcccgcccaacccaagggcctccagtggaccagcattcaagatgtgagtgcccgtggtgtgcaaggcactcccatggcaccgtatttattgactgatctgtgaaggcttccctgacccctgcccaggaagagttcactggtcgctctgttgtgccccacagcactttgttatacctctgccacacacttcacgcagcgcgttgtaactcatgtgtttacatgtctgtccccccagactgtgagctccttgagggcagggactgtacattctccagctctgtgtccccagggcctggcacattgtagacgcttaataaatgtctgttaaatgaa

SEQ ID NO: 198292 - DNA, 591 bp, Homo sapiens
  Payload ID: 19127
  Gene Name: upregulator of cell proliferation
  ENST ID: ENST00000455877
  CDS Start-End: 225-591
acgctggccacccgcacctggtcctgtggcttcgaccactagtcagcaaggccccggagaggccagcgaagaggaggggctcgttggctttacggagacgcgcggagcaccctcaaggtgccacacgctcgcctgctccctgttcctacatcctgggcgtcttcccaggctgtcatataactcctgagaatagtggttcttaactctatttggaatggagagaaatggaaggagatgattgcgagttccgttatggagatggtacaaatgaggctcaggacaatgattttccaacagtggagagaagcaggcttcaagaaatgctgtcacttttgggcctagagacgtaccaggtccagaaactcagcctccaggactctctgcagatcagttttgacagtatgaagaactgggcccctcaggttcccaaagacttgccctggaatttcctcaggaagttgcaggccctcaatgctgatgccaggaataccactatggtgctggacgtgctcccagacgccaggcctgtggagaaggagagccagatggaagaggagatcatctactgggacccagctgatgaccttgctg

SEQ ID NO: 198293 - DNA, 4042 bp, Homo sapiens
  Payload ID: 19127
  Gene Name: upregulator of cell proliferation
  Uniprot ID: Q8TCY9
  ENST ID: ENST00000453200
  CDS Start-End: 495-3290
attttacaatgggtaccgtctcagagaggccagcaactcgtccaacacagcactgcaagtaagaagtaggaaagttattgttttgcttaataataaggccttacgcttcagggctaaagaaaagccttttcttacagaaattaaactccaattacagaaaggtgtgaagttcagtaaggccctggggcaggttatcctacagcttttggcaccgcaggcaccgcccggcgagttccggcctccaggcacctgggcaggtgggcgttgggcgggctgcgggctgacctgggccgccccgcccccaccccgccccagctgtccccgggctgctccgagaggaccccgggcccaccttaccccacctcaccccacctccacccctggagcgcgtcccggagcgggcgggcggccggcgggccaggcccctccccggcgccgagccgcggccgcgcggaggaagcgaaggaggcgggagcggagacctcgctgcgctcatggcgtcgcccgggatagaagtggaattactgggcaaagggcattcagatttgggagaagtagccccagaaataaaagcatcagagagacgaacagctgtggccattgcagatttggaatggagagaaatggaaggagatgattgcgagttccgttatggagatggtacaaatgaggctcaggacaatgattttccaacagtggagagaagcaggcttcaagaaatgctgtcacttttgggcctagagacgtaccaggtccagaaactcagcctccaggactctctgcagatcagttttgacagtatgaagaactgggcccctcaggttcccaaagacttgccctggaatttcctcaggaagttgcaggccctcaatgctgatgccaggaataccactatggtgctggacgtgctcccagacgccaggcctgtggagaaggagagccagatggaagaggagatcatctactgggacccagctgatgaccttgctgccgacatttattccttttctgagctgcccacccctgatacgccagtgaaccccttagaccttctctgtgccctgctgctctcctcagacagtttcctgcaacaagaaatagcgttgaaaatggccctctgccagtttgcactcccactcgtgttgcctgactcggagaaccactaccatacatttctgctgtgggccatgcggggcattgtgaggacatggtggtcccagcccccaaggggcatggggagcttccgggaagacagcgtggtcttgtccagggcgcccgccttcgccttcgtgcgcatggacgtcagtagcaactccaagtcccagcttctcaacgccgtcctcagcccgggccacaggcagtgggactgcttctggcatcgggacctcaacttgggcaccaatgcccgggagatttcggatgggttggtagaaatttcctggttttttcccagcggaagggaggacttggacattttcccagaacctgtggcctttctgaacctgagaggtgacatcgggtctcactggctgcagtttaagctcttgacagaaatctcctccgctgtgtttatattgactgacaatatcagtaagaaggaatacaaattgctgtactccatgaaggagtcaaccacaaaatactacttcatcctgagtccctaccgtgggaagcgcaacacaaacctgagatttctgaataagttaattcctgtgctgaaaatagaccactcacatgtcctggtaaaggtcagcagcactgacagcgacagcttcgtgaagaggatccgggccatcgttgggaatgtgctgcgggcaccctgcaggcgggtatctgtggaggacatggcgcacgcagcccgcaaactgggcctaaaggtcgacgaggactgtgaggagtgtcagaaagcgaaagaccggatggagaggattaccaggaaaatcaaagactcggatgcctacagaagggacgagctgaggctgcagggggacccctggagaaaggcagcccaagtggagaaggagttctgccagctccagtgggccgtggacccccctgagaagcacagggctgagctgaggcggcggctgctagaacttcgaatgcagcagaacggccatgatccctcctcgggggtgcaggagttcatctcggggatcagcagcccctccttgagtgagaagcagtacttcctgaggtggatggagtggggcctggcacgggtggcccagccgcgactgagacagcctccggagacgcttctcaccctgagaccaaagcatgggggcaccacagacgtgggggagccgctctggcctgagcccctaggggtggaacacttcttgcgggagatgggacagttttatgaggctgagagctgtcttgtggaggcagggaggctgccggcaggccagaggcgttttgcccacttcccaggcttggcctcggagctgctgctgacagggctgcctctggagctaatcgatgggagcacgctgagcatgcccgtccgctgggtcacagggctcctgaaggagctgcacgtccgactggagagacggtcaaggctggtggttctgtcaaccgtcggggtgccaggcacgggcaagtccacactcctcaacaccatgtttgggctgcggtttgccacagggaagagctgcggtcctcgaggggccttcatgcagctcatcacagtggctgagggcttcagccaggacctgggctgtgaccacatcctggtgatagactccgggggcttgataggtggggccttgacgtcagctggggacagatttgagctggaggcttccttggccactctgctcatgggactgagcaatgtcaccgtgatcagtctagctgaaaccaaggacattccagcagctattctgcatgcatttctgaggttagaaaaaacggggcacatgcccaactaccagtttgtataccagaaccttcatgatgtatctgttcccggccctaggcccagagacaagagacagctcctggatccacctggtgacctgagcagggctgcagcccagatggagaaacagggcgacggcttccgggcactggcaggcctggccttctgcgaccctgagaagcagcacatctggcacatcccaggcctgtggcacggagcacctcccatggccgcagtgagcttggcctacagtgaagccatatttgaattgaagagatgcctactcgaaaacatcaggaacggcttgtcgaaccaaaacaaaaacatccagcagctcattgagctggtgagacggctgtgagtgtgcagagaaacccagttcaggtgtaggaggctgctgtgggcagccctgtctgatggggcacccgtgtggggctgtgctctggtgcctgagaatggctggtgcccaatcgacatgagaagacgaggaaaagacagggtttggagtctcctcaacagtgttaaaagaggaagtgacctcacagaccagctcagagatgttaccaagaatatcacagcccccagggtagggagacaagcagcagtttgttctgtctcagctcctgtcaaggatcctgcggggtgggccctctgtatagctgctctctgtcactggcccctggagtgggagcagcgtccttagtcactgcaggcccaggcgggcaggtggtcccaggacagaggtggggaagttgtcctgaggaagcagaagtaggccttgctcccgcccaacccaagggcctccagtggaccagcattcaagatgtgagtgcccgtggtgtgcaaggcactcccatggcaccgtatttattgactgatctgtgaaggcttccctgacccctgcccaggaagagttcactggtcgctctgttgtgccccacagcactttgttatacctctgccacacacttcacgcagcgcgttgtaactcatgtgtttacatgtctgtccccccagactgtgagctccttgagggcagggactgtacattctccagctctgtgtccccagggcctggcacattgtagacgcttaataaatgtctgttaaatg

SEQ ID NO: 198294 - DNA, 365 bp, Homo sapiens
  Payload ID: 19127
  Gene Name: upregulator of cell proliferation
  ENST ID: ENST00000446958
  CDS Start-End: 53-343
gcggccgcgcggaggaagcgaaggaggcgggagcggagacctcgctgcgctcatggcgtcgcccgggcattcagatttgggagaagtagccccagaaataaaagcatcagagagacgaacagctgtggccattgcagatttggaatggagagaaatggaaggagatgattgcgagttccgttatggagatggtacaaatgaggctcaggacaatgattttccaacagatcaggatactgggcccagagcttccaaacaacctgccaagggccacacactgggcagaagtgttttctttgtctttttcccattgccttttactaccatgctacttaaaaaataaaaagttattccatgtctggaca

SEQ ID NO: 198295 - DNA, 592 bp, Homo sapiens
  Payload ID: 19127
  Gene Name: upregulator of cell proliferation
  ENST ID: ENST00000439702
  CDS Start-End: 50-592
ggagacctcgctgcgctcatggcgtcgcccggatttggaatggagagaaatggaaggagatgattgcgagttccgttatggagatggtacaaatgaggctcaggacaatgattttccaacagtggagagaagcaggcttcaagaaatgctgtcacttttgggcctagagacgtaccaggtccagaaactcagcctccaggactctctgcagatcagttttgacagtatgaagaactgggcccctcaggttcccaaagacttgccctggaatttcctcaggaagttgcaggccctcaatgctgatgccaggaataccactatggtgctggacgtgctcccagacgccaggcctgtggagaaggagagccagatggaagaggagatcatctactgggacccagctgatgaccttgctgccgacatttattccttttctgagctgcccacccctgatacgccagtgaaccccttagaccttctctgtgccctgctgctctcctcagacagtttcctgcaacaagaaatagcgttgaaaatggccctctgccagtttgcactcccactcgtgttgcctgactcggagaaccactac

SEQ ID NO: 198296 - DNA, 2074 bp, Homo sapiens
  Payload ID: 19128
  Gene Name: upstream binding protein 1 (LBP-1a)
  Uniprot ID: Q9NZI7
  ENST ID: ENST00000283628
  CDS Start-End: 255-1877
ctgggccgcgaggcgcggggagtggccctaagcgcggggctgtacggggagggccgaggcgtggggcgaacgccggggcggggtcggggcggggccgggggaggcggaagcggcgcgtgaacctaagtcggagtcgcgttgaagccagcgtccggccggcagagcggcgtcggcggggacgcgccagcggagctccggctccttcgccctggacgcggaggccgcggtgtgcggggcgacggcgaggccggaagatggcctgggtgctcaagatggacgaggtgatcgagtccgggctggtgcacgacttcgacgccagcctctcgggcatcgggcaggaactgggcgccggcgcttacagcatgagtgatgtcttggcattgcccattttcaagcaggaagattccagccttccattggatggtgaaacagagcacccaccctttcagtatgtgatgtgtgctgcaacgtcaccagcagtaaaactgcatgatgaaacgcttacttatttgaaccaaggtcagtcatatgaaattcggatgctggataatcggaaaatgggtgatatgcctgagatcaatggaaaattagtaaagagcatcataagggttgtattccatgacagacggctacaatacacagagcatcagcaacttgaaggatggaagtggaatcgcccaggagacagacttcttgatttagatattccaatgtctgtgggaataattgacacaaggacgaatccaagccagttaaatgcggttgaatttctgtgggacccagcaaaacgcacctctgctttcattcaggtacactgcatcagcacagaatttactccacggaagcacggaggtgaaaagggagtgccctttaggatccaggttgacacctttaagcagaatgaaaatggagaatacacagatcatctacactcagctagctgccaaatcaaagtttttaagcctaaaggtgcagacaggaaacaaaaaactgaccgagagaagatggagaagagaacagctcatgaaaaagaaaagtatcagccgtcctatgataccacaatcctcacagagatgaggcttgagcctataattgaagatgcagttgaacatgagcagaaaaagtccagcaagcggactttgccagcagactacggtgattctctggcaaagcgaggcagttgttctccgtggcccgatgcccccacagcctatgtgaataacagcccttccccagcgcccactttcacctccccacagcagagcacttgcagtgtcccagacagcaattcttcttccccaaatcatcagggagatggagcttcacagacctctggtgaacaaattcagccttcagctacgatccaggaaacacagcaatggctgctcaaaaacagattctcttcctacacaagactgttctctaatttttcaggtgccgacttattaaaactgacaaaggaggatttagttcaaatttgtggtgcagccgatggaattcggctctataattcactgaagtcaaggtcggttagaccccgtttaaccatctatgtctgccgggagcagccaagcagcacagtgctgcaagggcagcagcaagctgcaagcagtgcaagcgagaatggcagtggggcaccctatgtttatcatgcaatctacttggaagaaatgattgcctcagaagttgctcgaaaacttgcgctggtgtttaatatccctctccaccaaattaatcaggtttacagacagggtcccaccggtattcacattcttgttagtgatcagatggttcagaattttcaagatgagagttgttttttattctccacagtaaaagctgaaagtagtgatggcatccacataattttgaagtgatgtcttatatagactgaactgtattcagtaccaaatagtcacgcttaaaagtgtgtgaagactgaatccaagaagtcttgggattggattttaccatatgaaatgtttcatattgaaaacacaagatgacctttctaatgagctgtatgagaggtgaatctcctcactgtcactgccatagccaagcatcctcatga

SEQ ID NO: 198297 - DNA, 4148 bp, Homo sapiens
  Payload ID: 19128
  Gene Name: upstream binding protein 1 (LBP-1a)
  Uniprot ID: Q9NZI7
  ENST ID: ENST00000283629
  CDS Start-End: 531-2153
gtcgcgttgaagccagcgtccggccggcagagcggcgtcggcggggttggccggggcggtgtggcgctagagcctgggcgggccgggggcaaggagtcaaggcttgggggcgggtgacgggcgggcggagggcttgcccccgtgtggtcctcggagcggcccgaggtccagcctcccagcggtcccggaggaggatgcgaccggggggccccgggcggggcggtcggcggcggctgcagcgctagcggcgcgggggctgggcggcggcgccggcatgaggcgcagggccggtgtccgcgggagggtggcgctgccggcggcccggccgctcccgctgcaattgctcgctgggctcgtcgtgccctgccagtggggcccccgcagctctcgtcccggccgccgctggtgaccactcgccgcccctccggaggcttcacccgcgccctcccccaggacgcgccagcggagctccggctccttcgccctggacgcggaggccgcggtgtgcggggcgacggcgaggccggaagatggcctgggtgctcaagatggacgaggtgatcgagtccgggctggtgcacgacttcgacgccagcctctcgggcatcgggcaggaactgggcgccggcgcttacagcatgagtgatgtcttggcattgcccattttcaagcaggaagattccagccttccattggatggtgaaacagagcacccaccctttcagtatgtgatgtgtgctgcaacgtcaccagcagtaaaactgcatgatgaaacgcttacttatttgaaccaaggtcagtcatatgaaattcggatgctggataatcggaaaatgggtgatatgcctgagatcaatggaaaattagtaaagagcatcataagggttgtattccatgacagacggctacaatacacagagcatcagcaacttgaaggatggaagtggaatcgcccaggagacagacttcttgatttagatattccaatgtctgtgggaataattgacacaaggacgaatccaagccagttaaatgcggttgaatttctgtgggacccagcaaaacgcacctctgctttcattcaggtacactgcatcagcacagaatttactccacggaagcacggaggtgaaaagggagtgccctttaggatccaggttgacacctttaagcagaatgaaaatggagaatacacagatcatctacactcagctagctgccaaatcaaagtttttaagcctaaaggtgcagacaggaaacaaaaaactgaccgagagaagatggagaagagaacagctcatgaaaaagaaaagtatcagccgtcctatgataccacaatcctcacagagatgaggcttgagcctataattgaagatgcagttgaacatgagcagaaaaagtccagcaagcggactttgccagcagactacggtgattctctggcaaagcgaggcagttgttctccgtggcccgatgcccccacagcctatgtgaataacagcccttccccagcgcccactttcacctccccacagcagagcacttgcagtgtcccagacagcaattcttcttccccaaatcatcagggagatggagcttcacagacctctggtgaacaaattcagccttcagctacgatccaggaaacacagcaatggctgctcaaaaacagattctcttcctacacaagactgttctctaatttttcaggtgccgacttattaaaactgacaaaggaggatttagttcaaatttgtggtgcagccgatggaattcggctctataattcactgaagtcaaggtcggttagaccccgtttaaccatctatgtctgccgggagcagccaagcagcacagtgctgcaagggcagcagcaagctgcaagcagtgcaagcgagaatggcagtggggcaccctatgtttatcatgcaatctacttggaagaaatgattgcctcagaagttgctcgaaaacttgcgctggtgtttaatatccctctccaccaaattaatcaggtttacagacagggtcccaccggtattcacattcttgttagtgatcagatggttcagaattttcaagatgagagttgttttttattctccacagtaaaagctgaaagtagtgatggcatccacataattttgaagtgatgtcttatatagactgaactgtattcagtaccaaatagtcacgcttaaaagtgtgtgaagactgaatccaagaagtcttgggattggattttaccatatgaaatgtttcatattgaaaacacaagatgacctttctaatgagctgtatgagaggtgaatctcctcactgtcactgccatagccaagcatcctcatgagagtgagcacatcggcacagcatgcatccagctctggaggccacggtgcaggcatagctgcctgctgctctggcagaggccagtaaatacagttcctagaagcagcctttgctgtctttttacactgtatgcggtttggaaatgaatgtagaaacttactgtgggcatttacctttctgtgccagtttggcttttattgcctgaaccttatgctgacctggagaggagatgggggacagtgctgttgtggggccagcagtgaatctgtatgcggagagttgtgttgtgctgatgtggccgttggtggtcaggtaagaggctcggcaccttcttggaagaaatcatgtctgagggtgtacgtttgatatgatcatgccagattggagaagatccaagccaggaagatgggcttgaagcaaactgcattatcaggagtaccttggtgagaggatcagtgtaaatcctaataggtacaaagacttttgtgttttggctttgtcacagatttattgaaaaacttttttgcttctgcttccatttttagcattttagtttctggttttcatttttggagattccttgccttttaaactcgtggtttttctctcattttcttccctctctccctccatctctgaccacccccaccctaaccccccacccccaccatcctattaaacatttttaaagccctaccccagacattggaaataggtgacccaagtagggggagaaagtattattgttgatagcttctgactaggtgttaagggatcttcattatgaacaagatgaatttttttctggaaacactagatgttatcaatcaaacactaaaatgtaccatacaaatcccttaagcctctcaaatattgagctttagtacaatcatggatagacattctggtgatgatttaggggctttttatacaccacatactagcttctttctctataagagtgcctctttcataaaaccaaatgcttgtctgctagcatacttttcaaagggaatccactgttttctcactttcctcccatatctccgtccttcatccaaaaccttcccagaatccatcagcaagcatgtttgaggcctgtggtgtaggggactgaattttttttttaacttctattccattttaattgtaggatatctttgtccatatacccaggtgtcctgatttgaatgtactatttgatcctcattgtgttcaggcaaaaaataggaaatgagtaattttgagtttgaaatctctcccagaagacaaactacttcagtgagtaaaagctttgacattttatgttttattcataaagggggttaattatttgctacaaagaagcacgatctattttcatcatcgatttgaaaatatctgtaactcctatagatcctataggcagagagttttcctttctgactttttccctttgctttcgtgtgaccacatgttttctgtaccagtcactggggaaagaagtgagtttatctcgtttgttttaaaagttttgcttgtctatttagcattcctttttgggtctcaagatttatggaacaataaatgtcatttaatgctgtgtgcttattttgaattcctcatcaggttttagaagcggggtaaaaatacttagatgcttatcagacttgaaattatactgagtggcattgaacgtgagtttgtcccagtgaaacaggctaaataaattttggcaccagcaaatttgttactttgtttttttaatagtaggatgtacacatttcagtataataaatgttttctgattgttttgcaaa

SEQ ID NO: 198298 - DNA, 859 bp, Homo sapiens
  Payload ID: 19128
  Gene Name: upstream binding protein 1 (LBP-1a)
  ENST ID: ENST00000411650
  CDS Start-End: 275-769
cacaaggacgaatccaagccagttaaatgcggttgaatttctgtgggacccagcaaaacgcacctctgctttcattcaggtacactgcatcagcacagaatttactccacggaagcacggaggtgaaaagggagtgccctttaggatccaggttgacacctttaagcagaatgaaaatggagaatacacagatcatctacactcagctagctgccaaatcaaagtttttaagcctaaaggtgcagacaggaaacaaaaaactgaccgagagaagatggagaagagaacagctcatgaaaaagaaaagtatcagccgtcctatgataccacaatcctcacagagtgttctccgtggcccgatgcccccacagcctatgtgaataacagcccttccccagcgcccactttcacctccccacagcagagcacttgcagtgtcccagacagcaattcttcttccccaaatcatcagggagatggagcttcacagacctctggtgaacaaattcagccttcagctacgatccaggaaacacagcaatggctgctcaaaaacagattctcttcctacacaagactgttctctaatttttcaggtgccgacttattaaaactgacaaaggaggatttagttcaaatttgtggtgcagccgatggaattcggctctataattcactgaagtcaagggcaggcccagatatgatgcaggcactgatgagggcagaggtagactgtaagactggtagaaatgcacatgggcagtactgatttcttgaagacgactgggtttgttgccaagaaaacaaaacttctaatttaggtcggttagaccccgtttaaccatctatgtctgccggg

SEQ ID NO: 198299 - DNA, 3669 bp, Homo sapiens
  Payload ID: 19128
  Gene Name: upstream binding protein 1 (LBP-1a)
  Uniprot ID: Q9NZI7
  ENST ID: ENST00000447368
  CDS Start-End: 163-1677
agtggggcccccgcagctctcgtcccggccgccgctggtgaccactcgccgcccctccggaggcttcacccgcgccctcccccaggacgcgccagcggagctccggctccttcgccctggacgcggaggccgcggtgtgcggggcgacggcgaggccggaagatggcctgggtgctcaagatggacgaggtgatcgagtccgggctggtgcacgacttcgacgccagcctctcgggcatcgggcaggaactgggcgccggcgcttacagcatgagtgatgtcttggcattgcccattttcaagcaggaagattccagccttccattggatggtgaaacagagcacccaccctttcagtatgtgatgtgtgctgcaacgtcaccagcagtaaaactgcatgatgaaacgcttacttatttgaaccaaggtcagtcatatgaaattcggatgctggataatcggaaaatgggtgatatgcctgagatcaatggaaaattagtaaagagcatcataagggttgtattccatgacagacggctacaatacacagagcatcagcaacttgaaggatggaagtggaatcgcccaggagacagacttcttgatttagatattccaatgtctgtgggaataattgacacaaggacgaatccaagccagttaaatgcggttgaatttctgtgggacccagcaaaacgcacctctgctttcattcaggtacactgcatcagcacagaatttactccacggaagcacggaggtgaaaagggagtgccctttaggatccaggttgacacctttaagcagaatgaaaatggagaatacacagatcatctacactcagctagctgccaaatcaaagtttttaagcctaaaggtgcagacaggaaacaaaaaactgaccgagagaagatggagaagagaacagctcatgaaaaagaaaagtatcagccgtcctatgataccacaatcctcacagagtgttctccgtggcccgatgcccccacagcctatgtgaataacagcccttccccagcgcccactttcacctccccacagcagagcacttgcagtgtcccagacagcaattcttcttccccaaatcatcagggagatggagcttcacagacctctggtgaacaaattcagccttcagctacgatccaggaaacacagcaatggctgctcaaaaacagattctcttcctacacaagactgttctctaatttttcaggtgccgacttattaaaactgacaaaggaggatttagttcaaatttgtggtgcagccgatggaattcggctctataattcactgaagtcaaggtcggttagaccccgtttaaccatctatgtctgccgggagcagccaagcagcacagtgctgcaagggcagcagcaagctgcaagcagtgcaagcgagaatggcagtggggcaccctatgtttatcatgcaatctacttggaagaaatgattgcctcagaagttgctcgaaaacttgcgctggtgtttaatatccctctccaccaaattaatcaggtttacagacagggtcccaccggtattcacattcttgttagtgatcagatggttcagaattttcaagatgagagttgttttttattctccacagtaaaagctgaaagtagtgatggcatccacataattttgaagtgatgtcttatatagactgaactgtattcagtaccaaatagtcacgcttaaaagtgtgtgaagactgaatccaagaagtcttgggattggattttaccatatgaaatgtttcatattgaaaacacaagatgacctttctaatgagctgtatgagaggtgaatctcctcactgtcactgccatagccaagcatcctcatgagagtgagcacatcggcacagcatgcatccagctctggaggccacggtgcaggcatagctgcctgctgctctggcagaggccagtaaatacagttcctagaagcagcctttgctgtctttttacactgtatgcggtttggaaatgaatgtagaaacttactgtgggcatttacctttctgtgccagtttggcttttattgcctgaaccttatgctgacctggagaggagatgggggacagtgctgttgtggggccagcagtgaatctgtatgcggagagttgtgttgtgctgatgtggccgttggtggtcaggtaagaggctcggcaccttcttggaagaaatcatgtctgagggtgtacgtttgatatgatcatgccagattggagaagatccaagccaggaagatgggcttgaagcaaactgcattatcaggagtaccttggtgagaggatcagtgtaaatcctaataggtacaaagacttttgtgttttggctttgtcacagatttattgaaaaacttttttgcttctgcttccatttttagcattttagtttctggttttcatttttggagattccttgccttttaaactcgtggtttttctctcattttcttccctctctccctccatctctgaccacccccaccctaaccccccacccccaccatcctattaaacatttttaaagccctaccccagacattggaaataggtgacccaagtagggggagaaagtattattgttgatagcttctgactaggtgttaagggatcttcattatgaacaagatgaatttttttctggaaacactagatgttatcaatcaaacactaaaatgtaccatacaaatcccttaagcctctcaaatattgagctttagtacaatcatggatagacattctggtgatgatttaggggctttttatacaccacatactagcttctttctctataagagtgcctctttcataaaaccaaatgcttgtctgctagcatacttttcaaagggaatccactgttttctcactttcctcccatatctccgtccttcatccaaaaccttcccagaatccatcagcaagcatgtttgaggcctgtggtgtaggggactgaattttttttttaacttctattccattttaattgtaggatatctttgtccatatacccaggtgtcctgatttgaatgtactatttgatcctcattgtgttcaggcaaaaaataggaaatgagtaattttgagtttgaaatctctcccagaagacaaactacttcagtgagtaaaagctttgacattttatgttttattcataaagggggttaattatttgctacaaagaagcacgatctattttcatcatcgatttgaaaatatctgtaactcctatagatcctataggcagagagttttcctttctgactttttccctttgctttcgtgtgaccacatgttttctgtaccagtcactggggaaagaagtgagtttatctcgtttgttttaaaagttttgcttgtctatttagcattcctttttgggtctcaagatttatggaacaataaatgtcatttaatgctgtgtgcttattttgaattcctcatcaggttttagaagcggggtaaaaatacttagatgcttatcagacttgaaattatactgagtggcattgaacgtgagtttgtcccagtgaaacaggctaaataaattttggcaccagcaaatttgttactttgtttttttaatagtaggatgtacacatttcagtataataaatgttttctgattgttttgc

SEQ ID NO: 198300 - DNA, 581 bp, Homo sapiens
  Payload ID: 19128
  Gene Name: upstream binding protein 1 (LBP-1a)
  ENST ID: ENST00000456378
  CDS Start-End: 138-581
gtgcggggacgcagcgaggccaccccggctgggaacagccgcgtgggcggggccgcattgcactctctggacagttcctgggccgcgaggcgcggggagtggccctaagcgcggggctgtacggggagggccggaagatggcctgggtgctcaagatggacgaggtgatcgagtccgggctggtgcacgacttcgacgccagcctctcgggcatcgggcaggaactgggcgccggcgcttacagcatgagtgatgtcttggcattgcccattttcaagcaggaagattccagccttccattggatggtgaaacagagcacccaccctttcagtatgtgatgtgtgctgcaacgtcaccagcagtaaaactgcatgatgaaacgcttacttatttgaaccaaggtcagtcatatgaaattcggatgctggataatcggaaaatgggtgatatgcctgagatcaatggaaaattagtaaagagcatcataagggttgtattccatgacagacggctacaatacacagagcatcagcaacttgaaggatggaagtggaatcgcccaggagacagacttcttgat

SEQ ID NO: 198301 - DNA, 4997 bp, Homo sapiens
  Payload ID: 19129
  Gene Name: upstream binding transcription factor, RNA polymerase I
  Uniprot ID: P17480
  ENST ID: ENST00000302904
  CDS Start-End: 494-2788
agacacacaccagtggcgacaggggagagttggaaagacgcaggagagaagcaggaggcaggaggcagcggggatggagcaatgggagcgggaagcaggcaggtttccttgcaaatccccctccggcctcacgccgtctcgccggccccggcaggggagcgaggaccccggcgaacagatggaggagtggagctcgctctaggcagctgggcttggccggagaatggaggagccaccaagcgaccggctgattggaagagaaacgcagagcgatggaggcggggtaggaggacgatttctctgcggggactggcggcggcgtacacgcccgggtcgggcgctgcagagcttggctggctttcaacccgcgctcgccggctccagccccgcgcgcccccacccctagccctcccggcggctccgcagggtgaggtggctttgaccccgggttgcccggccagcacgaccgaggaggtggctggacagctggaggatgaacggagaagccgactgccccacagacctggaaatggccgcccccaaaggccaagaccgttggtcccaggaagacatgctgactttgctggaatgcatgaagaacaaccttccatccaatgacagctccaagttcaaaaccaccgaatcacacatggactgggaaaaagtagcatttaaagacttttctggagacatgtgcaagctcaaatgggtggagatttctaatgaggtgaggaagttccgtacattgacagaattgatcctcgatgctcaggaacatgttaaaaatccttacaaaggcaaaaaactcaagaaacacccagacttcccaaagaagcccctgaccccttatttccgcttcttcatggagaagcgggccaagtatgcgaaactccaccctgagatgagcaacctggacctaaccaagattctgtccaagaaatacaaggagcttccggagaagaagaagatgaaatatattcaggacttccagagagagaaacaggagttcgagcgaaacctggcccgattcagggaggatcaccccgacctaatccagaatgccaagaaatcggacatcccagagaagcccaaaaccccccagcagctgtggtacacccacgagaagaaggtgtatctcaaagtgcggccagatgccactacgaaggaggtgaaggactccctggggaagcagtggtctcagctctcggacaaaaagaggctgaaatggattcataaggccctggagcagcggaaggagtacgaggagatcatgagagactatatccagaagcacccagagctgaacatcagtgaggagggtatcaccaagtccaccctcaccaaggccgaacgccagctcaaggacaagtttgacgggcgacccaccaagccacctccgaacagctactcgctgtactgcgcagagctcatggccaacatgaaggacgtgcccagcacagagcgcatggtgctgtgcagccagcagtggaagctgctgtcccagaaggagaaggacgcctatcacaagaagtgtgatcagaaaaagaaagattacgaggtggagctgctccgtttcctcgagagcctgcctgaggaggagcagcagcgggtcttgggggaagagaagatgctgaacatcaacaagaagcaggccaccagccccgcctccaagaagccagcccaggaagggggcaagggcggctccgagaagcccaagcggcccgtgtcggccatgttcatcttctcggaggagaaacggcggcagctgcaggaggagcggcctgagctctccgagagcgagctgacccgcctgctggcccgaatgtggaacgacctgtctgagaagaagaaggccaagtacaaggcccgagaggcggcgctcaaggctcagtcggagaggaagcccggcggggagcgcgaggaacggggcaagctgcccgagtcccccaaaagagctgaggagatctggcaacagagcgttatcggcgactacctggcccgcttcaagaatgaccgggtgaaggccttgaaagccatggaaatgacctggaataacatggaaaagaaggagaaactgatgtggattaagaaggcagccgaagaccaaaagcgatatgagagagagctgagtgagatgcgggcacctccagctgctacaaattcttccaagaagatgaaattccagggagaacccaagaagcctcccatgaacggttaccagaagttctcccaggagctgctgtccaatggggagctgaaccacctgccgctgaaggagcgcatggtggagatcggcagtcgctggcagcgcatctcccagagccagaaggagcactacaaaaagctggccgaggagcagcaaaagcagtacaaggtgcacctggacctctgggttaagagcctgtctccccaggaccgtgcagcatataaagagtacatctccaataaacgtaagagcatgaccaagctgcgaggcccaaaccccaaatccagccggactactctgcagtccaagtcggagtccgaggaggatgatgaagaggatgaggatgacgaggacgaggatgaagaagaggaagatgatgagaatggggactcctctgaagatggcggcgactcctctgagtccagcagcgaggacgagagcgaggatggggatgagaatgaagaggatgacgaggacgaagacgacgacgaggatgacgatgaggatgaagataatgagtccgagggcagcagctccagctcctcctcctcaggggactcctcagactctgactccaactgaggctcagccccaccccagggcagccagggagagcccaggagctcccctccccaactgaccacctttgtttctcccccatgttctgtcccttgcccccctggcctcccccactttctttctttctttaaaaaaaaaaaaaaatacggtgggggtagggggctggaggagcccaggccaggactctgcagcctcagagacatcagcccttgggggtcctcctccagggacagcaactatcagactaagccagcaccggaccagcctggcccaccccacccacttctgcacttgcggttccggcatggacaatggaccggagagtgggggtggggggtcccaaagagtttgatgaggccctccacacctgcggcccaatccaaggtggggtggaagcttggggaagacccattccttcccagaggggcctgccacctggacccctgcattggaactggaggcagggaacatggggaggaggagggtcggtgccttcaagaaaacaggcactgccctggtggccctctcccctgccccctgcaggaaggagctgcctggacccgttcatgggggagggggcagaagtgttttttatatatgtgtatatatttttttttaagctctgagctgtcaacgagacgtttcctaccgatctcggctgccgtctctgttgtcatttctgggagagggagggtttaggggtagatttggaaccttttaaaaatggtcttgatgtatgtggaagagagtatgtgtatgtgtgttcctgtacatagcatgggtgcagctgtggatgtgtgcaaaagagtgtgagtgtgtgtgtgtgtgtgtaaaggggtctgtcctagagcccacatcagtttgttgtgaatctggaaaaagggtcggtgagggccgggagatgttgaccctggtgggagcaggctgaggctgccccgttctccacatcctctgttttgcccagtctctgattccattagggggagtgtgctgaagccattctcggatgcttcccagaccaggctccctctgccagagtcacatgcatccgagctgctggtctccattgtccagcaggaaggcggaaaggcaggcaagatggtgtgaagcttaaagcttgtatttgatggaaaaggtctcccctgttcatctgagaggccaagcctggccaccccaggctcagaacctgggcttcaagaaatgtgctgggagctcctaacttacacatccctccagccttccttgaatcctcccaccaccccctatttcctttaatttctcaggtctgctccctcctcccccaaccccacagctgggcaagaagtctgcaaaagctgcatctgcagctgtctctaactcttcccagccatctcccgtattttttggtaccttgattccttgactcttaataagccaagccaccttatctctgtagttcttatttttttgttgactaaatttggggggttcttttttatggtcatgtcactgacctattaaattggggcttggtgcttttccaccttccccctctgaatgaaagccaaggaatgggggaagagcgggaactctgccgcggaggtggagcaagaacggtgaagggccctggtcccagagaggctggtgggtccctctcccaaaggaaggcagacagtctctgctttgccttggaccttggtgctgggggtggggaggcctgggggggacactccccactcccattccccttcctttgtcctaatcctggaattaagtacaggggtttataggttctatttcttcccaagagccctgcaaagaaccccagtttcctatttggatgcccctacactgttgtgtttcagtggaatgtattttcatttaaaaacaactttgaatggggcactttttctttcctgttttaaaaattgaaaaattcttacagtacaaacaggactgtcagggtgggggtgttggtgctgtaagaggtcactcttgagtgcattttggcactgggatgggatggctggggtgggaagacccccatccccacccccaacttcttttctaatatttaaggagtgttttgtaggattcaacaaccaccacaacttgaatttgtatcatgggaggtgggagggagtggcttagaggtgtctgcctatgcttaaagccaactgtggaagttttgttttcccttttttgtataataaagtgaaaaacaaaggtttga

SEQ ID NO: 198302 - DNA, 4684 bp, Homo sapiens
  Payload ID: 19129
  Gene Name: upstream binding transcription factor, RNA polymerase I
  Uniprot ID: P17480
  ENST ID: ENST00000343638
  CDS Start-End: 292-2475
cggagcggcgctgcgctgcgccgaggcgggcgggcgggcgggcggagcggggcgggcggagcgcggcgcgtggggctcgccattagccgtcgctccgcttcgccatctcgggctttgtctggcgactcgctgccccggcgtcggctgcagcggagctgcggctcgactgttcggcccgccgtgctcccaggtgcccccggcctgcgctcccatccacacgctcgggtgaggtggctttgaccccgggttgcccggccagcacgaccgaggaggtggctggacagctggaggatgaacggagaagccgactgccccacagacctggaaatggccgcccccaaaggccaagaccgttggtcccaggaagacatgctgactttgctggaatgcatgaagaacaaccttccatccaatgacagctccaagttcaaaaccaccgaatcacacatggactgggaaaaagtagcatttaaagacttttctggagacatgtgcaagctcaaatgggtggagatttctaatgaggtgaggaagttccgtacattgacagaattgatcctcgatgctcaggaacatgttaaaaatccttacaaaggcaaaaaactcaagaaacacccagacttcccaaagaagcccctgaccccttatttccgcttcttcatggagaagcgggccaagtatgcgaaactccaccctgagatgagcaacctggacctaaccaagattctgtccaagaaatacaaggagcttccggagaagaagaagatgaaatatattcaggacttccagagagagaaacaggagttcgagcgaaacctggcccgattcagggaggatcaccccgacctaatccagaatgccaagaaatcggacatcccagagaagcccaaaaccccccagcagctgtggtacacccacgagaagaaggtgtatctcaaagtgcggccagatgagatcatgagagactatatccagaagcacccagagctgaacatcagtgaggagggtatcaccaagtccaccctcaccaaggccgaacgccagctcaaggacaagtttgacgggcgacccaccaagccacctccgaacagctactcgctgtactgcgcagagctcatggccaacatgaaggacgtgcccagcacagagcgcatggtgctgtgcagccagcagtggaagctgctgtcccagaaggagaaggacgcctatcacaagaagtgtgatcagaaaaagaaagattacgaggtggagctgctccgtttcctcgagagcctgcctgaggaggagcagcagcgggtcttgggggaagagaagatgctgaacatcaacaagaagcaggccaccagccccgcctccaagaagccagcccaggaagggggcaagggcggctccgagaagcccaagcggcccgtgtcggccatgttcatcttctcggaggagaaacggcggcagctgcaggaggagcggcctgagctctccgagagcgagctgacccgcctgctggcccgaatgtggaacgacctgtctgagaagaagaaggccaagtacaaggcccgagaggcggcgctcaaggctcagtcggagaggaagcccggcggggagcgcgaggaacggggcaagctgcccgagtcccccaaaagagctgaggagatctggcaacagagcgttatcggcgactacctggcccgcttcaagaatgaccgggtgaaggccttgaaagccatggaaatgacctggaataacatggaaaagaaggagaaactgatgtggattaagaaggcagccgaagaccaaaagcgatatgagagagagctgagtgagatgcgggcacctccagctgctacaaattcttccaagaagatgaaattccagggagaacccaagaagcctcccatgaacggttaccagaagttctcccaggagctgctgtccaatggggagctgaaccacctgccgctgaaggagcgcatggtggagatcggcagtcgctggcagcgcatctcccagagccagaaggagcactacaaaaagctggccgaggagcagcaaaagcagtacaaggtgcacctggacctctgggttaagagcctgtctccccaggaccgtgcagcatataaagagtacatctccaataaacgtaagagcatgaccaagctgcgaggcccaaaccccaaatccagccggactactctgcagtccaagtcggagtccgaggaggatgatgaagaggatgaggatgacgaggacgaggatgaagaagaggaagatgatgagaatggggactcctctgaagatggcggcgactcctctgagtccagcagcgaggacgagagcgaggatggggatgagaatgaagaggatgacgaggacgaagacgacgacgaggatgacgatgaggatgaagataatgagtccgagggcagcagctccagctcctcctcctcaggggactcctcagactctgactccaactgaggctcagccccaccccagggcagccagggagagcccaggagctcccctccccaactgaccacctttgtttctcccccatgttctgtcccttgcccccctggcctcccccactttctttctttctttaaaaaaaaaaaaaaatacggtgggggtagggggctggaggagcccaggccaggactctgcagcctcagagacatcagcccttgggggtcctcctccagggacagcaactatcagactaagccagcaccggaccagcctggcccaccccacccacttctgcacttgcggttccggcatggacaatggaccggagagtgggggtggggggtcccaaagagtttgatgaggccctccacacctgcggcccaatccaaggtggggtggaagcttggggaagacccattccttcccagaggggcctgccacctggacccctgcattggaactggaggcagggaacatggggaggaggagggtcggtgccttcaagaaaacaggcactgccctggtggccctctcccctgccccctgcaggaaggagctgcctggacccgttcatgggggagggggcagaagtgttttttatatatgtgtatatatttttttttaagctctgagctgtcaacgagacgtttcctaccgatctcggctgccgtctctgttgtcatttctgggagagggagggtttaggggtagatttggaaccttttaaaaatggtcttgatgtatgtggaagagagtatgtgtatgtgtgttcctgtacatagcatgggtgcagctgtggatgtgtgcaaaagagtgtgagtgtgtgtgtgtgtgtgtaaaggggtctgtcctagagcccacatcagtttgttgtgaatctggaaaaagggtcggtgagggccgggagatgttgaccctggtgggagcaggctgaggctgccccgttctccacatcctctgttttgcccagtctctgattccattagggggagtgtgctgaagccattctcggatgcttcccagaccaggctccctctgccagagtcacatgcatccgagctgctggtctccattgtccagcaggaaggcggaaaggcaggcaagatggtgtgaagcttaaagcttgtatttgatggaaaaggtctcccctgttcatctgagaggccaagcctggccaccccaggctcagaacctgggcttcaagaaatgtgctgggagctcctaacttacacatccctccagccttccttgaatcctcccaccaccccctatttcctttaatttctcaggtctgctccctcctcccccaaccccacagctgggcaagaagtctgcaaaagctgcatctgcagctgtctctaactcttcccagccatctcccgtattttttggtaccttgattccttgactcttaataagccaagccaccttatctctgtagttcttatttttttgttgactaaatttggggggttcttttttatggtcatgtcactgacctattaaattggggcttggtgcttttccaccttccccctctgaatgaaagccaaggaatgggggaagagcgggaactctgccgcggaggtggagcaagaacggtgaagggccctggtcccagagaggctggtgggtccctctcccaaaggaaggcagacagtctctgctttgccttggaccttggtgctgggggtggggaggcctgggggggacactccccactcccattccccttcctttgtcctaatcctggaattaagtacaggggtttataggttctatttcttcccaagagccctgcaaagaaccccagtttcctatttggatgcccctacactgttgtgtttcagtggaatgtattttcatttaaaaacaactttgaatggggcactttttctttcctgttttaaaaattgaaaaattcttacagtacaaacaggactgtcagggtgggggtgttggtgctgtaagaggtcactcttgagtgcattttggcactgggatgggatggctggggtgggaagacccccatccccacccccaacttcttttctaatatttaaggagtgttttgtaggattcaacaaccaccacaacttgaatttgtatcatgggaggtgggagggagtggcttagaggtgtctgcctatgcttaaagccaactgtggaagttttgttttcccttttttgtataataaagtgaaaaacaaaggtttga

SEQ ID NO: 198303 - DNA, 2683 bp, Homo sapiens
  Payload ID: 19129
  Gene Name: upstream binding transcription factor, RNA polymerase I
  Uniprot ID: P17480
  ENST ID: ENST00000393606
  CDS Start-End: 374-2557
gcggcggggggtgtgcgagctgaggccggggccggcggcgggcgggctgcctgcaggcggagggcgctgtgctttgtgcttttcgccgcgaggagcagcaggcagcagccacagccgccgccgccgccgccgccgccacagcagcagcagccgccgccccagcgccgccgcctcgcccggaggaggagccgctgccgccgcgggagggagctgcggctgtgcccggccgagcgggggagggcgccgccactcagagccagggagggagccgctggagcgggaagcccggaggccgcgctgcgccggggtgaggtggctttgaccccgggttgcccggccagcacgaccgaggaggtggctggacagctggaggatgaacggagaagccgactgccccacagacctggaaatggccgcccccaaaggccaagaccgttggtcccaggaagacatgctgactttgctggaatgcatgaagaacaaccttccatccaatgacagctccaagttcaaaaccaccgaatcacacatggactgggaaaaagtagcatttaaagacttttctggagacatgtgcaagctcaaatgggtggagatttctaatgaggtgaggaagttccgtacattgacagaattgatcctcgatgctcaggaacatgttaaaaatccttacaaaggcaaaaaactcaagaaacacccagacttcccaaagaagcccctgaccccttatttccgcttcttcatggagaagcgggccaagtatgcgaaactccaccctgagatgagcaacctggacctaaccaagattctgtccaagaaatacaaggagcttccggagaagaagaagatgaaatatattcaggacttccagagagagaaacaggagttcgagcgaaacctggcccgattcagggaggatcaccccgacctaatccagaatgccaagaaatcggacatcccagagaagcccaaaaccccccagcagctgtggtacacccacgagaagaaggtgtatctcaaagtgcggccagatgagatcatgagagactatatccagaagcacccagagctgaacatcagtgaggagggtatcaccaagtccaccctcaccaaggccgaacgccagctcaaggacaagtttgacgggcgacccaccaagccacctccgaacagctactcgctgtactgcgcagagctcatggccaacatgaaggacgtgcccagcacagagcgcatggtgctgtgcagccagcagtggaagctgctgtcccagaaggagaaggacgcctatcacaagaagtgtgatcagaaaaagaaagattacgaggtggagctgctccgtttcctcgagagcctgcctgaggaggagcagcagcgggtcttgggggaagagaagatgctgaacatcaacaagaagcaggccaccagccccgcctccaagaagccagcccaggaagggggcaagggcggctccgagaagcccaagcggcccgtgtcggccatgttcatcttctcggaggagaaacggcggcagctgcaggaggagcggcctgagctctccgagagcgagctgacccgcctgctggcccgaatgtggaacgacctgtctgagaagaagaaggccaagtacaaggcccgagaggcggcgctcaaggctcagtcggagaggaagcccggcggggagcgcgaggaacggggcaagctgcccgagtcccccaaaagagctgaggagatctggcaacagagcgttatcggcgactacctggcccgcttcaagaatgaccgggtgaaggccttgaaagccatggaaatgacctggaataacatggaaaagaaggagaaactgatgtggattaagaaggcagccgaagaccaaaagcgatatgagagagagctgagtgagatgcgggcacctccagctgctacaaattcttccaagaagatgaaattccagggagaacccaagaagcctcccatgaacggttaccagaagttctcccaggagctgctgtccaatggggagctgaaccacctgccgctgaaggagcgcatggtggagatcggcagtcgctggcagcgcatctcccagagccagaaggagcactacaaaaagctggccgaggagcagcaaaagcagtacaaggtgcacctggacctctgggttaagagcctgtctccccaggaccgtgcagcatataaagagtacatctccaataaacgtaagagcatgaccaagctgcgaggcccaaaccccaaatccagccggactactctgcagtccaagtcggagtccgaggaggatgatgaagaggatgaggatgacgaggacgaggatgaagaagaggaagatgatgagaatggggactcctctgaagatggcggcgactcctctgagtccagcagcgaggacgagagcgaggatggggatgagaatgaagaggatgacgaggacgaagacgacgacgaggatgacgatgaggatgaagataatgagtccgagggcagcagctccagctcctcctcctcaggggactcctcagactctgactccaactgaggctcagccccaccccagggcagccagggagagcccaggagctcccctccccaactgaccacctttgtttctcccccatgttctgtcccttgcccccctggcctcccccactttctttctttcttt

SEQ ID NO: 198304 - DNA, 2738 bp, Homo sapiens
  Payload ID: 19129
  Gene Name: upstream binding transcription factor, RNA polymerase I
  Uniprot ID: P17480
  ENST ID: ENST00000436088
  CDS Start-End: 122-2416
agagccagggagggagccgctggagcgggaagcccggaggccgcgctgcgccggggtgaggtggctttgaccccgggttgcccggccagcacgaccgaggaggtggctggacagctggaggatgaacggagaagccgactgccccacagacctggaaatggccgcccccaaaggccaagaccgttggtcccaggaagacatgctgactttgctggaatgcatgaagaacaaccttccatccaatgacagctccaagttcaaaaccaccgaatcacacatggactgggaaaaagtagcatttaaagacttttctggagacatgtgcaagctcaaatgggtggagatttctaatgaggtgaggaagttccgtacattgacagaattgatcctcgatgctcaggaacatgttaaaaatccttacaaaggcaaaaaactcaagaaacacccagacttcccaaagaagcccctgaccccttatttccgcttcttcatggagaagcgggccaagtatgcgaaactccaccctgagatgagcaacctggacctaaccaagattctgtccaagaaatacaaggagcttccggagaagaagaagatgaaatatattcaggacttccagagagagaaacaggagttcgagcgaaacctggcccgattcagggaggatcaccccgacctaatccagaatgccaagaaatcggacatcccagagaagcccaaaaccccccagcagctgtggtacacccacgagaagaaggtgtatctcaaagtgcggccagatgccactacgaaggaggtgaaggactccctggggaagcagtggtctcagctctcggacaaaaagaggctgaaatggattcataaggccctggagcagcggaaggagtacgaggagatcatgagagactatatccagaagcacccagagctgaacatcagtgaggagggtatcaccaagtccaccctcaccaaggccgaacgccagctcaaggacaagtttgacgggcgacccaccaagccacctccgaacagctactcgctgtactgcgcagagctcatggccaacatgaaggacgtgcccagcacagagcgcatggtgctgtgcagccagcagtggaagctgctgtcccagaaggagaaggacgcctatcacaagaagtgtgatcagaaaaagaaagattacgaggtggagctgctccgtttcctcgagagcctgcctgaggaggagcagcagcgggtcttgggggaagagaagatgctgaacatcaacaagaagcaggccaccagccccgcctccaagaagccagcccaggaagggggcaagggcggctccgagaagcccaagcggcccgtgtcggccatgttcatcttctcggaggagaaacggcggcagctgcaggaggagcggcctgagctctccgagagcgagctgacccgcctgctggcccgaatgtggaacgacctgtctgagaagaagaaggccaagtacaaggcccgagaggcggcgctcaaggctcagtcggagaggaagcccggcggggagcgcgaggaacggggcaagctgcccgagtcccccaaaagagctgaggagatctggcaacagagcgttatcggcgactacctggcccgcttcaagaatgaccgggtgaaggccttgaaagccatggaaatgacctggaataacatggaaaagaaggagaaactgatgtggattaagaaggcagccgaagaccaaaagcgatatgagagagagctgagtgagatgcgggcacctccagctgctacaaattcttccaagaagatgaaattccagggagaacccaagaagcctcccatgaacggttaccagaagttctcccaggagctgctgtccaatggggagctgaaccacctgccgctgaaggagcgcatggtggagatcggcagtcgctggcagcgcatctcccagagccagaaggagcactacaaaaagctggccgaggagcagcaaaagcagtacaaggtgcacctggacctctgggttaagagcctgtctccccaggaccgtgcagcatataaagagtacatctccaataaacgtaagagcatgaccaagctgcgaggcccaaaccccaaatccagccggactactctgcagtccaagtcggagtccgaggaggatgatgaagaggatgaggatgacgaggacgaggatgaagaagaggaagatgatgagaatggggactcctctgaagatggcggcgactcctctgagtccagcagcgaggacgagagcgaggatggggatgagaatgaagaggatgacgaggacgaagacgacgacgaggatgacgatgaggatgaagataatgagtccgagggcagcagctccagctcctcctcctcaggggactcctcagactctgactccaactgaggctcagccccaccccagggcagccagggagagcccaggagctcccctccccaactgaccacctttgtttctcccccatgttctgtcccttgcccccctggcctcccccactttctttctttctttaaaaaaaaaaaaaaatacggtgggggtagggggctggaggagcccaggccaggactctgcagcctcagagacatcagcccttgggggtcctcctccagggacagcaactatcagactaagccagcaccggaccagcctggcccaccccacccacttctgcacttgcggttccggcatggacaatggaccggagagt

SEQ ID NO: 198305 - DNA, 674 bp, Homo sapiens
  Payload ID: 19129
  Gene Name: upstream binding transcription factor, RNA polymerase I
  ENST ID: ENST00000529373
  CDS Start-End: 92-674
caagactgggctccctggcagcacccacggaccccgaccctctgcacctggacagggcggctccgagaagcccaagcggcccgtgtcggccatgttcatcttctcggaggagaaacggcggcagctgcaggaggagcggcctgagctctccgagagcgagctgacccgcctgctggcccgaatgtggaacgacctgtctgagaagaagaaggccaagtacaaggcccgagaggcggcgctcaaggctcagtcggagaggaagcccggcggggagcgcgaggaacggggcaagctgcccgagtcccccaaaagagctgaggagatctggcaacagagcgttatcggcgactacctggcccgcttcaagaatgaccgggtgaaggccttgaaagccatggaaatgacctggaataacatggaaaagaaggagaaactgatgtggattaagaaggcagccgaagaccaaaagcgatatgagagagagctgagtgagatgcgggcacctccagctgctacaaattcttccaagaagatgaaattccagggagaacccaagaagcctcccatgaacggttaccagaagttctcccaggagctgctgtccaatggggagctgaaccacctgccgctgaaggagcgcatggtggagatcggcagtcgctggcagcgcatct

SEQ ID NO: 198306 - DNA, 3010 bp, Homo sapiens
  Payload ID: 19129
  Gene Name: upstream binding transcription factor, RNA polymerase I
  ENST ID: ENST00000527034
  CDS Start-End: 183-2420
gggctttgtctggcgactcgctgccccggcgtcggctgcagcggagctgcggctcgactgttcggcccgccgtgctcccaggtgcccccggcctgcgctcccatccacacgctcgggtgaggtggctttgaccccgggttgcccggccagcacgaccgaggaggtggctggacagctggaggatgaacggagaagccgactgccccacagacctggaaatggccgcccccaaaggccaagaccgttggtcccaggaagacatgctgactttgctggaatgcatgaagaacaaccttccatccaatgacagctccaagttcaaaaccaccgaatcacacatggactgggaaaaagtagcatttaaagacttttctggagacatgtgcaagctcaaatgggtggagatttctaatgaggtgaggaagttccgtacattgacagaattgatcctcgatgctcaggaacatgttaaaaatccttacaaaggcaaaaaactcaagaaacacccagacttcccaaagaagcccctgaccccttatttccgcttcttcatggagaagcgggccaagtatgcgaaactccaccctgagatgagcaacctggacctaaccaagattctgtccaagaaatacaaggagcttccggagaagaagaagatgaaatatattcaggacttccagagagagaaacaggagttcgagcgaaacctggcccgattcagggaggatcaccccgacctaatccagaatgccaagaaatcggacatcccagagaagcccaaaaccccccagcagctgtggtacacccacgagaagaaggtgtatctcaaagtgcggccagatgagatcatgagagactatatccagaagcacccagagctgaacatcagtgaggagggtatcaccaagtccaccctcaccaaggccgaacgccagctcaaggacaagtttgacgggcgacccaccaagccacctccgaacagctactcgctgtactgcgcagagctcatggccaacatgaaggacgtgcccagcacagagcgcatggtgctgtgcagccagcagtggaagctgctgtcccagaaggagaaggacgcctatcacaagaagtgtgatcagaaaaagaaagattacgaggtggagctgctccgtttcctcgagagcctgcctgaggaggagcagcagcgggtcttgggggaagagaagatgctgaacatcaacaagaagcaggccaccagccccgcctccaagaagccagcccaggaagggggcaagggcggctccgagaagcccaagcggcccgtgtcggccatgttcatcttctcggaggagaaacggcggcagctgcaggaggagcggcctgagctctccgagagcgagctgacccgcctgctggcccgaatgtggaacgacctgtctgagaagaagaaggccaagtacaaggcccgagaggcggcgctcaaggctcagtcggagaggaagcccggcggggagcgcgaggaacggggcaagctgcccgagtcccccaaaagagctgaggagatctggcaacagagcgttatcggcgactacctggcccgcttcaagaatgaccgggtgaaggccttgaaagccatggaaatgacctggaataacatggaaaagaaggagaaactgatgtggattaagaaggcagccgaagaccaaaagcgatatgagagagagctgagtgagatgcgggcacctccagctgctacaaattcttccaagaagatgaaattccagggagaacccaagaagcctcccatgaacggttaccagaagttctcccaggagctgctgtccaatggggagctgaaccacctgccgctgaaggagcgcatggtggagatcggcagtcgctggcagcgcatctcccagagccagaaggagcactacaaaaagctggccgaggagcagcaaaagcagtacaaggtgcacctggacctctgggttaagagcctgtctccccaggaccgtgcagcatataaagagtacatctccaataaacgtaagagcatgaccaagctgcgaggcccaaaccccaaatccagccggactactctgcagtccaagagtccgaggaggatgatgaagaggatgaggatgacgaggacgaggatgaagaagaggaagatgatgagaatggggactcctctgaagatggcggcgactcctctgagtccagcagcgaggacgagagcgaggatggggatgagaatgaagaggatgacgaggacgaagacgacgacgaggatgacgatgaggatgaagataatgagtccgagggcagcagctccagctcctcctcctcaggggactcctcagactctgactccaactgaggctcagccccaccccagggcagccagggagagcccaggagctcccctccccaactgaccacctttgtttctcccccatgttctgtcccttgcccccctggcctcccccactttctttctttctttaaaaaaaaaaaaaaatacggtgggggtagggggctggaggagcccaggccaggactctgcagcctcagagacatcagcccttgggggtcctcctccagggacagcaactatcagactaagccagcaccggaccagcctggcccaccccacccacttctgcacttgcggttccggcatggacaatggaccggagagtgggggtggggggtcccaaagagtttgatgaggccctccacacctgcggcccaatccaaggtggggtggaagcttggggaagacccattccttcccagaggggcctgccacctggacccctgcattggaactggaggcagggaacatggggaggaggagggtcggtgccttcaagaaaacaggcactgccctggtggccctctcccctgccccctgcaggaaggagctgcctggacccgttcatgggggagggggcagaagtgttttttatatatgtgtatatatttttttttaagctctgagctgtcaacgagacgtttcctaccg

SEQ ID NO: 198307 - DNA, 2459 bp, Homo sapiens
  Payload ID: 19129
  Gene Name: upstream binding transcription factor, RNA polymerase I
  Uniprot ID: P17480
  ENST ID: ENST00000526094
  CDS Start-End: 274-2457
gcggagccgggctgcaggggctgggggagggggtcacgaggaagaggaggggcgcactcccattcccatagaccccttaagtctaataaggtcatggctgagtctctcagagtgtggacctgcccccttctactctgggcggttagaaagtcgttagtcgttcacctctcagccttcctgagtgggaactggtatgtcttccaaagggtgaggtggctttgaccccgggttgcccggccagcacgaccgaggaggtggctggacagctggaggatgaacggagaagccgactgccccacagacctggaaatggccgcccccaaaggccaagaccgttggtcccaggaagacatgctgactttgctggaatgcatgaagaacaaccttccatccaatgacagctccaagttcaaaaccaccgaatcacacatggactgggaaaaagtagcatttaaagacttttctggagacatgtgcaagctcaaatgggtggagatttctaatgaggtgaggaagttccgtacattgacagaattgatcctcgatgctcaggaacatgttaaaaatccttacaaaggcaaaaaactcaagaaacacccagacttcccaaagaagcccctgaccccttatttccgcttcttcatggagaagcgggccaagtatgcgaaactccaccctgagatgagcaacctggacctaaccaagattctgtccaagaaatacaaggagcttccggagaagaagaagatgaaatatattcaggacttccagagagagaaacaggagttcgagcgaaacctggcccgattcagggaggatcaccccgacctaatccagaatgccaagaaatcggacatcccagagaagcccaaaaccccccagcagctgtggtacacccacgagaagaaggtgtatctcaaagtgcggccagatgagatcatgagagactatatccagaagcacccagagctgaacatcagtgaggagggtatcaccaagtccaccctcaccaaggccgaacgccagctcaaggacaagtttgacgggcgacccaccaagccacctccgaacagctactcgctgtactgcgcagagctcatggccaacatgaaggacgtgcccagcacagagcgcatggtgctgtgcagccagcagtggaagctgctgtcccagaaggagaaggacgcctatcacaagaagtgtgatcagaaaaagaaagattacgaggtggagctgctccgtttcctcgagagcctgcctgaggaggagcagcagcgggtcttgggggaagagaagatgctgaacatcaacaagaagcaggccaccagccccgcctccaagaagccagcccaggaagggggcaagggcggctccgagaagcccaagcggcccgtgtcggccatgttcatcttctcggaggagaaacggcggcagctgcaggaggagcggcctgagctctccgagagcgagctgacccgcctgctggcccgaatgtggaacgacctgtctgagaagaagaaggccaagtacaaggcccgagaggcggcgctcaaggctcagtcggagaggaagcccggcggggagcgcgaggaacggggcaagctgcccgagtcccccaaaagagctgaggagatctggcaacagagcgttatcggcgactacctggcccgcttcaagaatgaccgggtgaaggccttgaaagccatggaaatgacctggaataacatggaaaagaaggagaaactgatgtggattaagaaggcagccgaagaccaaaagcgatatgagagagagctgagtgagatgcgggcacctccagctgctacaaattcttccaagaagatgaaattccagggagaacccaagaagcctcccatgaacggttaccagaagttctcccaggagctgctgtccaatggggagctgaaccacctgccgctgaaggagcgcatggtggagatcggcagtcgctggcagcgcatctcccagagccagaaggagcactacaaaaagctggccgaggagcagcaaaagcagtacaaggtgcacctggacctctgggttaagagcctgtctccccaggaccgtgcagcatataaagagtacatctccaataaacgtaagagcatgaccaagctgcgaggcccaaaccccaaatccagccggactactctgcagtccaagtcggagtccgaggaggatgatgaagaggatgaggatgacgaggacgaggatgaagaagaggaagatgatgagaatggggactcctctgaagatggcggcgactcctctgagtccagcagcgaggacgagagcgaggatggggatgagaatgaagaggatgacgaggacgaagacgacgacgaggatgacgatgaggatgaagataatgagtccgagggcagcagctccagctcctcctcctcaggggactcctcagactctgactccaactgagg

SEQ ID NO: 198308 - DNA, 721 bp, Homo sapiens
  Payload ID: 19129
  Gene Name: upstream binding transcription factor, RNA polymerase I
  ENST ID: ENST00000530828
  CDS Start-End: 274-721
gcggagccgggctgcaggggctgggggagggggtcacgaggaagaggaggggcgcactcccattcccatagaccccttaagtctaataaggtcatggctgagtctctcagagtgtggacctgcccccttctactctgggcggttagaaagtcgttagtcgttcacctctcagccttcctgagtgggaactggtatgtcttccaaagggtgaggtggctttgaccccgggttgcccggccagcacgaccgaggaggtggctggacagctggaggatgaacggagaagccgactgccccacagacctggaaatggccgcccccaaaggccaagaccgttggtcccaggaagacatgctgactttgctggaatgcatgaagaacaaccttccatccaatgacagctccaagttcaaaaccaccgaatcacacatggactgggaaaaagtagcatttaaagacttttctggagacatgtgcaagctcaaatgggtggagatttctaatgagaaacacccagacttcccaaagaagcccctgaccccttatttccgcttcttcatggagaagcgggccaagtatgcgaaactccaccctgagatgagcaacctggacctaaccaagattctgtccaagaaatacaaggagcttccggagaagaagaagatgaaatatattcaggacttccagagagagaaacaggagttcgagcgaaacctggccc

SEQ ID NO: 198309 - DNA, 685 bp, Homo sapiens
  Payload ID: 19129
  Gene Name: upstream binding transcription factor, RNA polymerase I
  ENST ID: ENST00000529947
  CDS Start-End: 1-110
aggagcactacaaaaagctggccgaggagcagcaaaagcagtacaaggtgcacctggacctctgggttaagagatgggcaggctggtctcgaactcctgacctcatgtgatccgcccacctcggcctcccaaagcactgggactacaggcttgagccaccgtccgcagccactatcacccttttaaaaataaggaaaccaaggctcagagaggttaagtaacttgcccaaggtcacacagtaagtagaagaatccaaatcagactgccttttcctcccccatctgggaccacgggacctctcctagactcctggcctttgtgcttcccctctgtgctttggttgagtagtcagatctgtaaagtggagagaatcacctgtgtccttcccactcaccaaggcaggttggccaaggacccaggaagactgtggggatttgctgtttcaggagtttgagcctgtctccccaggaccgtgcagcatataaagagtacatctccaataaacgtaagagcatgaccaagctgcgaggcccaaaccccaaatccagccggactactctgcagtccaagtcggagtccgaggaggatgatgaagaggatgaggatgacgaggacgaggatgaagaagaggaagatgatgagaatggggactcctctgaagatggcggcgactcctctgagtcc

SEQ ID NO: 198310 - DNA, 2570 bp, Homo sapiens
  Payload ID: 19129
  Gene Name: upstream binding transcription factor, RNA polymerase I
  Uniprot ID: P17480
  ENST ID: ENST00000529383
  CDS Start-End: 274-2568
gcggagccgggctgcaggggctgggggagggggtcacgaggaagaggaggggcgcactcccattcccatagaccccttaagtctaataaggtcatggctgagtctctcagagtgtggacctgcccccttctactctgggcggttagaaagtcgttagtcgttcacctctcagccttcctgagtgggaactggtatgtcttccaaagggtgaggtggctttgaccccgggttgcccggccagcacgaccgaggaggtggctggacagctggaggatgaacggagaagccgactgccccacagacctggaaatggccgcccccaaaggccaagaccgttggtcccaggaagacatgctgactttgctggaatgcatgaagaacaaccttccatccaatgacagctccaagttcaaaaccaccgaatcacacatggactgggaaaaagtagcatttaaagacttttctggagacatgtgcaagctcaaatgggtggagatttctaatgaggtgaggaagttccgtacattgacagaattgatcctcgatgctcaggaacatgttaaaaatccttacaaaggcaaaaaactcaagaaacacccagacttcccaaagaagcccctgaccccttatttccgcttcttcatggagaagcgggccaagtatgcgaaactccaccctgagatgagcaacctggacctaaccaagattctgtccaagaaatacaaggagcttccggagaagaagaagatgaaatatattcaggacttccagagagagaaacaggagttcgagcgaaacctggcccgattcagggaggatcaccccgacctaatccagaatgccaagaaatcggacatcccagagaagcccaaaaccccccagcagctgtggtacacccacgagaagaaggtgtatctcaaagtgcggccagatgccactacgaaggaggtgaaggactccctggggaagcagtggtctcagctctcggacaaaaagaggctgaaatggattcataaggccctggagcagcggaaggagtacgaggagatcatgagagactatatccagaagcacccagagctgaacatcagtgaggagggtatcaccaagtccaccctcaccaaggccgaacgccagctcaaggacaagtttgacgggcgacccaccaagccacctccgaacagctactcgctgtactgcgcagagctcatggccaacatgaaggacgtgcccagcacagagcgcatggtgctgtgcagccagcagtggaagctgctgtcccagaaggagaaggacgcctatcacaagaagtgtgatcagaaaaagaaagattacgaggtggagctgctccgtttcctcgagagcctgcctgaggaggagcagcagcgggtcttgggggaagagaagatgctgaacatcaacaagaagcaggccaccagccccgcctccaagaagccagcccaggaagggggcaagggcggctccgagaagcccaagcggcccgtgtcggccatgttcatcttctcggaggagaaacggcggcagctgcaggaggagcggcctgagctctccgagagcgagctgacccgcctgctggcccgaatgtggaacgacctgtctgagaagaagaaggccaagtacaaggcccgagaggcggcgctcaaggctcagtcggagaggaagcccggcggggagcgcgaggaacggggcaagctgcccgagtcccccaaaagagctgaggagatctggcaacagagcgttatcggcgactacctggcccgcttcaagaatgaccgggtgaaggccttgaaagccatggaaatgacctggaataacatggaaaagaaggagaaactgatgtggattaagaaggcagccgaagaccaaaagcgatatgagagagagctgagtgagatgcgggcacctccagctgctacaaattcttccaagaagatgaaattccagggagaacccaagaagcctcccatgaacggttaccagaagttctcccaggagctgctgtccaatggggagctgaaccacctgccgctgaaggagcgcatggtggagatcggcagtcgctggcagcgcatctcccagagccagaaggagcactacaaaaagctggccgaggagcagcaaaagcagtacaaggtgcacctggacctctgggttaagagcctgtctccccaggaccgtgcagcatataaagagtacatctccaataaacgtaagagcatgaccaagctgcgaggcccaaaccccaaatccagccggactactctgcagtccaagtcggagtccgaggaggatgatgaagaggatgaggatgacgaggacgaggatgaagaagaggaagatgatgagaatggggactcctctgaagatggcggcgactcctctgagtccagcagcgaggacgagagcgaggatggggatgagaatgaagaggatgacgaggacgaagacgacgacgaggatgacgatgaggatgaagataatgagtccgagggcagcagctccagctcctcctcctcaggggactcctcagactctgactccaactgagg

SEQ ID NO: 198311 - DNA, 3011 bp, Homo sapiens
  Payload ID: 19129
  Gene Name: upstream binding transcription factor, RNA polymerase I
  Uniprot ID: P17480
  ENST ID: ENST00000533177
  CDS Start-End: 181-2364
cttggctcggctccccggaggccggggcgggggcgccggcggggctgggccgcaggctcgggggaggaggcggcggttcccgccgcggtcgcgcctctgtgccgggctcctccggtgaggtggctttgaccccgggttgcccggccagcacgaccgaggaggtggctggacagctggaggatgaacggagaagccgactgccccacagacctggaaatggccgcccccaaaggccaagaccgttggtcccaggaagacatgctgactttgctggaatgcatgaagaacaaccttccatccaatgacagctccaagttcaaaaccaccgaatcacacatggactgggaaaaagtagcatttaaagacttttctggagacatgtgcaagctcaaatgggtggagatttctaatgaggtgaggaagttccgtacattgacagaattgatcctcgatgctcaggaacatgttaaaaatccttacaaaggcaaaaaactcaagaaacacccagacttcccaaagaagcccctgaccccttatttccgcttcttcatggagaagcgggccaagtatgcgaaactccaccctgagatgagcaacctggacctaaccaagattctgtccaagaaatacaaggagcttccggagaagaagaagatgaaatatattcaggacttccagagagagaaacaggagttcgagcgaaacctggcccgattcagggaggatcaccccgacctaatccagaatgccaagaaatcggacatcccagagaagcccaaaaccccccagcagctgtggtacacccacgagaagaaggtgtatctcaaagtgcggccagatgagatcatgagagactatatccagaagcacccagagctgaacatcagtgaggagggtatcaccaagtccaccctcaccaaggccgaacgccagctcaaggacaagtttgacgggcgacccaccaagccacctccgaacagctactcgctgtactgcgcagagctcatggccaacatgaaggacgtgcccagcacagagcgcatggtgctgtgcagccagcagtggaagctgctgtcccagaaggagaaggacgcctatcacaagaagtgtgatcagaaaaagaaagattacgaggtggagctgctccgtttcctcgagagcctgcctgaggaggagcagcagcgggtcttgggggaagagaagatgctgaacatcaacaagaagcaggccaccagccccgcctccaagaagccagcccaggaagggggcaagggcggctccgagaagcccaagcggcccgtgtcggccatgttcatcttctcggaggagaaacggcggcagctgcaggaggagcggcctgagctctccgagagcgagctgacccgcctgctggcccgaatgtggaacgacctgtctgagaagaagaaggccaagtacaaggcccgagaggcggcgctcaaggctcagtcggagaggaagcccggcggggagcgcgaggaacggggcaagctgcccgagtcccccaaaagagctgaggagatctggcaacagagcgttatcggcgactacctggcccgcttcaagaatgaccgggtgaaggccttgaaagccatggaaatgacctggaataacatggaaaagaaggagaaactgatgtggattaagaaggcagccgaagaccaaaagcgatatgagagagagctgagtgagatgcgggcacctccagctgctacaaattcttccaagaagatgaaattccagggagaacccaagaagcctcccatgaacggttaccagaagttctcccaggagctgctgtccaatggggagctgaaccacctgccgctgaaggagcgcatggtggagatcggcagtcgctggcagcgcatctcccagagccagaaggagcactacaaaaagctggccgaggagcagcaaaagcagtacaaggtgcacctggacctctgggttaagagcctgtctccccaggaccgtgcagcatataaagagtacatctccaataaacgtaagagcatgaccaagctgcgaggcccaaaccccaaatccagccggactactctgcagtccaagtcggagtccgaggaggatgatgaagaggatgaggatgacgaggacgaggatgaagaagaggaagatgatgagaatggggactcctctgaagatggcggcgactcctctgagtccagcagcgaggacgagagcgaggatggggatgagaatgaagaggatgacgaggacgaagacgacgacgaggatgacgatgaggatgaagataatgagtccgagggcagcagctccagctcctcctcctcaggggactcctcagactctgactccaactgaggctcagccccaccccagggcagccagggagagcccaggagctcccctccccaactgaccacctttgtttctcccccatgttctgtcccttgcccccctggcctcccccactttctttctttctttaaaaaaaaaaaaaaatacggtgggggtagggggctggaggagcccaggccaggactctgcagcctcagagacatcagcccttgggggtcctcctccagggacagcaactatcagactaagccagcaccggaccagcctggcccaccccacccacttctgcacttgcggttccggcatggacaatggaccggagagtgggggtggggggtcccaaagagtttgatgaggccctccacacctgcggcccaatccaaggtggggtggaagcttggggaagacccattccttcccagaggggcctgccacctggacccctgcattggaactggaggcagggaacatggggaggaggagggtcggtgccttcaagaaaacaggcactgccctggtggccctctcccctgccccctgcaggaaggagctgcctggacccgttcatgggggagggggcagaagtgttttttatatatgtgtatatatttttttttaagctctgagctgtcaacgagacgtttcctacc

SEQ ID NO: 198312 - DNA, 1182 bp, Homo sapiens
  Payload ID: 19130
  Gene Name: upstream binding transcription factor, RNA polymerase I-like 1
  Uniprot ID: P0CB47
  ENST ID: ENST00000530464
  CDS Start-End: 1-1182
atggctttgcctagaagccaaggccattggtccaacaaagacatcttgaggttactggaatgcatggagaataatcgcccatctgatgacaacagcacgtttagctcaactcagtcacacatggactggggaaaagtagcttttaaaaacttttctggtgaaatgtgcagactcaaatggttagagatttcttgcaacttgagaaaattcggcactttgaaagaattagtcctggaagctaagaaatgtgttaaaaagatgaacaaaagccaaaaatacaggaacggtccagactttccaaagaggccccttactgcttacaatcgcttcttcaaggagagttggccccagtactcccaaatgtaccctgggatgagaagccaggaactgaccaaaatcctgtcaaagaaatacagggaactcccagagcagatgaaacagaaatatattcaggatttccggaaggaaaagcaagaatttgaggaaaaacttgctcgattcagggaagaacaccctgatttagtccagaaggccaagaaatctagtgtctccaagaggactcaaaacaaagtgcaaaagaagtttcagaaaaatattgaagaagtgaggtctcttccaaaaacggatcgatttttcaagaaggtaaaatttcatggagagcctcagaaaccccccatgaatggataccacaagtttcaccaagattcctggtcaagtaaagagatgcaacatttgtcagtgagggagcgcatggtagagattggcagacgctggcagcgcatcccgcagagccagaaggatcattttaagagccaggctgaggagctgcagaagcaatacaaggtgaaattggatctctggctcaagactttgtcacctgaaaattatgctgcatacaaagaatcgacctatgctaagggtaagaatatggccatgacaggaggcccggaccccaggttgaaacaagcagatccacagtcctcatcagcaaagggtctgcaagaagggtttggggaggggcaagggctccaggctgcaggaacagattcatcacagactatttgggtaaactgtcatgtctccatggaaccagaagagaacaggaagaaagatagagaaaaggaagaaagcagtaactcttcagactgcagcagtggagaagaaatagaagttgatgtctga

SEQ ID NO: 198313 - DNA, 998 bp, Homo sapiens
  Payload ID: 19131
  Gene Name: upstream transcription factor 1
  ENST ID: ENST00000368019
  CDS Start-End: 85-933
acttagcactcaggcctgtgaatcaggagatacaaagacctccaaaaaaggaccagttcctcggatgtgccccctcacagagagatgaaggggcagcagaaaacagctgaaacggaagaggggacagtgcagattcaggaaggtgcagtggctactggggaagacccaaccagtgtggctattgccagcatccagtcagctgccaccttccctgaccccaacgtcaagtacgtcttccgaactgagaatgggggccaggtgatgtacagggtgatccaggtgtctgaggggcagctggatggccaaactgagggaactggcgccatcagtggctaccctgccactcaatccatgacccaggcggtgatccagggtgctttcaccagtgatgatgcagttgacacggaggggacagctgctgagacgcactatacttacttccccagcacggcagtgggagatggggcagggggtcaattctttgtgatgatgtcaccacaagaagtactgcagggaggaagccagcgctcaattgcccctaggactcacccttattccccgaagtcagaagctccccggacgactcgggatgagaaacgcagggctcagcataatgaagtggagcgtcgccgccgagacaagatcaacaactggatcgtgcagctctccaagataatcccagactgctctatggagagcaccaagtctggccagagtaaaggtgggattctatccaaagcttgtgattatatccaggagcttcggcagagtaaccaccgcttgtctgaagaactgcagggacttgaccaactgcagctggacaatgacgtgcttcgacaacaggtggaagatcttaaaaacaagaatctgctgcttcgagctcagttgcggcaccacggattagaggtcgtcatcaagaatgacagcaactaactatggggattcaggggctttgggcccaagaactgcagatagcccaggagcaacagcctaatccc

SEQ ID NO: 198314 - DNA, 1717 bp, Homo sapiens
  Payload ID: 19131
  Gene Name: upstream transcription factor 1
  Uniprot ID: P22415
  ENST ID: ENST00000368020
  CDS Start-End: 116-1048
tccattgaaaattttccttggataggaaaggacttagcactcaggcctgtgaatcaggagatacaaagacctccaaaaaaggaccagttcctcggatgtgccccctcacagagagatgaaggggcagcagaaaacagctgaaacggaagaggggacagtgcagattcaggaaggtgcagtggctactggggaagacccaaccagtgtggctattgccagcatccagtcagctgccaccttccctgaccccaacgtcaagtacgtcttccgaactgagaatgggggccaggtgatgtacagggtgatccaggtgtctgaggggcagctggatggccaaactgagggaactggcgccatcagtggctaccctgccactcaatccatgacccaggcggtgatccagggtgctttcaccagtgatgatgcagttgacacggaggggacagctgctgagacgcactatacttacttccccagcacggcagtgggagatggggcagggggtaccacatcggggagtacagctgctgttgttactacccagggctcagaggcactgctggggcaggcgacccctcctggcactggtcaattctttgtgatgatgtcaccacaagaagtactgcagggaggaagccagcgctcaattgcccctaggactcacccttattccccgaagtcagaagctccccggacgactcgggatgagaaacgcagggctcagcataatgaagtggagcgtcgccgccgagacaagatcaacaactggatcgtgcagctctccaagataatcccagactgctctatggagagcaccaagtctggccagagtaaaggtgggattctatccaaagcttgtgattatatccaggagcttcggcagagtaaccaccgcttgtctgaagaactgcagggacttgaccaactgcagctggacaatgacgtgcttcgacaacaggtggaagatcttaaaaacaagaatctgctgcttcgagctcagttgcggcaccacggattagaggtcgtcatcaagaatgacagcaactaactatggggattcaggggctttgggcccaagaactgcagatagcccaggagcaacagcctaatcccgtgcccctttccttcactgccccacttctggcatgggacagggggaagttcagaaggtgtgtccttgaactgaggccctgtgatatggcggcctgcagtggtgtgaaacacacaatgtggacgtgcactgacagccttgcccacccccaccatgcagcccctgggcccttgtgctcctctcgcacaatgcatgtgctgtctccatgctggatactggacacactaaactctggggcttgtcctgtgcttgcttagagtgcccagcagaggtttgctgacaggtgatgctctggcttgccccaggactctggcacttccattggttcttcctttccctggagctgaggtttagatgtgcaacctgtggctcaggggagcaagcttacacaagaagtgagggaaggatgtttagcagtggctggtgcccatgaagaggagattggccagtgagaagctgaggcctatgcagacatctctggagccagagagaacaacaggcaggggcccacttggggccttcccccttgtgggggtcgttttttttttttcttttcttttttttttttttttttttttttttttaagataaaattgttcaaagcca

SEQ ID NO: 198315 - DNA, 1807 bp, Homo sapiens
  Payload ID: 19131
  Gene Name: upstream transcription factor 1
  Uniprot ID: P22415
  ENST ID: ENST00000368021
  CDS Start-End: 206-1138
gcccctcaccaacatggccgcgggctggaagtgcgcatgagcagctgtctatggagatacctaggccgggagagggagaacacagttggagaaaatcggcagctgagacggccttggccggacttagcactcaggcctgtgaatcaggagatacaaagacctccaaaaaaggaccagttcctcggatgtgccccctcacagagagatgaaggggcagcagaaaacagctgaaacggaagaggggacagtgcagattcaggaaggtgcagtggctactggggaagacccaaccagtgtggctattgccagcatccagtcagctgccaccttccctgaccccaacgtcaagtacgtcttccgaactgagaatgggggccaggtgatgtacagggtgatccaggtgtctgaggggcagctggatggccaaactgagggaactggcgccatcagtggctaccctgccactcaatccatgacccaggcggtgatccagggtgctttcaccagtgatgatgcagttgacacggaggggacagctgctgagacgcactatacttacttccccagcacggcagtgggagatggggcagggggtaccacatcggggagtacagctgctgttgttactacccagggctcagaggcactgctggggcaggcgacccctcctggcactggtcaattctttgtgatgatgtcaccacaagaagtactgcagggaggaagccagcgctcaattgcccctaggactcacccttattccccgaagtcagaagctccccggacgactcgggatgagaaacgcagggctcagcataatgaagtggagcgtcgccgccgagacaagatcaacaactggatcgtgcagctctccaagataatcccagactgctctatggagagcaccaagtctggccagagtaaaggtgggattctatccaaagcttgtgattatatccaggagcttcggcagagtaaccaccgcttgtctgaagaactgcagggacttgaccaactgcagctggacaatgacgtgcttcgacaacaggtggaagatcttaaaaacaagaatctgctgcttcgagctcagttgcggcaccacggattagaggtcgtcatcaagaatgacagcaactaactatggggattcaggggctttgggcccaagaactgcagatagcccaggagcaacagcctaatcccgtgcccctttccttcactgccccacttctggcatgggacagggggaagttcagaaggtgtgtccttgaactgaggccctgtgatatggcggcctgcagtggtgtgaaacacacaatgtggacgtgcactgacagccttgcccacccccaccatgcagcccctgggcccttgtgctcctctcgcacaatgcatgtgctgtctccatgctggatactggacacactaaactctggggcttgtcctgtgcttgcttagagtgcccagcagaggtttgctgacaggtgatgctctggcttgccccaggactctggcacttccattggttcttcctttccctggagctgaggtttagatgtgcaacctgtggctcaggggagcaagcttacacaagaagtgagggaaggatgtttagcagtggctggtgcccatgaagaggagattggccagtgagaagctgaggcctatgcagacatctctggagccagagagaacaacaggcaggggcccacttggggccttcccccttgtgggggtcgttttttttttttcttttcttttttttttttttttttttttttttttaagataaaattgttcaaagcca

SEQ ID NO: 198316 - DNA, 610 bp, Homo sapiens
  Payload ID: 19131
  Gene Name: upstream transcription factor 1
  ENST ID: ENST00000534633
  CDS Start-End: 294-610
gagacggccttggccggacttagcactcaggcctgtgaatcaggagatacaaagacctccaaaaaaggaccagttcctcggatgtgccccctcacagagagatgaaggggtgagtgaagaagaggcagcagaaaacagctgaaacggaagaggggacagtgcagattcaggaaggtgcagtggctactggggaagacccaaccagtgtggctattgccagcatccagtcagctgccaccttccctgaccccaacgtcaagtacgtcttccgaactgagaatgggggccaggtgatgtacagggtgatccaggtgtctgaggggcagctggatggccaaactgagggaactggcgccatcagtggctaccctgccactcaatccatgacccaggcggtgatccagggtgctttcaccagtgatgatgcagttgacacggaggggacagctgctgagacgcactatacttacttccccagcacggcagtgggagatggggcagggggtaccacatcggggagtacagctgctgttgttactacccagggctcagaggcactgctggggcaggcgacccctcctggcactggtcaattctttgtgatgatgtc

SEQ ID NO: 198317 - DNA, 505 bp, Homo sapiens
  Payload ID: 19131
  Gene Name: upstream transcription factor 1
  ENST ID: ENST00000528768
  CDS Start-End: 1-496
gagtacagctgctgttgttactacccagggctcagaggcactgctggggcaggcgacccctcctggcactggtcaattctttgtgatgatgtcaccacaagaagtactgcagggaggaagccagcgctcaattgcccctaggactcacccttattccccgaagtcagaagctccccggacgactcgggatgagaaacgcagggctcagcataatgaagtggagcgtcgccgccgagacaagatcaacaactggatcgtgcagctctccaagataatcccagactgctctatggagagcaccaagtctggccaggtgggattctatccaaagcttgtgattatatccaggagcttcggcagagtaaccaccgcttgtctgaagaactgcagggacttgaccaactgcagctggacaatgacgtgcttcgacaacaggtggaagatcttaaaaacaagaatctgctgcttcgagctcagttgcggcaccacggattagaggtcgtca

SEQ ID NO: 198318 - DNA, 720 bp, Homo sapiens
  Payload ID: 19131
  Gene Name: upstream transcription factor 1
  ENST ID: ENST00000531842
  CDS Start-End: 68-720
gtgaatcaggagatacaaagacctccaaaaaaggaccagttcctcggatgtgccccctcacagagagatgaaggggcagcagaaaacagctgaaacggaagaggggacagtgcagattcaggaaggtgcagtggctactggggaagacccaaccagtgtggctattgccagcatccagtcagctgccaccttccctgaccccaacgtcaagtacgtcttccgaactgagaatgggggccaggtgatgtacagggtgatccaggtgtctgaggggcagctggatggccaaactgagggaactggcgccatcagtggctaccctgccactcaatccatgacccaggcggtgatccagggtcaattctttgtgatgatgtcaccacaagaagtactgcagggaggaagccagcgctcaattgcccctaggactcacccttattccccgaagtcagaagctccccggacgactcgggatgagaaacgcagggctcagcataatgaagtggagcgtcgccgccgagacaagatcaacaactggatcgtgcagctctccaagataatcccagactgctctatggagagcaccaagtctggccagagtaaaggtgggattctatccaaagcttgtgattatatccaggagcttcggcagagtaaccaccgcttgtctgaagaactgcagggacttgaccaactgcagctggacaatgacgtgcttcg

SEQ ID NO: 198319 - DNA, 1092 bp, Homo sapiens
  Payload ID: 19131
  Gene Name: upstream transcription factor 1
  ENST ID: ENST00000473969
  CDS Start-End: 191-337
ggccgcgggctggaagtgcgcatgagcagctgtctatggagatacctaggccgggagagggagaacacagttggagaaaatcggcagctgagacggccttggccggacttagcactcaggcctgtgaatcaggagatacaaagacctccaaaaaaggaccagttcctcggatgtgccccctcacagagagatgaaggggcagcagaaaacagctgaaacggaagaggggacagtgcagattcaggaaggtgcagtggctactggggaagacccaaccagtgtggctattgccagcatccagtcagctgccaccttccctgaccccaacgtcaagtgatgtacagggtgatccaggtgtctgaggggcagctggatggccaaactgagggaactggcgccatcagtggctaccctgccactcaatccatgacccaggcggtgatccagggtgctttcaccagtgatgatgcagttgacacggaggggacagctgctgagacgcactatacttacttccccagcacggcagtgggagatggggcagggggtaccacatcggggagtacagctgctgttgttactacccagggctcagaggcactgctggggcaggcgacccctcctggcactggtcaattctttgtgatgatgtcaccacaagaagtactgcagggaggaagccagcgctcaattgcccctaggactcacccttattccccgaagtcagaagctccccggacgactcgggatgagaaacgcagggctcagcataatgaagtggagcgtcgccgccgagacaagatcaacaactggatcgtgcagctctccaagataatcccagactgctctatggagagcaccaagtctggccagagtaaaggtgggattctatccaaagcttgtgattatatccaggagcttcggcagagtaaccaccgcttgtctgaagaactgcagggacttgaccaactgcagctggacaatgacgtgcttcgacaacaggtggaagatcttaaaaacaagaatctgctgcttcgagctcagttgcggcaccacggattagaggtcgtcatcaagaatgacagcaactaa

SEQ ID NO: 198320 - DNA, 1634 bp, Homo sapiens
  Payload ID: 19132
  Gene Name: upstream transcription factor 2, c-fos interacting
  Uniprot ID: Q15853
  ENST ID: ENST00000222305
  CDS Start-End: 38-1078
ccccgggccccgcgccccccccgcccccgccccccccatggacatgctggacccgggtctggatcccgctgcctcggccaccgctgctgccgccgccagccacgacaagggacccgaggcggaggagggcgtcgagctgcaggaaggcggggacggcccaggagcggaggagcagacagcggtggccatcaccagcgtccagcaggcggcgttcggcgaccacaacatccagtaccagttccgcacagagacaaatggaggacaggtgacataccgcgtagtccaggtgactgatggtcagctggacggccagggcgacacagctggcgccgtcagcgtcgtgtccaccgctgccttcgcgggggggcagcaggctgtgacccaggtgggtgtggacggggcagcccagcgcccgggccccgccgctgcctctgtgcccccaggtcctgcagcgcccttcccgctggctgtgatccaaaatcccttcagcaatggtggcagtccggcggccgaggctgtcagcggggaggcacgatttgcctatttcccagcgtccagtgtgggagatactacggctgtgtccgtacagaccacagaccagagcttgcaggctggaggccagttctacgtcatgatgacgccccaggatgtgcttcagacaggaacacagaggacgatcgccccccggacacacccttactctccaaaaattgatggaaccagaacaccccgagatgagaggagaagagcccagcacaacgaagtggagcggaggcggagggacaagatcaacaactggatcgtccagctttcgaaaatcattccagactgtaacgcagacaacagcaagacgggagcgagtaaaggagggatcctgtccaaggcctgcgattacatccgggagttgcgccagaccaaccagcgcatgcaggagaccttcaaagaggccgagcggctgcagatggacaacgagctcctgaggcagcagatcgaggagctgaagaatgagaacgccctgcttcgagcccagctgcagcagcacaacctggagatggtgggcgagggcacccggcagtgacgcccgccaccaccacgcagccgccgccgcccacgccggcctctgctgcccccttccccagcccttagcacagagagggacacatgcccctcccccagctgcgtttttttatagtagatttttaacaaaaaacggggagaaataatgcatttctgtggatacagtgcccaccgccctcctccacttggaaacggtatcctccctgcccatccgtctgtctgtcgcccttctcccggccctcactaagccccggcacttctagtggtctcacctggaggcaagagggaggggacagaggccctgccacgtcccgctgcctcctgctctctggaggtactgagacagggtgctgatgggaaggaggggagcctttggggggccacccggggcctggacctatgcagggaggccacgtcccaccccacctcttgtttctgggtccctgctcccctttgggggtgtgtgtgtgtgttttaattttctttatggaaaaattgacaaaaaaaaaatagagagagaggtatttaactgcaataaactggccccatgtggcccc

SEQ ID NO: 198321 - DNA, 1523 bp, Homo sapiens
  Payload ID: 19132
  Gene Name: upstream transcription factor 2, c-fos interacting
  Uniprot ID: Q15853
  ENST ID: ENST00000343550
  CDS Start-End: 125-964
ctcctgccgcgcggcgtgagcgccgggctcggggcccccccggccgcccgccccctcccctccctccctcccctcccctcccctcccccccgggccccgcgccccccccgcccccgccccccccatggacatgctggacccgggtctggatcccgctgcctcggccaccgctgctgccgccgccagccacgacaagggacccgaggcggaggagggcgtcgagctgcaggaaggcggggacggcccaggagcggaggagcagacagcggtggccatcaccagcgtccagcaggcggcgttcggcgaccacaacatccagtaccagttccgcacagagacaaatggaggacaggctgtgatccaaaatcccttcagcaatggtggcagtccggcggccgaggctgtcagcggggaggcacgatttgcctatttcccagcgtccagtgtgggagatactacggctgtgtccgtacagaccacagaccagagcttgcaggctggaggccagttctacgtcatgatgacgccccaggatgtgcttcagacaggaacacagaggacgatcgccccccggacacacccttactctccaaaaattgatggaaccagaacaccccgagatgagaggagaagagcccagcacaacgaagtggagcggaggcggagggacaagatcaacaactggatcgtccagctttcgaaaatcattccagactgtaacgcagacaacagcaagacgggagcgagtaaaggagggatcctgtccaaggcctgcgattacatccgggagttgcgccagaccaaccagcgcatgcaggagaccttcaaagaggccgagcggctgcagatggacaacgagctcctgaggcagcagatcgaggagctgaagaatgagaacgccctgcttcgagcccagctgcagcagcacaacctggagatggtgggcgagggcacccggcagtgacgcccgccaccaccacgcagccgccgccgcccacgccggcctctgctgcccccttccccagcccttagcacagagagggacacatgcccctcccccagctgcgtttttttatagtagatttttaacaaaaaacggggagaaataatgcatttctgtggatacagtgcccaccgccctcctccacttggaaacggtatcctccctgcccatccgtctgtctgtcgcccttctcccggccctcactaagccccggcacttctagtggtctcacctggaggcaagagggaggggacagaggccctgccacgtcccgctgcctcctgctctctggaggtactgagacagggtgctgatgggaaggaggggagcctttggggggccacccggggcctggacctatgcagggaggccacgtcccaccccacctcttgtttctgggtccctgctcccctttgggggtgtgtgtgtgtgttttaattttctttatggaaaaattgacaaaaaaaaaatagagagagaggtatttaactgcaataaactggccccatgtggcccccgc

SEQ ID NO: 198322 - DNA, 648 bp, Homo sapiens
  Payload ID: 19132
  Gene Name: upstream transcription factor 2, c-fos interacting
  Uniprot ID: Q15853
  ENST ID: ENST00000379134
  CDS Start-End: 1-648
atggacatgctggacccgggtctggatcccgctgcctcggccaccgctgctgccgccgccagccacgacaagggacccgaggcggaggagggcgtcgagctgcaggaaggcggggacggcccaggagcggaggagcagacagcggtggccatcaccagcgtccagcaggcggcgttcggcgaccacaacatccagtaccagttccgcacagagacaaatggaggacagacaggaacacagaggacgatcgccccccggacacacccttactctccaaaaattgatggaaccagaacaccccgagatgagaggagaagagcccagcacaacgaagtggagcggaggcggagggacaagatcaacaactggatcgtccagctttcgaaaatcattccagactgtaacgcagacaacagcaagacgggagcgagtaaaggagggatcctgtccaaggcctgcgattacatccgggagttgcgccagaccaaccagcgcatgcaggagaccttcaaagaggccgagcggctgcagatggacaacgagctcctgaggcagcagatcgaggagctgaagaatgagaacgccctgcttcgagcccagctgcagcagcacaacctggagatggtgggcgagggcacccggcagtga

SEQ ID NO: 198323 - DNA, 1173 bp, Homo sapiens
  Payload ID: 19132
  Gene Name: upstream transcription factor 2, c-fos interacting
  ENST ID: ENST00000599471
  CDS Start-End: 1-762
gtgatccaaaatcccttcagcaatggtggcagtccggcggccgaggctgtcagcggggaggcacgatttgcctatttcccagcgtccagtgtgggagatactacggctgtgtccgtacagaccacagaccagagcttgcaggctggaggccagttctacgtcatgatgacgccccaggatgtgcttcagacaggaacacagaggacgatcgccccccggacacacccttactctccaaaaattgatggaaccagaacaccccgagatgagaggagaagagcccagcacaacgaagtggagcggaggcggagggacaagatcaacaactggatcgtccagctttcgaaaatcattccagactgtaacgcagacaacagcaagacgggagcggtgagcaccccggaccctcagtgtctgcggtggtcccggcccccgacccttgcatgcagaaagtccaacagccatggggctcgggagtcatccctggggtggaggccggtgggcggtgcctgccctaaggctcctggtcccctcgccccccagagtaaaggagggatcctgtccaaggcctgcgattacatccgggagttgcgccagaccaaccagcgcatgcaggagaccttcaaagaggccgagcggctgcagatggacaacgagctcctgaggcagcagatcgaggagctgaagaatgagaacgccctgcttcgagcccagctgcagcagcacaacctggagatggtgggcgagggcacccggcagtgacgcccgccaccaccacgcagccgccgccgcccacgccggcctctgctgcccccttccccagcccttagcacagagagggacacatgcccctcccccagctgcgtttttttatagtagatttttaacaaaaaacggggagaaataatgcatttctgtggatacagtgcccaccgccctcctccacttggaaacggtatcctccctgcccatccgtctgtctgtcgcccttctcccggccctcactaagccccggcacttctagtggtctcacctggaggcaagagggaggggacagaggccctgccacgtcccgctgcctcctgctctctggaggtactgagacagggtgctgatgggaaggaggggagcctttggggggccacccggggcctggacctatgcagggaggcc

SEQ ID NO: 198324 - DNA, 510 bp, Homo sapiens
  Payload ID: 19132
  Gene Name: upstream transcription factor 2, c-fos interacting
  ENST ID: ENST00000598058
  CDS Start-End: 1-510
acccgggtctggatcccgctgcctcggccaccgctgctgccgccgccagccacgacaagggacccgaggcggaggagggcgtcgagctgcaggaaggcggggacggcccaggagcggaggagcagacagcggtggccatcaccagcgtccagcaggcggcgttcggcgaccacaacatccagtaccagttccgcacagagacaaatggaggacaggtgacataccgcgtagtccaggtgactgatggtcagctggacggccagggcgacacagctggcgccgtcagcgtcgtgtccaccgctgccttcgcgggggggcagcaggctgtgacccaggtgggtgtggacggggcagcccagcgcccgggccccgccgctgcctctgtgcccccaggtcctgcagcgcccttcccgctggtaggtgccctgccacccctgggtgggggggggagggagtggagaggggacactggctctgctcttggggagccccgggggtggggcaggtgtc

SEQ ID NO: 198325 - DNA, 446 bp, Homo sapiens
  Payload ID: 19132
  Gene Name: upstream transcription factor 2, c-fos interacting
  ENST ID: ENST00000599625
  CDS Start-End: 1-446
tttcaaatctaatacttagcagatgcttgggcaaacagctctgcgataatacatgccccctttttttttcctcctcttgtagaaaaattgatggaaccagaacaccccgagatgagaggagaagagcccagcacaacgaagtggagcggaggcggagggacaagatcaacaactggatcgtccagctttcgaaaatcattccagactgtaacgcagacaacagcaagacgggagcgagtaaaggagggatcctgtccaaggcctgcgattacatccgggagttgcgccagaccaaccagcgcatgcaggagaccttcaaagaggccgagcggctgcagatggacaacgagctcctgaggcagcagatcgaggagctgaagaatgagaacgccctgcttcgagcccagctgcagcagcacaacctggagatggtgggcgagggcacc

SEQ ID NO: 198326 - DNA, 464 bp, Homo sapiens
  Payload ID: 19132
  Gene Name: upstream transcription factor 2, c-fos interacting
  ENST ID: ENST00000597671
  CDS Start-End: 1-259
ggctgtcagcggggaggcacgatttgcctatttcccagcgtccagtgtgggagatactacggctgtgtccgtacagaccacagaccagagcttgcaggctggaggccagttctacgtcatgatgacgccccaggatgtgcttcagacaggaacacagaggacgatcgccccccggacacacccttactctccaaaaattgatggaaccagaacaccccgagatgagaggagaagagcccagcacaacgaagttccttgaaattcgatgagacttacccgacgggcccgaatgtgtcctagcttggcggaagcttctggggcattgacgaggacaggtgtctgctgctgtcaggcagaatgtccccccagtggagcggaggcggagggacaagatcaacaactggatcgtccagctttcgaaaatcattccagactgtaacgcagacaacagcaagacgggagcg

SEQ ID NO: 198327 - DNA, 1612 bp, Homo sapiens
  Payload ID: 19132
  Gene Name: upstream transcription factor 2, c-fos interacting
  Uniprot ID: Q15853
  ENST ID: ENST00000595068
  CDS Start-End: 38-1054
ccccgggccccgcgccccccccgcccccgccccccccatggacatgctggacccgggtctggatcccgctgcctcggccaccgctgctgccgccgccagccacgacaagggacccgaggcggaggagggcgtcgagctgcaggaaggcggggacggcccaggagcggaggagcagacagcggtggccatcaccagcgtccagcaggcggcgttcggcgaccacaacatccagtaccagttccgcacagagacaaatggaggacaggtgacataccgcgtagtccaggtgactgatggtcagctggacggccagggcgacacagctggcgccgtcagcgtcgtgtccaccgctgccttcgcgggggggcagcaggctgtgacccaggtgggtgtggacggggcagcccagcgcccgggccccgccgctgcctctgtgcccccaggtcctgcagcgcccttcccgctggctgtgatccaaaatcccttcagcaatggtggcagtccggcggccgaggctgtcagcggggaggcacgatttgcctatttcccagcgtccagtgtgggagatactacggctgtgtccgtacagaccacagaccagagcttgcaggctggaggccagttctacgtcatgatgacgccccaggatgtgcttcagacaggaacacagaggacgatcgccccccggacacacccttactctccaaaaattgatggaaccagaacaccccgagatgagaggagaagagcccagcacaacgaagtggagcggaggcggagggacaagatcaacaactggatcgtccagctttcgaaaatcattccagactgtaacgcagacaacagcaagacgggagcggcctgcgattacatccgggagttgcgccagaccaaccagcgcatgcaggagaccttcaaagaggccgagcggctgcagatggacaacgagctcctgaggcagcagatcgaggagctgaagaatgagaacgccctgcttcgagcccagctgcagcagcacaacctggagatggtgggcgagggcacccggcagtgacgcccgccaccaccacgcagccgccgccgcccacgccggcctctgctgcccccttccccagcccttagcacagagagggacacatgcccctcccccagctgcgtttttttatagtagatttttaacaaaaaacggggagaaataatgcatttctgtggatacagtgcccaccgccctcctccacttggaaacggtatcctccctgcccatccgtctgtctgtcgcccttctcccggccctcactaagccccggcacttctagtggtctcacctggaggcaagagggaggggacagaggccctgccacgtcccgctgcctcctgctctctggaggtactgagacagggtgctgatgggaaggaggggagcctttggggggccacccggggcctggacctatgcagggaggccacgtcccaccccacctcttgtttctgggtccctgctcccctttgggggtgtgtgtgtgtgttttaattttctttatggaaaaattgacaaaaaaaaaatagagagagaggtatttaactgcaataaactggccccatgtggcccccg

SEQ ID NO: 198328 - DNA, 1179 bp, Homo sapiens
  Payload ID: 19132
  Gene Name: upstream transcription factor 2, c-fos interacting
  ENST ID: ENST00000594064
  CDS Start-End: 1-1050
atgctggacccgggtctggatcccgctgcctcggccaccgctgctgccgccgccagccacgacaagggacccgaggcggaggagggcgtcgagctgcaggaaggcggggacggcccaggagcggaggagcagacagcggtggccatcaccagcgtccagcaggcggcgttcggcgaccacaacatccagtaccagttccgcacagagacaaatggaggacaggtgacataccgcgtagtccaggtgactgatggtcagctggacggccagggcgacacagctggcgccgtcagcgtcgtgtccaccgctgccttcgcgggggggcagcaggctgtgacccaggtgggtgtggacggggcagcccagcgcccgggccccgccgctgcctctgtgcccccaggtcctgcagcgcccttcccgctggctgtgatccaaaatcccttcagcaatggtggcagtccggcggccgaggctgtcagcggggaggcacgatttgcctatttcccagcgtccagtgtgggagatactacggctgtgtccgtacagaccacagaccagagcttgcaggctggaggccagttctacgtcatgatgacgccccaggatgtgcttcagacaggaacacagaggacgatcgccccccggacacacccttactctccaaaaattgatggaaccagaacaccccgagatgagaggagaagagcccagcacaacgaagtggagcggaggcggagggacaagatcaacaactggatcgtccagctttcgaaaatcattccagactgtaacgcagacaacagcaagacgggagcgagtaaaggagggatcctgtccaaggcctgcgattacatccgggagttgcgccagaccaaccagcgcatgcaggagaccttcaaagaggccgagcggctgcagatggacaacgagctcctgaggcagcaggtgggtgcggggcctggagcgggtcagggcccaggagccccagatgcaaggcgctggccctcagctcccttgacctccgtcgtgtccgccagatcgaggagctgaagaatgagaacgccctgcttcgagcccagctgcagcagcacaacctggagatggtgggcgagggcacccggcagtgacgcccgccaccaccacgcagccgccgccgcccacgccggcctctgctgcccc

SEQ ID NO: 198329 - DNA, 550 bp, Homo sapiens
  Payload ID: 19132
  Gene Name: upstream transcription factor 2, c-fos interacting
  ENST ID: ENST00000596380
  CDS Start-End: 122-550
agtgatcgctgacctcccgccatgttccagggctgtttgaaacacaggacagaatgctacacgcagaaggagtccccactcctgttaattgcagagaatgcagtaaaccccaagcacagcaatgaggggacgggatggaggaacagagaaagctaagggtagcctctgccctcctactccccaggctgtgatccaaaatcccttcagcaatggtggcagtccggcggccgaggctgtcagcggggaggcacgatttgcctatttcccagcgtccagtgtgggagatactacggctgtgtccgtacagaccacagaccagagcttgcaggctggaggccagttctacgtcatgatgacgccccaggatgtgcttcagacaggaacacagaggacgatcgccccccggacacacccttactctccaaaaattgatggaaccagaacaccccgagatgagaggagaagagcccagcacaacgaagtggagcggaggcggagggacaagatcaacaactggatcgtccagctttcgaaaatcattccagactgt

SEQ ID NO: 198330 - DNA, 582 bp, Homo sapiens
  Payload ID: 19132
  Gene Name: upstream transcription factor 2, c-fos interacting
  ENST ID: ENST00000602164
  CDS Start-End: 1-339
atgctggacccgggtctggatcccgctgcctcggccaccgctgctgccgccgccagccacgacaagggacccgaggcggaggagggcgtcgagctgcaggaaggtgagtgcttgccgggccggccgcgcccggggagggctgggggcgctcggcgcggccctgaccgtgccccgaccctcctcggccccaggcggggacggcccaggagcggaggagcagacagcggtggccatcaccagcgtccagcaggcggcgttcggcgaccacaacatccagtaccagttccgcacagagacaaatggaggacaggtgacataccgcgtagtccaggtgactgatggtcagctggacggccagggcgacacagctggcgccgtcagcgtcgtgtccaccgctgccttcgcgggggggcagcaggctgtgacccaggtgggtgtggacggggcagcccagcgcccgggccccgccgctgcctctgtgcccccaggtcctgcagcgcccttcccgctggctgtgatccaaaatcccttcagcaatggtggcagtccggcggccgaggctgtcagcggggaggcacgatt

SEQ ID NO: 198331 - DNA, 13708 bp, Homo sapiens
  Payload ID: 19133
  Gene Name: upstream transcription factor family member 3
  Uniprot ID: Q68DE3
  ENST ID: ENST00000316407
  CDS Start-End: 412-7149
ggctgggaaagttgaggccgcgctgccgccgggtctccggccttgagggctcgggctcgcagcggctgcggtggccgcaaaaagaggcggcgggggcggggggagaggagggcctgggcccgcgctcccccagccccggaggagcaggcggtggccgcggacggagagattcgcccagacggtcagacactcctgccttcccctcctgggatcatgacccaggcgggggtcgccgccgtcgccgccgccaccgcggccgagaccgcgcagccggcggtaagaagaaagcataacccatagaccatcttctggcagaagatgatacatttggatcagaaacgggaggcattggaagccaggaatcaaaagtgaagaaactctgcaagcccttaggttcctattactgtaaccatgccagaaatgacagagaatgagacgcctacaaaaaagcagcacagaaagaaaaaccgggagacacacaatgcagtggagaggcatagaaagaagaaaattaatgctgggataaacagaataggagagctgatcccatgttctcctgccctgaagcagagcaagaatatgatcctggaccaagcctttaaatatataacagaattgaaaaggcaaaatgatgaactcctgcttaatggaggaaacaatgaacaagctgaagaaataaaaaagctacggaaacaactggaagaaatccaaaaagaaaatggccgatatattgaattactgaaagctaatgacatatgcttatatgatgacccgacaattcactggaaaggaaatcttaaaaactcaaaggtctctgttgttattcctagtgaccaggttcaaaaaaaaattattgtttattccaacgggaatcagcctggtggaaacagccagggaacagctgttcaggggataacttttaatgttagtcataatttacaaaagcagaccgccaatgtggtgccagtacagaggacttgcaatcttgtgactcctgtatctatttctggagtttacccttctgaaaacaagccatggcatcagaccacagttcctgcattggctaccaaccagcctgttcctctttgtcttcctgctgccatttctgctcagagtattctcgagcttcccacctctgaaagcgaatcaaatgtgcttggtgccactagtggctcactgattgctgtttcaattgaatctgagcctcaccaacatcattctttgcacacatgcctaaatgatcaaaattcttctgaaaataagaatggacaagagaaccccaaagtattgaagaaaatgaccccttgtgttacaaacatcccccacagctcctcagcaactgccactaaagtgcaccatggaaacaagtcctgcctgagcatacaggacttcagaggtgattttcaaaacacttttgttgtttcagttaccaccacagtctgctcgcagcctcccagaactgcaggtgattcttctccaatgagcattagtaagagtgcagacttgacaagtacagctacagtggtggcatcatctgcccctggagtagggaaggccaccattcctataagcactctttcgggaaaccctttggacaatggttggactctttcttgttctttgccttcttcaagtgttagtacttcagatttgaaaaacattaatagccttacacgaatctcttcagctggaaacacacagacaacgtggactactttgcaactggcaggaaacactattcagcccttaagccagacaccatcttctgctgtgactccagtattaaatgagtctggtactagccccaccacaagcaaccacagtagatatgtggctacagacatcaacttgaataattcctttccagcagatgggcagccagttgagcaagtagttgtaacattgccttcttgtccatctttacctatgcagccactaattgcccagccacaagttaaatctcagcctcccaaaaatatccttccactgaattcagcaatgcaagtgattcagatggctcagccagttgggtcagctgttaattcagctccaactaatcaaaatgttataattcttcagccacctagcaccaccccatgcccaacagtgatgagggcagaagtttccaaccaaacagtaggtcaacagatagtaatcatacaggctgctaatcagaatcctttgccactcctccctgctccacctcctggttctgttcgactccccatcaatggagccaatactgtaatagggtctaataattcagtgcaaaatgttccaacaccacagacttttggaggaaagcatcttgtccacatattaccaagaccttcatctttatcagcgtctaactcaacacaaactttttctgttaccatgtcaaaccaacagcctcaaaccatttctttaaatggacagctctttgctttgcagcctgtgatgtcttcatcaggaactacaaatcaaacccctatgcaaattattcaacccaccaccagcgaagatccaaataccaatgttgccctgaatacatttggtgctttggccagcctcaatcaaagcatatcacagatggctgggcaaagctgtgtacaattgtctattagccagcctgccaattctcaaactgctgcaaatagtcaaaccactacagctaactgtgtttcattaacaacaactgcagcacctcctgtgacaacagatagttcagccacactagctagtacttataatctagtgagtacttcctcaatgaacactgttgcttgtttgcctaacatgaaatctaaaaggttgaataagaagccaggtggcaggaaacacttagcagcaaacaagtcagcgtgtcccctgaattcagtcagagatgtgagcaagttagactgccccaacactgaaggctcagcagagccaccctgtaatgatggactgctagaaagcttccctgctgtgttaccatctgtctctgtgtctcaggcaaatagtgtgagtgtttctgcttcacattctttgggtgttctaagctctgaatcattaatacctgagtctgtatcgaaatctaagtcagcagaaaagtccagcccaccctcccaagaatctgtaacaagtgaacattttgcaatggccgcagcaaaatccaaagattctacccctaatctacaacaagagacatctcaggataaaccaccaagtagtttagcattatcagatgctgccaaaccctgcgcttcagccaatgtattgattccatctccaagtgatcctcacattttggtttctcaggttcctggtttgtcatctacaacaagcactacaagtactgactgtgtttctgaggtagaaatcattgctgaaccttgcagagttgagcaagattcatcagatacaatgcaaaccacaggtctcttaaaggggcaaggtttaactacattgctatctgatcttgctaaaaaaaaaaaccctcagaaatcatctctttctgatcagatggatcatcctgacttttcttcagaaaatcctaaaatagttgattcaagtgtgaatttacatcccaaacaggaactattactgatgaacaatgatgatagagatcctccacagcatcattcctgcctccctgatcaagaggttattaatggttctttgatcaacggtagacaggccgactctcccatgtcaaccagctctggcagtagtcgtagtttctcagttgcatccatgcttcctgaaacaacaagagaagatgtgaccagcaatgcaacaactaatacatgtgacagctgtacctttgtagagcaaactgatatagtagctcttgcagcaagagctatttttgaccaggagaaccttgagaaggggagagttggcctccaggctgatataagggaagttgcttcaaagccttctgaagcatcattgttagagggagacccacccttcaaatcacagatacctaaagagagtggcacaggacaggcagaagcaacaccaaatgaatttaattctcagggttcaattgaagcaactatggagaggccccttgagaaaccaagttgttctctaggaattaaaacatcaaatgcatctttacaggattcaacttctcagccaccaagcatcaccagtttaagtgtgaataatcttatccatcagagcagcatcagccatcctctggccagctgtgcgggtttatccccaacttcagagcaaacaactgtgcctgcaacggttaatctgaccgtttcatctagctcctatggcagtcaacctcctggaccatctctgatgactgaatattcccaagaacagctaaatactatgactagtaccataccaaattcacagattcaagagccactcttaaagccaagccatgaaagccgtaaggattctgctaagcgtgctgtccaagatgaccttttactgtcttcagctaaacgtcaaaagcactgtcagccagcccccctcaggcttgaaagtatgtccctgatgagcagaactccagacaccatttctgaccaaactcaaatgatggtcagtcagatccctcctaattcttcaaactcagttgtgcctgttagcaacccagctcatggagatggccttacacgattatttccacctagtaacaactttgtgactcctgcattgaggcaaactgaagttcagtgtggttctcagccttcagttgctgaacagcagcaaacccaggcaagtcagcatctacaggccctgcagcagcatgttccagctcaaggtgtatctcaccttcatagtaaccatctctacataaagcagcagcagcagcagcagcagcagcagcagcagcaacagcaacaacaacaagcagggcagttaagagagaggcatcacttatatcaaatgcagcatcatgtacctcatgcagagagctctgtccactctcagccccataatgtccaccaacagaggactctgcaacaggaagttcagatgcagaaaaagaggaatcttgttcagggcacccagacctctcagctttccttacaaccaaagcaccatggaactgaccaatcccgatccaagactggccagccacatccccaccatcagcagatgcagcaacaaatgcagcaacactttggaagctcccagacagagaagagctgtgaaaacccttcaactagtcggaaccatcataaccatccccagaaccatctcaatcaagatattatgcaccaacagcaggatgttggaagcagacagcaaggttcaggggtttcatctgaacatgtatctggccataatccaatgcagaggcttttgacatcaagaggcttagagcagcaaatggtgtcccaaccaagtattgtgactagatcttcagacatgacctgtactccacacaggccagagagaaatagagtttcaagttattctgctgaggcactcattggaaagacatcttctaattcagagcagagaatggggatatcaattcagggttccagagtttcagatcagcttgaaatgagaagctatcttgatgttcccagaaataagagtttggctattcataatatgcagggtcgtgtggaccatactgtggcctcagatatccgcctttctgattgtcagacgtttaaaccaagtggagctagtcaacagccccagagtaattttgaagtacaatcttcaagaaacaatgaaataggtaaccctgtatcatcattgcggagtatgcagtcccaggcttttcgaattagtcaaaacactggccccccaccaattgaccgtcaaaagagattatcttacccaccagttcagagcatcccaacaggaaatggtattccatcaagggacagtgaaaatacttgtcaccaaagtttcatgcagagcttacttgcccctcacctcagtgatcaggtcattgggagccagaggtcactctcagaacatcagaggaatacacagtgtggtccatcctctgcaattgaatataattgtcccccaactcatgaaaatgtccatattagaagagagagtgagagtcagaatagggaaagttgtgacatgtcgttaggtgcaattaacaccaggaacagcaccttgaatattcctttttcaagttcctcttcctcaggagatattcaaggtcgaaacacaagccccaatgtttctgtacagaaatccaatcccatgaggattactgagagtcatgccaccaagggccacatgaaccctccagtcacaaccaacatgcatggggttgcaaggccagcgttgccacatccatctgtgtctcatggaaatggcgatcaaggccctgctgtacgtcaagctaattcttcagttccccagagatcaaggcatcccctgcaagacagcagtggttccaaaattcgtcagcctgaaaggaatcgttctggaaaccaaaggcaaagtactgtctttgatccaagtcttccccatcttcctctctctactggtggcagtatgattcttggacgtcaacaacctgccacagagaagagaggaagtattgttcgtttcatgcctgatagcccacaagtacctaatgataattcaggtcctgaccagcatacactatcacaaaattttggtttttcttttattcctgagggtggcatgaatccaccaataaatgctaatgcttctttcattccacaggttactcagcctagtgccactcgaactccagccctcatcccggtagatccgcaaaatactctgccctccttctatcctccatactctcctgctcatcctacactgtccaatgatatttcaatcccctattttcctaatcagatgttctcaaatcctagcacagagaaggtaaacagtggaagtttaaataaccgatttggatcaattttatctcctcccagacctgttgggtttgctcaaccaagttttcctcttctcccagatatgccaccaatgcacatgaccaactctcacttatccaattttaatatgacatctttgtttccagaaatagccacagcgcttcctgatggctcagcaatgtcacctttgcttacaatagcaaattcctctgcctctgactcttccaagcagtcctcaaacagacctgcccataacataagccatattctaggtcatgattgcagttcagctgtttaaatactgataaacaaaatgtaaaggtaatgagtgagattacaaatgtatttgtgcgtgcatgtgcacagacatgtacatgaagagaaggattgtgtgtgtgtgtctgtataatcagttttcagttatcttctgaatgtagggaagccatgtcagatgcagatactgggttgtcagaaaacaagttatctttcgttttcaactgcatggtgtacttttttattttccaagtagatttacatttccaagttgatatttcctaaatactaattagctggaaattgggggagatcatcttgtcatgtactgggtagtaggagggagcctagactttaaacttgattgttgataacttatggaatatgtaggtaagttgctactgaaaaatataggcagcttgataaaacacagtggctcataatcaagtgctggctaatgtcagcatctagaacagcttcttacctatgacagatgttgaactgatgttgagtttaatgtccgtagttaaagtcaagcagttagcaaataaataaaagcaatcagcctttattctcaaagtttggtttagatacaggcttctttctaaattataacaatgcataaattatctgaattttatgtcttgttcttcaaattagggagctgtgttaccctttaatgtgccaagattatttaaagcaaaggtcttccttagacaattatttagccgtaaatatagaaagctaaaaagttaagtacatacatattctccgttttgtgcttgcattttgcatcgggtcataagggtaaaagcagttagttgtattgtggagttttgcatgggtgcagttaacaatggatgtttcatcagctgagtttaatttagtattctctcttcattctatttatttggtcttgaaataaattcttttgcattcatttaaatattaggattgatcaggaaatagtgtttgtaatctacacgtttatttgagccttactttaaaaatatttctgaacagagatttaagctctgtcagtattttcatttactgatagcatttatattttaaatatggcattgtatatttcattattatccttcataacagaattataatgagaatatgaatttgttatttttcttgttggtagatgtgaaatggtgcttcaaaaaatatatagtctttctgtatgtctctgtgtgtgtaagtatgtgtgtgtgtgtgtacacatattttaaagtatgaattggtcctttaaaaacaggcctgccatctgaaaatgggaaattgagacctgagacctgctaaagcatagaagaacttgatataggtagggttttttttttttttttttttttaatagatggagtctggctctgttgcccaggctggagtgcagtggcgtgatctcagctcactgcaagctccacctcccgggttcaagtgattctcctgcctcagcctcctgtgtagctgggactacaggcacgtgccaccacacctggctaatttttggtacttttagtagagacggggtttcaccgtgttagccaggatggtcttgatctcctgacctcgtgatccacctgcctcggcctcccaaagtgccaggattacaggcatgagccaccgtgcttggcctaggtacaggtttttaaaagccccacagaagtttataatacgtttaaaaacccatattaaaatttgaaaacttaaaaaaaaaactaagaaaacaatggcatatattccttttcttaaacctgtgaagtccattactttttgttcttgttatattctgccaaaaatgggatggggtgggagagatgcatagaaattgttttatctgccttgttaacaaagtgaactcaaggaccagcttttcttttctttcttcttttcttttttttttgagactctgtcacccaggctggagtgtcgttaggtgcaactaacaccaggaacagcaccttgaatattcctttttcaagttcctcttcctcaggagatattcaaggtcactttgtcacccaggctggagtctacaatggcaggatcttggctcactgcagcctctgcctcctgggttcaagcaaattcttgagcctcagcctcccgagtagctgagattacaggtctgtgccactacacctggctaatttttatatttttagtagagacggggtttcaccatcttggccaggctggtcttgaactcctgatgtcaggtgatccacccacctcggcctcccaaagtactggaattacaggcatgagtcacccctcccaggcccccccctttttttttaatcctaaaaagcttcctaagggttggtcagagcagttaactccagtgaatacctcttctaaagactcagcaaaagggtcatttgtgcctctttaactgttcttaccaaactgtcctgtctcttttctgctgccaactaagcagcttcctagggacaaaaaaatatacaatatttttttttttcttgcttacaaagcaagaacaacctgtattttctttcttcaaaatggtcttggggaagaataggagagcttcatgaataagttactcaagacaacagataaacacagtagtcaaaactttttattgaggaaaaatgtggcatttatgacttgctttttaattctcttaactgaattttaagctgcaacgttcaaatttttctttgtacttgaaaggtccagtgtgccaatttcaagaaggacagttttccatgtgtttggctattcatttccctctctccctctctcatctgtctgtctctcactgcctctgtctctgtctctcatacacatatacacacacacacacacacacacacacacacactctctctctctctctctctctctccagtggctgttaagttctgaaggactggggactgctagacataattgaaagtaaggtaacaggctaaggagaagctcagtttgaacattgcaatgtaaagtcctcaaagcctgtgactttcaagtatttctgttgcattaattgtattttcctgcttagctgtgttcagacatagtatttgcatttcttggagctttcattccaacagtctaacattttgatcttgaaagagtctcaataagccttatttgaccatctgaggaaaaatgtgaccatctgtgaataattggctcctgcttacgtgtagctctcattactttacagatgtatgcatgtgtatgtaagacttcagttcatacatggcttaattctgaaagtgttcagaccatagtacccttatttgatttaaaagcatgaatatatgagatttactagcagtattaagtatttgatagagctacgtgatttttgggaagaaatttgttatatggtatgtagtgttaatttggatataatttttggtaaagggatggcagaaaacatagtcaattttggttataataaacgtaaccttattcttggcctgctccatgtgaaatagggctcagggaagctggtcttttccttagcgggatgattactcctttgccttgaaacatttattgggcccaccatgtatggatcagcatgtggtggtaagtcatactcccaaatcagtgattcccaagtcttggctttgggaaccagtatgcctcgtattctcttaaagagcaacaagaatttcttgaaacaaaattagttcagaattgatttaaattttttaacttctggaaatacacgaagttatgtctgagtcatgagtgacagtcattgattaaatcatttctctgtctcttttttagcattattgatcacagagtccgttataaaaagtggttgattcctttcaacatttaacaataacttctaatgaagggtaaaattccagattctcttcatgcgtaaacatttaatgtgtcaatcatagatgaaaggaatctagtttgatgttgtttctttctttcttttttttggaaaacacaagttgctctgggatggcttatatgttgttttataccggttcaggaaatttatttttgtttttattgtaagaccttttgcggtaccagagatggcaccttttttctaggtaaggtgtaggaattcctcaatggtcttgcttcgtaaaatttaacatatcagaactggggaaagagaaaggagggggttatttttttgcagcattttccagtcacatatcagggttatactgaactgcaacaaagatcaacttttaaaaattagccttcttaaaatacaaaatgatttaagtattttaaagataatttatttgccttgctcttgccttctaacattagccatttcatggagaggctaaaacttatactccaaaaaatgtggaagcacattttaatgggagtaaaattaaaaaattttgagaaagggtaaaatcttatgaatatgcatcttcttagctttatcttccctttgataggtaggcacttatgctcttccatctgctccatgtcaaatagggctcagggaagccagtcatttccttagcgagatgattactcctttgccttgaaacatttattgggcccaccatgtatggatcagtgtgtggtagtgagtcatactcccaaatcagtgattcccaagtcttggctttgggaaccagtatgccttgtattctcttaaaaagcaacaataatttcttgaaacaaaattagttcagaattgatttaaaatatttcagtgtgccatatagctctgtcccttggtttggttggccttgttttttcctgtgaagaatgaaagggcaaaggtgataccaaaatgaaacagctttggagtgatatctttaggagcctggaagccatttttgtaattttgttgtctatataaatgctacctttgcctggaggtagtgcgcctgtggctgtgtacatccagagggcaacagtaatagccaacaaccagacaaactagtgaagttaatctgtgagtgatgattttatgatacttatatgcaaattaaaggcagaagttagtttcttctcaagatgcctttttggctgaacattaccatttttctttccccagggtttgaaagaaaagggccttttttggatttaactatattctgtctgcattctattcttcatgcgtaggtttctactagaacctgtggaggggggacaccaaatttagattgagtcagtccatgctgataagaagcgtgaggaccttgttggacacagagcttctagatctttccacctgtagcctctaccctgttcctgcactttacctgaaactgtgcctctggtctttagaccagctgttggaacatatcactcacccactcctctgttatagcaaagggccagctgggatggtacacgctgtgtaatcagacaccttctcgacaagtacagctgatgtttctcactgttgccttaccattctctgagccatctttgatgttgatttgtaaaaaaaaacaaaaaacaaaaaaaaaacctagtagcaaaactcctgttaaactcagagcttgtatgtggtggtcattcaacatccttatttctagatttacacaaactgtaccaactgtaatctttttctggcacgcgtatgtggtcagatgcttcataaacgtgagccaacttgggttgtaaacattggacataatatacaaattggggaattttggatgactgcataatcctgtcattagagatttcataagacagaagataactgtttatttgtaatttaacacatttttagaaaagatgatctttaatttctttccctcagttgtgtatacagctatacaccatactaacaccgtactatgtcataggaacttaaagttagatgtatctaaatcccttcacttttctaagacttctctgtgctcccacccctgaagtcttcaaatcatttttcatctgtgaagtcactgaggtactgggcttgactatagtggtaacagttaaggggagttgaactattgatcttccaagaagaaagggaccagatagtgttaagatgctgcagttgtgttactgtgaagaaaagattcgcttccactttcagcaggctatataaatatatatacatatatatatatattttcactttggtaaaaaaaagttgaaaaatctgaggagaacataattaccttcacaaattatttatagatacactgggtgagaagcttactgtagggcagtcacccaaaaaaaactaattttagtgctttcaatagtgtaatatttgtatctattaccatggcagcagtgtctgctgcacactgtgtcctattactgtaaatctcctggtttataattcttatggaaactaatttgttttgtaatggaatccagagcagatatgtataatatgatcaggattgtcctacagttgtaaataagaataggtcctgtttattttgacatctttttacaaatgcattgtattagggtgtgaatattctgaaccatcctcttgtttaaagtttggaaatttttattgttaaatgtaacattttaatggttgtaataattatttgtatagatatgaatatagtattttatttaagaaaataaactttgcatttttgcattgtaaa

SEQ ID NO: 198332 - DNA, 8461 bp, Homo sapiens
  Payload ID: 19133
  Gene Name: upstream transcription factor family member 3
  Uniprot ID: Q68DE3
  ENST ID: ENST00000478658
  CDS Start-End: 19-6756
gttcctattactgtaaccatgccagaaatgacagagaatgagacgcctacaaaaaagcagcacagaaagaaaaaccgggagacacacaatgcagtggagaggcatagaaagaagaaaattaatgctgggataaacagaataggagagctgatcccatgttctcctgccctgaagcagagcaagaatatgatcctggaccaagcctttaaatatataacagaattgaaaaggcaaaatgatgaactcctgcttaatggaggaaacaatgaacaagctgaagaaataaaaaagctacggaaacaactggaagaaatccaaaaagaaaatggccgatatattgaattactgaaagctaatgacatatgcttatatgatgacccgacaattcactggaaaggaaatcttaaaaactcaaaggtctctgttgttattcctagtgaccaggttcaaaaaaaaattattgtttattccaacgggaatcagcctggtggaaacagccagggaacagctgttcaggggataacttttaatgttagtcataatttacaaaagcagaccgccaatgtggtgccagtacagaggacttgcaatcttgtgactcctgtatctatttctggagtttacccttctgaaaacaagccatggcatcagaccacagttcctgcattggctaccaaccagcctgttcctctttgtcttcctgctgccatttctgctcagagtattctcgagcttcccacctctgaaagcgaatcaaatgtgcttggtgccactagtggctcactgattgctgtttcaattgaatctgagcctcaccaacatcattctttgcacacatgcctaaatgatcaaaattcttctgaaaataagaatggacaagagaaccccaaagtattgaagaaaatgaccccttgtgttacaaacatcccccacagctcctcagcaactgccactaaagtgcaccatggaaacaagtcctgcctgagcatacaggacttcagaggtgattttcaaaacacttttgttgtttcagttaccaccacagtctgctcgcagcctcccagaactgcaggtgattcttctccaatgagcattagtaagagtgcagacttgacaagtacagctacagtggtggcatcatctgcccctggagtagggaaggccaccattcctataagcactctttcgggaaaccctttggacaatggttggactctttcttgttctttgccttcttcaagtgttagtacttcagatttgaaaaacattaatagccttacacgaatctcttcagctggaaacacacagacaacgtggactactttgcaactggcaggaaacactattcagcccttaagccagacaccatcttctgctgtgactccagtattaaatgagtctggtactagccccaccacaagcaaccacagtagatatgtggctacagacatcaacttgaataattcctttccagcagatgggcagccagttgagcaagtagttgtaacattgccttcttgtccatctttacctatgcagccactaattgcccagccacaagttaaatctcagcctcccaaaaatatccttccactgaattcagcaatgcaagtgattcagatggctcagccagttgggtcagctgttaattcagctccaactaatcaaaatgttataattcttcagccacctagcaccaccccatgcccaacagtgatgagggcagaagtttccaaccaaacagtaggtcaacagatagtaatcatacaggctgctaatcagaatcctttgccactcctccctgctccacctcctggttctgttcgactccccatcaatggagccaatactgtaatagggtctaataattcagtgcaaaatgttccaacaccacagacttttggaggaaagcatcttgtccacatattaccaagaccttcatctttatcagcgtctaactcaacacaaactttttctgttaccatgtcaaaccaacagcctcaaaccatttctttaaatggacagctctttgctttgcagcctgtgatgtcttcatcaggaactacaaatcaaacccctatgcaaattattcaacccaccaccagcgaagatccaaataccaatgttgccctgaatacatttggtgctttggccagcctcaatcaaagcatatcacagatggctgggcaaagctgtgtacaattgtctattagccagcctgccaattctcaaactgctgcaaatagtcaaaccactacagctaactgtgtttcattaacaacaactgcagcacctcctgtgacaacagatagttcagccacactagctagtacttataatctagtgagtacttcctcaatgaacactgttgcttgtttgcctaacatgaaatctaaaaggttgaataagaagccaggtggcaggaaacacttagcagcaaacaagtcagcgtgtcccctgaattcagtcagagatgtgagcaagttagactgccccaacactgaaggctcagcagagccaccctgtaatgatggactgctagaaagcttccctgctgtgttaccatctgtctctgtgtctcaggcaaatagtgtgagtgtttctgcttcacattctttgggtgttctaagctctgaatcattaatacctgagtctgtatcgaaatctaagtcagcagaaaagtccagcccaccctcccaagaatctgtaacaagtgaacattttgcaatggccgcagcaaaatccaaagattctacccctaatctacaacaagagacatctcaggataaaccaccaagtagtttagcattatcagatgctgccaaaccctgcgcttcagccaatgtattgattccatctccaagtgatcctcacattttggtttctcaggttcctggtttgtcatctacaacaagcactacaagtactgactgtgtttctgaggtagaaatcattgctgaaccttgcagagttgagcaagattcatcagatacaatgcaaaccacaggtctcttaaaggggcaaggtttaactacattgctatctgatcttgctaaaaaaaaaaaccctcagaaatcatctctttctgatcagatggatcatcctgacttttcttcagaaaatcctaaaatagttgattcaagtgtgaatttacatcccaaacaggaactattactgatgaacaatgatgatagagatcctccacagcatcattcctgcctccctgatcaagaggttattaatggttctttgatcaacggtagacaggccgactctcccatgtcaaccagctctggcagtagtcgtagtttctcagttgcatccatgcttcctgaaacaacaagagaagatgtgaccagcaatgcaacaactaatacatgtgacagctgtacctttgtagagcaaactgatatagtagctcttgcagcaagagctatttttgaccaggagaaccttgagaaggggagagttggcctccaggctgatataagggaagttgcttcaaagccttctgaagcatcattgttagagggagacccacccttcaaatcacagatacctaaagagagtggcacaggacaggcagaagcaacaccaaatgaatttaattctcagggttcaattgaagcaactatggagaggccccttgagaaaccaagttgttctctaggaattaaaacatcaaatgcatctttacaggattcaacttctcagccaccaagcatcaccagtttaagtgtgaataatcttatccatcagagcagcatcagccatcctctggccagctgtgcgggtttatccccaacttcagagcaaacaactgtgcctgcaacggttaatctgaccgtttcatctagctcctatggcagtcaacctcctggaccatctctgatgactgaatattcccaagaacagctaaatactatgactagtaccataccaaattcacagattcaagagccactcttaaagccaagccatgaaagccgtaaggattctgctaagcgtgctgtccaagatgaccttttactgtcttcagctaaacgtcaaaagcactgtcagccagcccccctcaggcttgaaagtatgtccctgatgagcagaactccagacaccatttctgaccaaactcaaatgatggtcagtcagatccctcctaattcttcaaactcagttgtgcctgttagcaacccagctcatggagatggccttacacgattatttccacctagtaacaactttgtgactcctgcattgaggcaaactgaagttcagtgtggttctcagccttcagttgctgaacagcagcaaacccaggcaagtcagcatctacaggccctgcagcagcatgttccagctcaaggtgtatctcaccttcatagtaaccatctctacataaagcagcagcagcagcagcagcagcagcagcagcagcaacagcaacaacaacaagcagggcagttaagagagaggcatcacttatatcaaatgcagcatcatgtacctcatgcagagagctctgtccactctcagccccataatgtccaccaacagaggactctgcaacaggaagttcagatgcagaaaaagaggaatcttgttcagggcacccagacctctcagctttccttacaaccaaagcaccatggaactgaccaatcccgatccaagactggccagccacatccccaccatcagcagatgcagcaacaaatgcagcaacactttggaagctcccagacagagaagagctgtgaaaacccttcaactagtcggaaccatcataaccatccccagaaccatctcaatcaagatattatgcaccaacagcaggatgttggaagcagacagcaaggttcaggggtttcatctgaacatgtatctggccataatccaatgcagaggcttttgacatcaagaggcttagagcagcaaatggtgtcccaaccaagtattgtgactagatcttcagacatgacctgtactccacacaggccagagagaaatagagtttcaagttattctgctgaggcactcattggaaagacatcttctaattcagagcagagaatggggatatcaattcagggttccagagtttcagatcagcttgaaatgagaagctatcttgatgttcccagaaataagagtttggctattcataatatgcagggtcgtgtggaccatactgtggcctcagatatccgcctttctgattgtcagacgtttaaaccaagtggagctagtcaacagccccagagtaattttgaagtacaatcttcaagaaacaatgaaataggtaaccctgtatcatcattgcggagtatgcagtcccaggcttttcgaattagtcaaaacactggccccccaccaattgaccgtcaaaagagattatcttacccaccagttcagagcatcccaacaggaaatggtattccatcaagggacagtgaaaatacttgtcaccaaagtttcatgcagagcttacttgcccctcacctcagtgatcaggtcattgggagccagaggtcactctcagaacatcagaggaatacacagtgtggtccatcctctgcaattgaatataattgtcccccaactcatgaaaatgtccatattagaagagagagtgagagtcagaatagggaaagttgtgacatgtcgttaggtgcaattaacaccaggaacagcaccttgaatattcctttttcaagttcctcttcctcaggagatattcaaggtcgaaacacaagccccaatgtttctgtacagaaatccaatcccatgaggattactgagagtcatgccaccaagggccacatgaaccctccagtcacaaccaacatgcatggggttgcaaggccagcgttgccacatccatctgtgtctcatggaaatggcgatcaaggccctgctgtacgtcaagctaattcttcagttccccagagatcaaggcatcccctgcaagacagcagtggttccaaaattcgtcagcctgaaaggaatcgttctggaaaccaaaggcaaagtactgtctttgatccaagtcttccccatcttcctctctctactggtggcagtatgattcttggacgtcaacaacctgccacagagaagagaggaagtattgttcgtttcatgcctgatagcccacaagtacctaatgataattcaggtcctgaccagcatacactatcacaaaattttggtttttcttttattcctgagggtggcatgaatccaccaataaatgctaatgcttctttcattccacaggttactcagcctagtgccactcgaactccagccctcatcccggtagatccgcaaaatactctgccctccttctatcctccatactctcctgctcatcctacactgtccaatgatatttcaatcccctattttcctaatcagatgttctcaaatcctagcacagagaaggtaaacagtggaagtttaaataaccgatttggatcaattttatctcctcccagacctgttgggtttgctcaaccaagttttcctcttctcccagatatgccaccaatgcacatgaccaactctcacttatccaattttaatatgacatctttgtttccagaaatagccacagcgcttcctgatggctcagcaatgtcacctttgcttacaatagcaaattcctctgcctctgactcttccaagcagtcctcaaacagacctgcccataacataagccatattctaggtcatgattgcagttcagctgtttaaatactgataaacaaaatgtaaaggtaatgagtgagattacaaatgtatttgtgcgtgcatgtgcacagacatgtacatgaagagaaggattgtgtgtgtgtgtctgtataatcagttttcagttatcttctgaatgtagggaagccatgtcagatgcagatactgggttgtcagaaaacaagttatctttcgttttcaactgcatggtgtacttttttattttccaagtagatttacatttccaagttgatatttcctaaatactaattagctggaaattgggggagatcatcttgtcatgtactgggtagtaggagggagcctagactttaaacttgattgttgataacttatggaatatgtaggtaagttgctactgaaaaatataggcagcttgataaaacacagtggctcataatcaagtgctggctaatgtcagcatctagaacagcttcttacctatgacagatgttgaactgatgttgagtttaatgtccgtagttaaagtcaagcagttagcaaataaataaaagcaatcagcctttattctcaaagtttggtttagatacaggcttctttctaaattataacaatgcataaattatctgaattttatgtcttgttcttcaaattagggagctgtgttaccctttaatgtgccaagattatttaaagcaaaggtcttccttagacaattatttagccgtaaatatagaaagctaaaaagttaagtacatacatattctccgttttgtgcttgcattttgcatcgggtcataagggtaaaagcagttagttgtattgtggagttttgcatgggtgcagttaacaatggatgtttcatcagctgagtttaatttagtattctctcttcattctatttatttggtcttgaaataaattcttttgcattcatttaaatattaggattgatcaggaaatagtgtttgtaatctacacgtttatttgagccttactttaaaaatatttctgaacagagatttaagctctgtcagtattttcatttactgatagcatttatattttaaatatggcattgtatatttcattattatccttcataacagaattataatgagaatatgaatttgttatttttcttgttggtagatgtgaaatggtgcttcaaaaaatatatagtctttctgtatgtctctgtgtgtgtaagtatgtgtgtgtgtgtgtacacatattttaaagtatgaattggtcctttaaaaacaggcctgccatctgaaaatgggaaattgagacctgagacctgctaaagcatagaagaacttgatataggtagggttttttttttttttttttttttaatagatggagtctggctctgttgcccaggctggagtgcagtggcgtgatctcagctcactgcaagctccacctcccgggttcaagtgattctcctgcctcagcctcctgtgtagctgggactacaggcacgtgccaccacacctggctaatttttggtacttttagtagagacggggtttcaccgtgttagccaggatggtcttgatctcctgacctcgtgatccacctgcctcggcctcccaaagtgccaggattacaggcatgagccaccgtgcttggcctaggtacaggtttttaaaagccccacagaagtttataatacgtttaaaaacccatattaaaatttgaaaacttaaaaaaaaaa

SEQ ID NO: 198333 - DNA, 2133 bp, Homo sapiens
  Payload ID: 19133
  Gene Name: upstream transcription factor family member 3
  ENST ID: ENST00000491165
  CDS Start-End: 412-678
ggctgggaaagttgaggccgcgctgccgccgggtctccggccttgagggctcgggctcgcagcggctgcggtggccgcaaaaagaggcggcgggggcggggggagaggagggcctgggcccgcgctcccccagccccggaggagcaggcggtggccgcggacggagagattcgcccagacggtcagacactcctgccttcccctcctgggatcatgacccaggcgggggtcgccgccgtcgccgccgccaccgcggccgagaccgcgcagccggcggtaagaagaaagcataacccatagaccatcttctggcagaagatgatacatttggatcagaaacgggaggcattggaagccaggaatcaaaagtgaagaaactctgcaagcccttaggttcctattactgtaaccatgccagaaatgacagagaatgagacgcctacaaaaaagcagcacagaaagaaaaaccgggagacacacaatgcagtggagaggcatagaaagaagaaaattaatgctgggataaacagaataggagagctgatcccatgttctcctgccctgaagcagagcaagaatatgatcctggaccaagcctttaaatatataacagaattgaaaaggcaaaatgatgaactcctgcttaatggaggaaacaatgaacaaggtttctactagaacctgtggaggggggacaccaaatttagattgagtcagtccatgctgataagaagcgtgaggaccttgttggacacagagcttctagatctttccacctgtagcctctaccctgttcctgcactttacctgaaactgtgcctctggtctttagaccagctgttggaacatatcactcacccactcctctgttatagcaaagggccagctgggatggtacacgctgtgtaatcagacaccttctcgacaagtacagctgatgtttctcactgttgccttaccattctctgagccatctttgatgttgatttgtaaaaaaaaacaaaaaacaaaaaaaaaacctagtagcaaaactcctgttaaactcagagcttgtatgtggtggtcattcaacatccttatttctagatttacacaaactgtaccaactgtaatctttttctggcacgcgtatgtggtcagatgcttcataaacgtgagccaacttgggttgtaaacattggacataatatacaaattggggaattttggatgactgcataatcctgtcattagagatttcataagacagaagataactgtttatttgtaatttaacacatttttagaaaagatgatctttaatttctttccctcagttgtgtatacagctatacaccatactaacaccgtactatgtcataggaacttaaagttagatgtatctaaatcccttcacttttctaagacttctctgtgctcccacccctgaagtcttcaaatcatttttcatctgtgaagtcactgaggtactgggcttgactatagtggtaacagttaaggggagttgaactattgatcttccaagaagaaagggaccagatagtgttaagatgctgcagttgtgttactgtgaagaaaagattcgcttccactttcagcaggctatataaatatatatacatatatatatatattttcactttggtaaaaaaaagttgaaaaatctgaggagaacataattaccttcacaaattatttatagatacactgggtgagaagcttactgtagggcagtcacccaaaaaaaactaattttagtgctttcaatagtgtaatatttgtatctattaccatggcagcagtgtctgctgcacactgtgtcctattactgtaaatctcctggtttataattcttatggaaactaatttgttttgtaatggaatccagagcagatatgtataatatgatcaggattgtcctacagttgtaaataagaataggtcctgtttattttgacatctttttacaaatgcattgtattagggtgtgaatattctgaaccatcctcttgtttaaagtttggaaatttttattgttaaatgtaacattttaatggttgtaataattatttgtatagatatgaatatagtattttatttaagaaaataaactttgcatttttgcattgtaaa

SEQ ID NO: 198334 - DNA, 2071 bp, Homo sapiens
  Payload ID: 19134
  Gene Name: uracil DNA glycosylase
  Uniprot ID: P13051
  ENST ID: ENST00000242576
  CDS Start-End: 107-1048
gcatgcgcgggccgcttggcgccaattgctgaccgccacagccacagccagggctagcctcgccggttcccgggtggcgcgcgttcgctgcctcctcagctccaggatgatcggccagaagacgctctactcctttttctcccccagccccgccaggaagcgacacgcccccagccccgagccggccgtccaggggaccggcgtggctggggtgcctgaggaaagcggagatgcggcggccatcccagccaagaaggccccggctgggcaggaggagcctgggacgccgccctcctcgccgctgagtgccgagcagttggaccggatccagaggaacaaggccgcggccctgctcagactcgcggcccgcaacgtgcccgtgggctttggagagagctggaagaagcacctcagcggggagttcgggaaaccgtattttatcaagctaatgggatttgttgcagaagaaagaaagcattacactgtttatccacccccacaccaagtcttcacctggacccagatgtgtgacataaaagatgtgaaggttgtcatcctgggacaggatccatatcatggacctaatcaagctcacgggctctgctttagtgttcaaaggcctgttccgcctccgcccagtttggagaacatttataaagagttgtctacagacatagaggattttgttcatcctggccatggagatttatctgggtgggccaagcaaggtgttctccttctcaacgctgtcctcacggttcgtgcccatcaagccaactctcataaggagcgaggctgggagcagttcactgatgcagttgtgtcctggctaaatcagaactcgaatggccttgttttcttgctctggggctcttatgctcagaagaagggcagtgccattgataggaagcggcaccatgtactacagacggctcatccctcccctttgtcagtgtatagagggttctttggatgtagacacttttcaaagaccaatgagctgctgcagaagtctggcaagaagcccattgactggaaggagctgtgatcatcagctgaggggtggcctttgagaagctgctgttaacgtatttgccagttacgaagttccactgaaaattttcctattaattcttaagtactctgcataagggggaaaagcttccagaaagcagccatgaaccaggctgtccaggaatggcagctgtatccaaccacaaacaacaaaggctaccctttgaccaaatgtctttctctgcaacatggcttcggcctaaaatatgcagaagacagatgaggtcaaatactcagttggctctctttatctcccttgcctttatggtgaaacaggggagatgtgcacctttcaggcacagccctagtttggcgcctgctgctccttggttttgcctggttagactttcagtgacagatgttggggtgtttttgcttagaaaggtccccttgtctcagccttgcagggcaggcatgccagtctctgccagttccactgcccccttgatctttgaaggagtcctcaggcccctcgcagcataaggatgttttgcaactttccagaatctggcccagaaattagggctcaatttcctgattgtagtagaggttaagattgctgtgagctttatcagataagagaccgagagaagtaagctgggtcttgttattccttgggtgttggtggaataagcagtggaatttgaacaaggaagaggagaaaagggaattttgtctttatggggtggggtgattttctcctagggttatgtccagttggggtttttaaggcagcacagactgccaagtactgttttttttaaccgactgaaatcactttgggatattttttcctgcaacactggaaagttttagttttttaagaagtactcatgcagatatatatatatatatttttcccagtcctttttttaagagacggtctttattgggtctgcacctccatccttgatcttgttagcaatgctgtttttgctgttagtcgggttagagttggctctacgcgaggtttgttaataaaagtttgttaaaagtt

SEQ ID NO: 198335 - DNA, 2130 bp, Homo sapiens
  Payload ID: 19134
  Gene Name: uracil DNA glycosylase
  Uniprot ID: P13051
  ENST ID: ENST00000336865
  CDS Start-End: 210-1124
aaaagaccacgtggggacgcggtggggcgggtctggcgggggcggggcacctctgtgcagggttcccagtcaccgcgacgctcctcgggaagccatagggcgcctcccagcccgtctccccgctccagtttagaacctaattcccaattcccggaccgggcccagccctgggctcttactgtccgcttttgctgggacctgttccacaaatgggcgtcttctgccttgggccgtgggggttgggccggaagctgcggacgcctgggaaggggccgctgcagctcttgagccgcctctgcggggaccacttgcaggccatcccagccaagaaggccccggctgggcaggaggagcctgggacgccgccctcctcgccgctgagtgccgagcagttggaccggatccagaggaacaaggccgcggccctgctcagactcgcggcccgcaacgtgcccgtgggctttggagagagctggaagaagcacctcagcggggagttcgggaaaccgtattttatcaagctaatgggatttgttgcagaagaaagaaagcattacactgtttatccacccccacaccaagtcttcacctggacccagatgtgtgacataaaagatgtgaaggttgtcatcctgggacaggatccatatcatggacctaatcaagctcacgggctctgctttagtgttcaaaggcctgttccgcctccgcccagtttggagaacatttataaagagttgtctacagacatagaggattttgttcatcctggccatggagatttatctgggtgggccaagcaaggtgttctccttctcaacgctgtcctcacggttcgtgcccatcaagccaactctcataaggagcgaggctgggagcagttcactgatgcagttgtgtcctggctaaatcagaactcgaatggccttgttttcttgctctggggctcttatgctcagaagaagggcagtgccattgataggaagcggcaccatgtactacagacggctcatccctcccctttgtcagtgtatagagggttctttggatgtagacacttttcaaagaccaatgagctgctgcagaagtctggcaagaagcccattgactggaaggagctgtgatcatcagctgaggggtggcctttgagaagctgctgttaacgtatttgccagttacgaagttccactgaaaattttcctattaattcttaagtactctgcataagggggaaaagcttccagaaagcagccatgaaccaggctgtccaggaatggcagctgtatccaaccacaaacaacaaaggctaccctttgaccaaatgtctttctctgcaacatggcttcggcctaaaatatgcagaagacagatgaggtcaaatactcagttggctctctttatctcccttgcctttatggtgaaacaggggagatgtgcacctttcaggcacagccctagtttggcgcctgctgctccttggttttgcctggttagactttcagtgacagatgttggggtgtttttgcttagaaaggtccccttgtctcagccttgcagggcaggcatgccagtctctgccagttccactgcccccttgatctttgaaggagtcctcaggcccctcgcagcataaggatgttttgcaactttccagaatctggcccagaaattagggctcaatttcctgattgtagtagaggttaagattgctgtgagctttatcagataagagaccgagagaagtaagctgggtcttgttattccttgggtgttggtggaataagcagtggaatttgaacaaggaagaggagaaaagggaattttgtctttatggggtggggtgattttctcctagggttatgtccagttggggtttttaaggcagcacagactgccaagtactgttttttttaaccgactgaaatcactttgggatattttttcctgcaacactggaaagttttagttttttaagaagtactcatgcagatatatatatatatatttttcccagtcctttttttaagagacggtctttattgggtctgcacctccatccttgatcttgttagcaatgctgtttttgctgttagtcgggttagagttggctctacgcgaggtttgttaata

SEQ ID NO: 198336 - DNA, 2016 bp, Homo sapiens
  Payload ID: 19134
  Gene Name: uracil DNA glycosylase
  ENST ID: ENST00000446767
  CDS Start-End: 177-602
tggcgggggcggggcacctctgtgcagggttcccagtcaccgcgacgctcctcgggaagccatagggcgcctcccagcccgtctccccgctccagtttagaacctaattcccaattcccggaccgggcccagccctgggctcttactgtccgcttttgctgggacctgttccacaaatgggcgtcttctgccttgggccgtgggggttgggccggaagctgcggacgcctgggaaggggccgctgcagctcttgagccgcctctgcggggaccacttgcaggccatcccagccaagaaggccccggctgggcaggaggagcctgggacgccgccctcctcgccgctgagtgccgagcagttggaccggatccagaggaacaaggccgcggccctgctcagactcgcggcccgcaacgtgcccgtgggctttggagagagctggaagaagcacctcagcggggagttcgggaaaccgtattttatcaagctaatgggatttgttgcagaagaaagaaagcattacactgtttatccacccccacaccaagtcttcacctggacccagatgtgtgacataaaagattttggagaacatttataaagagttgtctacagacatagaggattttgttcatcctggccatggagatttatctgggtgggccaagcaaggtgttctccttctcaacgctgtcctcacggttcgtgcccatcaagccaactctcataaggagcgaggctgggagcagttcactgatgcagttgtgtcctggctaaatcagaactcgaatggccttgttttcttgctctggggctcttatgctcagaagaagggcagtgccattgataggaagcggcaccatgtactacagacggctcatccctcccctttgtcagtgtatagagggttctttggatgtagacacttttcaaagaccaatgagctgctgcagaagtctggcaagaagcccattgactggaaggagctgtgatcatcagctgaggggtggcctttgagaagctgctgttaacgtatttgccagttacgaagttccactgaaaattttcctattaattcttaagtactctgcataagggggaaaagcttccagaaagcagccatgaaccaggctgtccaggaatggcagctgtatccaaccacaaacaacaaaggctaccctttgaccaaatgtctttctctgcaacatggcttcggcctaaaatatgcagaagacagatgaggtcaaatactcagttggctctctttatctcccttgcctttatggtgaaacaggggagatgtgcacctttcaggcacagccctagtttggcgcctgctgctccttggttttgcctggttagactttcagtgacagatgttggggtgtttttgcttagaaaggtccccttgtctcagccttgcagggcaggcatgccagtctctgccagttccactgcccccttgatctttgaaggagtcctcaggcccctcgcagcataaggatgttttgcaactttccagaatctggcccagaaattagggctcaatttcctgattgtagtagaggttaagattgctgtgagctttatcagataagagaccgagagaagtaagctgggtcttgttattccttgggtgttggtggaataagcagtggaatttgaacaaggaagaggagaaaagggaattttgtctttatggggtggggtgattttctcctagggttatgtccagttggggtttttaaggcagcacagactgccaagtactgttttttttaaccgactgaaatcactttgggatattttttcctgcaacactggaaagttttagttttttaagaagtactcatgcagatatatatatatatatttttcccagtcctttttttaagagacggtctttattgggtctgcacctccatccttgatcttgttagcaatgctgtttttgctgttagtcgggttagagttggctctacgcgaggtttgttaataaaagtttgttaaaagtt

SEQ ID NO: 198337 - DNA, 2234 bp, Homo sapiens
  Payload ID: 19134
  Gene Name: uracil DNA glycosylase
  ENST ID: ENST00000539287
  CDS Start-End: 180-956
gtctggcgggggcggggcacctctgtgcagggttcccagtcaccgcgacgctcctcgggaagccatagggcgcctcccagcccgtctccccgctccagtttagaacctaattcccaattcccggaccgggcccagccctgggctcttactgtccgcttttgctgggacctgttccacaaatgggcgtcttctgccttgggccgtgggggttgggccggaagctgcggacgcctgggaaggggccgctgcagctcttgagccgcctctgcggggaccacttgcaggccatcccagccaagaaggccccggctgggcaggaggagcctgggacgccgccctcctcgccgctgagtgccgagcagttggaccggatccagaggaacaaggccgcggccctgctcagactcgcggcccgcaacgtgcccgtgggctttggagagagctggaagaagcacctcagcggggagttcgggaaaccgtattttatcaagctaatgggatttgttgcagaagaaagaaagcattacactgtttatccacccccacaccaagtcttcacctggacccagatgtgtgacataaaagatgtgaaggttgtcatcctgggacaggatccatatcatggacctaatcaagctcacgggctctgctttagtgttcaaaggcctgttccgcctccgcccagtttggagaacatttataaagagttgtctacagacatagaggattttgttcatcctggccatggagatttatctgggtgggccaagcaaggtgttctccttctcaacgctgtcctcacggttcgtgcccatcaagccaactctcataaggagcgaggctgggagcagttcactgatgcagttgtgtcctggctaaatcagaactcgaatggccttgttttcttgctctggggctcttatgctcagaagaagggcagtgccattgataggtagagactgggtttcaccatgttgacaaggctggtcttgaactcctgacctcaagcgatcctcccatcttggtctcccaaagtgctaggattacagatgtaagccaccgcacccgaccagcggcaccatgtactacagacggctcatccctcccctttgtcagtgtatagagggttctttggatgtagacacttttcaaagaccaatgagctgctgcagaagtctggcaagaagcccattgactggaaggagctgtgatcatcagctgaggggtggcctttgagaagctgctgttaacgtatttgccagttacgaagttccactgaaaattttcctattaattcttaagtactctgcataagggggaaaagcttccagaaagcagccatgaaccaggctgtccaggaatggcagctgtatccaaccacaaacaacaaaggctaccctttgaccaaatgtctttctctgcaacatggcttcggcctaaaatatgcagaagacagatgaggtcaaatactcagttggctctctttatctcccttgcctttatggtgaaacaggggagatgtgcacctttcaggcacagccctagtttggcgcctgctgctccttggttttgcctggttagactttcagtgacagatgttggggtgtttttgcttagaaaggtccccttgtctcagccttgcagggcaggcatgccagtctctgccagttccactgcccccttgatctttgaaggagtcctcaggcccctcgcagcataaggatgttttgcaactttccagaatctggcccagaaattagggctcaatttcctgattgtagtagaggttaagattgctgtgagctttatcagataagagaccgagagaagtaagctgggtcttgttattccttgggtgttggtggaataagcagtggaatttgaacaaggaagaggagaaaagggaattttgtctttatggggtggggtgattttctcctagggttatgtccagttggggtttttaaggcagcacagactgccaagtactgttttttttaaccgactgaaatcactttgggatattttttcctgcaacactggaaagttttagttttttaagaagtactcatgcagatatatatatatatatttttcccagtcctttttttaagagacggtctttattgggtctgcacctccatccttgatcttgttagcaatgctgtttttgctgttagtcgggttagagttggctctacgcgaggtttgttaataaaagtttgttaaaagtt

SEQ ID NO: 198338 - DNA, 725 bp, Homo sapiens
  Payload ID: 19135
  Gene Name: uracil phosphoribosyltransferase (FUR1) homolog (S. cerevisiae)
  ENST ID: ENST00000373373
  CDS Start-End: 129-557
gacagccagggttagatgttctgaggaggcgggagcaaccgagagagcacgtgagcatctgtcctttctacccgttcctctttatctttagtgttcagtagcagcggggatagcccggggcccggtgtatggccacggagttacagtgtccggactccatgccctgtcacaaccagcaagtaaactctgcctcaaccccaagtcccgagcagctgcgacctggcgatctgatcctggaccacgcagggggaaacagagcctccagggccaaggtgattctcctcacggggtacgcccattctagcctgccggccgagctggactctggggcctgcggcggctccagcctcaactcagagggcaacagtggtagtggtgacagtagcagctatgacgcaccagctggcaactccttcctagaggactgcgaactctcccggcagatcggggcgcagcttaagctgctgcctatgaatgatcagatacgggagctacagaccatcatccgtgacaactttttttccagtaggagagattacggttatgatttaaaatgaagtgtgtggaatgaagaagatctggagtctggttcatattaaaacatccctgttaacaaataattcagcctagcgttgtgtctaaaatagagcctcagagaatacatgcagcttcattgatacaagacagccagtagaggtgacttcatgttttctgcggatcgtttg

SEQ ID NO: 198339 - DNA, 2234 bp, Homo sapiens
  Payload ID: 19135
  Gene Name: uracil phosphoribosyltransferase (FUR1) homolog (S. cerevisiae)
  ENST ID: ENST00000373379
  CDS Start-End: 166-1011
gtgctaaaggaaaccaacagcggcctaggggtgaaaggacagccagggttagatgttctgaggaggcgggagcaaccgagagagcacgtgagcatctgtcctttctacccgttcctctttatctttagtgttcagtagcagcggggatagcccggggcccggtgtatggccacggagttacagtgtccggactccatgccctgtcacaaccagcaagtaaactctgcctcaaccccaagtcccgagcagctgcgacctggcgatctgatcctggaccacgcagggggaaacagagcctccagggccaaggtgattctcctcacggggtacgcccattctagcctgccggccgagctggactctggggcctgcggcggctccagcctcaactcagagggcaacagtggtagtggtgacagtagcagctatgacgcaccagctggcaactccttcctagaggactgcgaactctcccggcagatcggggcgcagcttaagctgctgcctatgaatgatcagatacgggagctacagaccatcatccgtgacaagacagccagtagaggtgacttcatgttttctgcggatcgtttgatcagacttgttgtggaagagggattgaatcagctgccatataaagaatgcatggtgaccactccaacagggtacaagtatgaaggagtgaaatttgagaagggaaattgtggggtcagcataatgagaagcggtgaggcaatggaacaaggtttacgagactgctgtcgatccatacgaattggaaagatcctgattcagagtgatgaggagacacaaagagccaaagtatattatgccaaattccccccagacatttaccggagaaaagtccttctgatgtatccaattctcagcactggaaatactgtaattgaagctgtaaaggttcttatagaacatggagttcaacccagtgttatcatcctactcagtctgttctccactcctcatggtgagttcagcatgaggcagtaactagggctccatatagtcctgaggtgggtgccaaatcaatcattcaggagtttccagagatcacaattttaactactgaagttcatcctgttgcacctacacattttggacagaaatactttggaacagactaagttatttaagtaaaataattatcttatgtaatattacaatcatgttttgattttctatttgttttactgattcacttgagggtggcagagaaaaatgtgttaaaatgctttttagttttggaagtgggtatatttgaggttatatctcatttagttatttgtttactgttggcaccgaattcaacaatgaagtatatgcaactcttacaaaacataaattttaataatattctaatgcaaattactgaaccctcagtgcattaaaattatttcctaatttatgagcctcttagtttggaggttgcttgaagccacaaataaaactcaaatgagagtcagttctttgtcccactgtagtttgcattttgtttagtttggttttagctctactaaggtttcacatatgtggctattgccacattcctctactgttttctttctgatactggacatgctagtaacttggagaggagaataaaagaatgtctcctggaattttacattcccattaatgtcctcattcagttggcagacctaggatgtatggttaactctcaggccattatgtttttcatggctcatttcccaaactgcattgttggtaggtgccttgctaagctgtaatgcagtgaagaagatggtggggcatttttagtaattggaactgtaacattaatttacaagattgaaccggggatgtctggatgctgacaagggagagccaagtactgttaatgccatcaatcctctaggaaggaattggtggtttttctgaagtgtgggggaaagggtggtttcttgctggatttcatggccagtaagtaaatttaaatgcttcatttttaatttggatgtttctgctagagacctttgatttggaaattagttattttgcatgtttgtcaactgtatatgtatgaaaatagaaaaaaaccatgctttttgtaaaaacccctaagatttgtatatgttcatctttaggcttctgaaagggagagaaatcatattggaaatcagtgttggtgttctgaaatctgcttgtaaaactctcatctcattttacattgatattaaaacattttaacagtg

SEQ ID NO: 198340 - DNA, 2186 bp, Homo sapiens
  Payload ID: 19135
  Gene Name: uracil phosphoribosyltransferase (FUR1) homolog (S. cerevisiae)
  Uniprot ID: Q96BW1
  ENST ID: ENST00000373383
  CDS Start-End: 168-1097
gtgtgctaaaggaaaccaacagcggcctaggggtgaaaggacagccagggttagatgttctgaggaggcgggagcaaccgagagagcacgtgagcatctgtcctttctacccgttcctctttatctttagtgttcagtagcagcggggatagcccggggcccggtgtatggccacggagttacagtgtccggactccatgccctgtcacaaccagcaagtaaactctgcctcaaccccaagtcccgagcagctgcgacctggcgatctgatcctggaccacgcagggggaaacagagcctccagggccaaggtgattctcctcacggggtacgcccattctagcctgccggccgagctggactctggggcctgcggcggctccagcctcaactcagagggcaacagtggtagtggtgacagtagcagctatgacgcaccagctggcaactccttcctagaggactgcgaactctcccggcagatcggggcgcagcttaagctgctgcctatgaatgatcagatacgggagctacagaccatcatccgtgacaagacagccagtagaggtgacttcatgttttctgcggatcgtttgatcagacttgttgtggaagagggattgaatcagctgccatataaagaatgcatggtgaccactccaacagggtacaagtatgaaggagtgaaatttgagaagggaaattgtggggtcagcataatgagaagcggtgaggcaatggaacaaggtttacgagactgctgtcgatccatacgaattggaaagatcctgattcagagtgatgaggagacacaaagagccaaagtatattatgccaaattccccccagacatttaccggagaaaagtccttctgatgtatccaattctcagcactggaaatactgtaattgaagctgtaaaggttcttatagaacatggagttcaacccagtgttatcatcctactcagtctgttctccactcctcatggtgccaaatcaatcattcaggagtttccagagatcacaattttaactactgaagttcatcctgttgcacctacacattttggacagaaatactttggaacagactaagttatttaagtaaaataattatcttatgtaatattacaatcatgttttgattttctatttgttttactgattcacttgagggtggcagagaaaaatgtgttaaaatgctttttagttttggaagtgggtatatttgaggttatatctcatttagttatttgtttactgttggcaccgaattcaacaatgaagtatatgcaactcttacaaaacataaattttaataatattctaatgcaaattactgaaccctcagtgcattaaaattatttcctaatttatgagcctcttagtttggaggttgcttgaagccacaaataaaactcaaatgagagtcagttctttgtcccactgtagtttgcattttgtttagtttggttttagctctactaaggtttcacatatgtggctattgccacattcctctactgttttctttctgatactggacatgctagtaacttggagaggagaataaaagaatgtctcctggaattttacattcccattaatgtcctcattcagttggcagacctaggatgtatggttaactctcaggccattatgtttttcatggctcatttcccaaactgcattgttggtaggtgccttgctaagctgtaatgcagtgaagaagatggtggggcatttttagtaattggaactgtaacattaatttacaagattgaaccggggatgtctggatgctgacaagggagagccaagtactgttaatgccatcaatcctctaggaaggaattggtggtttttctgaagtgtgggggaaagggtggtttcttgctggatttcatggccagtaagtaaatttaaatgcttcatttttaatttggatgtttctgctagagacctttgatttggaaattagttattttgcatgtttgtcaactgtatatgtatgaaaatagaaaaaaaccatgctttttgtaaaaacccctaagatttgtatatgttcatctttaggcttctgaaagggagagaaatcatattggaaatcagtgttggtgttctgaaatctgcttgtaaaactctcatctcattttacattgatattaaaacattttaacagtg

SEQ ID NO: 198341 - DNA, 1135 bp, Homo sapiens
  Payload ID: 19135
  Gene Name: uracil phosphoribosyltransferase (FUR1) homolog (S. cerevisiae)
  Uniprot ID: Q96BW1
  ENST ID: ENST00000462237
  CDS Start-End: 140-670
aggggtgaaaggacagccagggttagatgttctgaggaggcgggagcaaccgagagagcacgtgagcatctgtcctttctacccgttcctctttatctttagtgttcagtagcagcggggatagcccggggcccggtgtatggccacggagttacagtgtccggactccatgccctgtcacaaccagcaagtaaactctgcctcaaccccaagtcccgagcagctgcgacctggcgatctgatcctggaccacgcagggggaaacagagcctccagggccaaggtgattctcctcacggggtacgcccattctagcctgccggccgagctggactctggggcctgcggcggctccagcctcaactcagagggcaacagtggtagtggtgacagtagcagctatgacgcaccagctggcaactccttcctagaggactgcgaactctcccggcagatcggggcgcagcttaagctgctgcctatgaatgatcagatacgggagctacagaccatcatccgtgacaagacagccagtagaggtgacttcatgttttctgcggatcgtttggttttgcctgaggatttattccaaaagagcatagacaactcctgttctgcttttcatcatcagacttgttgtggaagagggattgaatcagctgccatataaagaatgcatggtgaccactccaacagggtacaagtatgaaggagtgaaatttgagaagggaaattgtggggtcagcataatgagaagcggtgaggcaatggaacaaggtttacgagactgctgtcgatccatacgaattggaaagatcctgattcagagtgatgaggagacacaaagagccaaagtatattatgccaaattccccccagacatttaccggagaaaagtccttctgatgtatccaattctcagcactggaaatactgtaattgaagctgtaaaggttcttatagaacatggagttcaacccagtgttatcatcctactcagtctgttctccactcctcatggtgccaaatcaatcattcaggagtttccagagatcacaattttaactactgaagttcatcctgttgcacctacacattttggacagaaatactttggaacagactaagttattta

SEQ ID NO: 198342 - DNA, 1636 bp, Homo sapiens
  Payload ID: 19135
  Gene Name: uracil phosphoribosyltransferase (FUR1) homolog (S. cerevisiae)
  ENST ID: ENST00000530743
  CDS Start-End: 54-575
ttcttggccttggcaaactttggagattggggacagccagtagaggtgacttcatgttttctgcggatcgtttgatcagacttgttgtggaagagggattgaatcagctgccatataaagaatgcatggtgaccactccaacagggtacaagtatgaaggagtgaaatttgagaagggaaattgtggggtcagcataatgagaagcggtgaggcaatggaacaaggtttacgagactgctgtcgatccatacgaattggaaagatcctgattcagagtgatgaggagacacaaagagccaaagtatattatgccaaattccccccagacatttaccggagaaaagtccttctgatgtatccaattctcagcactggaaatactgtaattgaagctgtaaaggttcttatagaacatggagttcaacccagtgttatcatcctactcagtctgttctccactcctcatggtgccaaatcaatcattcaggagtttccagagatcacaattttaactactgaagttcatcctgttgcacctacacattttggacagaaatactttggaacagactaagttatttaagtaaaataattatcttatgtaatattacaatcatgttttgattttctatttgttttactgattcacttgagggtggcagagaaaaatgtgttaaaatgctttttagttttggaagtgggtatatttgaggttatatctcatttagttatttgtttactgttggcaccgaattcaacaatgaagtatatgcaactcttacaaaacataaattttaataatattctaatgcaaattactgaaccctcagtgcattaaaattatttcctaatttatgagcctcttagtttggaggttgcttgaagccacaaataaaactcaaatgagagtcagttctttgtcccactgtagtttgcattttgtttagtttggttttagctctactaaggtttcacatatgtggctattgccacattcctctactgttttctttctgatactggacatgctagtaacttggagaggagaataaaagaatgtctcctggaattttacattcccattaatgtcctcattcagttggcagacctaggatgtatggttaactctcaggccattatgtttttcatggctcatttcccaaactgcattgttggtaggtgccttgctaagctgtaatgcagtgaagaagatggtggggcatttttagtaattggaactgtaacattaatttacaagattgaaccggggatgtctggatgctgacaagggagagccaagtactgttaatgccatcaatcctctaggaaggaattggtggtttttctgaagtgtgggggaaagggtggtttcttgctggatttcatggccagtaagtaaatttaaatgcttcatttttaatttggatgtttctgctagagacctttgatttggaaattagttattttgcatgtttgtcaactgtatatgtatgaaaatagaaaaaaaccatgctttttgtaaaaacccctaagatttgtatatgttcatctttaggcttctgaaagggagagaaatcatattggaaatcagtgttggtgttctgaaatctgcttgtaaaactctcatctcatttt

SEQ ID NO: 198343 - DNA, 10832 bp, Homo sapiens
  Payload ID: 19136
  Gene Name: URB1 ribosome biogenesis 1 homolog (S. cerevisiae)
  Uniprot ID: O60287
  ENST ID: ENST00000382751
  CDS Start-End: 117-6932
agccccgcctcttcctgcgccatgtgggcctgaagcgcgtgtctgctgtctgtgccagtgctcctgccgggtcccctcaggtgtgtcgtttccgtcgcgcttccgccctctcggccatgggggtccccaagaggaaggcctcgggcggccaggacggcgcggcttcctccgcgggtgcagccaagcgcgcccgcaaagaagagctcacgggcgtgcggttcaaggctcagctgaaggacccgcagggccccgggccaggcttggaagcgtttgtgtctgctgccaagaagctaccacgagaagatgtgtatgatgttgtggaagggtatataaagatttctgttgagtgtgtcgaaattttccagctcctaagtggagagaaacgacctgaaagtgaaacgatgttaatatttcaagttttcgaggccatattattgcggacagcaagtgatctttcacatttccatgttgtgggaaccaacattgtgaaaaagctgatgaacaaccacatgaagctcatctgtgagtccctgtatgcctcaggttacaggttggctcgcgcctgcctgagcctgatgaccgccatggtgacccagggtccggaagctgccagggacgtctgcagccattttgatttgaataaaaagaccctgtacaccctggtgaccaagagggattcaaagggagtgtacgacgttcggcaggcctacgttcagtttgctctctcctttttaattgcgggtgatgacagcactatagtgcaggtgttggaagtgaaagaatttattccttgcatttttagctcagggataaaggaagataggatctctaccatcaatattttattatccacactgaaaacaaaggtagttcacaataaaaatatcacaaaaacccagaaggtgcgtttctttacggggcagttattgaaccacatagcatcgctgtacaactggaatgggattaccgatgtgaacccagaaaatgtcaaggtttctgccgaagaagcagggaaaaccatggtgcgggagcttgttcataacttcctgatggatctttgctgttcactcaagcatggaattaatttttacgatgcatctttgggtacctttggcagaggcggaaacctgacactcttgcacttcttgctgggtttgaaaactgcagctgatgatgatctggtggctgaccttgtggtaaacatcctcaaagtgtgcccggacttactgaacaaatacttcaaggaagtaacgttttcctttatcccacgagcgaagtctacttggttaaataatatcaaactactaaacaagatctatgaggctcagccggagatttcccgggcatttcagaccagagagtttatacccttgcctcggctcctggcaatggtgatggtgaccaccgtgcccctggtgtgcaataagagcatgttcacccaagcattaaacttggacagcacctcagtgaggcacacagccttatcccttatttctgtcattttgaagagggcattaaaaactgttgaccactgcctgaataaagaggtgtggcaggaatcaggcgtgtacacagctgtgatgatggaagaattcgtgcagctcttcagagaagccctgagcaagattttgccagacctgaacactgtcgtgtgggtctggcagtcacttaaaaagcaagagaccaaacaggatgacaagaaagggcagaaaaggagcgatgggcccccggctgcctgcgatgctcaccagtgcgatgatgcagaaaccattcttttgaaagctgttttgctccaggtcatatgcctctaccagaaggtggtcccccacgtggtcatgcagtacaactttgacttcagcaagctcctgaaaggtgtcatctctgagcagggccttcgagaggaggtgcctcccattctgcagcaccacatgctgaaggtggccctggagctgccggccagcaagtttctgtggttaaaggcacaggaaggcccagatgcagaaattattggaggtgaacgatcagtattttacttactaatgaaaatgtttgtgaccagtagccatttacaactgaagtcattgaccaaacttctgatcatgaagattctgcgggacacgggggtgtttgagcacacctggaaggagctggagctctggctggagcatttagagaacaccatggaagaggacaaagagactgtgattcagtttctggaacgcattttattgacattggtggcgaatccctattcatacacagacaaagcatctgactttgtccaagaagcaagcatgctgcaggccactatgacgaagcaagaagccgatgacatgagcattcccatctcccacattgacgatgttctcgacatggtggatgtcctggtggagggcagtgaaggcttggatgaggaaatagggttcacgttgagtgaagacatgatcctgctcacgttcccattcagtgcggtagtccctgcggccctggaagccaggaataagttgctccttgggacaggcaatgaagcagcggaaaacgttgtgacatatctgacggcagtgctgactgacctcctccacacccagagggaccccctggctctgtgtctcctgctccaggcatatgataagcttgagcctccatgcctggtgccttgctgccagcagctctcacggtttaacagatactacagcctctggatcccggagcaagcccgagaggcctggctgctgcaggcacagggcagcccctcgccccctgcccttcccttggcctcgtccttcacagccctgctgcaggcagcctacgagagccaagcgcttcgggacgagcacatccaggtgcagctgcaggccaccatgccacacctgtccatgcagcaggtcctgctcgcggccaagcaggtgttgctctacctgcggagcactgtggagaacttcggccagctgggcagaagtgtgggcccgcccctcctgcagctcttcctggatctcctcaggcgcctggttgtccactgtgagcagctggatgcccagaaccagcagagatgcgaggccgcccgggccgaagccgacctcttcctggacatggagtccgtggcctcgctggagttggccaatgatcagacgctggaggaggtgcttgtggccatcctcaggcaccccaccctggagggctggttcctggccctggagcagcaggccctcccgccgcacacgctcagccctgtcctcgtgaagctcctggccacccactttagtgcaggggtccttcagctgctggcagcaagtgccccgatcctccagaacattgggcagctgggccttctggccaggtactcagaggccatcacccagagtgtgctgaaggaacttcagaacaggagggcgggcccggccacatcaccaccaaagaccccgccgcagctggaggccctgcaggagctgcatccatacatggagggtgcccagctccgtgaggtcaccctggccttgctgagcctgcctgagacacacctggtgacccagcaacccacgaaatcccccgggaaggaaagacacctgaatgctcttggaaagaccctggtgcagctgctgacctgcagcccccaggatcagctgcagagtggtgagctcctgtggtcctccgagtatgtgagaggcctgggggctctgctgcccacgctagcagtggacgagctggacacagtgctcctccacactctgcagagagaccctgtgctggcccccgcagtcggggctgatctgcttgactactgcctggcccggcgcacacaggcggccctcagcatcgctgccctgctcctccaggagagctgcacccacttgctgtggttcgagcagtggtgcctgcaggctggcccagggctcggcctccagggggacctggacgacttccttcccctcatccatgtgtacctccagtgcaggacacggagccacttcacacgcccagcaggagtgtcttccgctgtcattcctgtcttgaggaagaccctgtggaggcagctacagagcaggcttcttagcactgacagtcccccagcatctgggctgtaccaggagatcctggcacagctggtcccgtttgcacgagccaaggatctcagtgtactcatggaccgcctgcccagcttgcttcacaccccaagcagtcacaagaggtggatcgtggccgactccatttcagcagctctggaagggtcagcagaagagctgtgtgcctggagaaggacccttttggagtcctgtgtgaagtggctgatcgtgtctttcagtggtggacagcaagatgatgataatactcagaatcaggagaaggaaatgctgcttagattaaatgcgttgttgcatgcacttaatgaagttgatcctggtgactggcagaaattcgtgaagaagggactcaaatttcggtaccaggaccacacatttttaaagatgctcctcaccgccgtacagctcctgtacagcccagaaagctccgtgcgcacgaagctcatccagctcccggtggtctacgtgatgctcatgcagcactcgctgtttctgccgactctactgacgtctgacggagaggagagcccggacagccaagtaaaagaagcgctggtggacctgatgctgacggtggtggagatgtgcccctctgtctgtgagagcagccactttgcagtgcttctcggggcctatggcgccactctcagcgtcctagatcagaagattttacttctgcttcgagcgtatgagcagaacaagctcagcctcatcaacttcagggtgctgctgtggggcccagcggccgtggagcatcacaagacgtgccggagcctgggcaggtcactgtggcagcagccgagtgtcggggacatccttcgcctgctggaccgggaccggatgatgcagaccatcctgcacttcccccagaaccggaggctgctgccccccgaggacacacaggagctgatattcaaagacaaaagcagggtggatcttgatggcctctatgacccctgctttctccttcagctcttcagtgagctgaccaggccagagtttgtggtggattgtcgaaaatttttggattcaaatgctctgggcctaactgtcacagccctcagcagctatgacccccagatgcgagccatagcctaccatgtcctggcggcctactactcgcacttggagggcgcacggttccaagagcagtcccagctactttacctgttggatgtagtccggaatgggattcgaactcaggacatgagacttacttttaccttggctctcttcattgccaaagcagccctgcagattttgaaaccagaggagcacatgtacctgaaggtcagcaacttcctgctgtcgcatgagtacttgaacatggacaaagtgccaggcttctaccagttcttctacagctccgactttgagcaaaaaacagagcagaagtgggtgtttggcgttctgcggcaggggatccgtgacaagcagtgctacgaactgtgtgcccggcgtggcatcttccacatcatcctgtccttcttccacagcccgctgtgtgacgaggcagcacagaattggattctggaaattctacagaatgctgcccaggttgccagatctgcgtatgaaatcatacgagactatagccttttaacatggattttacacatccttgaaagcaagtttctggagactccgctgctgtctaatgtgatctccttgctacacacactgtgggtgaccaacctgggggacaaggcagtggagtgggagagccagcgcctttgccagcctagctcccaggagcctgccaagcggcttgccctgcacctggtcaatgagttcctttatgttctcatcgtgctcatgaagcacctgaggcccaccttggcccccgtccagctgaccaacttcttcgggacacttgactccgtgctgaggtaccgggccactgtcatacaggcctttagggacatgaacagattcaccgtaaatgagacagtgctttccaccaaggacgtccttgtcctcttgcacaagtggagcctcattgaaagagacctcaagctccaggaagacctgagagcagccattgagaaggcccaagcccgggagctcatgaaaatgctcaaggataagaacaagcctgtcatgccagcccgagccaaaggcccacggggccgaaagaggaggcctggggaggcagaggagatggctgaccctgagctgatggcatctaccttggagacatgcaagggcctcctgaggtccatcttgacttactggagaccagtgatccctggtcctgaccccactcaggagcctgtggactcagccagccccgagagcgatgcgccaggccccgtatatgctgccgcttccctggcagtcagttgggtgctgcggtcggtggccgagcacccgctcagcagggcagaggctgcaggactcattggctggcttaagagccatattttgccacaccctgtggtcgtggctgacctccttaaggacagtgccgtgaggagcagcatattcaggctgtatagccggctctgtggggctgaggggctggcagggcctgtgcaggaggtggcctgcctgttcaatacggtcatgctgcagctggtggctgcccagggccgggcagggagccccttccacccggccatggaagccctctccctgtcttctctgagtgagaaggatgaagccacacaagcctccgcagcattcctagtgtctctctacataaaggacatctggctgggggctcagcggccggacaccctcttaacccacgtccggatggtgtgtgaggccgcagatgatgccccgagcagtgaagaggaggccatcgtggtgctctgcaaggacgccgccagcgcagcctcagatgcttgactcctgccggccagcaccttgcaccctgatgaccagagcctcgagcacagcaccagcttctagaagtttggttgagtcaagggtttccagagaaggcatgggaaacaacaggttcagtacattggctcagttctttgacaagaaaagttgagaggactttattgaactgcccagtaaatgataaactcgggcctgtaggtgcccagcatcagagttgcaaggaatgtggggacttctaggccatgaggcccatccagtgcctcgtcaggccgccccttcctctctaggggcttggagctcatcacaggaaatagctcgagtttgaggcagcacttctgaatgcagaagagattcatctgtgttaaagctgaaatgtcaaaaggtatcagattttttttatgaaaacgaagagagatgtttaaagtttatttttcagcaggtgaggtggctcacgcctataatcccagcactttgggaggccaaggcgggtgaatcacctgaggtcaggagttcgaaaccagccttcccaacatggtgaaaccccatctctactaaaaatacaaaaattagccaggcatggtagcgcacacctgtaattccagctactcgggaggctaaggcaggggaatcgcttgaacctgggaggtggaggctacagtgagctgagatcgtgccattgcgctccagcctaggtgacagagcaagactccatctcaaaaaaataaaaaaataaagtttgtttttctataaaaagtcataacaaagtattagtatgactttttgaataagttaatttctgccagtgtttaattattttattaaagaaaaggatgttacactgaatccttaaagaataaaagtgatttgacctctgctttgagaagacagcctgtaatttttaaagctatacttcaaagaggggattttgaattttataaatgcttgttaatgtctatttttgtaaggtttttgtgttttcctttcattgttgtcaagaggctatttttgctccacataggcctgcatttattttaaaggtcagaattttactcttaatggtcatatattagttggggttgtagctgacaaaagtcatgaaatttcgtggttttcacagttaaaatttccgtctgttcctttaaaactctcctgcatgcctggggctcttgggatctgctctgtggcctaggatgtggctgttttatctgccgtataatgtacatcgtgctgacaatgccttggttttgtctgaaacatttacacttctattttccaccagtgttctttagaattgtttctgttttaggtgacttaaagttttaactaaagcatgagtaacgtttgttggcatacagtcccttcaccacaaataattgtcttgcactgtctacaaagcaaggatcagttacctcacttgtccccttccctacccaaataaaccttacaacgctattctttgagactatcctgaacttgaaatcccacgtttagatccaagctggactcaggcaagcgctgctccaacaaagcgttctcttcctggttccccttaatctttatccacctctccaaggcctatctttggggattcctttggttataggcacctctgcttgtttatgcagggggcattggccggaaggacattggtctggggaatatccctgaaccccatgcctctgggggcacagggaggggcagcgagcaggtggggtggatttccacggcttcatccctggctccaggcctaagctgcctcccaggttcttagggcccagcaagtcaatacatactacgtcaggtggcgacaaatgctccaaagccgagttccagctcagtcaagtgaggacacattttcagcacctcaccttcttttctgcatctctggagctcatcagtcttgcttttctttgttctcccttttaaatccactgccctgaccttgttcgtgtattttccagtcacttagtgtggaggaagggaatctcatcccatggagaatagatcgaacatggtcttcacctgacttaaaatataaaatgctaaattagaaatatcttaagtggggcggggggcacagttattttaaaaataaaacctatcaactccctccttgcctgaaagctgtaggggacatatgggtcttctgagatttgctgtgtgatgctgtctcctctccagggacaaggctgctgggcactagaggactagatctttcaagggtcccagatccactgtcacataaagtcacatccagaagacctttcctgccagcttccagggctctttgtgttctgtgacagcatttgggcatagatcctgcttacccggcctggctgctgacaggcgttggctgcctgccctccaggggagacactttcttgggctctgtctttgaaaggctgtggggaggttgaaggtgcaactcaggtccccagactgcagtgagctgacctggcagggcagatgccatcacatctgggggagccggcgggtgttagtggagcttggatgggaacttacccagcatcctaacaaaggtacagaaggaccaggtgaactcagggctgataacgcattacacagtaatggtaaagtggcatagtaaagattagtaagcaaacagcttttcctcttgatttgcatatattttattttcctactcttccctgagcaaatataagcagtaagcaagcaggctaggtgtgctcaataaactcagcaacacctgggatgacctctgcactcgaggggccactgcaatctttgtcaaaggcataggatgctcctgctctagttgcacttgacctaggtgccctttctgctacatgcaaatggcctctaagaagaacgaggaacgtatgtgtccaggttggcttgatttcaccagttcactcagctatggccacgatttactgacatcagctctgcaattgagaggtcctgtctccagggggaggctcgctgggcttgctcctgacgaggggacccccattgagggtcagttcccagaggagagtggggtgggtctggaaacccccgaggggcaaggtggaggagctctcctgtcgtagcggctggtcagggccagttctgctccctggctccactgagctcgcctgagcctgtgaggttgccaggggttccctgtggcacggcaggcacttctggatgcagaggtggaggttgaggccgtgactccaggggcatgtttggtggtgcttggggctgttcctgtgaacagagcagagtgggaggcaggcatcatagttgctgcagaacagtccatactgtggggctggggggtttcctgccacacctgccatctgcccggaccccatagggaaggccacacaggcaaattcctgagaagggtcagccagctcacaaaggtggccattctagagaaatctcagaggagaggaagtgctttgtcaggaactaggcctcaggtctttccctggaggccacttcttcctacattgatttaggatggggggggtggggggtggaggggagcaggttgacctcccatccagcgctgtatctgagtgtagttcattttatatccatagcccaagccaacttgtatcttggtgatatggtttggctgcgtcacgacacaaatctcaccttgaattgtaataatccccacgtgtcgtgggaaggacccagtgggaggtaattgaatcatgggggcgggtcttcccatgctgttctcgtgatagtaagtctcatgagatctgatggttttataaaggggagtttccctgcacatgcccttttgcctgtgtcatgtaagatgtggctttgctcttcctttgccttctgccatgactgtgaagcctcccccgccatgtgaaactgtgagtccattaaacctctttcctttataaatta

SEQ ID NO: 198344 - DNA, 5613 bp, Homo sapiens
  Payload ID: 19137
  Gene Name: URB2 ribosome biogenesis 2 homolog (S. cerevisiae)
  Uniprot ID: Q14146
  ENST ID: ENST00000258243
  CDS Start-End: 137-4711
ggacgcgggacccgtacagcggcctccgccgcaccgggacagcagccgccgccgctgccgccgtcctcccctgtctacccggagctgtctcgagctgagccccctaccgggccggatcccgagataaagcctagccatggctgctgtttattctggcatttcccttaagcttaaaagcaagacaacttcctgggaagataaactaaaactagctcactttgcttggatttctcaccagtgctttcttccaaataaagaacaagtgttacttgattgggcaagacaatcattggttgcattttataagaaaaagcttgaactgaaggaagatattgttgaaaggctttggatctatatagataacattttacatagcagaaaattgcagaatctcctcaagaatggaaagaccattaatcttcagatttccctagtcaagatcatcaatgagagagtagctgagttctctctttcgggatcccaaagaaacatctgtgctgtccttcgatgttgccagggcatcctgtcgacacctgccctggctgtcatctacacggccaaacaggagctgatggtggccttgctgagccagctttgctggtcggcctgcaggcagcccgaaggagctgtggtagcccagttgtttgaggtcattcacctggcccttggccattatctcttgatcctgcagcagcaggtcaacccaagacgtgcctttggggatgtgactgctcacctgctccagccgtgcctggtcctgaggcacttactctctgggggcacatggacgcaggctggccagggccagctgaggcaggtgctgagccgggacatcaggagtcagattgaggccatgttccgaggagggatttttcagcctgagctactgtcatcctacaaggaggggctcttggaccagcagcaaggggatgtgaagacgggagccatgaagaaccttctggctcccatggacaccgtgcttaacaggctggttgatgctggctactgtgcagcatcccttcatacctctgttgtggccaactcagtggccttgctgtataagctctttctagattcttactttaaggagggaaaccagcttctctgcttccaggttctccccaggttgtttggctgcttgaagatttcacacctgcaggaggagcagagcaaagccctgtccacatcagattggaccacagagcttttggttgtggaacagctactaaactcagtggccaacaacaatatctacaacatcgctgccgacagaattcggcacgaagaggctcagttccgcttttaccgccacgtggctgagctgctgataaaccatgcacaagcacccataccggcctggttccgctgtctgaagactttgatatctctgaatcatttgattttggagccagacctggatgacctgctggcttcagcgtggatcgatgccgaggtaacagagtttcgaaccaaaaaagcccaggaggcgcttattcgtactgtcttccagacttatgccaaactccgacaagtgccacggttgtttgaagaggttttgggggtgatctgtcgtccagctgctgaggcactgaggcagcctgtgctggcctcgggcccctccacggtactctctgcatgcctcctggagctgcctccaagtcagatcctggacacgtggtcccttgtgctggagaagttccagtctttagtcttgccctatttgcagagtgatgccgacatggccctgaaatcactgtcactgagcttgctgctgcactgcatcatgttcaacatgaggagcctggacagcagcacgcctctgcccattgtcagacggacacagtgcatgatggagaggatgatgagggagctcgtgcagcccctgctggcccttctcccggacaccccaggcccagagccagagctgtggctgcagaaggtcagtgactctgtgctcctgctctcttacacttgggcccaggtggacgctatgttcagtttgaactgtagccagtatcactctatgtctgggccccttataggtgttgctctggagatctcgaacctcccttcgttgctcccaggtgtaaaaacacagcattggaagaagatagagaagtttacagctcagttcagctctcttggtacatattgcttagaacagctgtacctgcagaaaatgaaaaggactttaatgcaaactagtttccggtctgaaggagccatccaaagtttgaggtgcgatgctgcctttattattggttccggcagaaaaagcttgaatcagagaacgacggcttcctgggatggccaagttgggatggtgagtggactcacataccctgtagcacactggcacttgattgtgtcaaatctcacaattttaatatcctatctgtgtccagatgatgtgggatacctggccagtgtcctgctgagaactttacccatgggcaaagcccaggaagtctcaatagatgaagaggcatacatcacactggaaaaaatatccaaagccttccttcatagccctctctttccagagatgcagtcccttcattctgctttcttaacgtgcgtaaccacaagttgctccagcattctgtgttctggtgcccagcgtgactcaggtcttgtcagtcagcagcttccctggctttttgaaaaggaccacatggttgtgggtcattgggaaaacagatttgcaaaagctggacccgaaggtatagaacctagaggagaaattgcccagaacttactgtccctggtcaagagtgacttccctatccagctggagggagagcagttggaaagcatcctggggcttttggaagtgatttctgccttacagctggacagcctcttgccaccctatcatgtgcattattttcttgtgttactgtccatggccgtcaccaaactaggatgctcttgctcctcctcactggctctcaagttcttgacgacttgctaccaacttcttggttacttgcaaaaggggaaaagtgctcgctctgtgttcaagatcatgtatggtagtgatatttttgaggttgtactgacctcattgttcagagctagtagtaggttccttattgagatggatgatcccgcttggctggaattcctccaagtgatagggacgttcttagaggagctaatgcagatgctcatccaaatgaagctgagcttggtgctcaattttagaaaaatcaccgcattcctctctagttccaaaccatacacggaggcagcttcaagcaaacaattagaaaatcagaacccccagggcaggcagctccttctggtgtctttaaccaggttgtgccatgtcctgggacctttcctcaaagagcagaagctgggccaagaggccccagcagcactgtctgagctgctgcagcaggttgtgctgcagacaggagctgtgctgcagctctgctcagtgccgggggcccggggctggcgccttccctcggtcctcatctcatccgtcagcacgctcttggaagccgacctgggtcagcactgcagggatggaggggccgacatttcccaaggaagcgacaggacgctgctctcccatgttgccctctaccagggtgtttactctcagatactgttggagttgccagctctcgcgggacatgatcagtcttttcaggcagccttgcagtttttgactctgttctttttggccccagaactgcatcccaaaaaggactccgtgtttacctccatgtttcattctgtgagaagagttcttgcagatcctgaaattcctgttcaggtcactcaggatattgagcctcatttgggagccttgttcacccaaatgttagaggttgggacgacagaggacttgaggctggtgatgcagtgtattctccagggactggatgtcagtaacatgtggaaagcagatgtgcaggctgttgtgtcagctgttacactgctgaggctgctactgaactgcccactcagtggagagaaagcaagtctgttgtggcgtgcgtgtccccagatagtcacagctttaacactcttaaaccgagaagcttctcaggagcagcctgtgtccctcacagtggtcgggcctgtcttagatgtcctggctgcactgctgcggcagggggaggaggccatcggcaacccccaccacgtcagcctggccttcagcatccttctcactgtccctttggaccatctgaagccgctggagtatggaagcgtcttcccgaggctgcacaacgtgctcttctcaatcctgcagtgtcaccctaaggtaatgctgaaagccatcccttctttcttgaactctttcaatagattggtgttttcagttatgcgggaagggcggcagaaggacaaaggaagcatagatgacctgcctacggtcctaaagtgtgcacgcctggttgaaagaatgtacagccacatcgccgcacgagctgaggagtttgctgtgttttccccatttatggtggcccagtacgtgttggaggtacagaaggtgaccttatatccagctgtgaaaagtctgctgcaggagggcatttacctcatcctggacctctgcatcgagcctgacgtccagttcctgcgggcctcgctgcagccgggaatgagagacatctttaaggagctctataatgactatctcaagtaccacaaggccaaacatgaaggagagaaaagatatacggcctaaggctatgggacagaagtgccgccagtgacactgtccagaggctttggctgcatggtctgaaagagctggagaatgaaagacttaagatgttctaattcgtagtattggtatacatagaaaatcctttggggtttatgtagtatattttgatgtattttacatcgtgtttttcttactattttttaatacatagttttatgcagtaagtattgcaatagaatcctgaaaattgaccctgggatgagattaattcaatagaaaaattgctgactcttgggacctttctgtgtttggttctcgtcttggctcagtggtttggtgttccctcgtctgcactggaaactacataaaacttggctttttactttgggtacatgggcgtataattcagccctgtttaaatatacttgcctttcaaattcttcaagtaacatgggaagtattcttgaaatgtcacattttctgccttccctctaagtatgctttctgaagaagtcagggaaagttagagtctgtggcctgaggtgtctgctctgggtggcgatagtgggcacctcaggcaggtcggtgacgtttagcacaggtgccagggctcctgcctgctcctcctgtgttagctctgtgaagttcatttaggaatttttttttcctatgcagtttaagaaataatcctaattgttttttcttattacctaagcaatatatttttattatagcaacctcagaaaagaaaaataaaaggataatttaaaaaactcattcatagtctcagttacccagataacctcggttgtcaccttggagtatcttgttgtagtccctttactatgtgtatgtatatagatgtgcatataaatatatatagtagctaaattggatcataaatgcatttttttaaagtt

SEQ ID NO: 198345 - DNA, 643 bp, Homo sapiens
  Payload ID: 19137
  Gene Name: URB2 ribosome biogenesis 2 homolog (S. cerevisiae)
  ENST ID: ENST00000434387
  CDS Start-End: 392-643
ccaatgatacttgaatatattaattagtactgttcctattattgtttgtttctacccatttccagaatggattagcaccagcttagagtaaaaggtacagactcagcaaattccaaaccaggattgccccatagacctcctgaagttacgcagtgtgggttctctaccctagatagttaaaacaagggtcaaagagtctaatacaagatgggtgagcagtgacagcagcatgtccaggcgaaaggatgtggctatccctgggcacacacaactggtttgagtgtcccgatagactaggctaagaaagaaataagtatgagctcctttaaagtagaaaaacttaaataatcacgtatgtacttttacattctgttatctgtcattacaggtaatgctgaaagccatcccttctttcttgaactctttcaatagattggtgttttcagttatgcgggaagggcggcagaaggacaaaggaagcatagatgacctgcctacggtcctaaagtgtgcacgcctggttgaaagaatgtacagccacatcgccgcacgagctgaggagtttgctgtgttttccccatttatggtggcccagtacgtgttggaggtacagaaggtgaccttatatccagctgtgaaaagt

SEQ ID NO: 198346 - DNA, 931 bp, Homo sapiens
  Payload ID: 19138
  Gene Name: ureidoimidazoline (2-oxo-4-hydroxy-4-carboxy-5-) decarboxylase
  Uniprot ID: A6NGE7
  ENST ID: ENST00000332715
  CDS Start-End: 18-539
ccagtggaatacaaggaatggacattgagaaggtcaactccatggaccttggagaattcgtggatgtgtttgggaatgccactgagagatgtcctctgattgcagctgctgtttggtcccagcggccattctctgatttggaagatttagagaagcacttttttgcctttattgatgcccttgcacagtcaggccaggagggcatcctgcgctgccacccggacctggcgggcagcgagctgcagcggggcacgctcacggccgagtcgcagcgggaacagagcggcgcaggcctgaggagcctgggcgcggacgagcggctgcggctggccgagctcaacgcgcagtaccgcgcgcgcttcggtttccccttcgtgctcgccgcgcgcttcagcgaccggacggcggtgccgcgcgagctggcgcgccggctgctctgcccgtccgcgcaggagctgcgcactgctctgggcgaggtgaagaagatcggcagcctgcgcctggccgacctcctccgcgcagaccccgccaagctgtagctgccgcgcgggccagggacccgggacgcacaaccggacgcgcgggggccacggcccggagctgtgcgtcctgggcgggaggcggactcgggcctggaacagcgtccacacacgtgcacaaaggaagtggagaattgaggcaatcatacgagtaatgagtccttttgtccgcccacccacacgcgcacgcgttgccaaaatatccatattgtttagtgctttgccccggatttatccagctcactgcttcaattcttcactccctttgcggcccccgacaccaccggcctttgtggattccaaagcgtttatccagttctccccaaccctctcctgctaagcccgaactgcaaagcaaaacggacggaaaaggaatcttttatgccacagcg

SEQ ID NO: 198347 - DNA, 2290 bp, Homo sapiens
  Payload ID: 19139
  Gene Name: ureidopropionase, beta
  Uniprot ID: Q9UBR1
  ENST ID: ENST00000326010
  CDS Start-End: 345-1499
aaccgagaggcgaagggcaaggggcgaagggcaagcgccggatcctttcgccccctccccacgtgaggccctggaggctgattggccgtgtgctgcggaggcggcaagaggaacgtgtcctggcacgtgccgaaggagcgctaaaggccaggggcggtcccacccgcgaagccctggaaggcggattggctgcgcgaggaagtggcgtgtcctcacttgagctgtctgggagcgagagtaagagataaaggcaagggcgcctgaccgggcctgggcacctcctcccactgcgggcaaagggcaggcagttcgtgcgcggacacaagcactggcggaccgtggccatggcgggcgctgagtggaagtcgctggaggaatgcttggagaagcacctgccgctccccgacttgcaggaagtgaagcgcgttctctatggcaaggaactcaggaagcttgatctgcccagggaagctttcgaagctgcctccagagaagactttgaactgcagggatatgcctttgaagcagcggaggagcagctgagacgaccccgcattgtgcacgtggggctggttcagaacagaatccccctccccgcaaatgcccctgtggcagaacaggtctctgcccttcatagacgcataaaggctatcgtagaggtggctgcaatgtgtggagtcaacatcatctgtttccaggaagcatggactatgccctttgccttctgtacgagagagaagcttccttggacagaatttgctgagtcagcagaggatgggcccaccaccagattctgtcagaagctggcgaagaaccatgacatggtggtggtgtctcccatcctggaacgagacagcgagcatggggatgttttgtggaatacagccgtggtgatctccaattccggagcagtcctgggaaagaccaggaaaaaccacatccccagagtgggtgatttcaacgagtcaacttactacatggagggaaacctgggccaccccgtgttccagacgcagttcggaaggatcgcggtgaacatttgctacgggcggcaccaccccctcaactggcttatgtacagcatcaacggggctgagatcatcttcaacccctcggccacgataggagcactcagcgagtccctgtggcccatcgaggccagaaacgcagccattgccaatcactgcttcacctgcgccatcaatcgagtgggcaccgagcacttcccgaacgagtttacctcgggagatggaaagaaagctcaccaggactttggctacttttatggctcgagctatgtggcagcccctgacagcagccggactcctgggctgtcccgtagccgggatggactgctagttgctaagctcgacctaaacctctgccagcaggtgaatgatgtctggaacttcaagatgacgggcaggtatgagatgtacgcacgggagctcgccgaagctgtcaagtccaactacagccccaccatcgtgaaagagtagccggcttcagtgcctgccttggggtgaggaagacacctctgccccagtggattagcaagtgtggcaggcttaacatgtccaggttctccccaataacattgtccaggttggttttaaaattcccaggcagggggagagtggcatggggagtgacttcttaatgggtaaggggctgcttacttctggggtattggaaatgtttggggactaggtagaggtgaatgtactaaatgccactgaatttgtatacttcagaatgtttgttatgtaaattttacctcaactaaaaaaaaaaatgcccaggtactgcttgtgcaggtggatttgaggttaggcagatgatgctgtccatcccgtacaccagtgggaagagggtgagggctgatccagagaccctgagcctacagcaaggctgtggtgggtcggatggtctttggatgtgtcagcttagctaggccacagtcaccagtaattcaatcagacactaatctaggtatttctgtgaaggtattttgtagatgtgacagaagtccattcccaattgactaagtaagtgagattatctcagataatctgggtcagcctgacctgattagtcagaaggcctaaagaacagagctaagggtttccctgaggaagaaattctgcctgaggacagcagcccagtgcttggcgagagttcctgacagtctgcccttctgatagcctgcctcacagagtttagacatgactagccagctcctacaatcactgaagtcaattccttgcaataaatctcaatatatccccta

SEQ ID NO: 198348 - DNA, 1928 bp, Homo sapiens
  Payload ID: 19139
  Gene Name: ureidopropionase, beta
  ENST ID: ENST00000382760
  CDS Start-End: 163-723
ggattggctgcgcgaggaagtggcgtgtcctcacttgagctgtctgggagcgagagtaagagataaaggcaagggcgcctgaccgggcctgggcacctcctcccactgcgggcaaagggcaggcagttcgtgcgcggacacaagcactggcggaccgtggccatggcgggcgctgagtggaagtcgctggaggaatgcttggagaagcacctgccgctccccgacttgcaggaagtgaagcgcgttctctatggcaaggaactcaggaagcttgatctgcccagggaagctttcgaagctgcctccagagaagactttgaactgcagggatatgcctttgaagcagcggaggagcagctgagacgaccccgcattgtgcacgtggggctggttcagaacagaatccccctccccgcaaatgcccctgtggcagaacaggtctctgcccttcatagacgcataaaggctatcgtagaggtggctgcaatgtgtggagtcaacatcatctgtttccaggaagcatggattctccgtccacatcaccaggaaccccggcctccctgctgttacgcaccgagctgttgtctgattccttcagttttcccacatcgttctgaatccattcgctcctctccatctctctaccaccacctggtccaagcccctggcagctcacctctggcttttgtaattccctccagctggtctcctgtgccctcctgaccaggacttctttaccttcagatctcagcccagagccagcccccccatctaaacatcctggtagtatgtacctttgtggtttttatttttatcagagttttacatgctcatggtttagagtcagatgggtgtacaaggtctgttaccaaaaaatagctattatccccagcatcaacactgagctagttcctttggaatttacctttgttagtgttgctacttcctaattttttagttttgcatcacctattgacttccccctatggaagatgtcagtgttagccctttcttgcctcctcctggcccttcgacatacatgtgtccttgttctatccccccagcccattttgtcaactttgattccttttctttttttttaagacaaggacttactctgtcacccaggcttagagtacaatcacagctcactgcagccttgatcccaggcccaagcaatcctcccacctcagcctcccaagtagctgggaccacaggtgcacaccatcacgcccagctaattgaaaaaaaaaagtttgtagagatggagatctcactatattgctaggctgaactttgatttcttttcctgaattattttctgttttccctagagtttgctttgttttctacttgccacgcattcaaccccaaactttctatcaattcctaaatctcccttaatgtgttttagacgcatcaaacagtctatcagtttcatctcctccaaggaatctgccccagagccttgtgactgctgtggtctgaatcaggtgccccctctgctggccacacagttattgtcctgggatcccccctcatcatcaccctggggaatccctttgccttgctcttgtgtttctctgttcccacagcttcctctttcttggtttatacccttattttagtggagtggtgtagtggatccttatagatttatgttgcctcggcatccatgttgaatacaagtttaactctctcataccagcggcagggctcggtcacgctggacacagtttccagatctacaccacaccgagatggctcaagccaagtggccagaggtaagaacttaagaggcctctctcccaccagcagactgggctgcccactttcctgctgcttcctttaaatggaccatccaggcatttggccattaacttaaggtgaccacatcttagtcattatgtgtactgctagttgcccca

SEQ ID NO: 198349 - DNA, 3154 bp, Homo sapiens
  Payload ID: 19139
  Gene Name: ureidopropionase, beta
  ENST ID: ENST00000415388
  CDS Start-End: 1298-1426
agataaagcaacagaagcctccagcgactaagttaaactttcctggggtcacaaggtttacaagtggctgaataggatttctacagactggttccttcacccggctgcccgccgaagtaagcgggccttactgccctaattctcaataggaccccaaagaggacgcttctttgctcctgaagggatggcaccctctggattcgcggtaacagcaaatggggctctcactcctaccatctcagtgacagtttaaagcgcaccctaccgcaggaaagtgcccatatttgcacacacgcggcagagggcagggctgaaaaggggccctagggtgcagggggcgcgccctcacccggggaccccgcattttacaatattagctccaccgaggcgcacggaaccgcaggcgagcaactgaccttcggctccagcggccccaaagccgggggtgggaacgcgcgacccaggtagcggcatggactccgagcctggcccctcgggggttaaaactccccagacataaaggctccggacgacagaggtgcagccgccgcgtgcccgtgggacactgaaactcttcccttaccttcctcggtagtcctgtgagggaggctggcccggccggctgccctacggtgcggacaggaggtcgcggtcgggaggggccctgcccggcggttgctgctggaaccagcccccgcaagggcccgcagcggccgggccgtttacctcagacccgcgccgcagcctcccggagcccgcgcccaggactccctcacgacctctccagggtcccggcccgacaccaaggggcaggtgaggggtggaacctggaggcacccgcgccagggcccctgagggaggcgggagggggacagcctcagtcctgactcgcagccgaggcgcgacgactccgcgcagtcccgcctgtggaggggcgtgcctcatcgcttgctaaccgagaggcgaagggcaaggggcgaagggcaagcgccggatcctttcgccccctccccacgtgaggccctggaggctgattggccgtgtgctgcggaggcggcaagaggaacgtgtcctggcacgtgccgaaggagcgctaaaggccaggggcggtcccacccgcgaagccctggaaggcggattggctgcgcgaggaagtggcgtgtcctcacttgagctgtctgggagcgagagtaagagataaaggcaagggcgcctgaccgggcctgggcacctcctcccactgcgggcaaagggcaggcagttcgtgcgcggacacaagcactggcggaccgtggccatggcgggcgctgagtggaagtcgctggaggaatgcttggagaagcacctgccgctccccgacttgcaggaagtgaagcgcgttctctatggcaaggaactcaggtctctgcccttcatagacgcataaaggctatcgtagaggtggctgcaatgtgtggagtcaacatcatctgtttccaggaagcatggactatgccctttgccttctgtacgagagagaagcttccttggacagaatttgctgagtcagcagaggatgggcccaccaccagattctgtcagaagctggcgaagaaccatgacatggtggtggtgtctcccatcctggaacgagacagcgagcatggggatgttttgtggaatacagccgtggtgatctccaattccggagcagtcctgggaaagaccaggaaaaaccacatccccagagtgggtgatttcaacgagtcaacttactacatggagggaaacctgggccaccccgtgttccagacgcagttcggaaggatcgcggtgaacatttgctacgggcggcaccaccccctcaactggcttatgtacagcatcaacggggctgagatcatcttcaacccctcggccacgataggagcactcagcgagtccctgtggcccatcgaggccagaaacgcagccattgccaatcactgcttcacctgcgccatcaatcgagtgggcaccgagcacttcccgaacgagtttacctcgggagatggaaagaaagctcaccaggactttggctacttttatggctcgagctatgtggcagcccctgacagcagccggactcctgggctgtcccgtagccgggatggactgctagttgctaagctcgacctaaacctctgccagcaggtgaatgatgtctggaacttcaagatgacgggcaggtatgagatgtacgcacgggagctcgccgaagctgtcaagtccaactacagccccaccatcgtgaaagagtagccggcttcagtgcctgccttggggtgaggaagacacctctgccccagtggattagcaagtgtggcaggcttaacatgtccaggttctccccaataacattgtccaggttggttttaaaattcccaggcagggggagagtggcatggggagtgacttcttaatgggtaaggggctgcttacttctggggtattggaaatgtttggggactaggtagaggtgaatgtactaaatgccactgaatttgtatacttcagaatgtttgttatgtaaattttacctcaactaaaaaaaaaaatgcccaggtactgcttgtgcaggtggatttgaggttaggcagatgatgctgtccatcccgtacaccagtgggaagagggtgagggctgatccagagaccctgagcctacagcaaggctgtggtgggtcggatggtctttggatgtgtcagcttagctaggccacagtcaccagtaattcaatcagacactaatctaggtatttctgtgaaggtattttgtagatgtgacagaagtccattcccaattgactaagtaagtgagattatctcagataatctgggtcagcctgacctgattagtcagaaggcctaaagaacagagctaagggtttccctgaggaagaaattctgcctgaggacagcagcccagtgcttggcgagagttcctgacagtctgcccttctgatagcctgcctcacagagtttagacatgactagccagctcctacaatcactgaagtcaattccttgcaataaatctcaatatatcccctactggttctgcttctctagttgaatctgactgatacagattttggtgccaaaagtggttctagaaaaatagaatcttaaagatg

SEQ ID NO: 198350 - DNA, 795 bp, Homo sapiens
  Payload ID: 19140
  Gene Name: URGCP-MRPS24 readthrough
  ENST ID: ENST00000603700
  CDS Start-End: 15-347
acctcgctgcgctcatggcgtcgcccgggcattcagatttgggagaagtagccccagaaataaaagcatcagagagacgaacagctgtggccattgcagatttggaatggagagaaatggaaggagatgattgcgagttccgttatggagatggtacaaatgaggctcaggacaatgattttccaacaggtgctgtcctggagccgagagctgccttgcgcttggcgcgccctgcacacctccccggtctgcgccaagaaccgggcggcccgagtacgcgtaagcaagggggacaagccggtgacctacgaggaggcacacgcgccgcactacatcgcccaccgtaaaggctggctgtcgctgcacacaggtaacctggatggagaggaccatgccgcagagcgaacggtggaggatgttttccttcgcaagttcatgtggggtaccttcccaggctgcctggctgaccagctggttttaaagcgccggggtaaccagttggagatctgtgccgtggtcctgaggcagttgtctccacacaagtactacttcctcgtgggctacagtgaaactttgctgtcctacttttacaaatgtcctgtgcgactccacctccaaactgtgccctcaaaggttgtgtataagtacctctagaacaatccccttttttccatcaagctgtagcctgcagagaatggaaacgtgggaaaggaatggtatgtgggggaaatgcatcccctcagaggactgaggcatagtctctcatctgctattgaataaagaccttctatcttg

SEQ ID NO: 198351 - DNA, 1579 bp, Homo sapiens
  Payload ID: 19141
  Gene Name: URI1, prefoldin-like chaperone
  Uniprot ID: O94763
  ENST ID: ENST00000360605
  CDS Start-End: 49-1476
agtgggtcttctcactcttttccaggctccttggaggtcactgccctgatgacaacatggtcttcccttcaaggaagccacgtttctaagagggctctggcatatgcattggtggtcactaactgccaagagagaatccagcattggaagaaggtagataatgactataatgcccttcgagaaagactcagcaccttgcctgataaattgtcttataatataatggtaccatttggcccttttgccttcatgccaggaaaacttgtccatactaatgaagtcactgttttactgggggacaactggtttgcaaagtgctcagcaaagcaggctgtaggtttagttgagcaccggaaagaacatgtaagaaaaacaatagatgacttaaaaaaagtgatgaaaaattttgaatccagagttgaattcacagaagatttgcagaaaatgagcgatgctgcaggtgatattgttgacatacgagaagaaattaaatgtgacttcgaatttaaagcaaaacaccgaattgctcataaaccgcattccaaaccaaaaacttcagatatttttgaagcagatattgcaaatgatgtgaaatccaaggatttgctagctgataaagaactgtgggctcgacttgaagaactagagagacaggaagaattgctgggtgaacttgatagtaagcctgatactgtgattgcaaatggagaagatacgacatcttctgaagaggaaaaggaagatcgtaacacaaatgtgaatgcgatgcatcaagtaacagactctcatactccttgtcataaggatgttgcaagttcagaaccattcagtggtcaagtgaatagtcagttgaactgttcagtgaatggttccagttcttaccacagtgatgatgatgatgatgatgatgatgacgacgacgacgacaacattgacgacgatgatggtgataacgaccatgaggctttaggggttggagataattctataccaacaatatatttttcacatactgttgagcctaagagggtccgaataaatactggaaagaataccactttaaaattcagtgaaaagaaagaagaagccaaacgtaaacgaaagaacagcactggcagtggccactctgcccaggagctgccgaccatcaggacgcctgcagacatttacagagcctttgttgatgttgtgaatggagaatatgtccctcgcaaatccatcctgaagtctcgaagtagagagaatagtgtgtgtagcgacactagtgaaagcagtgctgctgaatttgatgataggcggggagttttgaggagtatcagctgcgaagaagccacttgcagtgacaccagtgagagcattttggaagaggaaccacaagaaaatcaaaagaaacttttgcccttatcagtaacacctgaggttttgcggctagttggctattcaagaaacctcgcccctctgaatgtcatactgtaatctttaaggaagaaagctacatgaattaattgtactctatgggaaaatttctttggaaagatattttgtaaaacttttttttccaagtaaaaactttatgaaa

SEQ ID NO: 198352 - DNA, 3444 bp, Homo sapiens
  Payload ID: 19141
  Gene Name: URI1, prefoldin-like chaperone
  Uniprot ID: O94763
  ENST ID: ENST00000392271
  CDS Start-End: 298-1905
gcggccgccacgcgacgcctggctgggcccgcaccggagaggcgtctcggtacctggcaggcggcctgctactcggagcccgctgcggggcggcggcggcggggacatgcacgtgtgagatgcggcagcgggcggcgcggacgcgaacagcagcggcggcggcgggcgcggcctcctgggcgcggggcgcgcggtgcctgagggcgggcgcgcgggcgctgggcaactgccggccgcgccgcctgcgcaggcgctggttcaggactcacacgccgcgctgaggcccgcgggcccgtcatggaggcgcccaccgtggagacgccccccgacccctcgcccccttcggccccggcccctgccctggttccgttgcgcgccccggatgtggcgcggctgcgcgaggagcaggaaaaggtggtcactaactgccaagagagaatccagcattggaagaaggtagataatgactataatgcccttcgagaaagactcagcaccttgcctgataaattgtcttataatataatggtaccatttggcccttttgccttcatgccaggaaaacttgtccatactaatgaagtcactgttttactgggggacaactggtttgcaaagtgctcagcaaagcaggctgtaggtttagttgagcaccggaaagaacatgtaagaaaaacaatagatgacttaaaaaaagtgatgaaaaattttgaatccagagttgaattcacagaagatttgcagaaaatgagcgatgctgcaggtgatattgttgacatacgagaagaaattaaatgtgacttcgaatttaaagcaaaacaccgaattgctcataaaccgcattccaaaccaaaaacttcagatatttttgaagcagatattgcaaatgatgtgaaatccaaggatttgctagctgataaagaactgtgggctcgacttgaagaactagagagacaggaagaattgctgggtgaacttgatagtaagcctgatactgtgattgcaaatggagaagatacgacatcttctgaagaggaaaaggaagatcgtaacacaaatgtgaatgcgatgcatcaagtaacagactctcatactccttgtcataaggatgttgcaagttcagaaccattcagtggtcaagtgaatagtcagttgaactgttcagtgaatggttccagttcttaccacagtgatgatgatgatgatgatgatgatgacgacgacgacgacaacattgacgacgatgatggtgataacgaccatgaggctttaggggttggagataattctataccaacaatatatttttcacatactgttgagcctaagagggtccgaataaatactggaaagaataccactttaaaattcagtgaaaagaaagaagaagccaaacgtaaacgaaagaacagcactggcagtggccactctgcccaggagctgccgaccatcaggacgcctgcagacatttacagagcctttgttgatgttgtgaatggagaatatgtccctcgcaaatccatcctgaagtctcgaagtagagagaatagtgtgtgtagcgacactagtgaaagcagtgctgctgaatttgatgataggcggggagttttgaggagtatcagctgcgaagaagccacttgcagtgacaccagtgagagcattttggaagaggaaccacaagaaaatcaaaagaaacttttgcccttatcagtaacacctgaggctttttctggaactgttatagaaaaagaatttgtatcaccttccttaacaccacccccagccattgctcatcccgcactacccactattccagaacgaaaggaagttctgttggaagcatctgaagaaactggaaagagggtttcaaagtttaaagctgccagattgcaacagaaagactaggccctgtctaggaaatgggaatttacatcctaaaacctagttgttcatttgtttagagtatctatagcaaaataggttacatgtagtttgaaataaggtatcctgagttactttggcaacaagttcttttacccttacccgtggtatttgaaaaaaatcaaggtaactgtctgaatactttaatatcagcttgttttgtgaattctctgaatactgtcaacactcttatctaagtttgcctttatgatgcagtggcagcattttgaattacttttcaaagaatactgttcatatgcattgtttttgtgtttcaaactaaatacaggcagttttgtgccagctgtgatattgtgcataccatatggaccattttaaagaaaattttaaaatttcaaatagattcaacaattacattacttgctttcacattttaaaggcactttaaaaaaatctacttctcttgtaggttttgcggctagttggctattcaagaaacctcgcccctctgaatgtcatactgtaatctttaaggaagaaagctacatgaattaattgtactctatgggaaaatttctttggaaagatattttgtaaaacttttttttccaagtaaaaactttatgaaacttggtctcaaaaatgttgtgaactttatgattcaaaattgagtacagatatgtccttgattcatatgtatgctacatgtatcacacaacagatctggaattctttcagttcctcagatacttctcccttagtttttgcagtttcactgggattatgttttgggaaacaaggaaaggtctagatgcttaaacattttaaataaaaattccttacagtttcatcttcccaacattttcattctttaaggctactttcctactaactgaaataacacatttacttttaccacaattcctcaaaataaatttattctaacattgaaaataacattacaagttaatcattagcttgatgcatgctaaaatgtagcttttaaaaagcattctgcattagtactaaaataagccatcaatgccagtccaccctctctattcatggctaaatatttaaaggttatttatagcttctttaatgaattcttcttaaacaaagtgaaattatgtcctagaaaagtagaagctattcgtaactagagcagtgcaactttaaagttttatgaatatgtattttaatgacaagggggcgagcttgcatccccactagttaatggataattcaaaccgaggactgattttgaaagatcacctaaaaatgtagatttgttctttagtaaatttagatcaactatgcatatattttgtaggtaaatctttcagtccatgccccaaccctcaccaaaaccaaagcagaaattacacacacaaagatgctcccgttaggaattgctattcacatgaggctttctgtgctagatttttttctcagaaacaaactttactgtaggactattgtggtgttcttaacagatttgtaatttcaagatgcgtgtcattaaataatttttcatgttca

SEQ ID NO: 198353 - DNA, 291 bp, Homo sapiens
  Payload ID: 19141
  Gene Name: URI1, prefoldin-like chaperone
  ENST ID: ENST00000573052
  CDS Start-End: 1-121
gagtatcagctgcgaagaagccacttgcagtgacaccagtgagagcattttggaagaggaaccacaagaaaatcaaaagaaacttttgcccttatcagtaacacctgagttgaacatatagttgaccagattaaatgcagcaaacatccaggctttttctggaactgttatagaaaaagaatttgtatcaccttccttaacaccacccccagccattgctcatcccgcactacccactattccagaacgaaaggaagttctgttggaagcatctgaagaaactggaaagag

SEQ ID NO: 198354 - DNA, 486 bp, Homo sapiens
  Payload ID: 19141
  Gene Name: URI1, prefoldin-like chaperone
  ENST ID: ENST00000574233
  CDS Start-End: 272-486
gatgacaacatggtcttcccttcaaggaagccacgtttctaagagggctctggcatatgcattgagatgagtttgctgtgttggccagactagtctccaactccaggcctcaagtgatccacccgcctctgcttcccaaagtgctgggaccacaacaagtgtggtcactaactgccaagagagaatccagcattggaagaaggtagataatgactataatgcccttcgagaaagactcagcaccttgcctgataaattgtcttataatataatggtaccatttggcccttttgccttcatgccaggaaaacttgtccatactaatgaagtcactgttttactgggggacaactggtttgcaaagtgctcagcaaagcaggctgtaggtttagttgagcaccggaaagaacatgtaagaaaaacaatagatgacttaaaaaaagtgatgaaaaattttgaatccagagttgaattcacagaagattt

SEQ ID NO: 198355 - DNA, 844 bp, Homo sapiens
  Payload ID: 19141
  Gene Name: URI1, prefoldin-like chaperone
  ENST ID: ENST00000574666
  CDS Start-End: 238-390
gcggcctgctactcggagcccgctgcggggcggcggcggcggggacatgcacgtgtgagatgcggcagcgggcggcgcggacgcgaacagcagcggcggcggcgggcgcggcctcctgggcgcggggcgcgcggtgcctgagggcgggcgcgcgggcgctgggcaactgccggccgcgccgcctgcgcaggcgctggttcaggactcacacgccgcgctgaggcccgcgggcccgtcatggaggcgcccaccgtggagacgccccccgacccctcgcccccttcggccccggcccctgccctggttccgttgcgcgccccggatgtggcgcggctgcgcgaggagcaggaaaaggtggtcactaactgccaagagagaatccagcattgaggtgaaaagccaggcatccttcaagctagtggatctttgacaaagatgcattgcaaaacaatcaacaaacaatcagaaaggcatgctatgtgaagaaggtagataatgactataatgcccttcgagaaagactcagcaccttgcctgataaattgtcttataatataatggtaccatttggcccttttgccttcatgccaggaaaacttgtccatactaatgaagtcactgttttactgggggacaactggtttgcaaagtgctcagcaaagcaggctgtaggtttagttgagcaccggaaagaacatgtaagaaaaacaatagatgacttaaaaaaagtgatgaaaaattttgaatccagagttgaattcacagaagatttgcagaaaatgagcgatgctgcaggtgatattgttgacatacgagaagaaattaaatgtgacttcgaatttaa

SEQ ID NO: 198356 - DNA, 1032 bp, Homo sapiens
  Payload ID: 19141
  Gene Name: URI1, prefoldin-like chaperone
  ENST ID: ENST00000575242
  CDS Start-End: 1-685
tgtgaatgcgatgcatcaagtaacagactctcatactccttgtcataaggatgttgcaagttcagaaccattcagtggtcaagtgaatagtcagttgaactgttcagtgaatggttccagttcttaccacagtgatgatgatgatgatgatgatgatgacgacgacgacgacaacattgacgacgatgatggtgataacgaccatgaggctttaggggttggagataattctataccaacaatatatttttcacatactgttgagcctaagagggtccgaataaatactggaaagaataccactttaaaattcagtgaaaagaaagaagaagccaaacgtaaacgaaagaacagcactggcagtggccactctgcccaggagctgccgaccatcaggacgcctgcagacatttacagagcctttgttgatgttgtgaatggagaatatgtccctcgcaaatccatcctgaagtctcgaagtagagagaatagtgtgtgtagcgacactagtgaaagcagtgctgctgaatttgatgataggcggggagttttgaggagtatcagctgcgaagaagccacttgcagtgacaccagtgagagcattttggaagaggaaccacaagaaaatcaaaagaaacttttgcccttatcagtaacacctgaggtgtgtgtgtgtatcttttaattctttatttcatatagtatctttgaccagttttagctatttaatctgaaaagtcataagattaaattaattctaggttttatactttcttggtactaattaataaaaaattaatagtcacaaacagtacaaatattgtgataatcaaatagtttattttttgataaacacattacttgtcttaacgttctatttcagcaaaatgggaaatttaaaatgtcttacttggcattatgtattacatttgtagctaggaaattatttcgcagtttattttaaataaattaccagtaggtcattttctgatagtgtaaggagcagattacattattctcttttaaatacct

SEQ ID NO: 198357 - DNA, 514 bp, Homo sapiens
  Payload ID: 19141
  Gene Name: URI1, prefoldin-like chaperone
  ENST ID: ENST00000570564
  CDS Start-End: 416-514
actcttttccaggctccttggaggtcactgccctgatgacaacatggtcttcccttcaaggaagccacgtttctaagagggctctggcatatgcattggtggtcactaactgccaagagagaatccagcattgaggtgaaaagccaggcatccttcaagctagtggatctttgacaaagatgcattgcaaaacaatcaacaaacaatcagaaaggcatgctatgtgtgagtgatgatccctgcagcatatgccataggcttgttgtagaggagctgctcagtaaatggtggattcaattgaaacaagtcttttttggatgcttaatgggaagttgtagggaagaaggtagataatgactataatgcccttcgagaaagactcagcaccttgcctgataaattgtcttataatataatggtaccatttggcccttttgccttcatgccaggaaaacttgtccatactaatgaagtcactgttttactgggggacaactggtttgcaaagtgctca

SEQ ID NO: 198358 - DNA, 2495 bp, Homo sapiens
  Payload ID: 19141
  Gene Name: URI1, prefoldin-like chaperone
  ENST ID: ENST00000574110
  CDS Start-End: 288-419
cgcgacgcctggctgggcccgcaccggagaggcgtctcggtacctggcaggcggcctgctactcggagcccgctgcggggcggcggcggcggggacatgcacgtgtgagatgcggcagcgggcggcgcggacgcgaacagcagcggcggcggcgggcgcggcctcctgggcgcggggcgcgcggtgcctgagggcgggcgcgcgggcgctgggcaactgccggccgcgccgcctgcgcaggcgctggttcaggactcacacgccgcgctgaggcccgcgggcccgtcatggaggcgcccaccgtggagacgccccccgacccctcgcccccttcggccccggcccctgccctggttccgttgcgcgccccggatgtggcgcggctgcgcgaggagcaggaaaaggaagaaggtagataatgactataatgcccttcgagaaagactcagcaccttgcctgataaattgtcttataatataatggtaccatttggcccttttgccttcatgccaggaaaacttgtccatactaatgaagtcactgttttactgggggacaactggtttgcaaagtgctcagcaaagcaggctgtaggtttagttgagcaccggaaagaacatgtaagaaaaacaatagatgacttaaaaaaagtgatgaaaaattttgaatccagagttgaattcacagaagatttgcagaaaatgagcgatgctgcaggtgatattgttgacatacgagaagaaattaaatgtgacttcgaatttaaagcaaaacaccgaattgctcataaaccgcattccaaaccaaaaacttcagatatttttgaagcagatattgcaaatgatgtgaaatccaaggatttgctagctgataaagaactgtgggctcgacttgaagaactagagagacaggaagaattgctgggtgaacttgatagtaagcctgatactgtgattgcaaatggagaagatacgacatcttctgaagaggaaaaggaagatcgtaacacaaatgtgaatgcgatgcatcaagtaacagactctcatactccttgtcataaggatgttgcaagttcagaaccattcagtggtcaagtgaatagtcagttgaactgttcagtgaatggttccagttcttaccacagtgatgatgatgatgatgatgatgatgacgacgacgacgacaacattgacgacgatgatggtgataacgaccatgaggctttaggggttggagataattctataccaacaatatatttttcacatactgttgagcctaagagggtccgaataaatactggaaagaataccactttaaaattcagtgaaaagaaagaagaagccaaacgtaaacgaaagaacagcactggcagtggccactctgcccaggagctgccgaccatcaggacgcctgcagacatttacagagcctttgttgatgttgtgaatggagaatatgtccctcgcaaatccatcctgaagtctcgaagtagagagaatagtgtgtgtagcgacactagtgaaagcagtgctgctgaatttgatgataggcggggagttttgaggagtatcagctgcgaagaagccacttgcagtgacaccagtgagagcattttggaagaggaaccacaagaaaatcaaaagaaacttttgcccttatcagtaacacctgaggctttttctggaactgttatagaaaaagaatttgtatcaccttccttaacaccacccccagccattgctcatcccgcactacccactattccagaacgaaaggaagttctgttggaagcatctgaagaaactggaaagagggtttcaaagtttaaagctgccagattgcaacagaaagactaggccctgtctaggaaatgggaatttacatcctaaaacctagttgttcatttgtttagagtatctatagcaaaataggttacatgtagtttgaaataaggtatcctgagttactttggcaacaagttcttttacccttacccgtggtatttgaaaaaaatcaaggtaactgtctgaatactttaatatcagcttgttttgtgaattctctgaatactgtcaacactcttatctaagtttgcctttatgatgcagtggcagcattttgaattacttttcaaagaatactgttcatatgcattgtttttgtgtttcaaactaaatacaggcagttttgtgccagctgtgatattgtgcataccatatggaccattttaaagaaaattttaaaatttcaaatagattcaacaattacattacttgctttcacattttaaaggcactttaaaaaaatctacttctcttgtaggttttgcggctagttggctattcaagaaacctcgcccctctgaatgtcatactgtaatctttaaggaagaaagctacatgaattaattgtactctatgggaaaatttctttggaaagatattttgtaaaacttttttttccaagtaaaaactttatgaaacttggtctc

SEQ ID NO: 198359 - DNA, 578 bp, Homo sapiens
  Payload ID: 19141
  Gene Name: URI1, prefoldin-like chaperone
  ENST ID: ENST00000576442
  CDS Start-End: 212-578
aaatctgtaaagccaatgttctagttttcagatacactgatttttgtagctctgtgcatagctctgttttttcatgagtagttatctgttttcatgacaggtggtcactaactgccaagagagaatccagcattggaagaaggtagataatgactataatgcccttcgagaaagactcagcaccttgcctgataaattgtcttataatataatggtaccatttggcccttttgccttcatgccaggaaaacttgtccatactaatgaagtcactgttttactgggggacaactggtttgcaaagtgctcagcaaagcaggctgtaggtttagttgagcaccggaaagaacatgtaagaaaaacaatagatgacttaaaaaaagtgatgaaaaattttgaatccagagttgaattcacagaagatttgcagaaaatgagcgatgctgcaggtgatattgttgacatacgagaagaaattaaatgtgacttcgaatttaaagcaaaacaccgaattgctcataaaccgcattccaaaccaaaaacttcagatatttttgaagcagatattgcaaatgatg

SEQ ID NO: 198360 - DNA, 385 bp, Homo sapiens
  Payload ID: 19141
  Gene Name: URI1, prefoldin-like chaperone
  ENST ID: ENST00000585655
  CDS Start-End: 1-54
agggctctggcatatgcattgggcctctgtgaggttttaatgaatgaaggctgaagaaactccacagagatggtgactttcccccagcacagctcttgccctcaaggaagagacactcgaccaaacaggcaactggaaacaggatggcttcgtgggcgtgtgtgacttacacagggctgtgcactcagaagaatcccgtgactgacttaggctctgcagctgccatcttgaaattcttaataacttttgaatggtgttgggggtggggttggaggggatggtccacactttcattttgcactgggcactacaaattatgtgaccggctctgattaaaatgctacaagaactaacatgaaactggacacagaaaccagaccccaga

SEQ ID NO: 198361 - DNA, 6738 bp, Homo sapiens
  Payload ID: 19142
  Gene Name: uridine monophosphate synthetase
  Uniprot ID: P11172
  ENST ID: ENST00000232607
  CDS Start-End: 107-1549
ctgcagacgaggcaggcggaagaggcgggacttcgcgggtgacgtcatcggggcgccggaggcccggggcgcctgggaatttgaagcaaacaggcagcgcgcgacaatggcggtcgctcgtgcagctttggggccattggtgacgggtctgtacgacgtgcaggctttcaagtttggggacttcgtgctgaagagcgggctttcctcccccatctacatcgatctgcggggcatcgtgtctcgaccgcgtcttctgagtcaggttgcagatattttattccaaactgcccaaaatgcaggcatcagttttgacaccgtgtgtggagtgccttatacagctttgccattggctacagttatctgttcaaccaatcaaattccaatgcttattagaaggaaagaaacaaaggattatggaactaagcgtcttgtagaaggaactattaatccaggagaaacctgtttaatcattgaagatgttgtcaccagtggatctagtgttttggaaactgttgaggttcttcagaaggagggcttgaaggtcactgatgccatagtgctgttggacagagagcagggaggcaaggacaagttgcaggcgcacgggatccgcctccactcagtgtgtacattgtccaaaatgctggagattctcgagcagcagaaaaaagttgatgctgagacagttgggagagtgaagaggtttattcaggagaatgtctttgtggcagcgaatcataatggttctcccctttctataaaggaagcacccaaagaactcagcttcggtgcacgtgcagagctgcccaggatccacccagttgcatcgaagcttctcaggcttatgcaaaagaaggagaccaatctgtgtctatctgctgatgtttcactggccagagagctgttgcagctagcagatgctttaggacctagtatctgcatgctgaagactcatgtagatattttgaatgattttactctggatgtgatgaaggagttgataactctggcaaaatgccatgagttcttgatatttgaagaccggaagtttgcagatataggaaacacagtgaaaaagcagtatgaaggaggtatctttaaaatagcttcctgggcagatctagtaaatgctcacgtggtgccaggctcaggagttgtgaaaggcctgcaagaagtgggcctgcctttgcatcgggggtgcctccttattgcggaaatgagctccaccggctccctggccactggggactacactagagcagcggttagaatggctgaggagcactctgaatttgttgttggttttatttctggctcccgagtaagcatgaaaccagaatttcttcacttgactccaggagttcagttggaagcaggaggagataatcttggccaacagtacaatagcccacaagaagttattggcaaacgaggttccgatatcatcattgtaggtcgtggcataatctcagcagctgatcgtctggaagcagcagagatgtacagaaaagctgcttgggaagcgtatttgagtagacttggtgtttgagtgcttcagatacatttttcagatacaatgtgaagacattgaagatatgtggtcctcctgaaagtcactggctggaaataatccaattattcctgcttggattcttccacagggcctgtgtaagaatgggttctggagttctcatggtctttaggaaatattgagtaatttgtaatcaccgcattgatactataataagttcattcttaagcttgctttttttgagactggtgtttgttagacagccacagtcctgtctgggttagggtcttccacatttgaggatccttcctatctctccatgggactagactgctttgttattctatttattttttaatttttttcgagacaggatctcactctgttgcccaggatggagtgcagtggtgagatcacggctcattgcagcctcgacctcccaggtgatcctcccacctcagcttccagattagctggtgctataggcatgcaccaccacgtccatctaaatttctttattatttgtagagatgaggtcttgccatgttacccaggctggtctcaactcctgggctcaagcgatcctcctgcctcagtctctcaaagtgctgggattacaggtgtgagccactgtgcccagcctaattgcagtaagacaaaaattctagggcaccaagaggctaaagtcagcacagcttttcttgtgtcctgtattctctgtctaatgtgttgcccaaataatacctaattgttagccattcccctccatctctggcctaaaagtgatagtccaggtatccacatgggctggttcccagaactgccattgctcactctccaaagaggggaaggtggggaaggggaaggtgactatagctcagctcctgagctagtatctggctgttatttcaacaaccggagttggggtttgggctcattttttcccctagccagcaattatggaccagtagtaacacaagtgacagcttcctgtgactgacttcacaattaggaggtctaagattccatttgggtatttgcttaaggatcccacataattgtcccaacggtcattagtagaggggaggtaagccttcattaataataaagagaaagcccacattcaaggtggtgtttgagcaggggcagggtgagggctgtcccggtgctcattgcaccagcacactcacattccttctcatttggggcccacctgcaggaagtggcacaggatcagccatttccccacccttgtcagctgatggcccactgttctttaatgactcagaggaatgcctaggatttttttttttttttgagacagaatctcactgtcgcccaggctggagttcagtggcacgatctcggctcactgcaacttctgcctctctggttcaagcagttctcctgcctcagcctcccgagtagctgggactacaagcctaggatttttaactcaggtttttattatattccctcctgaagtttttacttcaagagcttctgctctaaagtccaatttgggcttcatgtccccagtgctgcatctccagggaaatgctgtctgtgggagagaccaactctcaaggaagaagtggccacagaaggagcaggaagggagttggccctcagggctactctggggaagccaaaagtcatgaaggggagaagaattttctgacaaaaacttgcaggaatctcttaggtgtcttcagtgttggagtgatatgttgagaggcctttggagtgatgtgctgaggtctcaggcgcccacctccctggctgtcacttccatgtgtcagtggttctcccactttagcaggtatcagagtcacctggagtcttgtcaaaacaggtaccagccccacccgcagcgtttctgactctgggtagctctgggatggggcttgagaatttgcgtttccaaaaaggtcccaggtgatgctgcggttgcctgcgcagggactggactttgagaaccacttcactggttattcacatttctgcctctgcagtgagacagccttgaggtctgcctcctgctaagagtcacatgctcctgtcctttagaaatgtgggctcctgccatctccaggacgcaggcactgttcctgttgatgaaccctatttcacaggacccctgctaaggtgatttgaggggaaatgagaggaggctcaaataatcacccagcccctgccacttactgaaagtgtaggtccttgtgccccacaccatcagagtttctgcgttagcagatttgtggtttgcccagcagcctgggcgtgtgcatttctaatgggtgcctcaagtgatctgtttctgatttgtatttctattgtgaagagtcagcccagtactgcaggcctcttacctaagcagaatcccagtctggcatcaaagctttagaggacaagttgattcaggcagagaagaacttgggctatacaagcgctgttcttcagcattgaagtattttggaggcattagatagtttaaccctttctcagtcaaggaatatttacagaacatgatctctgggcattgtaactcctggtcttagtggggaatatagggaccccatgtctccatggggtgcacagaatgtctgtgagactgatggagtggagaacgccatcccccagcctctccagctactcgaggcattctgtagaacataagcccatagattgtgtgtgtgtgtgtgtgtgtgtgtgtgtgtgtgtgtgtgtgcatgcgcgcgcgtgcgcactggaggaacctaagaaactatttggtgcacttcctcttattttagagctcccaaagtgtagctccagaatcgtaaagggatatgctcagtctcacagccagcctgtggatctcagtcccaacactcacccttgtgctactgagtcagctctaagaaaatctgccaaaagtaggccgagggctggttttttgttttgttttgtttgtttgatacagggtcttcactctgttgcccaggctggagtatatcatggctcactgcaaccttgacttgggctcaagcgatccgctcaagtagctggaactactctcaagtagctctcaagagcctctcgagtggctggaactacaggcgtgcaccaccacagctggttaatttttaaaattttttgtagagacggtggaggaggttctcactgtgactcagtgtgtgcccgacagcagagcccacaccactccagttgcagtggttgccatctgggtcatcagacctggctgtcaggggtgcagccacaggagagccaacagcagagggtgctggccgctgagctagctgctaatgctggcctgggtgcagttctcatccaaagtacccggtgggtgggagtcactcagtaccagttccgagcctgaacccaaactctcgtgtttctgctcacccctctctggcttctgccaccacatgggaagaatatgccctggttagcccatggcttctgaagagcaagagaaagtagagcagagcctactccagcctcccccgtccaatgtatgaaagccccagctgatctgtaagcctgggagcgtgataaatgcttagtagtgcatgccatggagttccagggtggtttattacacggcaatatctagctaaatacatttaacttgctgcagctctctggatccagcctggttaccaggaagacaaaaactgggctccaccaggaaccagtcttctgccttcccaaccatcacctctggctgcatcagcgatctctcccagcgaaatagctgcttggtcttgtgtgaatcctgtactttaacacagtggaccaagtgtcagtcattgaaaatgaccatgagtaaccctgtggactctctgcagcttggttcctttgccccttaacaggtgggtatgaatcgtgtcttcagtgccagggctgaatgagaaagggcattcctttttgaaggaatctgatactaaacacaaagcatgagaaaaatcaggacttgttggagttatatttttaaaatatatattttaacagttatatatattagatataatatataatagtatatataaataatactatattgcccaggctggtctcgaactccttagctcaagtgatcctcctgccttggcttcccaaagtgctaggattacaggtgtgagccactgctcccggcctgttggagttctttacatttattttataatcaatgctgttttattaaatgcggattttattttggattacaggatgtagaatgccatatttttcttagatcatagggcctttcacatttgtaatttggccttgtatgagttaccctgcaatccctttgttttccccataacccttccaaaggaaggccgcaatagaaatacaaagagaaacaaaataattagaatattttttaacttctaaagttcaaggttttggcataagtctggtttagaagcacatttgcctagccctttccttcccaccaagggggaaagtcttcctctagacaagaggcagagggctcctcagagtcagatcctggtgtgggctctcacgtgctgctgctgaatcccagggaaggagggaggaagggcagttgacacccaaaataagggtggggaactgtcagcagaggaggtctgtgtcatgtttttcagcgctggggttggggggagcccaggagagcaggaagatccagagatccctcgccccagctcggccatgtgtgtctgggacagagcctgaggtggcctgagcttcctgtggctccagagtaacattatagagaagctgaattctcctgtttttctgaaaagggcatgggagttagctgagaagcagacctggtgggcctgagagtctcaatcgtcaggtaaggacagtcagtgggaagtggacgggccgcacaaccaaggttctcatgaggacaaccatgtcttcgggggtgcccttgtgcacagacagctccatagtcctgcctccaatgtcccaacactgcattgtctccctgcacttagcagccctgcagggtgagacttggggaggatcctgaaatgattgtatttaacaagacatgctgtccttgtttacctggaacctagcaatgttgttttctgccacaacttgaatagatacttgaagcagagatgatgttgagttaaaaaaaatatatacataaaaatatgggttcttttcaacctgaatagatggcctaaaaattcaaa

SEQ ID NO: 198362 - DNA, 2001 bp, Homo sapiens
  Payload ID: 19142
  Gene Name: uridine monophosphate synthetase
  ENST ID: ENST00000462091
  CDS Start-End: 40-213
ggcgcctgggaatttgaagcaaacaggcagcgcgcgacaatggcggtcgctcgtgcagctttggggccattggtgacgggtctgtacgacgtgcaggctttcaagtttggggacttcgtgctgaagagcgggctttcctcccccatctacatcgatctgcggggcatcgtgtctcgaccgcgtcttctgagtcaggaactaagcgtcttgtagaaggaactattaatccaggagaaacctgtttaatcattgaagatgttgtcaccagtggatctagtgttttggaaactgttgaggttcttcagaaggagggcttgaaggtcactgatgccatagtgctgttggacagagagcagggaggcaaggacaagttgcaggcgcacgggatccgcctccactcagtgtgtacattgtccaaaatgctggagattctcgagcagcagaaaaaagttgatgctgagacagttgggagagtgaagaggtttattcaggagaatgtctttgtggcagcgaatcataatggttctcccctttctataaaggaagcacccaaagaactcagcttcggtgcacgtgcagagctgcccaggatccacccagttgcatcgaagcttctcaggcttatgcaaaagaaggagaccaatctgtgtctatctgctgatgtttcactggccagagagctgttgcagctagcagatgctttaggacctagtatctgcatgctgaagactcatgtagatattttgaatgattttactctggatgtgatgaaggagttgataactctggcaaaatgccatgagttcttgatatttgaagaccggaagtttgcagatataggaaacacagtgaaaaagcagtatgaaggaggtatctttaaaatagcttcctgggcagatctagtaaatgctcacgtggtgccaggctcaggagttgtgaaaggcctgcaagaagtgggcctgcctttgcatcgggggtgcctccttattgcggaaatgagctccaccggctccctggccactggggactacactagagcagcggttagaatggctgaggagcactctgaatttgttgttggttttatttctggctcccgagtaagcatgaaaccagaatttcttcacttgactccaggagttcagttggaagcaggaggagataatcttggccaacagtacaatagcccacaagaagttattggcaaacgaggttccgatatcatcattgtaggtcgtggcataatctcagcagctgatcgtctggaagcagcagagatgtacagaaaagctgcttgggaagcgtatttgagtagacttggtgtttgagtgcttcagatacatttttcagatacaatgtgaagacattgaagatatgtggtcctcctgaaagtcactggctggaaataatccaattattcctgcttggattcttccacagggcctgtgtaagaatgggttctggagttctcatggtctttaggaaatattgagtaatttgtaatcaccgcattgatactataataagttcattcttaagcttgctttttttgagactggtgtttgttagacagccacagtcctgtctgggttagggtcttccacatttgaggatccttcctatctctccatgggactagactgctttgttattctatttattttttaatttttttcgagacaggatctcactctgttgcccaggatggagtgcagtggtgagatcacggctcattgcagcctcgacctcccaggtgatcctcccacctcagcttccagattagctggtgctataggcatgcaccaccacgtccatctaaatttctttattatttgtagagatgaggtcttgccatgttacccaggctggtctcaactcctgggctcaagcgatcctcctgcctcagtctctcaaagtgctgggattacaggtgtgagccactgtgcccagcctaattgcagtaagacaaaaattctagggcaccaagaggctaaagtcagc

SEQ ID NO: 198363 - DNA, 1691 bp, Homo sapiens
  Payload ID: 19142
  Gene Name: uridine monophosphate synthetase
  ENST ID: ENST00000497791
  CDS Start-End: 21-194
caaacaggcagcgcgcgacaatggcggtcgctcgtgcagctttggggccattggtgacgggtctgtacgacgtgcaggctttcaagtttggggacttcgtgctgaagagcgggctttcctcccccatctacatcgatctgcggggcatcgtgtctcgaccgcgtcttctgagtcaggaactaagcgtcttgtagaaggaactattaatccaggagaaacctgtttaatcattgaagatgttgtcaccagtggatctagtgttttggaaactgttgaggttcttcagaaggagggcttgaaggtcactgatgccatagtgctgttggacagagagcagggaggcaaggacaagttgcaggcgcacgggatccgcctccactcagtgtgtacattgtccaaaatgctggagattctcgagcagcagaaaaaagttgatgctgagacagttgggagagtgaagaggtttattcaggagaatgtctttgtggcagcgaatcataatggttctcccctttctataaaggaagcacccaaagaactcagcttcggtgcacgtgcagagctgcccaggatccacccagttgcatcgaagcttctcaggcttatgcaaaagaaggagaccaatctgtgtctatctgctgatgtttcactggccagagagctgttgcagctagcagatgctttaggacctagtatctgcatgctgaagactcatgtagatattttgaatgattttactctggatgtgatgaaggagttgataactctggcaaaatgccatgagttcttgatatttgaagaccggaagtttgcagatataggaaacacagtgaaaaagcagtatgaaggagataatcttggccaacagtacaatagcccacaagaagttattggcaaacgaggttccgatatcatcattgtaggtcgtggcataatctcagcagctgatcgtctggaagcagcagagatgtacagaaaagctgcttgggaagcgtatttgagtagacttggtgtttgagtgcttcagatacatttttcagatacaatgtgaagacattgaagatatgtggtcctcctgaaagtcactggctggaaataatccaattattcctgcttggattcttccacagggcctgtgtaagaatgggttctggagttctcatggtctttaggaaatattgagtaatttgtaatcaccgcattgatactataataagttcattcttaagcttgctttttttgagactggtgtttgttagacagccacagtcctgtctgggttagggtcttccacatttgaggatccttcctatctctccatgggactagactgctttgttattctatttattttttaatttttttcgagacaggatctcactctgttgcccaggatggagtgcagtggtgagatcacggctcattgcagcctcgacctcccaggtgatcctcccacctcagcttccagattagctggtgctataggcatgcaccaccacgtccatctaaatttctttattatttgtagagatgaggtcttgccatgttacccaggctggtctcaactcctgggctcaagcgatcctcctgcctcagtctctcaaagtgctgggattacaggtgtgagccactgtgcccagcctaattgcagtaagacaaaaattctagggcaccaagaggctaaagtcagc

SEQ ID NO: 198364 - DNA, 2242 bp, Homo sapiens
  Payload ID: 19142
  Gene Name: uridine monophosphate synthetase
  ENST ID: ENST00000467167
  CDS Start-End: 28-228
tttgaagcaaacaggcagcgcgcgacaatggcggtcgctcgtgcagctttggggccattggtgacgggtctgtacgacgtgcaggctttcaagtttggggacttcgtgctgaagagcgggctttcctcccccatctacatcgatctgcggggcatcgtgtctcgaccgcgtcttctgagtcagatgggatctctcttacgtcacccaggctggagtgcagctctgtgatcatagctcactgcagcctggaactcctgggcttaagagatcttcttgcctcgggttgcagatattttattccaaactgcccaaaatgcaggcatcagttttgacaccgtgtgtggagtgccttatacagctttgccattggctacagttatctgttcaaccaatcaaattccaatgcttattagaaggaaagaaacaaaggattatggaactaagcgtcttgtagaaggaactattaatccaggagaaacctgtttaatcattgaagatgttgtcaccagtggatctagtgttttggaaactgttgaggttcttcagaaggagggcttgaaggtcactgatgccatagtgctgttggacagagagcagggaggcaaggacaagttgcaggcgcacgggatccgcctccactcagtgtgtacattgtccaaaatgctggagattctcgagcagcagaaaaaagttgatgctgagacagttgggagagtgaagaggtttattcaggagaatgtctttgtggcagcgaatcataatggttctcccctttctataaaggaagcacccaaagaactcagcttcggtgcacgtgcagagctgcccaggatccacccagttgcatcgaagcttctcaggcttatgcaaaagaaggagaccaatctgtgtctatctgctgatgtttcactggccagagagctgttgcagctagcagatgctttaggacctagtatctgcatgctgaagactcatgtagatattttgaatgattttactctggatgtgatgaaggagttgataactctggcaaaatgccatgagttcttgatatttgaagaccggaagtttgcagatataggaaacacagtgaaaaagcagtatgaaggaggtatctttaaaatagcttcctgggcagatctagtaaatgctcacgtggtgccaggctcaggagttgtgaaaggcctgcaagaagtgggcctgcctttgcatcgggggtgcctccttattgcggaaatgagctccaccggctccctggccactggggactacactagagcagcggttagaatggctgaggagcactctgaatttgttgttggttttatttctggctcccgagtaagcatgaaaccagaatttcttcacttgactccaggagttcagttggaagcaggaggagataatcttggccaacagtacaatagcccacaagaagttattggcaaacgaggttccgatatcatcattgtaggtcgtggcataatctcagcagctgatcgtctggaagcagcagagatgtacagaaaagctgcttgggaagcgtatttgagtagacttggtgtttgagtgcttcagatacatttttcagatacaatgtgaagacattgaagatatgtggtcctcctgaaagtcactggctggaaataatccaattattcctgcttggattcttccacagggcctgtgtaagaatgggttctggagttctcatggtctttaggaaatattgagtaatttgtaatcaccgcattgatactataataagttcattcttaagcttgctttttttgagactggtgtttgttagacagccacagtcctgtctgggttagggtcttccacatttgaggatccttcctatctctccatgggactagactgctttgttattctatttattttttaatttttttcgagacaggatctcactctgttgcccaggatggagtgcagtggtgagatcacggctcattgcagcctcgacctcccaggtgatcctcccacctcagcttccagattagctggtgctataggcatgcaccaccacgtccatctaaatttctttattatttgtagagatgaggtcttgccatgttacccaggctggtctcaactcctgggctcaagcgatcctcctgcctcagtctctcaaagtgctgggattacaggtgtgagccactgtgcccagcctaattgcagtaagacaaaaattctagggcaccaagaggctaaagtcagc

SEQ ID NO: 198365 - DNA, 1789 bp, Homo sapiens
  Payload ID: 19142
  Gene Name: uridine monophosphate synthetase
  ENST ID: ENST00000474588
  CDS Start-End: 21-449
caaacaggcagcgcgcgacaatggcggtcgctcgtgcagctttggggccattggtgacgggtctgtacgacgtgcaggctttcaagtttggggacttcgtgctgaagagcgggctttcctcccccatctacatcgatctgcggggcatcgtgtctcgaccgcgtcttctgagtcaggttgcagatattttattccaaactgcccaaaatgcaggcatcagttttgacaccgtgtgtggagtgccttatacagctttgccattggctacagttatctgttcaaccaatcaaattccaatgcttattagaaggaaagaaacaaaggattatggaagcacccaaagaactcagcttcggtgcacgtgcagagctgcccaggatccacccagttgcatcgaagcttctcaggcttatgcaaaagaaggagaccaatctgtgtctatctgctgatgtttcactggccagagagctgttgcagctagcagatgctttaggacctagtatctgcatgctgaagactcatgtagatattttgaatgattttactctggatgtgatgaaggagttgataactctggcaaaatgccatgagttcttgatatttgaagaccggaagtttgcagatataggaaacacagtgaaaaagcagtatgaaggaggtatctttaaaatagcttcctgggcagatctagtaaatgctcacgtggtgccaggctcaggagttgtgaaaggcctgcaagaagtgggcctgcctttgcatcgggggtgcctccttattgcggaaatgagctccaccggctccctggccactggggactacactagagcagcggttagaatggctgaggagcactctgaatttgttgttggttttatttctggctcccgagtaagcatgaaaccagaatttcttcacttgactccaggagttcagttggaagcaggaggagataatcttggccaacagtacaatagcccacaagaagttattggcaaacgaggttccgatatcatcattgtaggtcgtggcataatctcagcagctgatcgtctggaagcagcagagatgtacagaaaagctgcttgggaagcgtatttgagtagacttggtgtttgagtgcttcagatacatttttcagatacaatgtgaagacattgaagatatgtggtcctcctgaaagtcactggctggaaataatccaattattcctgcttggattcttccacagggcctgtgtaagaatgggttctggagttctcatggtctttaggaaatattgagtaatttgtaatcaccgcattgatactataataagttcattcttaagcttgctttttttgagactggtgtttgttagacagccacagtcctgtctgggttagggtcttccacatttgaggatccttcctatctctccatgggactagactgctttgttattctatttattttttaatttttttcgagacaggatctcactctgttgcccaggatggagtgcagtggtgagatcacggctcattgcagcctcgacctcccaggtgatcctcccacctcagcttccagattagctggtgctataggcatgcaccaccacgtccatctaaatttctttattatttgtagagatgaggtcttgccatgttacccaggctggtctcaactcctgggctcaagcgatcctcctgcctcagtctctcaaagtgctgggattacaggtgtgagccactgtgcccagcctaattgcagtaagacaaaaattctagggcaccaagaggctaaagtcagc

SEQ ID NO: 198366 - DNA, 2081 bp, Homo sapiens
  Payload ID: 19142
  Gene Name: uridine monophosphate synthetase
  ENST ID: ENST00000460034
  CDS Start-End: 21-221
caaacaggcagcgcgcgacaatggcggtcgctcgtgcagctttggggccattggtgacgggtctgtacgacgtgcaggctttcaagtttggggacttcgtgctgaagagcgggctttcctcccccatctacatcgatctgcggggcatcgtgtctcgaccgcgtcttctgagtcagatgggatctctcttacgtcacccaggctggagtgcagctctgtgatcatagctcactgcagcctggaactcctgggcttaagagatcttcttgcctcgggaactaagcgtcttgtagaaggaactattaatccaggagaaacctgtttaatcattgaagatgttgtcaccagtggatctagtgttttggaaactgttgaggttcttcagaaggagggcttgaaggtcactgatgccatagtgctgttggacagagagcagggaggcaaggacaagttgcaggcgcacgggatccgcctccactcagtgtgtacattgtccaaaatgctggagattctcgagcagcagaaaaaagttgatgctgagacagttgggagagtgaagaggtttattcaggagaatgtctttgtggcagcgaatcataatggttctcccctttctataaaggaagcacccaaagaactcagcttcggtgcacgtgcagagctgcccaggatccacccagttgcatcgaagcttctcaggcttatgcaaaagaaggagaccaatctgtgtctatctgctgatgtttcactggccagagagctgttgcagctagcagatgctttaggacctagtatctgcatgctgaagactcatgtagatattttgaatgattttactctggatgtgatgaaggagttgataactctggcaaaatgccatgagttcttgatatttgaagaccggaagtttgcagatataggaaacacagtgaaaaagcagtatgaaggaggtatctttaaaatagcttcctgggcagatctagtaaatgctcacgtggtgccaggctcaggagttgtgaaaggcctgcaagaagtgggcctgcctttgcatcgggggtgcctccttattgcggaaatgagctccaccggctccctggccactggggactacactagagcagcggttagaatggctgaggagcactctgaatttgttgttggttttatttctggctcccgagtaagcatgaaaccagaatttcttcacttgactccaggagttcagttggaagcaggaggagataatcttggccaacagtacaatagcccacaagaagttattggcaaacgaggttccgatatcatcattgtaggtcgtggcataatctcagcagctgatcgtctggaagcagcagagatgtacagaaaagctgcttgggaagcgtatttgagtagacttggtgtttgagtgcttcagatacatttttcagatacaatgtgaagacattgaagatatgtggtcctcctgaaagtcactggctggaaataatccaattattcctgcttggattcttccacagggcctgtgtaagaatgggttctggagttctcatggtctttaggaaatattgagtaatttgtaatcaccgcattgatactataataagttcattcttaagcttgctttttttgagactggtgtttgttagacagccacagtcctgtctgggttagggtcttccacatttgaggatccttcctatctctccatgggactagactgctttgttattctatttattttttaatttttttcgagacaggatctcactctgttgcccaggatggagtgcagtggtgagatcacggctcattgcagcctcgacctcccaggtgatcctcccacctcagcttccagattagctggtgctataggcatgcaccaccacgtccatctaaatttctttattatttgtagagatgaggtcttgccatgttacccaggctggtctcaactcctgggctcaagcgatcctcctgcctcagtctctcaaagtgctgggattacaggtgtgagccactgtgcccagcctaattgcagtaagacaaaaattctagggcaccaagaggctaaagtcagc

SEQ ID NO: 198367 - DNA, 2340 bp, Homo sapiens
  Payload ID: 19142
  Gene Name: uridine monophosphate synthetase
  ENST ID: ENST00000479719
  CDS Start-End: 21-1049
caaacaggcagcgcgcgacaatggcggtcgctcgtgcagctttggggccattggtgacgggtctgtacgacgtgcaggctttcaagtttggggacttcgtgctgaagagcgggctttcctcccccatctacatcgatctgcggggcatcgtgtctcgaccgcgtcttctgagtcaggttgcagatattttattccaaactgcccaaaatgcaggcatcagttttgacaccgtgtgtggagtgccttatacagctttgccattggctacagttatctgttcaaccaatcaaattccaatgcttattagaaggaaagaaacaaaggattatggaactaagcgtcttgtagaaggaactattaatccaggagaaacctgtttaatcattgaagatgttgtcaccagtggatctagtgttttggaaactgttgaggttcttcagaaggagggcttgaaggtcactgatgccatagtgctgttggacagagagcagggaggcaaggacaagttgcaggcgcacgggatccgcctccactcagtgtgtacattgtccaaaatgctggagattctcgagcagcagaaaaaagttgatgctgagacagttgggagagtgaagaggtttattcaggagaatgtctttgtggcagcgaatcataatggttctcccctttctataaaggaagcacccaaagaactcagcttcggtgcacgtgcagagctgcccaggatccacccagttgcatcgaagcttctcaggcttatgcaaaagaaggagaccaatctgtgtctatctgctgatgtttcactggccagagagctgttgcagctagcagatgctttaggacctagtatctgcatgctgaagactcatgtagatattttgaatgattttactctggatgtgatgaaggagttgataactctggcaaaatgccatgagttcttgatatttgaagaccggaagtttgcagatataggaaacacagtgaaaaagcagtatgaaggtaagtgtattattcaggaatctgcaagaatcagaaatccagcttaaactgaagaagaaaaaggaaatgctcatgtcattgaaagtccattcatagagcaggctgtcaagcgtggttggatccaggagctcaagtgatatcttcatgacttgctttctctccatctctcagctctgctttcttctctgttgacttctttctcaggaggtatctttaaaatagcttcctgggcagatctagtaaatgctcacgtggtgccaggctcaggagttgtgaaaggcctgcaagaagtgggcctgcctttgcatcgggggtgcctccttattgcggaaatgagctccaccggctccctggccactggggactacactagagcagcggttagaatggctgaggagcactctgaatttgttgttggttttatttctggctcccgagtaagcatgaaaccagaatttcttcacttgactccaggagttcagttggaagcaggaggagataatcttggccaacagtacaatagcccacaagaagttattggcaaacgaggttccgatatcatcattgtaggtcgtggcataatctcagcagctgatcgtctggaagcagcagagatgtacagaaaagctgcttgggaagcgtatttgagtagacttggtgtttgagtgcttcagatacatttttcagatacaatgtgaagacattgaagatatgtggtcctcctgaaagtcactggctggaaataatccaattattcctgcttggattcttccacagggcctgtgtaagaatgggttctggagttctcatggtctttaggaaatattgagtaatttgtaatcaccgcattgatactataataagttcattcttaagcttgctttttttgagactggtgtttgttagacagccacagtcctgtctgggttagggtcttccacatttgaggatccttcctatctctccatgggactagactgctttgttattctatttattttttaatttttttcgagacaggatctcactctgttgcccaggatggagtgcagtggtgagatcacggctcattgcagcctcgacctcccaggtgatcctcccacctcagcttccagattagctggtgctataggcatgcaccaccacgtccatctaaatttctttattatttgtagagatgaggtcttgccatgttacccaggctggtctcaactcctgggctcaagcgatcctcctgcctcagtctctcaaagtgctgggattacaggtgtgagccactgtgcccagcctaattgcagtaagacaaaaattctagggcaccaagaggctaaagtcagc

SEQ ID NO: 198368 - DNA, 228 bp, Homo sapiens
  Payload ID: 19142
  Gene Name: uridine monophosphate synthetase
  ENST ID: ENST00000628619
  CDS Start-End: 28-228
tttgaagcaaacaggcagcgcgcgacaatggcggtcgctcgtgcagctttggggccattggtgacgggtctgtacgacgtgcaggctttcaagtttggggacttcgtgctgaagagcgggctttcctcccccatctacatcgatctgcggggcatcgtgtctcgaccgcgtcttctgagtcagatgggatctctcttacgtcacccaggctggagtgcagctctgtga

SEQ ID NO: 198369 - DNA, 1932 bp, Homo sapiens
  Payload ID: 19143
  Gene Name: uridine phosphorylase 1
  Uniprot ID: Q16831
  ENST ID: ENST00000331803
  CDS Start-End: 624-1556
gcgggaactcccaggatcaggaaggtcccagagaaactccccaggggggaagccgaggccgtccagagagatccagggtacacacagtgacagtgccagctccacattcccgaccaccgggccagggctggttccacgctgtcatttctctccgctggccccagccgcggggccaccgccagacagacagaccggggatcctgcctggcggcgtgaccttgggttagtcctagagccgcttctagcccggtttcctccgccccaggttaggaccacgtggggcggggccgctcgcagactccatatgagattcacctcgcaggtggttccctcattcgagtgctccggcgcacagacccgcgccccgccgtctgcgagcctcccgagagccgtcccttcgtccggccctggagcattgcgtttgtcgccggtgtcgcagtgcgaggatggcgccgcgggtgtagcggctctctgcgcaggccgagtgggcttggtgaggtgactcgcggtcgcgggtgactcgccggcaggacactgcctggaacgcctggagcgcctcccactgcagacgtctgtccgcctccagccgctctcctctgacgggtcctgcctcagttggcggaatggcggccacgggagccaatgcagagaaagctgaaagtcacaatgattgccccgtcagacttttaaatccaaacatagcaaaaatgaaagaagatattctctatcatttcaatctcaccactagcagacacaatttcccagccttgtttggagatgtgaagtttgtgtgtgttggtggaagcccctcccggatgaaagccttcatcaggtgcgttggtgcagagctgggccttgactgcccaggtagagactatcccaacatctgtgcgggaactgaccgctatgccatgtataaagtaggaccggtgctgtctgtcagtcatggtatgggcattccttctatctcaatcatgttgcatgagctcataaagctgctgtactatgcccggtgctccaacgtcactatcatccgcattggcacttctggtgggataggtctggagcccggcactgtggtcataacagagcaggcagtggatacctgcttcaaggcagagtttgagcagattgtcctggggaagcgggtcatccggaaaacggaccttaacaagaagctggtgcaggagctgttgctgtgttctgcagagctgagcgagttcaccacagtggtggggaacaccatgtgcaccttggacttctatgaagggcaaggccgtctggatggggctctctgctcctacacggagaaggacaagcaggcgtatctggaggcagcctatgcagccggcgtccgcaatatcgagatggagtcctcggtgtttgccgccatgtgcagcgcctgcggcctccaagcggccgtggtgtgtgtcaccctcctgaaccgcctggaaggggaccagatcagcagccctcgcaatgtgctcagcgagtaccagcagaggccgcagcggctggtgagctacttcatcaagaagaaactgagcaaggcctgagcgctgccctgcacctccgcagacctgctgtgatgacttgccattaaaagcattgtccaaaatcccctgttgtgtggactttgagcacactttacacaagaatctagaaaatcagatcgcgattaagagacagagaatcttggattaaccgcatgggagatgttcttccttttgaagtttcattggagcattttcaatgatgttagcctgatttggggtttcttcaagaacattctaccaaatttttgtactatttctagggaaatttttcagactttaaaattctaatggtagtcagatttcatgtcactaaacaagaaatctgacaatagtgccaggaaactaatttcctgatacattaaaaaaattccatgca

SEQ ID NO: 198370 - DNA, 955 bp, Homo sapiens
  Payload ID: 19143
  Gene Name: uridine phosphorylase 1
  Uniprot ID: Q16831
  ENST ID: ENST00000395560
  CDS Start-End: 353-463
attcgagtgctccggcgcacagacccgcgccccgccgtctgcgagcctcccgagagccgtcccttcgtccggccctggagcattgcgtttgtcgccggtgtcgcagtgcgaggatggcgccgcgggtgtagcggctctctgcgcaggccgagtgggcccagagaagcgaggaactccgcagctcgtcgacacgtctcgtctcctgtcccaattcagggcttggtgaggtgactcgcggtcgcgggtgactcgccggcaggacactgcctggaacgcctggagcgcctcccactgcagacgtctgtccgcctccagccgctctcctctgacgggtcctgcctcagttggcggaatggcggccacgggagccaatgcagagaaagctgaaagtcacaagtctggagcccggcactgtggtcataacagagcaggcagtggatacctgcttcaaggcagagtttgagcagattgtcctggggaagcgggtcatccggaaaacggaccttaacaagaagctggtgcaggagctgttgctgtgttctgcagagctgagcgagttcaccacagtggtggggaacaccatgtgcaccttggacttctatgaagggcaaggccgtctggatggggctctctgctcctacacggagaaggacaagcaggcgtatctggaggcagcctatgcagccggcgtccgcaatatcgagatggagtcctcggtgtttgccgccatgtgcagcgcctgcggcctccaagcggccgtggtgtgtgtcaccctcctgaaccgcctggaaggggaccagatcagcagccctcgcaatgtgctcagcgagtaccagcagaggccgcagcggctggtgagctacttcatcaagaagaaactgagcaaggcctgagcgctgccctgcacctccgcagacctgctgtgatgacttgccattaaaagcattgtccaaaa

SEQ ID NO: 198371 - DNA, 1375 bp, Homo sapiens
  Payload ID: 19143
  Gene Name: uridine phosphorylase 1
  Uniprot ID: Q16831
  ENST ID: ENST00000395564
  CDS Start-End: 381-1313
tgagattcacctcgcaggtggttccctcattcgagtgctccggcgcacagacccgcgccccgccgtctgcgagcctcccgagagccgtcccttcgtccggccctggagcattgcgtttgtcgccggtgtcgcagtgcgaggatggcgccgcgggtgtagcggctctctgcgcaggccgagtgggcccagagaagcgaggaactccgcagctcgtcgacacgtctcgtctcctgtcccaattcagggcttggtgaggtgactcgcggtcgcgggtgactcgccggcaggacactgcctggaacgcctggagcgcctcccactgcagacgtctgtccgcctccagccgctctcctctgacgggtcctgcctcagttggcggaatggcggccacgggagccaatgcagagaaagctgaaagtcacaatgattgccccgtcagacttttaaatccaaacatagcaaaaatgaaagaagatattctctatcatttcaatctcaccactagcagacacaatttcccagccttgtttggagatgtgaagtttgtgtgtgttggtggaagcccctcccggatgaaagccttcatcaggtgcgttggtgcagagctgggccttgactgcccaggtagagactatcccaacatctgtgcgggaactgaccgctatgccatgtataaagtaggaccggtgctgtctgtcagtcatggtatgggcattccttctatctcaatcatgttgcatgagctcataaagctgctgtactatgcccggtgctccaacgtcactatcatccgcattggcacttctggtgggataggtctggagcccggcactgtggtcataacagagcaggcagtggatacctgcttcaaggcagagtttgagcagattgtcctggggaagcgggtcatccggaaaacggaccttaacaagaagctggtgcaggagctgttgctgtgttctgcagagctgagcgagttcaccacagtggtggggaacaccatgtgcaccttggacttctatgaagggcaaggccgtctggatggggctctctgctcctacacggagaaggacaagcaggcgtatctggaggcagcctatgcagccggcgtccgcaatatcgagatggagtcctcggtgtttgccgccatgtgcagcgcctgcggcctccaagcggccgtggtgtgtgtcaccctcctgaaccgcctggaaggggaccagatcagcagccctcgcaatgtgctcagcgagtaccagcagaggccgcagcggctggtgagctacttcatcaagaagaaactgagcaaggcctgagcgctgccctgcacctccgcagacctgctgtgatgacttgccattaaaagcattgtccaaaa

SEQ ID NO: 198372 - DNA, 682 bp, Homo sapiens
  Payload ID: 19143
  Gene Name: uridine phosphorylase 1
  ENST ID: ENST00000432131
  CDS Start-End: 594-682
caggaaggtcccagagaaactccccaggggggaagccgaggccgtccagagagatccagggtacacacagtgacagtgccagctccacattcccgaccaccgggccagggctggttccacgctgtcatttctctccgctggccccagccgcggggccaccgccagacagacagaccggggatcctgcctggcggcgtgaccttgggttagtcctagagccgcttctagcccggtttcctccgccccagtgctccggcgcacagacccgcgccccgccgtctgcgagcctcccgagagccgtcccttcgtccggccctggagcattgcgtttgtcgccggtgtcgcagtgcgaggatggcgccgcgggtgtagcggctctctgcgcaggccgagtgggcccagagaagcgaggaactccgcagctcgtcgacacgtctcgtctcctgtcccaattcagggcttggtgaggtgactcgcggtcgcgggtgactcgccggcaggacactgcctggaacgcctggagcgcctcccactgcagacgtctgtccgcctccagccgctctcctctgacgggtcctgcctcagttggcggaatggcggccacgggagccaatgcagagaaagctgaaagtcacaatgattgccccgtcagacttttaaatccaaacatagcaaaaatgaa

SEQ ID NO: 198373 - DNA, 918 bp, Homo sapiens
  Payload ID: 19143
  Gene Name: uridine phosphorylase 1
  ENST ID: ENST00000436673
  CDS Start-End: 481-918
attcgagtgctccggcgcacagacccgcgccccgccgtctgcgagcctcccgagagccgtcccttcgtccggccctggagcattgcgtttgtcgccggtgtcgcagtgcgaggatggcgccgcgggtgtagcggctctctgcgcaggccgagtggggcggtgacggaggctctggtgcaccttggctgtgagctgcagaggagcagagagcggcccggcgcggctgcgcggggaggcgggcgcgcggccgggaggttctggggctggtgtgtgcggagcgagggcccagagaagcgaggaactccgcagctcgtcgacacgtctcgtctcctgtcccaattcagggcttggtgaggtgactcgcggtcgcgggtgactcgccggcaggacactgcctggaacgcctggagcgcctcccactgcagacgtctgtccgcctccagccgctctcctctgacgggtcctgcctcagttggcggaatggcggccacgggagccaatgcagagaaagctgaaagtcacaatgattgccccgtcagacttttaaatccaaacatagcaaaaatgaaagaagatattctctatcatttcaatctcaccactagcagacacaatttcccagccttgtttggagatgtgaagtttgtgtgtgttggtggaagcccctcccggatgaaagccttcatcaggtgcgttggtgcagagctgggccttgactgcccaggtagagactatcccaacatctgtgcgggaactgaccgctatgccatgtataaagtaggaccggtgctgtctgtcagtcatggtatgggcattccttctatctcaatcatgttgcatgagctcataaagctgctgtactatgcccggtgctccaacgtcactatcatccgcattggcacttctggtgggataggt

SEQ ID NO: 198374 - DNA, 869 bp, Homo sapiens
  Payload ID: 19143
  Gene Name: uridine phosphorylase 1
  ENST ID: ENST00000444999
  CDS Start-End: 336-593
cacagacccgcgccccgccgtctgcgagcctcccgagagccgtcccttcgtccggccctggagcattgcgtttgtcgccggtgtcgcagtgcgaggatggcgccgcgggtgtagcggctctctgcgcaggccgagtgggcccagagaagcgaggaactccgcagctcgtcgacacgtctcgtctcctgtcccaattcagggcttggtgaggtgactcgcggtcgcgggtgactcgccggcaggacactgcctggaacgcctggagcgcctcccactgcagacgtctgtccgcctccagccgctctcctctgacgggtcctgcctcagttggcggaatggcggccacgggagccaatgcagagaaagctgaaagtcacaatgattgccccgtcagacttttaaatccaaacatagcaaaaatgaaagaagatattctctatcatttcaatctcaccactagcagacacaatttcccagccttgtttggagatgtgaagtttgtgtgtgttggtggaagcccctcccggatgaaagccttcatcagcatggtatgggcattccttctatctcaatcatgttgcatgagctcataaagctgctgtactatgcccggtgctccaacgtcactatcatccgcattggcacttctggtgggataggtctggagcccggcactgtggtcataacagagcaggcagtggatacctgcttcaaggcagagtttgagcagattgtcctggggaagcgggtcatccggaaaacggaccttaacaagaagctggtgcaggagctgttgctgtgttctgcagagctgagcgagttcaccacagtggtggggaacaccatgtgcaccttggacttctatgaag

SEQ ID NO: 198375 - DNA, 864 bp, Homo sapiens
  Payload ID: 19143
  Gene Name: uridine phosphorylase 1
  ENST ID: ENST00000416681
  CDS Start-End: 433-864
ggctttgccccagcaagcgggaactcccaggatcaggaaggtcccagagaaactccccaggggggaagccgaggccgtccagagagatccagggtacacacagtgacagtgccagctccacattcccgaccaccgggccagggctggttccacgctgtcatttctctccgctggccccagccgcggggccaccgccagacagacagaccggggatcctgcctggcggcgtgaccttgggttagtcctagagccgcttctagcccggtttcctccgccccaggttaggaccacgtggggcttggtgaggtgactcgcggtcgcgggtgactcgccggcaggacactgcctggaacgcctggagcgcctcccactgcagacgtctgtccgcctccagccgctctcctctgacgggtcctgcctcagttggcggaatggcggccacgggagccaatgcagagaaagctgaaagtcacaatgattgccccgtcagacttttaaatccaaacatagcaaaaatgaaagaagatattctctatcatttcaatctcaccactagcagacacaatttcccagccttgtttggagatgtgaagtttgtgtgtgttggtggaagcccctcccggatgaaagccttcatcaggtgcgttggtgcagagctgggccttgactgcccaggtagagactatcccaacatctgtgcgggaactgaccgctatgccatgtataaagtaggaccggtgctgtctgtcagtcatggtatgggcattccttctatctcaatcatgttgcatgagctcataaagctgctgtactatgcccggtgctccaacgtcactatcatccgcattggcacttctggtggg

SEQ ID NO: 198376 - DNA, 1013 bp, Homo sapiens
  Payload ID: 19143
  Gene Name: uridine phosphorylase 1
  Uniprot ID: Q16831
  ENST ID: ENST00000457596
  CDS Start-End: 528-638
acagtgacagtgccagctccacattcccgaccaccgggccagggctggttccacgctgtcatttctctccgctggccccagccgcggggccaccgccagacagacagaccggggatcctgcctggcggcgtgaccttgggttagtcctagagccgcttctagcccggtttcctccgccccagtgctccggcgcacagacccgcgccccgccgtctgcgagcctcccgagagccgtcccttcgtccggccctggagcattgcgtttgtcgccggtgtcgcagtgcgaggatggcgccgcgggtgtagcggctctctgcgcaggccgagtgggcccagagaagcgaggaactccgcagctcgtcgacacgtctcgtctcctgtcccaattcagggcttggtgaggtgactcgcggtcgcgggtgactcgccggcaggacactgcctggaacgcctggagcgcctcccactgcagacgtctgtccgcctccagccgctctcctctgacgggtcctgcctcagttggcggaatggcggccacgggagccaatgcagagaaagctgaaagtcacaagtctggagcccggcactgtggtcataacagagcaggcagtggatacctgcttcaaggcagagtttgagcagattgtcctggggaagcgggtcatccggaaaacggaccttaacaagaagctggtgcaggagctgttgctgtgttctgcagagctgagcgagttcaccacagtggtggggaacaccatgtgcaccttggacttctatgaagggcaaggccgtctggatggggctctctgctcctacacggagaaggacaagcaggcgtatctggaggcagcctatgcagccggcgtccgcaatatcgagatggagtcctcggtgtttgccgccatgtgcagcgcctgcggcctccaagcggccgtggtgtgtgtcaccctcctgaaccgcctggaaggggaccagatcagcagccctcgcaatgtgctcagcgagtaccagca

SEQ ID NO: 198377 - DNA, 782 bp, Homo sapiens
  Payload ID: 19143
  Gene Name: uridine phosphorylase 1
  Uniprot ID: Q16831
  ENST ID: ENST00000417464
  CDS Start-End: 180-290
ggatggcgccgcgggtgtagcggctctctgcgcaggccgagtgggcttggtgaggtgactcgcggtcgcgggtgactcgccggcaggacactgcctggaacgcctggagcgcctcccactgcagacgtctgtccgcctccagccgctctcctctgacgggtcctgcctcagttggcggaatggcggccacgggagccaatgcagagaaagctgaaagtcacaagtctggagcccggcactgtggtcataacagagcaggcagtggatacctgcttcaaggcagagtttgagcagattgtcctggggaagcgggtcatccggaaaacggaccttaacaagaagctggtgcaggagctgttgctgtgttctgcagagctgagcgagttcaccacagtggtggggaacaccatgtgcaccttggacttctatgaagggcaaggccgtctggatggggctctctgctcctacacggagaaggacaagcaggcgtatctggaggcagcctatgcagccggcgtccgcaatatcgagatggagtcctcggtgtttgccgccatgtgcagcgcctgcggcctccaagcggccgtggtgtgtgtcaccctcctgaaccgcctggaaggggaccagatcagcagccctcgcaatgtgctcagcgagtaccagcagaggccgcagcggctggtgagctacttcatcaagaagaaactgagcaaggcctgagcgctgccctgcacctccgcagacctgctgtgatgacttgccattaaaagcattgtccaaaa

SEQ ID NO: 198378 - DNA, 974 bp, Homo sapiens
  Payload ID: 19143
  Gene Name: uridine phosphorylase 1
  ENST ID: ENST00000421046
  CDS Start-End: 329-844
agactccatatgagattcacctcgcaggtggttccctcattcgagtgctccggcgcacagacccgcgccccgccgtctgcgagcctcccgagagccgtcccttcgtccggccctggagcattgcgtttgtcgccggtgtcgcagtgcgaggatggcgccgcgggtgtagcggctctctgcgcaggccgagtgggcttggtgaggtgactcgcggtcgcgggtgactcgccggcaggacactgcctggaacgcctggagcgcctcccactgcagacgtctgtccgcctccagccgctctcctctgacgggtcctgcctcagttggcggaatggcggccacgggagccaatgcagagaaagctgaaagtcacaatgattgccccgtcagacttttaaatccaaacatagcaaaaatgaaagaagatattctctatcatttcaatctcaccactagcagacacaatttcccagccttgtttggagatgtgaagtttgtgtgtgttggtggaagcccctcccggatgaaagccttcatcaggtgcgttggtgcagagctgggccttgactgcccaggtagagactatcccaacatctgtgcgggaactgaccgctatgccatgtataaagtaggaccggtgctgtctgtcagtcatggtatgggcattccttctatctcaatcatgttgcatgagctcataaagctgctgtactatgcccggtgctccaacgtcactatcatccgcattggcacttctggtgggatagggattttgaagcaccttaggagaaaagacacaggaaaatcaaaggggggaagagagaggcgcagtacaaaactcagataagtgtccttaaattagcttaaaatgtccctatcctcaacagggacattttttttttgtttaaaaaacaaagatggttggccgggcgcggtggctcacacctgtaatcccagcacattgggaggccgaggcg

SEQ ID NO: 198379 - DNA, 2224 bp, Homo sapiens
  Payload ID: 19144
  Gene Name: uridine phosphorylase 2
  Uniprot ID: O95045
  ENST ID: ENST00000005756
  CDS Start-End: 195-1148
tatttgataggaaaatttaaaatgctaaaggaaaaattttcttagcaatttcacaggaaaacctaagttttaagagaggttatcattctgactgggaactgaactattatgactaggtctataatttaataacaagtcacaatatctctctttcttgacatcaatttaaggtgacttttcacatagtagagagaatggcttcagttatacctgcctccaataggtccatgagatctgacaggaatacatatgttggaaaaaggtttgttcacgttaaaaatccttacttggatttgatggatgaagacattctctatcacttggatttgggaacaaaaacacacaacctaccagcaatgtttggagatgtaaagtttgtctgtgtcggtgggagccccaacagaatgaaagcatttgcactgtttatgcacaaggagctcgggtttgaggaagctgaagaagacataaaagacatctgtgctgggacagacagatactgtatgtacaaaaccgggcctgtgctcgccatcagtcacggcatgggcatcccctccatttctattatgcttcatgaactcatcaaattactccaccatgcacggtgctgcgatgtcaccattattagaatcggtacatcagggggaatagggattgcaccagggactgttgtaataacggatatagctgtagactccttctttaagccccggtttgaacaggtcattttggacaacattgtcacccgaagtactgaactggacaaagaactgtctgaagaactgttcaactgtagcaaagaaatccccaacttcccaaccctcgttggacatacaatgtgtacctatgatttttatgaaggccaaggccgactagatggagcactgtgctccttttccagagaaaaaaagttagactacttgaagagagcatttaaagctggtgtcaggaatattgaaatggaatctacagtgtttgcagctatgtgtggactctgtggtctaaaagctgctgtggtctgtgtgacacttctcgacagactcgactgtgatcagatcaacttgcctcatgatgtcctggtggagtaccagcaacggcctcagctcctaatctccaacttcatcagacggcggcttggactttgtgactagacgtcctaactgggcagcccaaccctcccctgcaagtttgtagctcaagttgtaatgtgaaagtcatattttatttgtggcatttttatatagttctcatccacatgctaaatggaaagactttatgaaatccttctctcttaaaaaggaatttattgtaaaagaatactcacactaaattaaattcaaatttcattttagaataagttaactaaatcagtctaataattaaaattttaaaactcctggattatgacatttggagtttcatatgcagcattaattaagctcacatcaaaatagaccagccatttgcacatagttaccagtcactctgtttctgaaaccaatccagaaattcatgttagaacattgtcaggcacttctaggtattggacaagtgacagaaactgatcatccatattcaaaatatttacagaaaaaagtgtcagtgaaatgtaggtctatatggaaaagttaccattaggaaaatatggccatactgcttttttacccctgcactatttcagtgcaccacagaataggattcgagatttacatatgcctgtttgtgattttatctcagaatataacaactctggattacattttcctctcaactgaaaaccctcagtaatgcaaagaaaggccttcctttttcttcagaatcacaagtgactaaattgccttctagccattttttcttgtaaaaaaagtgttttgaggaggctgtattttttattccatttcaatattaaccaaataggctgagaaattcatagcaattgaattaagacttgagttcaagatgttaaaggaatccttttgtatgacttgtccagaccggcctattgccctacccgtttgattctctgggaggcatggtgctcctcctggctgcacatgctctctgtgaactgatcgcatcttgggttcttctcaatttgacatacttgggagtcggaatgactggatgggggatgggtagaggatgactggcacacttgtatagtatgtaatgttgtgtacatattatttatatggttgtggctcaaataaagtttaattccaacaca

SEQ ID NO: 198380 - DNA, 2435 bp, Homo sapiens
  Payload ID: 19144
  Gene Name: uridine phosphorylase 2
  Uniprot ID: O95045
  ENST ID: ENST00000605860
  CDS Start-End: 47-1171
ggccgcgcggcacgggtgagtgcccagggacttcaccagtgctgccatgctggccccaggctgtgagttggacccagaccaagaagtggtgaggacaaggcctgaagatgtgcctgcttccccttcaacttccaccatgattgtaagtgtcctgaggcctcccagccatgcttcctgtacagcctgtggaactgtgacttttcacatagtagagagaatggcttcagttatacctgcctccaataggtccatgagatctgacaggaatacatatgttggaaaaaggtttgttcacgttaaaaatccttacttggatttgatggatgaagacattctctatcacttggatttgggaacaaaaacacacaacctaccagcaatgtttggagatgtaaagtttgtctgtgtcggtgggagccccaacagaatgaaagcatttgcactgtttatgcacaaggagctcgggtttgaggaagctgaagaagacataaaagacatctgtgctgggacagacagatactgtatgtacaaaaccgggcctgtgctcgccatcagtcacggcatgggcatcccctccatttctattatgcttcatgaactcatcaaattactccaccatgcacggtgctgcgatgtcaccattattagaatcggtacatcagggggaatagggattgcaccagggactgttgtaataacggatatagctgtagactccttctttaagccccggtttgaacaggtcattttggacaacattgtcacccgaagtactgaactggacaaagaactgtctgaagaactgttcaactgtagcaaagaaatccccaacttcccaaccctcgttggacatacaatgtgtacctatgatttttatgaaggccaaggccgactagatggagcactgtgctccttttccagagaaaaaaagttagactacttgaagagagcatttaaagctggtgtcaggaatattgaaatggaatctacagtgtttgcagctatgtgtggactctgtggtctaaaagctgctgtggtctgtgtgacacttctcgacagactcgactgtgatcagatcaacttgcctcatgatgtcctggtggagtaccagcaacggcctcagctcctaatctccaacttcatcagacggcggcttggactttgtgactagacgtcctaactgggcagcccaaccctcccctgcaagtttgtagctcaagttgtaatgtgaaagtcatattttatttgtggcatttttatatagttctcatccacatgctaaatggaaagactttatgaaatccttctctcttaaaaaggaatttattgtaaaagaatactcacactaaattaaattcaaatttcattttagaataagttaactaaatcagtctaataattaaaattttaaaactcctggattatgacatttggagtttcatatgcagcattaattaagctcacatcaaaatagaccagccatttgcacatagttaccagtcactctgtttctgaaaccaatccagaaattcatgttagaacattgtcaggcacttctaggtattggacaagtgacagaaactgatcatccatattcaaaatatttacagaaaaaagtgtcagtgaaatgtaggtctatatggaaaagttaccattaggaaaatatggccatactgcttttttacccctgcactatttcagtgcaccacagaataggattcgagatttacatatgcctgtttgtgattttatctcagaatataacaactctggattacattttcctctcaactgaaaaccctcagtaatgcaaagaaaggccttcctttttcttcagaatcacaagtgactaaattgccttctagccattttttcttgtaaaaaaagtgttttgaggaggctgtattttttattccatttcaatattaaccaaataggctgagaaattcatagcaattgaattaagacttgagttcaagatgttaaaggaatccttttgtatgacttgtccagaccggcctattgccctacccgtttgattctctgggaggcatggtgctcctcctggctgcacatgctctctgtgaactgatcgcatcttgggttcttctcaatttgacatacttgggagtcggaatgactggatgggggatgggtagaggatgactggcacacttgtatagtatgtaatgttgtgtacatattatttatatggttgtggctcaaataaagtttaattccaacacagtacagattatttggatcccagagccattgtcacacatgaccgaatggaggcttggggcaggaaataggtcctaggccggttgagtctgaattggcctgctcctgggtggggaatgtctttctctttcaagcaatgacaataaacaagaggtatttatcatcaccaataaacaatcccccaagaggta

SEQ ID NO: 198381 - DNA, 2063 bp, Homo sapiens
  Payload ID: 19145
  Gene Name: uridine-cytidine kinase 1
  Uniprot ID: Q9HA47
  ENST ID: ENST00000372208
  CDS Start-End: 86-691
gcctccgacctcggcgctgggcgggcgcgccgggcctggggaaggggcgggcgcggggacccgatgcgcgggagcggaggccgagatggcttcggcgggaggcgaagactgcgagagccccgcgccggaggccgaccgtccgcaccagcggcccttcctgataggggtgagcggcggcactgccagcgggaagtcgaccgtgtgtgagaagatcatggagttgctgggacagaacgaggtggaacagcggcagcggaaggtggtcatcctgagccaggacaggttctacaaggtcctgacggcagagcagaaggccaaggccttgaaaggacagtacaattttgaccatccagatgcctttgataatgatttgatgcacaggactctgaagaacatcgtggagggcaaaacggtggaggtgccgacctatgattttgtgacacactcaaggttaccagagaccacggtggtctaccctgcggacgtggttctgtttgagggcatcttggtgttctacagccaggagatccgggacatgttccacctgcgcctcttcgtggacaccgactccgacgtcaggctgtctcgaagagacaaagaagtatgccgatgtgatcatcccgcgaggagtggacaatatggttgccatcaacctgatcgtgcagcacatccaggacattctgaatggtgacatctgcaaatggcaccgaggagggtccaatgggcggagctacaagcggaccttttctgagccaggggaccaccctgggatgctgacctctggcaaacggtcacatttggagtccagcagcagaccccactgaggggctgccgagcctcagggcaggtctcccgcccggcatgtgtgttcagggactgagcctggggacgcccacccacacccactgcttcctctcggcgcaccccaggggagtgttagcagcgaggccttcctcactcaggagtggaaactcagatgtgtcactcagactcaacttgctgggacactgacaggcgttcctgaggttttcagccacttaggctcgttgcggtttaaagatccctctaggtcactgagaaatgccacagaatgtgcaggaagcctgggaggcttctgtgaggaatgtgaggcacattattggggaaattgaggagacagcctagacactggctggcctgatgttttgttgacagtgaacccacagtgggagagagttttttccagtctgatctggttcttacacactcacacacataactcaaaagttttgtgaacaagtactttccttttttacatgttacatgtcctcatgttttctgttttctgtttcataacacaaggctggttgtggcctacaaacctaatttcatgacccagtggtttgcagtccagcgtggcctacacggatatggggagccactgagggatgttttccccccttgcttgtgccttaaaggcagagaagcgaggcggatgccctggaagcacccagcatcacacccaggcttgtgcggggccaggctgggagcccatgcagtagggcagaaggcagcggaggccaggtctgtcccggctggagaacagcgtccacgcagtcctgcctggggtcaggccctcactgaccctcaggggagcccccaaggtgctgtctgtctagacaggctgtcccaccccagggtggctagtggccatatgcagggaatggtgcttctggctgtggcacgcactggatcacccaggtcccagcagacatggccgcccaaagtcagcaagcctcctttgtgctatgtggagctcacagcctcacatgtgaacacccgtgtctgggttgcctggggtgatcctccctcctgcgtggtggctgtctctggaaagcatcccttgccgctgccatgggcagccccagcccccgtccgtccaggctcacccacagtagtgatgcagacgtgacgtgggggaagggggctgagccctgtggctgggttctgacaactgtaacggttttgtcgagcttaggcccctttggagggagaatcaataaataacaaacaccaactacaaa

SEQ ID NO: 198382 - DNA, 2051 bp, Homo sapiens
  Payload ID: 19145
  Gene Name: uridine-cytidine kinase 1
  Uniprot ID: Q9HA47
  ENST ID: ENST00000372210
  CDS Start-End: 6-812
ccgagatggcttcggcgggaggcgaagactgcgagagccccgcgccggaggccgaccgtccgcaccagcggcccttcctgatagggtcgaccgtgtgtgagaagatcatggagttgctgggacagaacgaggtggaacagcggcagcggaaggtggtcatcctgagccaggacaggttctacaaggtcctgacggcagagcagaaggccaaggccttgaaaggacagtacaattttgaccatccagatgcctttgataatgatttgatgcacaggactctgaagaacatcgtggagggcaaaacggtggaggtgccgacctatgattttgtgacacactcaaggttaccagagaccacggtggtctaccctgcggacgtggttctgtttgagggcatcttggtgttctacagccaggagatccgggacatgttccacctgcgcctcttcgtggacaccgactccgacgtcaggctgtctcgaagagttctccgggacgtgcgccgagggagggacctggagcagattctgacgcagtacaccaccttcgtgaagccggccttcgaggagttctgcctgccgacaaagaagtatgccgatgtgatcatcccgcgaggagtggacaatatggttgccatcaacctgatcgtgcagcacatccaggacattctgaatggtgacatctgcaaatggcaccgaggagggtccaatgggcggagctacaagcggaccttttctgagccaggggaccaccctgggatgctgacctctggcaaacggtcacatttggagtccagcagcagaccccactgaggggctgccgagcctcagggcaggtctcccgcccggcatgtgtgttcagggactgagcctggggacgcccacccacacccactgcttcctctcggcgcaccccaggggagtgttagcagcgaggccttcctcactcaggagtggaaactcagatgtgtcactcagactcaacttgctgggacactgacaggcgttcctgaggttttcagccacttaggctcgttgcggtttaaagatccctctaggtcactgagaaatgccacagaatgtgcaggaagcctgggaggcttctgtgaggaatgtgaggcacattattggggaaattgaggagacagcctagacactggctggcctgatgttttgttgacagtgaacccacagtgggagagagttttttccagtctgatctggttcttacacactcacacacataactcaaaagttttgtgaacaagtactttccttttttacatgttacatgtcctcatgttttctgttttctgtttcataacacaaggctggttgtggcctacaaacctaatttcatgacccagtggtttgcagtccagcgtggcctacacggatatggggagccactgagggatgttttccccccttgcttgtgccttaaaggcagagaagcgaggcggatgccctggaagcacccagcatcacacccaggcttgtgcggggccaggctgggagcccatgcagtagggcagaaggcagcggaggccaggtctgtcccggctggagaacagcgtccacgcagtcctgcctggggtcaggccctcactgaccctcaggggagcccccaaggtgctgtctgtctagacaggctgtcccaccccagggtggctagtggccatatgcagggaatggtgcttctggctgtggcacgcactggatcacccaggtcccagcagacatggccgcccaaagtcagcaagcctcctttgtgctatgtggagctcacagcctcacatgtgaacacccgtgtctgggttgcctggggtgatcctccctcctgcgtggtggctgtctctggaaagcatcccttgccgctgccatgggcagccccagcccccgtccgtccaggctcacccacagtagtgatgcagacgtgacgtgggggaagggggctgagccctgtggctgggttctgacaactgtaacggttttgtcgagcttaggcccctttggagggagaatcaataaataacaaacaccaactacaaa

SEQ ID NO: 198383 - DNA, 2114 bp, Homo sapiens
  Payload ID: 19145
  Gene Name: uridine-cytidine kinase 1
  Uniprot ID: Q9HA47
  ENST ID: ENST00000372211
  CDS Start-End: 27-875
cccgatgcgcgggagcggaggccgagatggcttcggcgggaggcgaagactgcgagagccccgcgccggaggccgaccgtccgcaccagcggcccttcctgataggggacgagcggttccaggcgggaatcccgcttctgtgtctccagtcgaccgtgtgtgagaagatcatggagttgctgggacagaacgaggtggaacagcggcagcggaaggtggtcatcctgagccaggacaggttctacaaggtcctgacggcagagcagaaggccaaggccttgaaaggacagtacaattttgaccatccagatgcctttgataatgatttgatgcacaggactctgaagaacatcgtggagggcaaaacggtggaggtgccgacctatgattttgtgacacactcaaggttaccagagaccacggtggtctaccctgcggacgtggttctgtttgagggcatcttggtgttctacagccaggagatccgggacatgttccacctgcgcctcttcgtggacaccgactccgacgtcaggctgtctcgaagagttctccgggacgtgcgccgagggagggacctggagcagattctgacgcagtacaccaccttcgtgaagccggccttcgaggagttctgcctgccgacaaagaagtatgccgatgtgatcatcccgcgaggagtggacaatatggttgccatcaacctgatcgtgcagcacatccaggacattctgaatggtgacatctgcaaatggcaccgaggagggtccaatgggcggagctacaagcggaccttttctgagccaggggaccaccctgggatgctgacctctggcaaacggtcacatttggagtccagcagcagaccccactgaggggctgccgagcctcagggcaggtctcccgcccggcatgtgtgttcagggactgagcctggggacgcccacccacacccactgcttcctctcggcgcaccccaggggagtgttagcagcgaggccttcctcactcaggagtggaaactcagatgtgtcactcagactcaacttgctgggacactgacaggcgttcctgaggttttcagccacttaggctcgttgcggtttaaagatccctctaggtcactgagaaatgccacagaatgtgcaggaagcctgggaggcttctgtgaggaatgtgaggcacattattggggaaattgaggagacagcctagacactggctggcctgatgttttgttgacagtgaacccacagtgggagagagttttttccagtctgatctggttcttacacactcacacacataactcaaaagttttgtgaacaagtactttccttttttacatgttacatgtcctcatgttttctgttttctgtttcataacacaaggctggttgtggcctacaaacctaatttcatgacccagtggtttgcagtccagcgtggcctacacggatatggggagccactgagggatgttttccccccttgcttgtgccttaaaggcagagaagcgaggcggatgccctggaagcacccagcatcacacccaggcttgtgcggggccaggctgggagcccatgcagtagggcagaaggcagcggaggccaggtctgtcccggctggagaacagcgtccacgcagtcctgcctggggtcaggccctcactgaccctcaggggagcccccaaggtgctgtctgtctagacaggctgtcccaccccagggtggctagtggccatatgcagggaatggtgcttctggctgtggcacgcactggatcacccaggtcccagcagacatggccgcccaaagtcagcaagcctcctttgtgctatgtggagctcacagcctcacatgtgaacacccgtgtctgggttgcctggggtgatcctccctcctgcgtggtggctgtctctggaaagcatcccttgccgctgccatgggcagccccagcccccgtccgtccaggctcacccacagtagtgatgcagacgtgacgtgggggaagggggctgagccctgtggctgggttctgacaactgtaacggttttgtcgagcttaggcccctttggagggagaatcaataaataacaaacaccaactacaaa

SEQ ID NO: 198384 - DNA, 2167 bp, Homo sapiens
  Payload ID: 19145
  Gene Name: uridine-cytidine kinase 1
  Uniprot ID: Q9HA47
  ENST ID: ENST00000372215
  CDS Start-End: 95-928
gctccggttgcctccgacctcggcgctgggcgggcgcgccgggcctggggaaggggcgggcgcggggacccgatgcgcgggagcggaggccgagatggcttcggcgggaggcgaagactgcgagagccccgcgccggaggccgaccgtccgcaccagcggcccttcctgataggggtgagcggcggcactgccagcgggaagtcgaccgtgtgtgagaagatcatggagttgctgggacagaacgaggtggaacagcggcagcggaaggtggtcatcctgagccaggacaggttctacaaggtcctgacggcagagcagaaggccaaggccttgaaaggacagtacaattttgaccatccagatgcctttgataatgatttgatgcacaggactctgaagaacatcgtggagggcaaaacggtggaggtgccgacctatgattttgtgacacactcaaggttaccagagaccacggtggtctaccctgcggacgtggttctgtttgagggcatcttggtgttctacagccaggagatccgggacatgttccacctgcgcctcttcgtggacaccgactccgacgtcaggctgtctcgaagagttctccgggacgtgcgccgagggagggacctggagcagattctgacgcagtacaccaccttcgtgaagccggccttcgaggagttctgcctgccgacaaagaagtatgccgatgtgatcatcccgcgaggagtggacaatatggttgccatcaacctgatcgtgcagcacatccaggacattctgaatggtgacatctgcaaatggcaccgaggagggtccaatgggcggagctacaagcggaccttttctgagccaggggaccaccctgggatgctgacctctggcaaacggtcacatttggagtccagcagcagaccccactgaggggctgccgagcctcagggcaggtctcccgcccggcatgtgtgttcagggactgagcctggggacgcccacccacacccactgcttcctctcggcgcaccccaggggagtgttagcagcgaggccttcctcactcaggagtggaaactcagatgtgtcactcagactcaacttgctgggacactgacaggcgttcctgaggttttcagccacttaggctcgttgcggtttaaagatccctctaggtcactgagaaatgccacagaatgtgcaggaagcctgggaggcttctgtgaggaatgtgaggcacattattggggaaattgaggagacagcctagacactggctggcctgatgttttgttgacagtgaacccacagtgggagagagttttttccagtctgatctggttcttacacactcacacacataactcaaaagttttgtgaacaagtactttccttttttacatgttacatgtcctcatgttttctgttttctgtttcataacacaaggctggttgtggcctacaaacctaatttcatgacccagtggtttgcagtccagcgtggcctacacggatatggggagccactgagggatgttttccccccttgcttgtgccttaaaggcagagaagcgaggcggatgccctggaagcacccagcatcacacccaggcttgtgcggggccaggctgggagcccatgcagtagggcagaaggcagcggaggccaggtctgtcccggctggagaacagcgtccacgcagtcctgcctggggtcaggccctcactgaccctcaggggagcccccaaggtgctgtctgtctagacaggctgtcccaccccagggtggctagtggccatatgcagggaatggtgcttctggctgtggcacgcactggatcacccaggtcccagcagacatggccgcccaaagtcagcaagcctcctttgtgctatgtggagctcacagcctcacatgtgaacacccgtgtctgggttgcctggggtgatcctccctcctgcgtggtggctgtctctggaaagcatcccttgccgctgccatgggcagccccagcccccgtccgtccaggctcacccacagtagtgatgcagacgtgacgtgggggaagggggctgagccctgtggctgggttctgacaactgtaacggttttgtcgagcttaggcccctttggagggagaatcaataaataacaaacaccaactacaaa

SEQ ID NO: 198385 - DNA, 2237 bp, Homo sapiens
  Payload ID: 19145
  Gene Name: uridine-cytidine kinase 1
  ENST ID: ENST00000491309
  CDS Start-End: 64-720
gggcgcgccgggcctggggaaggggcgggcgcggggacccgatgcgcgggagcggaggccgagatggcttcggcgggaggcgaagactgcgagagccccgcgccggaggccgaccgtccgcaccagcggcccttcctgataggggtgagcggcggcactgccagcgggaaggacgagcggttccaggcgggaatcccgcttctgtgtctccagtcgaccgtgtgtgagaagatcatggagttgctgggacagaacgaggtggaacagcggcagcggaaggtggtcatcctgagccaggacaggttctacaaggtcctgacggcagagcagaaggccaaggccttgaaaggacagtacaattttgaccatccagatgcctttgataatgatttgatgcacaggactctgaagaacatcgtggagggcaaaacggtggaggtgccgacctatgattttgtgacacactcaaggttaccagagaccacggtggtctaccctgcggacgtggttctgtttgagggcatcttggtgttctacagccaggagatccgggacatgttccacctgcgcctcttcgtggacaccgactccgacgtcaggctgtctcgaagagttctccgggacgtgcgccgagggagggacctggagcagattctgacgcagtacaccaccttcgtgaagccggccttcgaggagttctgcctgccgcagagcatctgacagggaatgagagtcagcattgagccaatgagtggttggatgagggaacaaagaagtatgccgatgtgatcatcccgcgaggagtggacaatatggttgccatcaacctgatcgtgcagcacatccaggacattctgaatggtgacatctgcaaatggcaccgaggagggtccaatgggcggagctacaagcggaccttttctgagccaggggaccaccctgggatgctgacctctggcaaacggtcacatttggagtccagcagcagaccccactgaggggctgccgagcctcagggcaggtctcccgcccggcatgtgtgttcagggactgagcctggggacgcccacccacacccactgcttcctctcggcgcaccccaggggagtgttagcagcgaggccttcctcactcaggagtggaaactcagatgtgtcactcagactcaacttgctgggacactgacaggcgttcctgaggttttcagccacttaggctcgttgcggtttaaagatccctctaggtcactgagaaatgccacagaatgtgcaggaagcctgggaggcttctgtgaggaatgtgaggcacattattggggaaattgaggagacagcctagacactggctggcctgatgttttgttgacagtgaacccacagtgggagagagttttttccagtctgatctggttcttacacactcacacacataactcaaaagttttgtgaacaagtactttccttttttacatgttacatgtcctcatgttttctgttttctgtttcataacacaaggctggttgtggcctacaaacctaatttcatgacccagtggtttgcagtccagcgtggcctacacggatatggggagccactgagggatgttttccccccttgcttgtgccttaaaggcagagaagcgaggcggatgccctggaagcacccagcatcacacccaggcttgtgcggggccaggctgggagcccatgcagtagggcagaaggcagcggaggccaggtctgtcccggctggagaacagcgtccacgcagtcctgcctggggtcaggccctcactgaccctcaggggagcccccaaggtgctgtctgtctagacaggctgtcccaccccagggtggctagtggccatatgcagggaatggtgcttctggctgtggcacgcactggatcacccaggtcccagcagacatggccgcccaaagtcagcaagcctcctttgtgctatgtggagctcacagcctcacatgtgaacacccgtgtctgggttgcctggggtgatcctccctcctgcgtggtggctgtctctggaaagcatcccttgccgctgccatgggcagccccagcccccgtccgtccaggctcacccacagtagtgatgcagacgtgacgtgggggaagggggctgagccctgtggctgggttctgacaactgtaacggttttgtcgagcttaggcccctttggagggagaatcaataaataacaaacaccaactacaaa

SEQ ID NO: 198386 - DNA, 1837 bp, Homo sapiens
  Payload ID: 19146
  Gene Name: uridine-cytidine kinase 1-like 1
  Uniprot ID: Q9NWZ5
  ENST ID: ENST00000354216
  CDS Start-End: 44-1690
tgcgcgccgcccggccaggcccgcaaagaggcctccgagcgccatggctgcgcccccggcccgcgcggacgctgatccttcgcccacgtcgccacctacggcccgagacacaccaggccggcaggctgagaaaagcgagaccgcgtgcgaggaccgcagcaatgcagagtccctggacaggctcctgccacctgtgggcactgggcgctctccccggaagcggaccaccagccagtgcaagtcagagcctcccctgctgcgtacaagcaagcgtaccatctacaccgccgggcggccgccctggtacaatgaacacggcacgcaatccaaagaggccttcgccatcggcttgggaggcggcagtgcctctgggaagaccactgtggccagaatgatcatcgaggccctggatgtgccctgggtggtcttgctgtccatggactccttctacaaggtgctgactgagcagcagcaggaacaggccgcacacaacaacttcaacttcgaccacccagatgcctttgacttcgacctcatcatttccaccctcaagaagctgaagcaggggaagagtgtcaaggtgcccatttatgacttcaccacgcacagccggaagaaggactggaaaacactgtatggtgcaaacgtcatcatctttgagggcatcatggcctttgctgacaagacactgttggagctcctggacatgaagatctttgtggacacagactccgacatccgcctggtacggcggctgcgccgggacatcagtgagcgcggccgggacatcgagggtgtcatcaagcagtacaacaagtttgtcaagccctccttcgaccagtacatccagcccaccatgcgcctggcagacatcgtggtccccagagggagcggcaacacggtggccatcgacctgattgtgcagcacgtgcacagccagctggaggagcgtgaactcagcgtcagggctgcgctggcctcggcacaccagtgccacccgctgccccggacgctgagcgtcctgaagagcacgccgcaggtacggggcatgcacaccatcatcagggacaaggagaccagtcgcgacgagttcatcttctactccaagagactgatgcggctgctcatcgagcacgcgctctccttcctgccctttcaggactgcgtcgtacagaccccgcaggggcaggactatgcgggcaagtgctatgcggggaagcagatcaccggtgtgtccattctgcgcgccggtgaaaccatggagcccgcgctgcgcgctgtgtgcaaagacgtgcgcatcggcaccatcctcatccagaccaaccagcttaccggggagcccgagctccactacctgaggctgcccaaggacatcagcgatgaccacgtgatcctcatggactgcaccgtgtccacgggcgcggcggccatgatggcagtgcgcgtgctcctggaccacgacgtgcctgaggacaagatctttttgctgtcgctgctcatggcagagatgggcgtgcactcagtggcctatgcatttccgcgagtgagaatcatcaccacggcggtggacaagcgggtcaatgaccttttccgcatcatcccaggcattgggaactttggcgaccgctactttgggacagacgcggtccccgatggcagtgacgaggaggaagtggcctacacgggttagctgcccagtgagccatcccgtccccaccaccctcctcctgcctcctgacccaggactgctgaatacaaagatgttaatttttaaaatgttactagtataatttattctatgcattttataaaataaataaagctttagaaaaatgaa

SEQ ID NO: 198387 - DNA, 1845 bp, Homo sapiens
  Payload ID: 19146
  Gene Name: uridine-cytidine kinase 1-like 1
  Uniprot ID: Q9NWZ5
  ENST ID: ENST00000358711
  CDS Start-End: 14-1273
gcctccgagcgccatggctgcgcccccggcccgcgcggacgctgatccttcgcccacgtcgccacctacggcccgagacacaccaggccggcaggctgagaaaagcgagaccgcgtgcgaggaccgcagcaatgcagagtccctggacaggctcctgccacctgtgggcactgggcgctctccccggaagcggaccaccagccagtgcaagtcagagcctcccctgctgcgtacaagcaagcgtaccatctacaccgccgggcggccgccctggtacaatgaacacggcacgcaatccaaagaggccttcgccatcggcttgggaggcggcagtgcctctgggaagaccactgtggccagaatgatcatcgaggccctggatgtgccctgggtggtcttgctgtccatggactccttctacaaggtgctgactgagcagcagcaggaacaggccgcacacaacaacttcaacttcgaccacccagatgcctttgacttcgacctcatcatttccaccctcaagaagctgaagcaggggaagagtgtcaaggtgcccatttatgacttcaccacgcacagccggaagaaggactggaaaacactgtatggtgcaaacgtcatcatctttgagggcatcatggcctttgctgacaagacactgttggagctcctggacatgaagatctttgtggacacagactccgacatccgcctggtacggcggctgcgccgggacatcagtgagcgcggccgggacatcgagggtgtcatcaagcagtacaacaagtttgtcaagccctccttcgaccagtacatccagcccaccatgcgcctggcagacatcgtggtccccagagggagcggcaacacggtggccatcgacctgattgtgcagcacgtgcacagccagctggaggagggctgcgctggcctcggcacaccagtgccacccgctgccccggacgctgagcgtcctgaagagcacgccgcaggtacggggcatgcacaccatcatcaggtgagggcccacctggggacggggcggccccgggcgcgtgctcccgctcaactgttggccccacagggacaaggagaccagtcgcgacgagttcatcttctactccaagagactgatgcggctgctcatcgagcacgcgctctccttcctgccctttcaggactgcgtcgtacagaccccgcaggggcaggactatgcgggcaagtgctatgcggggaagcagatcaccggtgtgtccattctgcgcgccggtgaaaccatggagcccgcgctgcgcgctgtgtgcaaagacgtgcgcatcggcaccatcctcatccagaccaaccagcttaccggggagcccgagctccactacctgaggctgcccaaggacatcagcgatgaccacgtgatcctcatggactgcaccgtgtccacgggcgcggcggccatgatggcagtgcgcgtgctcctggaccacgacgtgcctgaggacaagatctttttgctgtcgctgctcatggcagagatgggcgtgcactcagtggcctatgcatttccgcgagtgagaatcatcaccacggcggtggacaagcgggtcaatgaccttttccgcatcatcccaggcattgggaactttggcgaccgctactttgggacagacgcggtccccgatggcagtgacgaggaggaagtggcctacacgggttagctgcccagtgagccatcccgtccccaccaccctcctcctgcctcctgacccaggactgctgaatacaaagatgttaatttttaaaatgttactagtataatttattctatgcattttataaaataaataaagcttt

SEQ ID NO: 198388 - DNA, 1954 bp, Homo sapiens
  Payload ID: 19146
  Gene Name: uridine-cytidine kinase 1-like 1
  Uniprot ID: Q9NWZ5
  ENST ID: ENST00000369908
  CDS Start-End: 301-1902
agtacggtggaggcttcaagggcctcctagctgctgtgcctctgctgacatttggcaggcagcttctgccagccaagggtctcaccccagccacccggctctgcacccactgtgctgcccacaggagtggtcctgcccatggaagggccagttcaggtggccggagctcctgagctgccctaggggactgctgtgggtctgaggtggtgatgtcccccacggctgcctgcgcctgagcccccacgcatccacccctggggccactctgctgttcaggagcacccacccgtgtcctcgaccatgagcagccccccagcttaccctggcatcaggatctcagggtgccgggcccttggagcagaaggcagcagcaatgcagagtccctggacaggctcctgccacctgtgggcactgggcgctctccccggaagcggaccaccagccagtgcaagtcagagcctcccctgctgcgtacaagcaagcgtaccatctacaccgccgggcggccgccctggtacaatgaacacggcacgcaatccaaagaggccttcgccatcggcttgggaggcggcagtgcctctgggaagaccactgtggccagaatgatcatcgaggccctggatgtgccctgggtggtcttgctgtccatggactccttctacaaggtgctgactgagcagcagcaggaacaggccgcacacaacaacttcaacttcgaccacccagatgcctttgacttcgacctcatcatttccaccctcaagaagctgaagcaggggaagagtgtcaaggtgcccatttatgacttcaccacgcacagccggaagaaggactggaaaacactgtatggtgcaaacgtcatcatctttgagggcatcatggcctttgctgacaagacactgttggagctcctggacatgaagatctttgtggacacagactccgacatccgcctggtacggcggctgcgccgggacatcagtgagcgcggccgggacatcgagggtgtcatcaagcagtacaacaagtttgtcaagccctccttcgaccagtacatccagcccaccatgcgcctggcagacatcgtggtccccagagggagcggcaacacggtggccatcgacctgattgtgcagcacgtgcacagccagctggaggagcgtgaactcagcgtcagggctgcgctggcctcggcacaccagtgccacccgctgccccggacgctgagcgtcctgaagagcacgccgcaggtacggggcatgcacaccatcatcagggacaaggagaccagtcgcgacgagttcatcttctactccaagagactgatgcggctgctcatcgagcacgcgctctccttcctgccctttcaggactgcgtcgtacagaccccgcaggggcaggactatgcgggcaagtgctatgcggggaagcagatcaccggtgtgtccattctgcgcgccggtgaaaccatggagcccgcgctgcgcgctgtgtgcaaagacgtgcgcatcggcaccatcctcatccagaccaaccagcttaccggggagcccgagctccactacctgaggctgcccaaggacatcagcgatgaccacgtgatcctcatggactgcaccgtgtccacgggcgcggcggccatgatggcagtgcgcgtgctcctggaccacgacgtgcctgaggacaagatctttttgctgtcgctgctcatggcagagatgggcgtgcactcagtggcctatgcatttccgcgagtgagaatcatcaccacggcggtggacaagcgggtcaatgaccttttccgcatcatcccaggcattgggaactttggcgaccgctactttgggacagacgcggtccccgatggcagtgacgaggaggaagtggcctacacgggttagctgcccagtgagccatcccgtccccaccaccctcctcctgcctcctgaccca

SEQ ID NO: 198389 - DNA, 888 bp, Homo sapiens
  Payload ID: 19146
  Gene Name: uridine-cytidine kinase 1-like 1
  ENST ID: ENST00000430743
  CDS Start-End: 484-888
ctttagttcccccggggagaggctggggacaagctacccattctggggtatgacacctatcagcacgtgtgagcccgccctgtgcccggcccacttctgcttcctcttagcgcaggaggggtcccgcactgggaggggccctcacagcctaccccgctagctttctgcctgatggtgagcttgccccgttgttcgccgccatctttcgcctttgcctgacagctcaggtagggcgacgtctccccccagctcagccccaggcagaagtcaggcccgctctgcacctcgtgctgtgcctggcccgtgtgttcccctcacagtgacgcacagccgtcctgtggggagggagggctctgggaaaagacccccttcttgagtgttccccatcggtttgtccccagggctgcgctggcctcggcacaccagtgccacccgctgccccggacgctgagcgtcctgaagagcacgccgcaggtacggggcatgcacaccatcatcagggacaaggagaccagtcgcgacgagttcatcttctactccaagagactgatgcggctgctcatcgagcacgcgctctccttcctgccctttcaggactgcgtcgtacagaccccgcaggggcaggactatgcgggcaagtgctatgcggggaagcagatcaccggtgtgtccattctgcgcgccggtgaaaccatggagcccgcgctgcgcgctgtgtgcaaagacgtgcgcatcggcaccatcctcatccagaccaaccagcttaccggggagcccgagctccactacctgaggctgcccaaggacatcagcgatgaccacgtgatcctcatggactgcaccgtgtccacgggcgcggcggccatgatggcagtgcgcgtgctcctg

SEQ ID NO: 198390 - DNA, 1375 bp, Homo sapiens
  Payload ID: 19147
  Gene Name: uridine-cytidine kinase 2
  Uniprot ID: Q9BZX2
  ENST ID: ENST00000367879
  CDS Start-End: 304-1089
ctcgccgcctccgcctcggcgaatagcagcgcgctgcccgcccggattggagcagcagcatcacgctgacctctgcctgggatgtaaaccggaccagccgctgcgggcaaaggaaggctcttggctccttcgggaaacccagccccgtcaccgggctccgagcggctcgcaggcgagcgacagcggcctcagccccggcagcgcccagcggcggctgcggaaagcggagggagtccgacgcgggcgcgggcggggagcgtgcgtccgttcgcacaggcagcgggaggaggggcggcgcgaaccatggccggggacagcgagcagaccctgcagaaccaccagcagcccaacggcggcgagcccttccttataggcgtcagcgggggaacagctagcggcaagtcttccgtgtgtgctaagatcgtgcagctcctggggcagaatgaggtggactatcgccagaagcaggtggtcatcctgagccaggatagcttctaccgtgtccttacctcggagcagaaggccaaagccctgaagggccagttcaactttgaccacccggatgcctttgacaatgaactcattctcaaaacactcaaagaaatcactgaagggaaaacagtccagatccccgtgtatgactttgtctcccattcccggaaggaggagacagttactgtctatcccgcagacgtggtgctctttgaagggatcctggccttctactcccaggaggtacgagacctgttccagatgaagctttttgtggatacagatgcggacacccggctctcacgcagagtattaagggacatcagcgagagaggcagggatcttgagcagattttatctcagtacattacgttcgtcaagcctgcctttgaggaattctgcttgccaacaaagaagtatgctgatgtgatcatccctagaggtgcagataatctggtggccatcaacctcatcgtgcagcacatccaggacatcctgaatggagggccctccaaacggcagaccaatggctgtctcaacggctacaccccttcacgcaagaggcaggcatcggagtccagcagcaggccgcattgacccgtctccatcggaccccagcccctatctccaagagacagaggaggggtcaggaggcactgctcatctgtacatactgtttcctatgacattactgtatttaagaaaacaccatggagatgaaatgcctttgattttttttttctttttgtactttggaacgacaaaatgaaacagaacttgaccctgagcttaaataacaaaactgtgccaactactactggtgatgcctaattatgaatccaacgtgtaaccagttataaatacatatatatataaaaaagga

SEQ ID NO: 198391 - DNA, 1083 bp, Homo sapiens
  Payload ID: 19147
  Gene Name: uridine-cytidine kinase 2
  Uniprot ID: Q9BZX2
  ENST ID: ENST00000470820
  CDS Start-End: 700-1035
ggtagagccagaccagacagacgtcgggattctgtacttcctcacaaatgctttctcgtctgtatcctctttcccaaaacttttctttattttccctccttcccttccccttctgtcctttcctccctcctttcaattgcctcaggactggcggggaggggatggagttgttgagagaaaactgtgagtttctgtttttaaagttcagagtgttaggttccataaatgccaggccatgagagcattcctggagacgccttcagagaaaaaaagaaatcacatctgtttttgtctgcctttattcttcattcaacagcaggtttttttaattccaaggagaaggatgtctgccgtgtatttctgtttcatggtgaaagctcagaagtggtcaaaggagacctttgtcccggccgtgatcacccttggctctttggtggtggtccgagggctctgtaagaccatattagccaagtctttagcccccgcttgaagtctgtgggggcaaggaacccagaacccagcccagccagatgttctggcccttgttctctgtcccttgctagcccctgcctggcttggcccattatctgctctgtgctttgcaggaaggaggagacagttactgtctatcccgcagacgtggtgctctttgaagggatcctggccttctactcccaggaggtacgagacctgttccagatgaagctttttgtggatacagatgcggacacccggctctcacgcagagtattaagggacatcagcgagagaggcagggatcttgagcagattttatctcagtacattacgttcgtcaagcctgcctttgaggaattctgcttgccaacaaagaagtatgctgatgtgatcatccctagaggtgcagataatctggtggccatcaacctcatcgtgcagcacatccaggacatcctgaatggagggccctccaaacggcagaccaatggctgtctcaacggctacaccccttcacgcaagaggcaggcatcggagtccagcagcaggccgcattgacccgtctccatcggaccccagcccctatctccaagagacagaggaggg

SEQ ID NO: 198392 - DNA, 753 bp, Homo sapiens
  Payload ID: 19147
  Gene Name: uridine-cytidine kinase 2
  Uniprot ID: Q9BZX2
  ENST ID: ENST00000469256
  CDS Start-End: 167-502
actttgttggtttggggtagagccagaccagacagacgtcgggattctgtacttcctcacaaatgctttctcgaaggaggagacagttactgtctatcccgcagacgtggtgctctttgaagggatcctggccttctactcccaggaggtacgagacctgttccagatgaagctttttgtggatacagatgcggacacccggctctcacgcagagtattaagggacatcagcgagagaggcagggatcttgagcagattttatctcagtacattacgttcgtcaagcctgcctttgaggaattctgcttgccaacaaagaagtatgctgatgtgatcatccctagaggtgcagataatctggtggccatcaacctcatcgtgcagcacatccaggacatcctgaatggagggccctccaaacggcagaccaatggctgtctcaacggctacaccccttcacgcaagaggcaggcatcggagtccagcagcaggccgcattgacccgtctccatcggaccccagcccctatctccaagagacagaggaggggtcaggaggcactgctcatctgtacatactgtttcctatgacattactgtatttaagaaaacaccatggagatgaaatgcctttgattttttttttctttttgtactttggaacgacaaaatgaaacagaacttgaccctgagcttaaataacaaaactgtgccaactactactggtgatgcctaattatgaatccaacgtgt

SEQ ID NO: 198393 - DNA, 3149 bp, Homo sapiens
  Payload ID: 19148
  Gene Name: urocanate hydratase 1
  Uniprot ID: Q96N76
  ENST ID: ENST00000290868
  CDS Start-End: 55-2085
agtctcttcctggcctccccacagtgctggcctctgcctccatctcagtcacacatgtctagcctccaggcgctgtgctctggcctgcccctgcggcccctcccagagaaccggggacgccaggctggggtgccccatgcccctgtcaggacccccagcctcagccctgtggagaaacagctggcgctgaggaacgccctgcgctacttccccccggatgtccaggagctgctggccccagagtttgcccaggagctgcaactgtacggacacatctacatgtaccggttttgccccgacattgaaatgagggcctacccgattgagcagtacccctgccagacgaaagtggctgccgccatcatgcacatgattatgaacaacctggatcctgccgtggcccagtttccccaggagctggtgacctatggaggaaatgggcaggtgttcagcaactgggctcagttctggctgaccatgttctacttgtcgaagatgacagaggagcagactttggtcatgtacagtgggcacccacttggcctctttcccagcagccgcagtgccccacggctcgtcatcaccaatgggatggtcattcccaactactcctcccggacggagtatgagaagctctttgccttgggggttacaatgtacggccagatgacagcaggtagctactgctacatcggtccccagggaatcgttcatggcactgtgctcaccgtgttgaatgctgcacgtcggtacctgggcatcgaggacttggctgggaaggtctttgtcacctctgggctcggcggaatgagtggggctcaggccaaggccgcagtcatcgtggggtgcatcggtgtgatagcagaggtggataaagcagcccttgagaaacgccacaggcagggctggctgatggaagtgactgacagcttggaccgctgcatccagaggctcagggaagcaaggaaaaaaaaggaggtgctcagccttggttaccatggcaacgtggtggctctttgggagcgcctggtccacgaattggacacgacgggggagtgcttggtggacctggggtcagatcagacatcctgccacaacccgttcaatggcggctactaccctgtgcagctcagcttcacggaggcccagagcctcatggcctccaaccctgctgtgttcaaggacctggtccaggaaagcctgaggaggcaagtctcagccatcaacaggttggccgaggagaagttcttcttctgggactacggcaatgccttcctcttggaggcccagagagcaggagcggatgtggagaagaaaggtgctggcaggacagagttccgctacccttcctatgtgcagcacatcatgggggacatattctcccagggatttgggcctttccgctgggtgtgcacatcgggggacccccaggacctggcggtcacagacgaactggccacatctgtgctggaggaagccattgctgatggagtgaaggtgtctgtgaagctgcagtacatggacaacatccgctggatccgggaggccgccaggcaccggctggtggtgggctcccaggcaaggatcctgtactcagaccagaagggccgcgtggccatcgctgtggccattaaccaggccatcgcctgcaggaggatcaaggcgccggtggtcctgagccgagatcaccatgacgtgagcggcaccgacagcccctttagggagacctccaacatttacgacggctctgccttctgtgcagacatggctgtgcagaacttcgtgggagatgcctgtcgcggagccacctgggtcgcccttcacaacggagggggcgtgggctggggtgaggtgatcaacgggggattcggcctcgtgctggacggtaccccggaggccgaggggagagccaggctgatgctcagctgggatgtctccaatggtgtggcccggcgctgctggtcagggaaccagaaggcctatgagatcatctgccagaccatgcaggagaacagcaccttggtggtgacactgcctcacaaggtggaggacgagcgggtgctccagcaggccctgcagctctgagggagccaggagtcgcggcccctgcctcccttcctccctggcgatcctcacctgcccagccatggcacacacccttcctgcacacccgcactacctgcacttctcgcacatcctcacgtggcccttatggtgccctgtgcagggtgccaccacagcctcattttacagacagccccctgaggcccagagacatgcagctctctgtccacaaccatgccacttgcatgggagccctgaaggctgtcaaagtccatttagggccaagtcccaagcctgcccgggggccctgcggtgaacactggtcaagctctctccggctgggatgatcacaccctctgcttcctggccacctgccagcctccatgcaactctgtctgtctgctgcccatctgctgtctgtgcaagcaacttctggaccctggcaccctgggctgctggcctggaggagttcgggaaggaggatagaccaggaaataaagggtcaacagagctgtgtgctgcactgtgggctggtgggacgggcaggccgggtctgccctaaggataaatgatcacttactggggaagaaatgagagagcaggggcacccccctaggccagcacagcctgaggggtacagcaaaggggaccctttgctggcccctgaggctggagtctggcaccccttccccaatcccatagcccggtaatgactgggtccagagcctcgtgagaggtcaccgggatgggggaagtggcctctgtcagggccagggctcatgaatctcattctcttagctgggcgtgcaacagaccaacagataactcatcctaaacagagaaatgagaaagagtctgtgggtgggcctctgagggccacagaaaaccagacaccccacatgtcggtggattggagaggggcaggccactgccctctccaggaccaagccgggttcttggtccccaccctccctgcactccgcatctcctccccagcagccattctcccctttcccttgtgaacaaaagcctagttttgtgtgggcagcaatatagggtaaataaaaccacctgattctccagcc

SEQ ID NO: 198394 - DNA, 2735 bp, Homo sapiens
  Payload ID: 19148
  Gene Name: urocanate hydratase 1
  Uniprot ID: Q96N76
  ENST ID: ENST00000383579
  CDS Start-End: 35-2245
acagtgctggcctctgcctccatctcagtcacacatgtctagcctccaggcgctgtgctctggcctgcccctgcggcccctcccagagaaccggggacgccaggctggggtgccccatgcccctgtcaggacccccagcctcagccctgtggagaaacagctggcgctgaggaacgccctgcgctacttccccccggatgtccaggagctgctggccccagagtttgcccaggagctgcaactgtacggacacatctacatgtaccggttttgccccgacattgaaatgagggcctacccgattgagcagtacccctgccagacgaaagtggctgccgccatcatgcacatgattatgaacaacctggatcctgccgtggcccagtttccccaggagctggtgacctatggaggaaatgggcaggtgttcagcaactgggctcagttctggctgaccatgttctacttgtcgaagatgacagaggagcagactttggtcatgtacagtgggcacccacttggcctctttcccagcagccgcagtgccccacggctcgtcatcaccaatgggatggtcattcccaactactcctcccggacggagtatgagaagctctttgccttgggggttacaatgtacggccagatgacagcaggtagctactgctacatcggtccccagggaatcgttcatggcactgtgctcaccgtgttgaatgctgcacgtcggtacctgggcatcgaggacttggctgggaaggtctttgtcacctctgggctcggcggaatgagtggggctcaggccaaggccgcagtcatcgtggggtgcatcggtgtgatagcagaggtggataaagcagcccttgagaaacgccacaggcagggctggctgatggaagtgactgacagcttggaccgctgcatccagaggctcagggtccttcagctgggattgcaacaagccctgggctgggccggcctccctgctgccctgggactgtgtgtcctttcctgctttgtcaaccttgcacccctgggggaggggaggtgcctggctccctcgggcttctccaggccactcctgggggcacctgttctgcttttgtgtccttccagggaagcaaggaaaaaaaaggaggtgctcagccttggttaccatggcaacgtggtggctctttgggagcgcctggtccacgaattggacacgacgggggagtgcttggtggacctggggtcagatcagacatcctgccacaacccgttcaatggcggctactaccctgtgcagctcagcttcacggaggcccagagcctcatggcctccaaccctgctgtgttcaaggacctggtccaggaaagcctgaggaggcaagtctcagccatcaacaggttggccgaggagaagttcttcttctgggactacggcaatgccttcctcttggaggcccagagagcaggagcggatgtggagaagaaaggtgctggcaggacagagttccgctacccttcctatgtgcagcacatcatgggggacatattctcccagggatttgggcctttccgctgggtgtgcacatcgggggacccccaggacctggcggtcacagacgaactggccacatctgtgctggaggaagccattgctgatggagtgaaggtgtctgtgaagctgcagtacatggacaacatccgctggatccgggaggccgccaggcaccggctggtggtgggctcccaggcaaggatcctgtactcagaccagaagggccgcgtggccatcgctgtggccattaaccaggccatcgcctgcaggaggatcaaggcgccggtggtcctgagccgagatcaccatgacgtgagcggcaccgacagcccctttagggagacctccaacatttacgacggctctgccttctgtgcagacatggctgtgcagaacttcgtgggagatgcctgtcgcggagccacctgggtcgcccttcacaacggagggggcgtgggctggggtgaggtgatcaacgggggattcggcctcgtgctggacggtaccccggaggccgaggggagagccaggctgatgctcagctgggatgtctccaatggtgtggcccggcgctgctggtcagggaaccagaaggcctatgagatcatctgccagaccatgcaggagaacagcaccttggtggtgacactgcctcacaaggtggaggacgagcgggtgctccagcaggccctgcagctctgagggagccaggagtcgcggcccctgcctcccttcctccctggcgatcctcacctgcccagccatggcacacacccttcctgcacacccgcactacctgcacttctcgcacatcctcacgtggcccttatggtgccctgtgcagggtgccaccacagcctcattttacagacagccccctgaggcccagagacatgcagctctctgtccacaaccatgccacttgcatgggagccctgaaggctgtcaaagtccatttagggccaagtcccaagcctgcccgggggccctgcggtgaacactggtcaagctctctccggctgggatgatcacaccctctgcttcctggccacctgccagcctccatgcaactctgtctgtctgctgcccatctgctgtctgtgcaagcaacttctggaccctggcaccctgggctgctggcctggaggagttcgggaaggaggatagaccaggaaataaagggtcaacagag

SEQ ID NO: 198395 - DNA, 795 bp, Homo sapiens
  Payload ID: 19149
  Gene Name: urocortin
  Uniprot ID: P55089
  ENST ID: ENST00000296099
  CDS Start-End: 300-674
tgcgtccagtgctgcttccagcgctagccccaggggcacgaaggctggtgtagggaggtgcgcccctccgggggcccgccagccgtcagactcgaagctgtggctgtcattgcttctacaatcagtgcatgttcttcgctgacgtcagtcggagctgtcctggcactatataaggctggcgacagccccgggacagaccctgtgttccccaaggcgtcttcagcctgccccgagggacagagactggagctcaatcttggaccgtacagacgctcgccgacaacctggccggcggcaccatgaggcaggcgggacgcgcagcgctgctggccgcgctgctgctcctggtacagctgtgccctgggagcagccagaggagccccgaggcggccggggtccaggacccgagtctgcgctggagccccggggcacggaaccagggtggcggggcccgcgcgctcctcttgctgctggcggagcgcttcccgcgccgcgcggggcccggccgattgggactcgggacggcaggcgagcggccgcggcgggacaacccttctctgtccattgacctcacctttcacctgctgcggaccctgctggagctggcgcggacgcagagccagcgggagcgcgccgagcagaaccgcatcatattcgactcggtgggcaagtgatggcccggtttggggctgcgaaaacgttgacccctttcccccaccccagagttgggatgcggggcagagccaccagggcactgtctgcgtgactattttttaataaaagtactgaagaccc

SEQ ID NO: 198396 - DNA, 1481 bp, Homo sapiens
  Payload ID: 19150
  Gene Name: urocortin 2
  Uniprot ID: Q96RP3
  ENST ID: ENST00000273610
  CDS Start-End: 84-422
ggacagtagtgcctggccccagccccaggcagccacagcaggctgccttaccccagaagcagctggtggcgcctgacctcacgatgaccaggtgtgctctgctgttgctgatggtcctgatgttgggcagagtcctggttgtcccagtgacccctatcccaaccttccagctccgccctcagaattctccccagaccactccccgacctgcggcctcagagagcccctcagctgctcccacatggccgtgggctgcccagagccactgcagccccacccgccaccctggctcgcgcattgtcctatcgctggatgtccccatcggcctcttgcagatcttactggagcaagcccgggccagggctgccagggagcaggccaccaccaacgcccgcatcctggcccgtgtcggccactgctgagcctgagagagggggtcacagtgatagggccaccctggatgggaagacctggagggcagccacacagctggacggatgctgccacatctgggcatacagtgtctggacgctgccacatctgggcatacagtgtctggacactgccacatggagccactgtcatgcaggtcatatcagatctgagtgccccacagagtcacagtgtgtctggacagcctggacattggacattgctaagttgggtcactgccacatggagtcttgccatgcctgtgtgccccacagacctaatatatgtccggacagcttggatgctgccacgtaaggtcactgctgtggcgagtcttgctatgtctgggtgccccatagtcacagaacacctggacaccgccacatgcagtcatcatcatgttactttcaggagcctcaacacgagagctcaacactgcctccgaccagtccctctgaggcccacaggtctgtcatcccataggccaccacacagagaaatgctggctgagggtcacttgcttgctctgtgccccatgaggcagcacctgccccagatggacggggctgtgaggggtgtctccaggcacaaaggcccgaacacaggaagcctgtgaccatggcagccttgtcttatgggcgcatatgtgcgtgtgtggctgagtctctgacagctgtgagtgtgtgtgagcagggtaagggtacgtgaggggtctgagaggagtgggtgcttgtcccccaaacctgcatgaagcaagaacaactcctggccaggccctgtcctccccacgtacccctgcatccccagcctcgacccagggacatgcagggctcacaggagacagggctcaggctgccggagctccaaccaaactctgtcccacttcacgcacggactgtcctgggcaaaggtgttcacctttccgagcctcggtttccttatctgtaaagcaaagcgacaccagcaagcctgtgagcattgtgtatatagcagacatggaggtcctgcagcaggaggtgctcaataaacacaaagcgactgaaggatgg

SEQ ID NO: 198397 - DNA, 1200 bp, Homo sapiens
  Payload ID: 19151
  Gene Name: urocortin 3
  Uniprot ID: Q969E3
  ENST ID: ENST00000380433
  CDS Start-End: 229-714
gatccaccctgtgatctgtcacttttatatacacacaggggaggggaccgtttccatagagagggaatatcacagcccacttaggaacaataccggagaagcaggagccgagaccccggagcagccacaagttcatggggacgtgcacggggccgccctcctggccctgaagctgcgccggcctccctgagcgtttcgctgcggagggaagtccactctcggggagagatgctgatgccggtccacttcctgctgctcctgctgctgctcctggggggccccaggacaggcctcccccacaagttctacaaagccaagcccatcttcagctgcctcaacaccgccctgtctgaggctgagaagggccagtgggaggatgcatccctgctgagcaagaggagcttccactacctgcgcagcagagacgcctcttcgggagaggaggaggagggcaaagagaaaaagactttccccatctctggggccaggggtggagccagaggcacccggtacagatacgtgtcccaagcacagcccaggggaaagccacgccaggacacggccaagagtccccaccgcaccaagttcaccctgtccctcgacgtccccaccaacatcatgaacctcctcttcaacatcgccaaggccaagaacctgcgtgcccaggcggccgccaatgcccacctgatggcgcaaattgggaggaagaagtagaggcggaggctggacgggagggcagcggggtggggagggggaggggagggggaggggagggcgagggggggaggggagggggagggtgctgtctgctggtttgtgttttgtgggatcagtcagttttacaggttgctgcactgctgagcccctctgatctcttctggcctttgaccctgtctccctcctgctctgtctgtacacacagaagtgcagtattgtccaaccttcccagacacaaagcagctaacgttcctccctgtactcagcgtctccttcctccctccccacagcaagaggcaaagttcatgcattcctcctctccagtcttctctctgttgaccccatgcctgagaagagagcgttcagggctcctctcccacacatcaacttcttccagggcagaaagaggagctgcagcactcgccttcctgccaccgaatccttccctacctcctcaccccattaaaacaatggcttcttcaa

SEQ ID NO: 198398 - DNA, 2477 bp, Homo sapiens
  Payload ID: 19152
  Gene Name: uromodulin
  Uniprot ID: P07911
  ENST ID: ENST00000302509
  CDS Start-End: 293-2215
aacaacaacctcacagcttggacaaggcaaacattatgccaggaggaaaaaatattccacccccaagaaaacaatatcaaaaaacagaactagagactaattggaggagagattgccagcctggggcaaatgtgtatatataagtatgaggcacatcatgaccagactaactctacctttctggcttcaggacaccagacatcagagacagagagaaaaattcaaagggccaacccgtctttcctttgggcaggtgctatctagacctgaagtagcgggaagagcagaaaggatggggcagccatctctgacttggatgctgatggtggtggtggcctcttggttcatcacaactgcagccactgacacctcagaagcaagatggtgctctgaatgtcacagcaatgccacctgcacggaggatgaggccgttacgacgtgcacctgtcaggagggcttcaccggcgatggcctgacctgcgtggacctggatgagtgcgccattcctggagctcacaactgctccgccaacagcagctgcgtaaacacgccaggctccttctcctgcgtctgccccgaaggcttccgcctgtcgcccggtctcggctgcacagacgtggatgagtgcgctgagcctgggcttagccactgccacgccctggccacatgtgtcaatgtggtgggcagctacttgtgcgtatgccccgcgggctaccggggggatggatggcactgtgagtgctccccgggctcctgcgggccggggttggactgcgtgcccgagggcgacgcgctcgtgtgcgcggatccgtgccaggcgcaccgcaccctggacgagtactggcgcagcaccgagtacggggagggctacgcctgcgacacggacctgcgcggctggtaccgcttcgtgggccagggcggtgcgcgcatggccgagacctgcgtgccagtcctgcgctgcaacacggccgcccccatgtggctcaatggcacgcatccgtccagcgacgagggcatcgtgagccgcaaggcctgcgcgcactggagcggccactgctgcctgtgggatgcgtccgtccaggtgaaggcctgtgccggcggctactacgtctacaacctgacagcgccccccgagtgtcacctggcgtactgcacagaccccagctccgtggaggggacgtgtgaggagtgcagtatagacgaggactgcaaatcgaataatggcagatggcactgccagtgcaaacaggacttcaacatcactgatatctccctcctggagcacaggctggaatgtggggccaatgacatgaaggtgtcgctgggcaagtgccagctgaagagtctgggcttcgacaaggtcttcatgtacctgagtgacagccggtgctcgggcttcaatgacagagacaaccgggactgggtgtctgtagtgaccccagcccgggatggcccctgtgggacagtgttgacgaggaatgaaacccatgccacttacagcaacaccctctacctggcagatgagatcatcatccgtgacctcaacatcaaaatcaactttgcatgctcctaccccctggacatgaaagtcagcctgaagaccgccctacagccaatggtcagtgctctaaacatcagagtgggcgggaccggcatgttcaccgtgcggatggcgctcttccagaccccttcctacacgcagccctaccaaggctcctccgtgacactgtccactgaggcttttctctacgtgggcaccatgttggatgggggcgacctgtcccgatttgcactgctcatgaccaactgctatgccacacccagtagcaatgccacggaccccctgaagtacttcatcatccaggacagatgcccacacactagagactcaactatccaagtggtggagaatggggagtcctcccagggccgattttccgtccagatgttccggtttgctggaaactatgacctagtctacctgcactgtgaagtctatctctgtgacaccatgaatgaaaagtgcaagcctacctgctctgggaccagattccgaagtgggagtgtcatagatcaatcccgtgtcctgaacttgggtcccatcacacggaaaggtgtccaggccacagtctcaagggcttttagcagcttggggctcctgaaagtctggctgcctctgcttctctcggccaccttgaccctgacttttcagtgactgacagcggaaagccctgtgctccatggctgccatctcacctcctgctgggcagggggcatgatgcgggccagtgctccagccacagaaaagaaagttcatgctttgttcagcctgccttcttttctcccttttaatcctggctgtcgagaaacagcctgtgtctttaaatgctgctttttctcaaaatgggacttgtgacggtgtacctgaggcccccatctccttaaagagtgtggcaaaataatgatttttaaatctc

SEQ ID NO: 198399 - DNA, 2408 bp, Homo sapiens
  Payload ID: 19152
  Gene Name: uromodulin
  Uniprot ID: P07911
  ENST ID: ENST00000396134
  CDS Start-End: 125-2146
aactctacctttctggcttcaggacaccagacatcagagacagagagaaaaattcaaagggccaacccgtctttcctttgggcaggtgctatctagacctgaagtagcgggaagagcagaaaggatggggcagccatctctgacttggatgctgatggtggtggtggcctcttggttcatcacaactgcagccactgacacctcagaagcaagaacaaagtacaactgcccagccaggtggagttggaggactccgcagagaggaggcgacactgagcagggtcctgatgaagatttcaccagccagggaagatggtgctctgaatgtcacagcaatgccacctgcacggaggatgaggccgttacgacgtgcacctgtcaggagggcttcaccggcgatggcctgacctgcgtggacctggatgagtgcgccattcctggagctcacaactgctccgccaacagcagctgcgtaaacacgccaggctccttctcctgcgtctgccccgaaggcttccgcctgtcgcccggtctcggctgcacagacgtggatgagtgcgctgagcctgggcttagccactgccacgccctggccacatgtgtcaatgtggtgggcagctacttgtgcgtatgccccgcgggctaccggggggatggatggcactgtgagtgctccccgggctcctgcgggccggggttggactgcgtgcccgagggcgacgcgctcgtgtgcgcggatccgtgccaggcgcaccgcaccctggacgagtactggcgcagcaccgagtacggggagggctacgcctgcgacacggacctgcgcggctggtaccgcttcgtgggccagggcggtgcgcgcatggccgagacctgcgtgccagtcctgcgctgcaacacggccgcccccatgtggctcaatggcacgcatccgtccagcgacgagggcatcgtgagccgcaaggcctgcgcgcactggagcggccactgctgcctgtgggatgcgtccgtccaggtgaaggcctgtgccggcggctactacgtctacaacctgacagcgccccccgagtgtcacctggcgtactgcacagaccccagctccgtggaggggacgtgtgaggagtgcagtatagacgaggactgcaaatcgaataatggcagatggcactgccagtgcaaacaggacttcaacatcactgatatctccctcctggagcacaggctggaatgtggggccaatgacatgaaggtgtcgctgggcaagtgccagctgaagagtctgggcttcgacaaggtcttcatgtacctgagtgacagccggtgctcgggcttcaatgacagagacaaccgggactgggtgtctgtagtgaccccagcccgggatggcccctgtgggacagtgttgacgaggaatgaaacccatgccacttacagcaacaccctctacctggcagatgagatcatcatccgtgacctcaacatcaaaatcaactttgcatgctcctaccccctggacatgaaagtcagcctgaagaccgccctacagccaatggtcagtgctctaaacatcagagtgggcgggaccggcatgttcaccgtgcggatggcgctcttccagaccccttcctacacgcagccctaccaaggctcctccgtgacactgtccactgaggcttttctctacgtgggcaccatgttggatgggggcgacctgtcccgatttgcactgctcatgaccaactgctatgccacacccagtagcaatgccacggaccccctgaagtacttcatcatccaggacagatgcccacacactagagactcaactatccaagtggtggagaatggggagtcctcccagggccgattttccgtccagatgttccggtttgctggaaactatgacctagtctacctgcactgtgaagtctatctctgtgacaccatgaatgaaaagtgcaagcctacctgctctgggaccagattccgaagtgggagtgtcatagatcaatcccgtgtcctgaacttgggtcccatcacacggaaaggtgtccaggccacagtctcaagggcttttagcagcttggggctcctgaaagtctggctgcctctgcttctctcggccaccttgaccctgacttttcagtgactgacagcggaaagccctgtgctccatggctgccatctcacctcctgctgggcagggggcatgatgcgggccagtgctccagccacagaaaagaaagttcatgctttgttcagcctgccttcttttctcccttttaatcctggctgtcgagaaacagcctgtgtctttaaatgctgctttttctcaaaatgggacttgtgacggtgtacctgaggcccccatctccttaaagagtgtggcaaaataatgatttttaaatctc

SEQ ID NO: 198400 - DNA, 2399 bp, Homo sapiens
  Payload ID: 19152
  Gene Name: uromodulin
  ENST ID: ENST00000396138
  CDS Start-End: 68-2137
aaaaaacagaactagagactaattggaggagagattgccagcctggggcaaatgtgtatatataagtatgaggcacatcatgaccagactaactctacctttctggcttcaggacaccagacatcagagacagagagaaaaattcaaagggccaacccgtctttcctttgggcaggtgctatctagacctgaagtagcgggaagagcagaaaggatggggcagccatctctgacttggatgctgatggtggtggtggcctcttggttcatcacaactgcagccactgacacctcagaagcaagatggtgctctgaatgtcacagcaatgccacctgcacggaggatgaggccgttacgacgtgcacctgtcaggagggcttcaccggcgatggcctgacctgcgtggacctggatgagtgcgccattcctggagctcacaactgctccgccaacagcagctgcgtaaacacgccaggctccttctcctgcgtctgccccgaaggcttccgcctgtcgcccggtctcggctgcacagacgtggatgagtgcgctgagcctgggcttagccactgccacgccctggccacatgtgtcaatgtggtgggcagctacttgtgcgtatgccccgcgggctaccggggggatggatggcactgtgagtgctccccgggctcctgcgggccggggttggactgcgtgcccgagggcgacgcgctcgtgtgcgcggatccgtgccaggcgcaccgcaccctggacgagtactggcgcagcaccgagtacggggagggctacgcctgcgacacggacctgcgcggctggtaccgcttcgtgggccagggcggtgcgcgcatggccgagacctgcgtgccagtcctgcgctgcaacacggccgcccccatgtggctcaatggcacgcatccgtccagcgacgagggcatcgtgagccgcaaggcctgcgcgcactggagcggccactgctgcctgtgggatgcgtccgtccaggtgaaggcctgtgccggcggctactacgtctacaacctgacagcgccccccgagtgtcacctggcgtactgcacagaccccagctccgtggaggggacgtgtgaggagtgcagtatagacgaggactgcaaatcgaataatggcagatggcactgccagtgcaaacaggacttcaacatcactgatatctccctcctggagcacaggctggaatgtggggccaatgacatgaaggtgtcgctgggcaagtgccagctgaagagtctgggcttcgacaaggtcttcatgtacctgagtgacagccggtgctcgggcttcaatgacagagacaaccgggactgggtgtctgtagtgaccccagcccgggatggcccctgtgggacagtgttgacgaggaatgaaacccatgccacttacagcaacaccctctacctggcagatgagatcatcatccgtgacctcaacatcaaaatcaactttgcatgctcctaccccctggacatgaaagtcagcctgaagaccgccctacagccaatggtcagtgctctaaacatcagagtgggcgggaccggcatgttcaccgtgcggatggcgctcttccagaccccttcctacacgcagccctaccaaggctcctccgtgacactgtccactgaggcttttctctacgtgggcaccatgttggatgggggcgacctgtcccgatttgcactgctcatgaccaactgctatgccacacccagtagcaatgccacggaccccctgaagtacttcatcatccaggacagatgcccacacactagagactcaactatccaagtggtggagaatggggagtcctcccagggccgattttccgtccagatgttccggtttgctggaaactatgacctagtctacctgcactgtgaagtctatctctgtgacaccatgaatgaaaagtgcaagcctacctgctctgggaccagattccgaagtgggagtgtcatagatcaatcccgtgtcctgaacttgggtcccatcacacggaaaggtgtccaggccacagtctcaagggcttttagcagcttggggctcctgaaagtctggctgcctctgcttctctcggccaccttgaccctgacttttcagtgactgacagcggaaagccctgtgctccatggctgccatctcacctcctgctgggcagggggcatgatgcgggccagtgctccagccacagaaaagaaagttcatgctttgttcagcctgccttcttttctcccttttaatcctggctgtcgagaaacagcctgtgtctttaaatgctgctttttctcaaaatgggacttgtgacggtgtacctgaggcccccatctccttaaagagtgtggcaaaataatgatttttaaatctc

SEQ ID NO: 198401 - DNA, 546 bp, Homo sapiens
  Payload ID: 19152
  Gene Name: uromodulin
  ENST ID: ENST00000570972
  CDS Start-End: 459-546
aatactggcatccaccctggactatttttccaattggaagaaatagtaagtgaccactccagaaacatttaaatgcattgtgaaggttaattacctctcaagttgctcgtctcaagccacttctttacgatatgtgagttgcatgaaggagcagactgccatgttcattgttctccatggtgactagctccctgtttggcacaatgtagctactcaatagatgtttgttgaatgaataagtgatccaggcaaattgaaagtttccaggcagaggatcagttaaaatccaaagctgccttcagtaaagtggtgagtccagaacactattccatctggctacttcctgctccaaatgactgagttcttcaaaatgtgcaatgtgctgagaattggggagccaagactgggatgttggtgaggtgctatctagacctgaagtagcgggaagagcagaaaggatggggcagccatctctgacttggatgctgatggtggtggtggcctcttggttcatcacaactgcagccactgacacctcagaagcaa

SEQ ID NO: 198402 - DNA, 589 bp, Homo sapiens
  Payload ID: 19152
  Gene Name: uromodulin
  ENST ID: ENST00000571174
  CDS Start-End: 214-589
agactaactctacctttctggcttcaggtaaggctatctgtagctgtcttctcctagcccagcttctccccatcctatttgagggaggtaggagaggaaattaagaccttggacactggggtcagacctggatttgagtcattattctgccaattattggcttcatgatctttagtgctatctagacctgaagtagcgggaagagcagaaaggatggggcagccatctctgacttggatgctgatggtggtggtggcctcttggttcatcacaactgcagccactgacacctcagaagcaagatggtgctctgaatgtcacagcaatgccacctgcacggaggatgaggccgttacgacgtgcacctgtcaggagggcttcaccggcgatggcctgacctgcgtggacctggatgagtgcgccattcctggagctcacaactgctccgccaacagcagctgcgtaaacacgccaggctccttctcctgcgtctgccccgaaggcttccgcctgtcgcccggtctcggctgcacagacgtggatgagtgcgctgagcctgggcttagccactgccacgccctggccacat

SEQ ID NO: 198403 - DNA, 537 bp, Homo sapiens
  Payload ID: 19152
  Gene Name: uromodulin
  ENST ID: ENST00000570757
  CDS Start-End: 273-537
taactctacctttctggcttcaggtaaggctatctgtagctgtcttctcctagcccagcttctccccatcctatttgagggaggtaggagaggaaattaagaccttggacactggggtcagacctggatttgagtcattattctgccaattattggcttcatgatctttagacaccagacatcagagacagagagaaaaattcaaagggccaacccgtctttcctttgggcaggtgctatctagacctgaagtagcgggaagagcagaaaggatggggcagccatctctgacttggatgctgatggtggtggtggcctcttggttcatcacaactgcagccactgacacctcagaagcaagatggtgctctgaatgtcacagcaatgccacctgcacggaggatgaggccgttacgacgtgcacctgtcaggagggcttcaccggcgatggcctgacctgcgtggacctggatgagtgcgccattcctggagctcacaactgctccgccaacagcagctgcgtaaacacgccaggct

SEQ ID NO: 198404 - DNA, 559 bp, Homo sapiens
  Payload ID: 19152
  Gene Name: uromodulin
  ENST ID: ENST00000577168
  CDS Start-End: 146-559
aacaacaacctcacagcttggacaaggcaaacattatgccaggaggaaaaaatattccacccccaagaaaacaatatcaaaaaacagaactagagactaattggaggagagattgccagcctggggcaaatgtgtatatataagtatgaggcacatcatgaccagactaactctacctttctggcttcaggtgctatctagacctgaagtagcgggaagagcagaaaggatggggcagccatctctgacttggatgctgatggtggtggtggcctcttggttcatcacaactgcagccactgacacctcagaagcaagatggtgctctgaatgtcacagcaatgccacctgcacggaggatgaggccgttacgacgtgcacctgtcaggagggcttcaccggcgatggcctgacctgcgtggacctggatgagtgcgccattcctggagctcacaactgctccgccaacagcagctgcgtaaacacgccaggctccttctcctgcgtctgccccgaaggcttccgcctgtcgcccggtctcggctgcacagacgtggat

SEQ ID NO: 198405 - DNA, 545 bp, Homo sapiens
  Payload ID: 19152
  Gene Name: uromodulin
  ENST ID: ENST00000573567
  CDS Start-End: 62-545
aactctacctttctggcttcaggtgctatctagacctgaagtagcgggaagagcagaaaggatggggcagccatctctgacttggatgctgatggtggtggtggcctcttggttcatcacaactgcagccactgacacctcagaagcaagaacaaagtacaactgcccagccaggtggagttggaggactccgcagagaggaggcgacactgagcagggatggtgctctgaatgtcacagcaatgccacctgcacggaggatgaggccgttacgacgtgcacctgtcaggagggcttcaccggcgatggcctgacctgcgtggacctggatgagtgcgccattcctggagctcacaactgctccgccaacagcagctgcgtaaacacgccaggctccttctcctgcgtctgccccgaaggcttccgcctgtcgcccggtctcggctgcacagacgtggatgagtgcgctgagcctgggcttagccactgccacgccctggccacatgtgtcaatgtggtgggcagctacttgtgcgtatgccccg

SEQ ID NO: 198406 - DNA, 2315 bp, Homo sapiens
  Payload ID: 19152
  Gene Name: uromodulin
  Uniprot ID: P07911
  ENST ID: ENST00000570689
  CDS Start-End: 148-2070
agatcatgtggcatagagcccctgacaggccacgagccagagaatgggtgtgccacctccaggtcccccaggcgtaactggagcctcaggaggtgtgtgctcagagaggtgctatctagacctgaagtagcgggaagagcagaaaggatggggcagccatctctgacttggatgctgatggtggtggtggcctcttggttcatcacaactgcagccactgacacctcagaagcaagatggtgctctgaatgtcacagcaatgccacctgcacggaggatgaggccgttacgacgtgcacctgtcaggagggcttcaccggcgatggcctgacctgcgtggacctggatgagtgcgccattcctggagctcacaactgctccgccaacagcagctgcgtaaacacgccaggctccttctcctgcgtctgccccgaaggcttccgcctgtcgcccggtctcggctgcacagacgtggatgagtgcgctgagcctgggcttagccactgccacgccctggccacatgtgtcaatgtggtgggcagctacttgtgcgtatgccccgcgggctaccggggggatggatggcactgtgagtgctccccgggctcctgcgggccggggttggactgcgtgcccgagggcgacgcgctcgtgtgcgcggatccgtgccaggcgcaccgcaccctggacgagtactggcgcagcaccgagtacggggagggctacgcctgcgacacggacctgcgcggctggtaccgcttcgtgggccagggcggtgcgcgcatggccgagacctgcgtgccagtcctgcgctgcaacacggccgcccccatgtggctcaatggcacgcatccgtccagcgacgagggcatcgtgagccgcaaggcctgcgcgcactggagcggccactgctgcctgtgggatgcgtccgtccaggtgaaggcctgtgccggcggctactacgtctacaacctgacagcgccccccgagtgtcacctggcgtactgcacagaccccagctccgtggaggggacgtgtgaggagtgcagtatagacgaggactgcaaatcgaataatggcagatggcactgccagtgcaaacaggacttcaacatcactgatatctccctcctggagcacaggctggaatgtggggccaatgacatgaaggtgtcgctgggcaagtgccagctgaagagtctgggcttcgacaaggtcttcatgtacctgagtgacagccggtgctcgggcttcaatgacagagacaaccgggactgggtgtctgtagtgaccccagcccgggatggcccctgtgggacagtgttgacgaggaatgaaacccatgccacttacagcaacaccctctacctggcagatgagatcatcatccgtgacctcaacatcaaaatcaactttgcatgctcctaccccctggacatgaaagtcagcctgaagaccgccctacagccaatggtcagtgctctaaacatcagagtgggcgggaccggcatgttcaccgtgcggatggcgctcttccagaccccttcctacacgcagccctaccaaggctcctccgtgacactgtccactgaggcttttctctacgtgggcaccatgttggatgggggcgacctgtcccgatttgcactgctcatgaccaactgctatgccacacccagtagcaatgccacggaccccctgaagtacttcatcatccaggacagatgcccacacactagagactcaactatccaagtggtggagaatggggagtcctcccagggccgattttccgtccagatgttccggtttgctggaaactatgacctagtctacctgcactgtgaagtctatctctgtgacaccatgaatgaaaagtgcaagcctacctgctctgggaccagattccgaagtgggagtgtcatagatcaatcccgtgtcctgaacttgggtcccatcacacggaaaggtgtccaggccacagtctcaagggcttttagcagcttggggctcctgaaagtctggctgcctctgcttctctcggccaccttgaccctgacttttcagtgactgacagcggaaagccctgtgctccatggctgccatctcacctcctgctgggcagggggcatgatgcgggccagtgctccagccacagaaaagaaagttcatgctttgttcagcctgccttcttttctcccttttaatcctggctgtcgagaaacagcctgtgtctttaaatgctgctttttctcaaaatgggacttgtgacggtgtacctgaggcccccatctccttaaagagtgtggcaaaat

SEQ ID NO: 198407 - DNA, 737 bp, Homo sapiens
  Payload ID: 19152
  Gene Name: uromodulin
  ENST ID: ENST00000574195
  CDS Start-End: 255-737
gcagaggatcagttaaaatccaaagctgccttcagtaaagtggtgagtccagaacactattccatctggctacttcctgctccaaatgactgagttcttcaaaatgtgcaatgtgctgagaattggggagccaagactgggatgttggtgaggacaccagacatcagagacagagagaaaaattcaaagggccaacccgtctttcctttgggcaggtgctatctagacctgaagtagcgggaagagcagaaaggatggggcagccatctctgacttggatgctgatggtggtggtggcctcttggttcatcacaactgcagccactgacacctcagaagcaagaacaaagtacaactgcccagccaggtggagttggaggactccgcagagaggaggcgacactgagcagggtcctgatgaagatttcaccagccagggaagcagaaaacataaaatgtgcaaagaaagggaggggcaacaggttcaccgtaaatcctaccaaagatggtgctctgaatgtcacagcaatgccacctgcacggaggatgaggccgttacgacgtgcacctgtcaggagggcttcaccggcgatggcctgacctgcgtggacctggatgagtgcgccattcctggagctcacaactgctccgccaacagcagctgcgtaaacacgccaggctccttctcctgcgtctgccccgaaggcttccgcctgtcgcccggtctcggctgcaca

SEQ ID NO: 198408 - DNA, 543 bp, Homo sapiens
  Payload ID: 19152
  Gene Name: uromodulin
  ENST ID: ENST00000576546
  CDS Start-End: 286-543
acgatatgtgagttgcatgaaggagcagactgccatgttcattgttctccatggtgactagctccctgtttggcacaatgtagctactcaatagatgtttgttgaatgaataagtgatccaggcaaattgaaagtttccaggcagaggatcagttaaaatccaaagctgccttcagtaaagtggacaccagacatcagagacagagagaaaaattcaaagggccaacccgtctttcctttgggcaggtgctatctagacctgaagtagcgggaagagcagaaaggatggggcagccatctctgacttggatgctgatggtggtggtggcctcttggttcatcacaactgcagccactgacacctcagaagcaagatggtgctctgaatgtcacagcaatgccacctgcacggaggatgaggccgttacgacgtgcacctgtcaggagggcttcaccggcgatggcctgacctgcgtggacctggatgagtgcgccattcctggagctcacaactgctccgccaacagcagctgcgtaaacacg

SEQ ID NO: 198409 - DNA, 526 bp, Homo sapiens
  Payload ID: 19152
  Gene Name: uromodulin
  ENST ID: ENST00000576688
  CDS Start-End: 219-526
agactaactctacctttctggcttcaggcagaggatcagttaaaatccaaagctgccttcagtaaagtggtgagtccagaacactattccatctggctacttcctgctccaaatgactgagttcttcaaaatgtgcaatgtgctgagaattggggagccaagactgggatgttggtgaggtgctatctagacctgaagtagcgggaagagcagaaaggatggggcagccatctctgacttggatgctgatggtggtggtggcctcttggttcatcacaactgcagccactgacacctcagaagcaagatggtgctctgaatgtcacagcaatgccacctgcacggaggatgaggccgttacgacgtgcacctgtcaggagggcttcaccggcgatggcctgacctgcgtggacctggatgagtgcgccattcctggagctcacaactgctccgccaacagcagctgcgtaaacacgccaggctccttctcctgcgtctgccccgaaggcttccgcctgtcgcccgg

SEQ ID NO: 198410 - DNA, 1106 bp, Homo sapiens
  Payload ID: 19153
  Gene Name: uromodulin-like 1
  ENST ID: ENST00000400421
  CDS Start-End: 1-728
accctgtgggctcctggtacaacgtcaccatactggtgaaaatggacttcaaggaactccagcaagtggaccccaggctcctgaaccacatgcgccttctgcattccttggtcaccagcgccctgcaaccaatggcctccaccgtccaccacctgcactcagcccctgggaacgcctccaccacagtgtcgcggctgctactgggcctgccacggccactgcctgtggctgacgtctccaccctgctgggtgacattgcgaagcgtgtctatgaagtgatcagcgtccaggtgcaagatgtcaatgagtgtttctatgaggagctcaatgcctgctctggaagggaactgtgcgcaaacctggagggctcgtactggtgcgtctgtcaccaggaagctccagccacgtctccacggaagctgaacctggagtgggaagattgtcctccagtcagtgactacgtggtcctcaacgtcaccagtgacagttttcaagtatcctggcgtttaaattctacacagaaccacactttccatgtccgggtttaccggggtatggagttgctcaggagcgccaggacacagagccaggcactggcagtggctgggctggaggctggagtgctgtacagggtgaagaccagctaccaggggtgcggggccgacgtctccaccacgctgaccatcaaaaccaagtacgttcttgagaagttggactttcagagctaaattctggaacctcccgggcaggttggaacccattggtcaccctgatgttgggggcctgagtaagggcctcgtcgtatgcccaggtatttgaagtcacaataaagattgtaaaccacaacctgacggagaagttactcaaccgcagcagtgtggagtaccaggacttttctagacaactgcttcacgaggtcgagagctccttcccaccagtggtgtctgacttgtaccgaagtgggaagctgagaatgcagatcgtgtctctccaggcgggaagtgtggtcgtgaggctcaagctcaccgtgcaggaccccgggtttcccatgggcatctccacgctggcccccatactccagcccctgttggcaagcacagtgttcc

SEQ ID NO: 198411 - DNA, 5516 bp, Homo sapiens
  Payload ID: 19153
  Gene Name: uromodulin-like 1
  Uniprot ID: Q5DID0
  ENST ID: ENST00000400424
  CDS Start-End: 397-4137
cgctggtttcctctggaggctgcgagggagaaaccgtcccctgcctctcccaggctctggggtgagcccttcctggcatcccgggctcattgtagatggatcactccaatctccatggcttctcagggcttccctccatgcacctcaaatctctctctccttccttttgtaaggatgccagtcattggatttaggttcaccttaaatccaggatgatctcatctaaattacatctgcaaaaagaccctttttccaaaaaaaggcctctccctgttgggctaccagctatgcagccaccgtgtgacccacactgtacagaaggtggaggccgtgcagacgtcctacacgtcctatgtgtcctgcggcggctggatcccctggaggcggtgccctaagatggtttaccggacacagtacctggtagtggaggtccccgagtccaggaacgtgactgactgctgtgagggctatgaacagctcggcctctactgtgtcttgcccctgaatcagtccgggcagttcacgtcaagacctggggcctgccccgcagaggggcctgaaccatccacctccccctgcagcttggacatcgactgtcctggacttgagaagtgctgcccctggtcaggggggcgctactgcatggcccctgcaccccaagctccagagagggaccctgtgggctcctggtacaacgtcaccatactggtgaaaatggacttcaaggaactccagcaagtggaccccaggctcctgaaccacatgcgccttctgcattccttggtcaccagcgccctgcaaccaatggcctccaccgtccaccacctgcactcagcccctgggaacgcctccaccacagtgtcgcggctgctactgggcctgccacggccactgcctgtggctgacgtctccaccctgctgggtgacattgcgaagcgtgtctatgaagtgatcagcgtccaggtgcaagatgtcaatgagtgtttctatgaggagctcaatgcctgctctggaagggaactgtgcgcaaacctggagggctcgtactggtgcgtctgtcaccaggaagctccagccacgtctccacggaagctgaacctggagtgggaagattgtcctccagtcagtgactacgtggtcctcaacgtcaccagtgacagttttcaagtatcctggcgtttaaattctacacagaaccacactttccatgtccgggtttaccggggtatggagttgctcaggagcgccaggacacagagccaggcactggcagtggctgggctggaggctggagtgctgtacagggtgaagaccagctaccaggggtgcggggccgacgtctccaccacgctgaccatcaaaaccaatgcccaggtatttgaagtcacaataaagattgtaaaccacaacctgacggagaagttactcaaccgcagcagtgtggagtaccaggacttttctagacaactgcttcacgaggtcgagagctccttcccaccagtggtgtctgacttgtaccgaagtgggaagctgagaatgcagatcgtgtctctccaggcgggaagtgtggtcgtgaggctcaagctcaccgtgcaggaccccgggtttcccatgggcatctccacgctggcccccatactccagcccctgttggcaagcacagtgttccagattgaccggcaggggacacgcgtgcaagactgggacgagtgtgtggacagcgcggaacacgactgctcaccggctgcctggtgcatcaacctggagggctcctacacctgccagtgccgtaccaccagggacgccaccccctcccgcgcaggccgggcctgtgagggtgacctggtgagccccatgggcggtggactgtctgcggcaacaggggtaacggtcccaggtcttggcacgggaacagcagccctcggcctagagaacttcaccttgtcacccagtcctgggtaccctcagggcaccccggcagcaggccaggcctggaccccagagccctcacccagaagagggggcagcaatgtggtcgggtatgacaggaacaacacaggaaaaggcgtggagcaggagctacagggaaactccatcatggagccaccctcctggccttcccctactgaggaccccaccggccacttcctgtggcatgccacccgttccacccgggaaacacttctgaatcccacgtggctgcgaaatgaggacagtggaccctccggttctgtagacctgccattgacctccaccctcacagctctgaagacccccgcctgtgttcctgtctccattgggaggatcatggtctccaatgtgaccagcaccggcttccacctggcatgggaggcggatcttgctatggactccaccttccagctcactctgacttccatgtggagccctgctgtggtcctagagacctggaacacgagtgtgacactgtcggggctggagcctggggtcttgcacctggttgagatcatggccaaagcatgtgggaaagaaggtgccagagctcatctgaaagtgaggacagcagcccggaagctcattggaaaggtcagaatcaaaaatgtcaggtactcagaatcctttcgcaacgcaagcagccaggagtatcgagatttcctagaactattcttcaggatggtgcggggctccctgccagccaccatgtgtcagcacatggacgctggtggggtcaggatggaagtcgtcagcgtcaccaacggcagcatcgtggtggagtttcacttgctgataatcgcagatgtggatgtccaggaggtgtcagctgcatttctcaccgccttccagaccgtgcctctgctggaggtgatcagaggcgacaccttcatacaggattacgatgagtgtgaaaggaaggaggacgactgtgtgccggggacatcctgtcgaaacaccctcgggtctttcacttgtagctgcgagggaggagcccccgacttccctgtggaatattctgagagaccctgtgaaggtgactctcctggcaatgaaacctgggccaccagcccagagaggcctctcaccacagcagggaccaaggctgcctttgtgcaaggcaccagccccaccccccaaggcctgccccagcggctgaacctgaccggagcagtcagggtgctctgtgagatcgagaaggtggttgtcgccatccagaagcgcttcctgcagcaggaatccatccccgagtcctcgttgtacctcagccacccctcctgcaacgtgagccacagcaatggcacacacgtgctcctggaggccggctggagcgagtgtgggaccctcatgcagagcaacatgacgaacaccgtggtgaggaccacgctgaggaacgacctgtcccaggagggcatcatccaccacctgaagatcctgagccccatctactgcgccttccagaatgacctgctgacatcctccggcttcaccctggagtggggggtttacaccatcatcgaggacctccacggcgctgggaattttgttaccgaaatgcagttgtttatcggagactctcccatacctcagaattatagcgtgtctgccagtgacgatgtcaggatcgaagtggggctctacaggcagaaaagcaacctcaaggtggtcctgacggagtgctgggcaaccccgtctagcaacgcccgggaccccatcaccttcagcttcattaacaacagctgccctgtgcccaacacatacaccaacgtgattgagaacggcaactccaataaggcccagttcaagctgaggatcttttcctttatcaacgactccatcgtctacctgcactgcaaactccgcgtctgcatggaatcccccggagccacgtgcaaaatcaattgcaataactttcggttgctgcaaaatagtgaaacctctgccacacaccagatgtcctggggacccctcatccggtctgaaggtgagcctcctcatgcagaagcaggcctgggtgccggttatgtggtccttattgtggtggccatcttcgtgctggtggcgggaacagccacccttctgatcgtgcgctaccagagaatgaatgggagatacaactttaaaatccagtccaacaacttcagctaccaggtgttctacgaataggaggcgcaggctgacaggaaggtcgccgtgagtcaagctgcctccagaacctcagagcttccctggtgggctcccccgggatccccagtgtctctctgcacctccacccatccctcggttcttaactcttcaagccttaacggaggtctgctctgacgggtgggctctgccagagcccgggtgagcccagaaaggaagacagcagccaccgtctgtcccgaagaggcaggccgtcctgtaggtcctagaggagccacagcccaggggcagatgaaggggctgcggaagacgggggcagtcctgggggtgctgcggctacaccaccacccgcgcggcccccgcagcctagacctcccaggcctgtgaccctccacaccagccctcagaaccctcctgggcttgccctcccttggcgtccgtcaccctttggcaaatatagaatatttcacattctcagagagacccgaccgcgctcttgatgctctttcgaaaataggtcagtcttagaaatacactgctaatgttatttttagtggatgtttatgctgtttgacttttctcctgtgtaccaaggtattgcttttatttacacgacagcgactcaaaaggcactcgattaatgtgacaaccttttcaataagcagaaataacgtaggtacacatcactctttacatttttctaagcattttcacagccgtttcttcatataatccgaccacagtgggaggtgtgatttacccattacacaatgagaaaccagaggagccgatgagttacttaattgaggtcacagaatgaattagcaagaaaatggttctaaaatctaagtattttagtctagaattttctccattacatcatcctaagagataatgctctgtacttcatttgaaataaactggaattgtattagatagctcacacctgaaagtagagtgtttttcctcagtgaacttagaattataacatggccttagttttcaacccatgatactaattttgttgaatataattaattgtcattcatacagaacatttggggaaaggagtattttgatttactggatattctcagagtcagtaaagaatgacagtgggtaatatgtgtggatcacagattctgatcaagtagaatcaatcgcataagacactgaaatgtggctggttgtgctggatgctccatttgggatggtccatcacaggctcgctgagcatccaacgagggccggtgctgtgttgggcacgctggggaggccagaaacgcatctctggttcttcccaagtcatgtcccgctgttctgatgtcagctgaggagctttcacttgcctttcttggaagagcatgacacatattcagtaaaaccagctgttgagcccc

SEQ ID NO: 198412 - DNA, 5442 bp, Homo sapiens
  Payload ID: 19153
  Gene Name: uromodulin-like 1
  Uniprot ID: Q5DID0
  ENST ID: ENST00000400427
  CDS Start-End: 397-4521
cgctggtttcctctggaggctgcgagggagaaaccgtcccctgcctctcccaggctctggggtgagcccttcctggcatcccgggctcattgtagatggatcactccaatctccatggcttctcagggcttccctccatgcacctcaaatctctctctccttccttttgtaaggatgccagtcattggatttaggttcaccttaaatccaggatgatctcatctaaattacatctgcaaaaagaccctttttccaaaaaaaggcctctccctgttgggctaccagctatgcagccaccgtgtgacccacactgtacagaaggtggaggccgtgcagacgtcctacacgtcctatgtgtcctgcggcggctggatcccctggaggcggtgccctaagatggtttaccggacacagtacctggtagtggaggtccccgagtccaggaacgtgactgactgctgtgagggctatgaacagctcggcctctactgtgtcttgcccctgaatcagtccgggcagttcacgtcaagacctggggcctgccccgcagaggggcctgaaccatccacctccccctgcagcttggacatcgactgtcctggacttgagaagtgctgcccctggtcaggggggcgctactgcatggcccctgcaccccaagctccagagagggaccctgtgggctcctggtacaacgtcaccatactggtgaaaatggacttcaaggaactccagcaagtggaccccaggctcctgaaccacatgcgccttctgcattccttggtcaccagcgccctgcaaccaatggcctccaccgtccaccacctgcactcagcccctgggaacgcctccaccacagtgtcgcggctgctactgggcctgccacggccactgcctgtggctgacgtctccaccctgctgggtgacattgcgaagcgtgtctatgaagtgatcagcgtccaggtgcaagatgtcaatgagtgtttctatgaggagctcaatgcctgctctggaagggaactgtgcgcaaacctggagggctcgtactggtgcgtctgtcaccaggaagctccagccacgtctccacggaagctgaacctggagtgggaagattgtcctccagtcagtgactacgtggtcctcaacgtcaccagtgacagttttcaagtatcctggcgtttaaattctacacagaaccacactttccatgtccgggtttaccggggtatggagttgctcaggagcgccaggacacagagccaggcactggcagtggctgggctggaggctggagtgctgtacagggtgaagaccagctaccaggggtgcggggccgacgtctccaccacgctgaccatcaaaaccaatgcccaggtatttgaagtcacaataaagattgtaaaccacaacctgacggagaagttactcaaccgcagcagtgtggagtaccaggacttttctagacaactgcttcacgaggtcgagagctccttcccaccagtggtgtctgacttgtaccgaagtgggaagctgagaatgcagatcgtgtctctccaggcgggaagtgtggtcgtgaggctcaagctcaccgtgcaggaccccgggtttcccatgggcatctccacgctggcccccatactccagcccctgttggcaagcacagtgttccagattgaccggcaggggacacgcgtgcaagactgggacgagtgtgtggacagcgcggaacacgactgctcaccggctgcctggtgcatcaacctggagggctcctacacctgccagtgccgtaccaccagggacgccaccccctcccgcgcaggccgggcctgtgagggtgacctggtgagccccatgggcggtggactgtctgcggcaacaggggtaacggtcccaggtcttggcacgggaacagcagccctcggcctagagaacttcaccttgtcacccagtcctgggtaccctcagggcaccccggcagcaggccaggcctggaccccagagccctcacccagaagagggggcagcaatgtggtcgggtatgacaggaacaacacaggaaaaggcgtggagcaggaggtgcccagcactgccccgggtctggggatggaccaggggagccccagccaggtgaaccccagccaggggagccccagccaggggagcctcagacaggagagtaccagccaggcgagccccagccagaggagcaccagccaggggagccccagccaggtgaaccccagccagcggagcaccagccacgcgaactccagccaggggagccccagccaggggagccccagccaggagagccccagccaggggagcaccagccaggcgagccccagccataggaacactatcggggtgataggcaccacctcctccccgaaggctactgggtcaacccacagcttccctcctggggccacagatggcccactggccctccctggacagctacagggaaactccatcatggagccaccctcctggccttcccctactgaggaccccaccggccacttcctgtggcatgccacccgttccacccgggaaacacttctgaatcccacgtggctgcgaaatgaggacagtggaccctccggttctgtagacctgccattgacctccaccctcacagctctgaagacccccgcctgtgttcctgtctccattgggaggatcatggtctccaatgtgaccagcaccggcttccacctggcatgggaggcggatcttgctatggactccaccttccagctcactctgacttccatgtggagccctgctgtggtcctagagacctggaacacgagtgtgacactgtcggggctggagcctggggtcttgcacctggttgagatcatggccaaagcatgtgggaaagaaggtgccagagctcatctgaaagtgaggacagcagcccggaagctcattggaaaggtcagaatcaaaaatgtcaggtactcagaatcctttcgcaacgcaagcagccaggagtatcgagatttcctagaactattcttcaggatggtgcggggctccctgccagccaccatgtgtcagcacatggacgctggtggggtcaggatggaagtcgtcagcgtcaccaacggcagcatcgtggtggagtttcacttgctgataatcgcagatgtggatgtccaggaggtgtcagctgcatttctcaccgccttccagaccgtgcctctgctggaggtgatcagaggcgacaccttcatacaggattacgatgagtgtgaaaggaaggaggacgactgtgtgccggggacatcctgtcgaaacaccctcgggtctttcacttgtagctgcgagggaggagcccccgacttccctgtggaatattctgagagaccctgtgaaggtgactctcctggcaatgaaacctgggccaccagcccagagaggcctctcaccacagcagggaccaaggctgcctttgtgcaaggcaccagccccaccccccaaggcctgccccagcggctgaacctgaccggagcagtcagggtgctctgtgagatcgagaaggtggttgtcgccatccagaagcgcttcctgcagcaggaatccatccccgagtcctcgttgtacctcagccacccctcctgcaacgtgagccacagcaatggcacacacgtgctcctggaggccggctggagcgagtgtgggaccctcatgcagagcaacatgacgaacaccgtggtgaggaccacgctgaggaacgacctgtcccaggagggcatcatccaccacctgaagatcctgagccccatctactgcgccttccagaatgacctgctgacatcctccggcttcaccctggagtggggggtttacaccatcatcgaggacctccacggcgctgggaattttgttaccgaaatgcagttgtttatcggagactctcccatacctcagaattatagcgtgtctgccagtgacgatgtcaggatcgaagtggggctctacaggcagaaaagcaacctcaaggtggtcctgacggagtgctgggcaaccccgtctagcaacgcccgggaccccatcaccttcagcttcattaacaacagctgccctgtgcccaacacatacaccaacgtgattgagaacggcaactccaataaggcccagttcaagctgaggatcttttcctttatcaacgactccatcgtctacctgcactgcaaactccgcgtctgcatggaatcccccggagccacgtgcaaaatcaattgcaataactttcggttgctgcaaaatagtgaaacctctgccacacaccagatgtcctggggacccctcatccggtctgaaggtgagcctcctcatgcagaagcaggcctgggtgccggttatgtggtccttattgtggtggccatcttcgtgctggtggcgggaacagccacccttctgatcgtgcgctaccagagaatgaatgggagatacaactttaaaatccagtccaacaacttcagctaccaggtgttctacgaataggaggcgcaggctgacaggaaggtcgccgtgagtcaagctgcctccagaacctcagagcttccctggtgggctcccccgggatccccagtgtctctctgcacctccacccatccctcggttcttaactcttcaagccttaacggaggtctgctctgacgggtgggctctgccagagcccgggtgagcccagaaaggaagacagcagccaccgtctgtcccgaagaggcaggccgtcctgtaggtcctagaggagccacagcccaggggcagatgaaggggctgcggaagacgggggcagtcctgggggtgctgcggctacaccaccacccgcgcggcccccgcagcctagacctcccaggcctgtgaccctccacaccagccctcagaaccctcctgggcttgccctcccttggcgtccgtcaccctttggcaaatatagaatatttcacattctcagagagacccgaccgcgctcttgatgctctttcgaaaataggtcagtcttagaaatacactgctaatgttatttttagtggatgtttatgctgtttgacttttctcctgtgtaccaaggtattgcttttatttacacgacagcgactcaaaaggcactcgattaatgtgacaaccttttcaataagcagaaataacgtaggtacacatcactctttacatttttctaagcattttcacagccgtttcttcatataatccgaccacagtgggaggtgtgatttacccattacacaatgagaaaccagaggagccgatgagttacttaattgaggtcacagaatgaattagcaagaaaatggttctaaaatctaagtattttagtctagaattttctccattacatcatcctaagagataatgctctgtacttcatttgaaataaactggaattgtattagatagctc

SEQ ID NO: 198413 - DNA, 5262 bp, Homo sapiens
  Payload ID: 19153
  Gene Name: uromodulin-like 1
  Uniprot ID: Q5DID0
  ENST ID: ENST00000408989
  CDS Start-End: 1-4341
atgctcaggacctcggggctggcactgctggctctggtcagtgctgtgggcccaagccaggccagcggcttcacagaaaaaggcctctccctgttgggctaccagctatgcagccaccgtgtgacccacactgtacagaaggtggaggccgtgcagacgtcctacacgtcctatgtgtcctgcggcggctggatcccctggaggcggtgccctaagatggtttaccggacacagtacctggtagtggaggtccccgagtccaggaacgtgactgactgctgtgagggctatgaacagctcggcctctactgtgtcttgcccctgaatcagtccgggcagttcacgtcaagacctggggcctgccccgcagaggggcctgaaccatccacctccccctgcagcttggacatcgactgtcctggacttgagaagtgctgcccctggtcaggggggcgctactgcatggcccctgcaccccaagctccagagagggaccctgtgggctcctggtacaacgtcaccatactggtgaaaatggacttcaaggaactccagcaagtggaccccaggctcctgaaccacatgcgccttctgcattccttggtcaccagcgccctgcaaccaatggcctccaccgtccaccacctgcactcagcccctgggaacgcctccaccacagtgtcgcggctgctactgggcctgccacggccactgcctgtggctgacgtctccaccctgctgggtgacattgcgaagcgtgtctatgaagtgatcagcgtccaggtgcaagatgtcaatgagtgtttctatgaggagctcaatgcctgctctggaagggaactgtgcgcaaacctggagggctcgtactggtgcgtctgtcaccaggaagctccagccacgtctccacggaagctgaacctggagtgggaagattgtcctccagtcagtgactacgtggtcctcaacgtcaccagtgacagttttcaagtatcctggcgtttaaattctacacagaaccacactttccatgtccgggtttaccggggtatggagttgctcaggagcgccaggacacagagccaggcactggcagtggctgggctggaggctggagtgctgtacagggtgaagaccagctaccaggggtgcggggccgacgtctccaccacgctgaccatcaaaaccaatgcccaggtatttgaagtcacaataaagattgtaaaccacaacctgacggagaagttactcaaccgcagcagtgtggagtaccaggacttttctagacaactgcttcacgaggtcgagagctccttcccaccagtggtgtctgacttgtaccgaagtgggaagctgagaatgcagatcgtgtctctccaggcgggaagtgtggtcgtgaggctcaagctcaccgtgcaggaccccgggtttcccatgggcatctccacgctggcccccatactccagcccctgttggcaagcacagtgttccagattgaccggcaggggacacgcgtgcaagactgggacgagtgtgtggacagcgcggaacacgactgctcaccggctgcctggtgcatcaacctggagggctcctacacctgccagtgccgtaccaccagggacgccaccccctcccgcgcaggccgggcctgtgagggtgacctggtgagccccatgggcggtggactgtctgcggcaacaggggtaacggtcccaggtcttggcacgggaacagcagccctcggcctagagaacttcaccttgtcacccagtcctgggtaccctcagggcaccccggcagcaggccaggcctggaccccagagccctcacccagaagagggggcagcaatgtggtcgggtatgacaggaacaacacaggaaaaggcgtggagcaggaggtgcccagcactgccccgggtctggggatggaccaggggagccccagccaggtgaaccccagccaggggagccccagccaggggagcctcagacaggagagtaccagccaggcgagccccagccagaggagcaccagccaggggagccccagccaggtgaaccccagccagcggagcaccagccacgcgaactccagccaggggagccccagccaggggagccccagccaggagagccccagccaggggagcaccagccaggcgagccccagccataggaacactatcggggtgataggcaccacctcctccccgaaggctactgggtcaacccacagcttccctcctggggccacagatggcccactggccctccctggacagctacagggaaactccatcatggagccaccctcctggccttcccctactgaggaccccaccggccacttcctgtggcatgccacccgttccacccgggaaacacttctgaatcccacgtggctgcgaaatgaggacagtggaccctccggttctgtagacctgccattgacctccaccctcacagctctgaagacccccgcctgtgttcctgtctccattgggaggatcatggtctccaatgtgaccagcaccggcttccacctggcatgggaggcggatcttgctatggactccaccttccagctcactctgacttccatgtggagccctgctgtggtcctagagacctggaacacgagtgtgacactgtcggggctggagcctggggtcttgcacctggttgagatcatggccaaagcatgtgggaaagaaggtgccagagctcatctgaaagtgaggacagcagcccggaagctcattggaaaggtcagaatcaaaaatgtcaggtactcagaatcctttcgcaacgcaagcagccaggagtatcgagatttcctagaactattcttcaggatggtgcggggctccctgccagccaccatgtgtcagcacatggacgctggtggggtcaggatggaagtcgtcagcgtcaccaacggcagcatcgtggtggagtttcacttgctgataatcgcagatgtggatgtccaggaggtgtcagctgcatttctcaccgccttccagaccgtgcctctgctggaggtgatcagaggcgacaccttcatacaggattacgatgagtgtgaaaggaaggaggacgactgtgtgccggggacatcctgtcgaaacaccctcgggtctttcacttgtagctgcgagggaggagcccccgacttccctgtggaatattctgagagaccctgtgaaggtgactctcctggcaatgaaacctgggccaccagcccagagaggcctctcaccacagcagggaccaaggctgcctttgtgcaaggcaccagccccaccccccaaggcctgccccagcggctgaacctgaccggagcagtcagggtgctctgtgagatcgagaaggtggttgtcgccatccagaagcgcttcctgcagcaggaatccatccccgagtcctcgttgtacctcagccacccctcctgcaacgtgagccacagcaatggcacacacgtgctcctggaggccggctggagcgagtgtgggaccctcatgcagagcaacatgacgaacaccgtggtgaggaccacgctgaggaacgacctgtcccaggagggcatcatccaccacctgaagatcctgagccccatctactgcgccttccagaatgacctgctgacatcctccggcttcaccctggagtggggggtttacaccatcatcgaggacctccacggcgctgggaattttgttaccgaaatgcagttgtttatcggagactctcccatacctcagaattatagcgtgtctgccagtgacgatgtcaggatcgaagtggggctctacaggcagaaaagcaacctcaaggtggtcctgacggagtgctgggcaaccccgtctagcaacgcccgggaccccatcaccttcagcttcattaacaacagctgccctgtgcccaacacatacaccaacgtgattgagaacggcaactccaataaggcccagttcaagctgaggatcttttcctttatcaacgactccatcgtctacctgcactgcaaactccgcgtctgcatggaatcccccggagccacgtgcaaaatcaattgcaataactttcggttgctgcaaaatagtgaaacctctgccacacaccagatgtcctggggacccctcatccggtctgaaggtgagcctcctcatgcagaagcaggcctgggtgccggttatgtggtccttattgtggtggccatcttcgtgctggtggcgggaacagccacccttctgatcgtgcgctaccagagaatgaatgggagatacaactttaaaatccagtccaacaacttcagctaccaggtgttctacgaataggaggcgcaggctgacaggaaggtcgccgtgagtcaagctgcctccagaacctcagagcttccctggtgggctcccccgggatccccagtgtctctctgcacctccacccatccctcggttcttaactcttcaagccttaacggaggtctgctctgacgggtgggctctgccagagcccgggtgagcccagaaaggaagacagcagccaccgtctgtcccgaagaggcaggccgtcctgtaggtcctagaggagccacagcccaggggcagatgaaggggctgcggaagacgggggcagtcctgggggtgctgcggctacaccaccacccgcgcggcccccgcagcctagacctcccaggcctgtgaccctccacaccagccctcagaaccctcctgggcttgccctcccttggcgtccgtcaccctttggcaaatatagaatatttcacattctcagagagacccgaccgcgctcttgatgctctttcgaaaataggtcagtcttagaaatacactgctaatgttatttttagtggatgtttatgctgtttgacttttctcctgtgtaccaaggtattgcttttatttacacgacagcgactcaaaaggcactcgattaatgtgacaaccttttcaataagcagaaataacgtaggtacacatcactctttacatttttctaagcattttcacagccgtttcttcatataatccgaccacagtgggaggtgtgatttacccattacacaatgagaaaccagaggagccgatgagttacttaattgaggtcacagaatgaattagcaagaaaatggttctaaaatctaagtattttagtctagaattttctccattacatcatcctaagagataatgctctgtacttcatttgaaataaactggaattgtattagatagctc

SEQ ID NO: 198414 - DNA, 4878 bp, Homo sapiens
  Payload ID: 19153
  Gene Name: uromodulin-like 1
  Uniprot ID: Q5DID0
  ENST ID: ENST00000408910
  CDS Start-End: 1-3957
atgctcaggacctcggggctggcactgctggctctggtcagtgctgtgggcccaagccaggccagcggcttcacagaaaaaggcctctccctgttgggctaccagctatgcagccaccgtgtgacccacactgtacagaaggtggaggccgtgcagacgtcctacacgtcctatgtgtcctgcggcggctggatcccctggaggcggtgccctaagatggtttaccggacacagtacctggtagtggaggtccccgagtccaggaacgtgactgactgctgtgagggctatgaacagctcggcctctactgtgtcttgcccctgaatcagtccgggcagttcacgtcaagacctggggcctgccccgcagaggggcctgaaccatccacctccccctgcagcttggacatcgactgtcctggacttgagaagtgctgcccctggtcaggggggcgctactgcatggcccctgcaccccaagctccagagagggaccctgtgggctcctggtacaacgtcaccatactggtgaaaatggacttcaaggaactccagcaagtggaccccaggctcctgaaccacatgcgccttctgcattccttggtcaccagcgccctgcaaccaatggcctccaccgtccaccacctgcactcagcccctgggaacgcctccaccacagtgtcgcggctgctactgggcctgccacggccactgcctgtggctgacgtctccaccctgctgggtgacattgcgaagcgtgtctatgaagtgatcagcgtccaggtgcaagatgtcaatgagtgtttctatgaggagctcaatgcctgctctggaagggaactgtgcgcaaacctggagggctcgtactggtgcgtctgtcaccaggaagctccagccacgtctccacggaagctgaacctggagtgggaagattgtcctccagtcagtgactacgtggtcctcaacgtcaccagtgacagttttcaagtatcctggcgtttaaattctacacagaaccacactttccatgtccgggtttaccggggtatggagttgctcaggagcgccaggacacagagccaggcactggcagtggctgggctggaggctggagtgctgtacagggtgaagaccagctaccaggggtgcggggccgacgtctccaccacgctgaccatcaaaaccaatgcccaggtatttgaagtcacaataaagattgtaaaccacaacctgacggagaagttactcaaccgcagcagtgtggagtaccaggacttttctagacaactgcttcacgaggtcgagagctccttcccaccagtggtgtctgacttgtaccgaagtgggaagctgagaatgcagatcgtgtctctccaggcgggaagtgtggtcgtgaggctcaagctcaccgtgcaggaccccgggtttcccatgggcatctccacgctggcccccatactccagcccctgttggcaagcacagtgttccagattgaccggcaggggacacgcgtgcaagactgggacgagtgtgtggacagcgcggaacacgactgctcaccggctgcctggtgcatcaacctggagggctcctacacctgccagtgccgtaccaccagggacgccaccccctcccgcgcaggccgggcctgtgagggtgacctggtgagccccatgggcggtggactgtctgcggcaacaggggtaacggtcccaggtcttggcacgggaacagcagccctcggcctagagaacttcaccttgtcacccagtcctgggtaccctcagggcaccccggcagcaggccaggcctggaccccagagccctcacccagaagagggggcagcaatgtggtcgggtatgacaggaacaacacaggaaaaggcgtggagcaggagctacagggaaactccatcatggagccaccctcctggccttcccctactgaggaccccaccggccacttcctgtggcatgccacccgttccacccgggaaacacttctgaatcccacgtggctgcgaaatgaggacagtggaccctccggttctgtagacctgccattgacctccaccctcacagctctgaagacccccgcctgtgttcctgtctccattgggaggatcatggtctccaatgtgaccagcaccggcttccacctggcatgggaggcggatcttgctatggactccaccttccagctcactctgacttccatgtggagccctgctgtggtcctagagacctggaacacgagtgtgacactgtcggggctggagcctggggtcttgcacctggttgagatcatggccaaagcatgtgggaaagaaggtgccagagctcatctgaaagtgaggacagcagcccggaagctcattggaaaggtcagaatcaaaaatgtcaggtactcagaatcctttcgcaacgcaagcagccaggagtatcgagatttcctagaactattcttcaggatggtgcggggctccctgccagccaccatgtgtcagcacatggacgctggtggggtcaggatggaagtcgtcagcgtcaccaacggcagcatcgtggtggagtttcacttgctgataatcgcagatgtggatgtccaggaggtgtcagctgcatttctcaccgccttccagaccgtgcctctgctggaggtgatcagaggcgacaccttcatacaggattacgatgagtgtgaaaggaaggaggacgactgtgtgccggggacatcctgtcgaaacaccctcgggtctttcacttgtagctgcgagggaggagcccccgacttccctgtggaatattctgagagaccctgtgaaggtgactctcctggcaatgaaacctgggccaccagcccagagaggcctctcaccacagcagggaccaaggctgcctttgtgcaaggcaccagccccaccccccaaggcctgccccagcggctgaacctgaccggagcagtcagggtgctctgtgagatcgagaaggtggttgtcgccatccagaagcgcttcctgcagcaggaatccatccccgagtcctcgttgtacctcagccacccctcctgcaacgtgagccacagcaatggcacacacgtgctcctggaggccggctggagcgagtgtgggaccctcatgcagagcaacatgacgaacaccgtggtgaggaccacgctgaggaacgacctgtcccaggagggcatcatccaccacctgaagatcctgagccccatctactgcgccttccagaatgacctgctgacatcctccggcttcaccctggagtggggggtttacaccatcatcgaggacctccacggcgctgggaattttgttaccgaaatgcagttgtttatcggagactctcccatacctcagaattatagcgtgtctgccagtgacgatgtcaggatcgaagtggggctctacaggcagaaaagcaacctcaaggtggtcctgacggagtgctgggcaaccccgtctagcaacgcccgggaccccatcaccttcagcttcattaacaacagctgccctgtgcccaacacatacaccaacgtgattgagaacggcaactccaataaggcccagttcaagctgaggatcttttcctttatcaacgactccatcgtctacctgcactgcaaactccgcgtctgcatggaatcccccggagccacgtgcaaaatcaattgcaataactttcggttgctgcaaaatagtgaaacctctgccacacaccagatgtcctggggacccctcatccggtctgaaggtgagcctcctcatgcagaagcaggcctgggtgccggttatgtggtccttattgtggtggccatcttcgtgctggtggcgggaacagccacccttctgatcgtgcgctaccagagaatgaatgggagatacaactttaaaatccagtccaacaacttcagctaccaggtgttctacgaataggaggcgcaggctgacaggaaggtcgccgtgagtcaagctgcctccagaacctcagagcttccctggtgggctcccccgggatccccagtgtctctctgcacctccacccatccctcggttcttaactcttcaagccttaacggaggtctgctctgacgggtgggctctgccagagcccgggtgagcccagaaaggaagacagcagccaccgtctgtcccgaagaggcaggccgtcctgtaggtcctagaggagccacagcccaggggcagatgaaggggctgcggaagacgggggcagtcctgggggtgctgcggctacaccaccacccgcgcggcccccgcagcctagacctcccaggcctgtgaccctccacaccagccctcagaaccctcctgggcttgccctcccttggcgtccgtcaccctttggcaaatatagaatatttcacattctcagagagacccgaccgcgctcttgatgctctttcgaaaataggtcagtcttagaaatacactgctaatgttatttttagtggatgtttatgctgtttgacttttctcctgtgtaccaaggtattgcttttatttacacgacagcgactcaaaaggcactcgattaatgtgacaaccttttcaataagcagaaataacgtaggtacacatcactctttacatttttctaagcattttcacagccgtttcttcatataatccgaccacagtgggaggtgtgatttacccattacacaatgagaaaccagaggagccgatgagttacttaattgaggtcacagaatgaattagcaagaaaatggttctaaaatctaagtattttagtctagaattttctccattacatcatcctaagagataatgctctgtacttcatttgaaataaactggaattgtattagatagctc

SEQ ID NO: 198415 - DNA, 1082 bp, Homo sapiens
  Payload ID: 19153
  Gene Name: uromodulin-like 1
  ENST ID: ENST00000485357
  CDS Start-End: 1-236
accctgtgggctcctggtacaacgtcaccatactggtgaaaatggacttcaaggaactccagcaagtggaccccaggctcctgaaccacatgcgccttctgcattccttgatgtcaatgagtgtttctatgaggagctcaatgcctgctctggaagggaactgtgcgcaaacctggagggctcgtactggtgcgtctgtcaccaggaagctccagccacgtctccacggaagctgaacctggagtgggaagagacgaggtctcactgagtagcccaggctgttctcaagctcccagcctcaagagatccttcctccttggcctcacaaagcgctgggattgcaggcaggagaccccgtgttcagcctaagcacgtggccttgagatccacttagaacttcgcgccacgtccacatcccacggcaccccactaagctctgcagagaactgtctatagattcctgctctgtggcttccagggtgagaatcctgtccctttcgtgagcacagaaggttggaaaacagattgtcctccagtcagtgactacgtggtcctcaacgtcaccagtgacagttttcaagtatcctggcgtttaaattctacacagaaccacactttccatgtccgggtttaccggggtatggagttgctcaggagcgccaggacacagagccaggcactggcagtggctgggctggaggctggagtgctgtacagggtgaagaccagctaccaggggtgcggggccgacgtctccaccacgctgaccatcaaaaccaatgcccaggtatttgaagtcacaataaagattgtaaaccacaacctgacggagaagttactcaaccgcagcagtgtggagtaccaggacttttctagacaactgcttcacgaggtcgagagctccttcccaccagtggtgtctgacttgtaccgaagtgggaagctgagaatgcagatcgtgtctctccaggcgggaagtgtggtcgtgaggctcaagctcaccgtgcaggaccccgggtttcccatgggcatctccacgctggcccccatactccagcccctgttggcaagcacagtgttcc

SEQ ID NO: 198416 - DNA, 1093 bp, Homo sapiens
  Payload ID: 19153
  Gene Name: uromodulin-like 1
  ENST ID: ENST00000468982
  CDS Start-End: 1-329
accctgtgggctcctggtacaacgtcaccatactggtgaaaatggacttcaaggaactccagcaagtggaccccaggctcctgaaccacatgcgccttctgcattccttgcttgttaaggggactgcccaattggccagtaagaaactagctctgaagccacactgcctggccctagtgttgccactcatcagctgtgtgaccttgggtcaccagcgccctgcaaccaatggcctccaccgtccaccacctgcactcagcccctgggaacgcctccaccacagtgtcgcggctgctactgggcctgccacggccactgcctgtggctgacgtctccaccctgctgggtgacattgcgaagcgtgtctatgaagtgatcagcgtccaggtgcaagatgtcaatgagtgtttctatgaggagctcaatgcctgctctggaagggaactgtgcgcaaacctggagggctcgtactggtgcgtctgtcaccaggaagctccagccacgtctccacggaagctgaacctggagtgggaagattgtcctccagtcagtgactacgtggtcctcaacgtcaccagtgacagttttcaagtatcctggcgtttaaattctacacagaaccacactttccatgtccgggtttaccggggtatggagttgctcaggagcgccaggacacagagccaggcactggcagtggctgggctggaggctggagtgctgtacagggtgaagaccagctaccaggggtgcggggccgacgtctccaccacgctgaccatcaaaaccaatgcccaggtatttgaagtcacaataaagattgtaaaccacaacctgacggagaagttactcaaccgcagcagtgtggagtaccaggacttttctagacaactgcttcacgaggtcgagagctccttcccaccagtggtgtctgacttgtaccgaagtgggaagctgagaatgcagatcgtgtctctccaggcgggaagtgtggtcgtgaggctcaagctcaccgtgcaggaccccgggtttcccatgggcatctccacgctggcccccatactccagcccctgttggcaagcacagtgttcc

SEQ ID NO: 198417 - DNA, 1150 bp, Homo sapiens
  Payload ID: 19153
  Gene Name: uromodulin-like 1
  ENST ID: ENST00000466434
  CDS Start-End: 1-524
accctgtgggctcctggtacaacgtcaccatactggtgaaaatggacttcaaggaactccagcaagtggaccccaggctcctgaaccacatgcgccttctgcattccttggtcaccagcgccctgcaaccaatggcctccaccgtccaccacctgcactcagcccctgggaacgcctccaccacagtgtcgcggctgctactgggcctgccacggccactgcctgtggctgacgtctccaccctgctgggtgacattgcgaagcgtgtctatgaagtgatcagcgtccaggtgcaagatgtcaatgagtgtttctatgaggagctcaatgcctgctctggaagggaactgtgcgcaaacctggagggctcgtactggtgcgtctgtcaccaggaagctccagccacgtctccacggaagctgaacctggagtgggaagcacgtggccttgagatccacttagaacttcgcgccacgtccacatcccacggcaccccactaagctctgcagagaactgtctatagattcctgctctgtggcttccagggtgagaatcctgtccctttcgtgagcacagaaggttggaaaacagattgtcctccagtcagtgactacgtggtcctcaacgtcaccagtgacagttttcaagtatcctggcgtttaaattctacacagaaccacactttccatgtccgggtttaccggggtatggagttgctcaggagcgccaggacacagagccaggcactggcagtggctgggctggaggctggagtgctgtacagggtgaagaccagctaccaggggtgcggggccgacgtctccaccacgctgaccatcaaaaccaatgcccaggtatttgaagtcacaataaagattgtaaaccacaacctgacggagaagttactcaaccgcagcagtgtggagtaccaggacttttctagacaactgcttcacgaggtcgagagctccttcccaccagtggtgtctgacttgtaccgaagtgggaagctgagaatgcagatcgtgtctctccaggcgggaagtgtggtcgtgaggctcaagctcaccgtgcaggaccccgggtttcccatgggcatctccacgctggcccccatactccagcccctgttggcaagcacagtgttcc

SEQ ID NO: 198418 - DNA, 917 bp, Homo sapiens
  Payload ID: 19153
  Gene Name: uromodulin-like 1
  ENST ID: ENST00000497243
  CDS Start-End: 1-341
accctgtgggctcctggtacaacgtcaccatactggtgaaaatggacttcaaggaactccagcaagtggaccccaggctcctgaaccacatgcgccttctgcattccttggtaggtgagacagacgggggctgcctgcaccctccttgtggcagctgctcaggcagacccaggtcaccagcgccctgcaaccaatggcctccaccgtccaccacctgcactcagcccctgggaacgcctccaccacagtgtcgcggctgctactgggcctgccacggccactgcctgtggctgacgtctccaccctgctgggtgacattgcgaagcgtgtctatgaagtgatcagcgtccaggtgcaagattgtcctccagtcagtgactacgtggtcctcaacgtcaccagtgacagttttcaagtatcctggcgtttaaattctacacagaaccacactttccatgtccgggtttaccggggtatggagttgctcaggagcgccaggacacagagccaggcactggcagtggctgggctggaggctggagtgctgtacagggtgaagaccagctaccaggggtgcggggccgacgtctccaccacgctgaccatcaaaaccaatgcccaggtatttgaagtcacaataaagattgtaaaccacaacctgacggagaagttactcaaccgcagcagtgtggagtaccaggacttttctagacaactgcttcacgaggtcgagagctccttcccaccagtggtgtctgacttgtaccgaagtgggaagctgagaatgcagatcgtgtctctccaggcgggaagtgtggtcgtgaggctcaagctcaccgtgcaggaccccgggtttcccatgggcatctccacgctggcccccatactccagcccctgttggcaagcacagtgttcc

SEQ ID NO: 198419 - DNA, 1262 bp, Homo sapiens
  Payload ID: 19153
  Gene Name: uromodulin-like 1
  ENST ID: ENST00000491559
  CDS Start-End: 1-416
accctgtgggctcctggtacaacgtcaccatactggtgaaaatggacttcaaggaactccagcaagtggaccccaggctcctgaaccacatgcgccttctgcattccttggtcaccagcgccctgcaaccaatggcctccaccgtccaccacctgcactcagcccctgggaacgcctccaccacagtgtcgcggctgctactgggcctgccacggccactgcctgtggctgacgtctccaccctgctgggtgacattgcgaagcgtgtctatgaagtgatcagcgtccagatgtcaatgagtgtttctatgaggagctcaatgcctgctctggaagggaactgtgcgcaaacctggagggctcgtactggtgcgtctgtcaccaggaagctccagccacgtctccacggaagctgaacctggagtgggaagagacgaggtctcactgagtagcccaggctgttctcaagctcccagcctcaagagatccttcctccttggcctcacaaagcgctgggattgcaggcaggagaccccgtgttcagcctaagcacgtggccttgagatccacttagaacttcgcgccacgtccacatcccacggcaccccactaagctctgcagagaactgtctatagattcctgctctgtggcttccagggtgagaatcctgtccctttcgtgagcacagaaggttggaaaacagattgtcctccagtcagtgactacgtggtcctcaacgtcaccagtgacagttttcaagtatcctggcgtttaaattctacacagaaccacactttccatgtccgggtttaccggggtatggagttgctcaggagcgccaggacacagagccaggcactggcagtggctgggctggaggctggagtgctgtacagggtgaagaccagctaccaggggtgcggggccgacgtctccaccacgctgaccatcaaaaccaatgcccaggtatttgaagtcacaataaagattgtaaaccacaacctgacggagaagttactcaaccgcagcagtgtggagtaccaggacttttctagacaactgcttcacgaggtcgagagctccttcccaccagtggtgtctgacttgtaccgaagtgggaagctgagaatgcagatcgtgtctctccaggcgggaagtgtggtcgtgaggctcaagctcaccgtgcaggaccccgggtttcccatgggcatctccacgctggcccccatactccagcccctgttggcaagcacagtgttcc

SEQ ID NO: 198420 - DNA, 4198 bp, Homo sapiens
  Payload ID: 19154
  Gene Name: uronyl-2-sulfotransferase
  Uniprot ID: Q9Y2C2
  ENST ID: ENST00000367463
  CDS Start-End: 104-1324
cggccctccccatgtgcagccggccagccgggctctcctcctcgcggcggatgggtgaccttttcctggcacgggcaggctgtgggaggcagcggagcaggcgatgaagaagaagcagcagcatcccggcggcggcgcggatccctggccccatggggcccctatggggggcgcccctccgggcctgggcagctggaagcgtcgggtgcccctgctgcctttcctgcgcttctccctccgggactacggcttctgcatggccaccctgctggtcttctgcctgggctccctcctctatcagctcagcgggggaccccctcgcttcctgctcgacctgcggcagtacttgggaaattccacttacttggatgaccatggaccacctcctagtaaggtactacctttcccaagccaggtggtgtacaacagggtaggcaagtgtgggagccgtactgtggtcttgcttctgagaatcttgtcggagaagcacggatttaatttggtcacatcagacattcacaacaaaaccaggcttactaaaaatgaacaaatggaactgattaaaaatataagtactgccgaacaaccctatttattcactcgacatgttcatttcctcaacttctcaaggtttggaggagaccagcctgtctacatcaacatcattagagaccccgtcaaccggttcttatccaactattttttccgtcgctttggagactggagaggggaacaaaatcacatgatccgcacccccagcatgaggcaggaggagcgctacctggatatcaatgagtgtattcttgaaaactatcccgagtgctccaaccccaggttattttacatcattccgtacttttgtggacagcatcccagatgcagggagcctggtgaatgggcccttgagagagcaaagctgaacgtgaatgaaaacttcctgctcgtggggattcttgaagagttggaagatgtgctgctgttactggaaagatttttacctcattacttcaagggcgtgctcagtatctacaaagacccagagcacaggaagcttggaaacatgactgtgacggtgaagaagactgtcccctctcctgaggctgtgcagatcctctaccagcggatgagatacgagtacgagttttaccactacgtcaaagagcagttccacctgctgaagcgcaagtttggacttaagtctcacgtcagcaagccccccctgaggccacacttctttatcccaactccactggaaaccgaggagccaatcgacgatgaagaacaggatgatgaaaagtggctggaagatatttataagaggtgatgtgactgtgttgcctctatggctttatctcccttttccagaaagttctttgtttggggaagtaaaatccttaagggactaaattaatgcttgggtgcattaaaaagaacaaaacattcccacatgttggggtcattgggagatgcccggttttgcgggttttatttgtttaattttattctgtgttttctcttggctctttgggtctttcccgggtacactagatggctccatcccaaggcatcttgtcataaaacagctttcccccaccccatatcatgggaaaagggggagaaatatagcccctagcctaataacttatcatttgtaaaatgacttataaaaatattacctcaatggtaggagacatccagacttgtatatttcagtggaaatacaaaaccacttcagagaccagggtatctcctctggaaggatctaagagaaggtaagacagattaggacatcgaaaaggaggatggagccaggtgccatggcttgagcctataatccgaggctgaggtgggaggatcacttgagcccaggagtttgaggttgcagtgagctgtgatcacaccactgcactccagcctgggtgacagagtgagactctgtctcaattaattttttttttttaaaggaggaggatctccatgggtaagtggtttctacccgcatgggtagagttctgcctctggtccttctcagggggcactttcaccaagagcagtgtaattatctctgaaagagcaagtcagcttgtgccgcatccccaaccaatccacagcctggagtacctttcaaggtcaaagtgcatggccagctccattgagacattccatttcaaagcaccgtgctgacagatatcaaagtactctagcagggaaaataatttgtttgctgtgtaaggaagaatgtagacaagacagataaatctgaaggtcatgtggcatcagggaaagggcatggctgtgtcttttgcacccaatatgaaacatcttctcccaacactgctttaatggaagttctaggaaccaatttagctcaggcatttgactcctacagcagaagttctgagcctgaccacagatggtgtgtaatctatcaaacacacccctggccaagttgggtcctataggacctggtactatgtactattgtaacttctagttccctaagaggtacctgttttcagtaaaaaggggtcctgagttctgtgcaggtggaagagctacccgagaactacctgagttctgtgcaggtagagtcccatttcttatgggacctgtgtgctcctgagaactcttacttgagacatcaaaaagaagcagcaagagcttctgggacagagactgcttggccagctttgtaagtaagtggctgcctccaatgtgatgtgagtacatgttgggcagtctcactgtcctaaggtatgtcttctttccacctcccactgcccctcccctgccacctatcaatgatgccttggttcagtcattagaaatctgttgctttgagttctgaaatattttcaccttaaaaaaaatgctgaaaatacacattctcctgggaagacgataaacagctagctaagaagccgaggttcagtggtggcagcaggaaggacactgccacaaattttgtctatttcatatttgtcccctagagccagccctagcaaatgtgtgagttgggagtagttaatagtaaataagactctgactttacacaagctacacattttatacttttcataaaccacaaagtctctctagaattttttctgccttcactaaaattggactgtagccaagatataaagcaagtcatttggaacctgccgagtgagcactgaagctactttatcatgagatgtgtgttaagaaggctgcagcccacaggagtccagggaaggcggggaccacagaggcacagagtccagcacttggccgctcatgggccttctttctgcctcagaggacgggggcagagaagtgatgaagggaaatgttcttagaggaggaaatatcctttgtcctgttcagagagaccagggccctaccattaggcatactttcagaagcaacctggagaacagctatcaatcatattcaaaaccagtacaagaactgctgcctggtaccctgtgagtcatttctatgaaattccatataaagaatgatgataagtttacacactgtgcaatctcacaatctgaaaataaagttgagttggctgtgttttctctgctcttgtcagaacattgggacaattggtcgttcaaaaacattcatcctcttactgcaagtttatctgggtacttttacctgtgtgttcaaaggcatttcttttcagcagtgatcattataacttcacaaaaaaagatgctgacggatttacttacagggccttaatgttattttgtcccagccaacaccctctaggtcctaaaagtcaaggtacttcagtttatttggcaaacatgacaacattttttttggccctgggcccaacagtttgtacttcatgaaacatattgtacattttacatagtttaatttaaaaaataccttttaagctagttgatctttgactgtcttatttattataacctttcagcacattccaaggttttagttactcaggaaggagttaattaaaatgattttattttggtctgatggatgttttttaaaaggaaaattattattatgaaccttcagcctactttcttgagtgccgtaaaagtgcttgtaaatctttttttttttttaagaagaaagaaaaaaatggtgtttgacgttgatggaaattcaaaaatatatatggaactgaaacattaacttagctaaaataaaagcaatctgtgtttga

SEQ ID NO: 198421 - DNA, 1223 bp, Homo sapiens
  Payload ID: 19155
  Gene Name: uroplakin 1A
  Uniprot ID: O00322
  ENST ID: ENST00000222275
  CDS Start-End: 1-777
atggcgtctgcggcagcagcggaggccgagaagggatctccagttgtggtgggcctgctagttgtgggcaatatcattattctgctgtcaggcctgtccctgtttgctgagaccatatgggtgacagccgaccagtaccgtgtatacccactgatgggagtctcaggcaaggatgacgtcttcgctggtgcctggattgccatcttctgcggcttctccttcttcatggtagccagttttggtgtgggtgccgcactctgccgccgccggtccatggtcctcacgtacctggtgctcatgctcatcgtctacatcttcgagtgcgcctcctgcatcacgtcctacacccaccgtgactacatggtgtccaacccatccctgatcaccaagcagatgctgaccttctacagcgcggacaccgaccagggccaggagctgacccgcctctgggaccgcgtcatgattgagcaagaatgctgtggcacatctggtcccatggactgggtgaacttcacgtcagccttccgggcggccactccggaggtggtgttcccctggcccccactgtgctgtcgccggacgggaaacttcatccccctcaacgaggagggctgccgcctggggcacatggactacctgttcaccaagggctgcttcgaacacatcggccacgccatcgacagctacacgtggggtatctcgtggtttgggtttgccatcctgatgtggacgctcccggtcatgctgatagccatgtatttctacaccatgctctgagggacaggaggggaaggcaacatacacaccccggactcctccgcatcctcctcctgcttcctccgctgggcctggatggctgcctcacctctcacctcccaacgtccctagcccttacgtccttccacttccaagatctttttccaggttcctgagccctactgtgtctcaggtgtgccctgaaaccccagggcttgtgtgcacatatccttagcccatctttcaagggacctctccatgatcccacctcccattcacagatacctctcttgtagctctctgacctcctccttcatggcaggcatcgccattcttgctgaaccgtttgtgattgccatttgagctctggaagcctctattgccatgagagttctgtcacggtcactttactgtccccatcatcacccagcacggggctaagcatatactagatagtcaataaataa

SEQ ID NO: 198422 - DNA, 1016 bp, Homo sapiens
  Payload ID: 19155
  Gene Name: uroplakin 1A
  Uniprot ID: O00322
  ENST ID: ENST00000379013
  CDS Start-End: 1-822
atggcgtctgcggcagcagcggaggccgagaagggatctccagttgtggtgggcctgctagttgtgggcaatatcattattctgctgtcaggcctgtccctgtttgctgagaccatatgggtgacagccgaccagtaccgtgtatacccactgatgggagtctcaggcaaggatgacgtcttcgctggtgcctggattgccatcttctgcggcttctccttcttcatggtagccagttttggtgtgggtgccgcactctgccgccgccggtccatggtcctcacgtacctggtgctcatgctcatcgtctacatcttcgagtgcgcctcctgcatcacgtcctacacccaccgtgactacatggtgtccaacccatccctgatcaccaagcagatgctgaccttctacagcgcggacaccgaccagggccaggagctgacccgcctctgggaccgcgtcatgattgagcaagaatgctgtggcacatctggtcccatggactgggtgaacttcacgtcagccttccgggcggccactccggaggtggtgttcccctggcccccactgtgctgtcgccggacgggaaacttcatccccctcaacgaggagggctgccgcctggggcacatggactacctgttcaccaaggctggagtacagtggcacaatctcagctcactgcagcgtctgcctcccgggttcaagggattctcccacctcagcttccagagcagctgggattacagggctgcttcgaacacatcggccacgccatcgacagctacacgtggggtatctcgtggtttgggtttgccatcctgatgtggacgctcccggtcatgctgatagccatgtatttctacaccatgctctgagggacaggaggggaaggcaacatacacaccccggactcctccgcatcctcctcctgcttcctccgctgggcctggatggctgcctcacctctcacctcccaacgtccctagcccttacgtccttccacttccaagatcttt

SEQ ID NO: 198423 - DNA, 1366 bp, Homo sapiens
  Payload ID: 19155
  Gene Name: uroplakin 1A
  Uniprot ID: O00322
  ENST ID: ENST00000616789
  CDS Start-End: 28-849
cagagaggctgcagacagagaaggatgatggcgtctgcggcagcagcggaggccgagaagggatctccagttgtggtgggcctgctagttgtgggcaatatcattattctgctgtcaggcctgtccctgtttgctgagaccatatgggtgacagccgaccagtaccgtgtatacccactgatgggagtctcaggcaaggatgacgtcttcgctggtgcctggattgccatcttctgcggcttctccttcttcatggtagccagttttggtgtgggtgccgcactctgccgccgccggtccatggtcctcacgtacctggtgctcatgctcatcgtctacatcttcgagtgcgcctcctgcatcacgtcctacacccaccgtgactacatggtgtccaacccatccctgatcaccaagcagatgctgaccttctacagcgcggacaccgaccagggccaggagctgacccgcctctgggaccgcgtcatgattgagcaagaatgctgtggcacatctggtcccatggactgggtgaacttcacgtcagccttccgggcggccactccggaggtggtgttcccctggcccccactgtgctgtcgccggacgggaaacttcatccccctcaacgaggagggctgccgcctggggcacatggactacctgttcaccaaggctggagtacagtggcacaatctcagctcactgcagcgtctgcctcccgggttcaagggattctcccacctcagcttccagagcagctgggattacagggctgcttcgaacacatcggccacgccatcgacagctacacgtggggtatctcgtggtttgggtttgccatcctgatgtggacgctcccggtcatgctgatagccatgtatttctacaccatgctctgagggacaggaggggaaggcaacatacacaccccggactcctccgcatcctcctcctgcttcctccgctgggcctggatggctgcctcacctctcacctcccaacgtccctagcccttacgtccttccacttccaagatctttttccaggttcctgagccctactgtgtctcaggtgtgccctgaaaccccagggcttgtgtgcacatatccttagcccatctttcaagggacctctccatgatcccacctcccattcacagatacctctcttgtagctctctgacctcctccttcatggcaggcatcgccattcttgctgaaccgtttgtgattgccatttgagctctggaagcctctattgccatgagagttctgtcacggtcactttactgtccccatcatcacccagcacggggctaagcatatactagatagtcaataaataaataaataatgaatgaatg

SEQ ID NO: 198424 - DNA, 1268 bp, Homo sapiens
  Payload ID: 19155
  Gene Name: uroplakin 1A
  Uniprot ID: O00322
  ENST ID: ENST00000617999
  CDS Start-End: 28-804
cagagaggctgcagacagagaaggatgatggcgtctgcggcagcagcggaggccgagaagggatctccagttgtggtgggcctgctagttgtgggcaatatcattattctgctgtcaggcctgtccctgtttgctgagaccatatgggtgacagccgaccagtaccgtgtatacccactgatgggagtctcaggcaaggatgacgtcttcgctggtgcctggattgccatcttctgcggcttctccttcttcatggtagccagttttggtgtgggtgccgcactctgccgccgccggtccatggtcctcacgtacctggtgctcatgctcatcgtctacatcttcgagtgcgcctcctgcatcacgtcctacacccaccgtgactacatggtgtccaacccatccctgatcaccaagcagatgctgaccttctacagcgcggacaccgaccagggccaggagctgacccgcctctgggaccgcgtcatgattgagcaagaatgctgtggcacatctggtcccatggactgggtgaacttcacgtcagccttccgggcggccactccggaggtggtgttcccctggcccccactgtgctgtcgccggacgggaaacttcatccccctcaacgaggagggctgccgcctggggcacatggactacctgttcaccaagggctgcttcgaacacatcggccacgccatcgacagctacacgtggggtatctcgtggtttgggtttgccatcctgatgtggacgctcccggtcatgctgatagccatgtatttctacaccatgctctgagggacaggaggggaaggcaacatacacaccccggactcctccgcatcctcctcctgcttcctccgctgggcctggatggctgcctcacctctcacctcccaacgtccctagcccttacgtccttccacttccaagatctttttccaggttcctgagccctactgtgtctcaggtgtgccctgaaaccccagggcttgtgtgcacatatccttagcccatctttcaagggacctctccatgatcccacctcccattcacagatacctctcttgtagctctctgacctcctccttcatggcaggcatcgccattcttgctgaaccgtttgtgattgccatttgagctctggaagcctctattgccatgagagttctgtcacggtcactttactgtccccatcatcacccagcacggggctaagcatatactagatagtcaataaataaataaataatgaatgaatg

SEQ ID NO: 198425 - DNA, 2118 bp, Homo sapiens
  Payload ID: 19156
  Gene Name: uroplakin 1B
  Uniprot ID: O75841
  ENST ID: ENST00000264234
  CDS Start-End: 150-932
atcacagactacccttccctggtcctggaggttcaaagaattgcaggagggtagaaaagcacctgggtcgggtgcagactgcggagcgggccctaccgtgtgcgcagaaagaggaggcgcttgccttcagcttgtgggaaatcccgaagatggccaaagacaactcaactgttcgttgcttccagggcctgctgatttttggaaatgtgattattggttgttgcggcattgccctgactgcggagtgcatcttctttgtatctgaccaacacagcctctacccactgcttgaagccaccgacaacgatgacatctatggggctgcctggatcggcatatttgtgggcatctgcctcttctgcctgtctgttctaggcattgtaggcatcatgaagtccagcaggaaaattcttctggcgtatttcattctgatgtttatagtatatgcctttgaagtggcatcttgtatcacagcagcaacacaacaagactttttcacacccaacctcttcctgaagcagatgctagagaggtaccaaaacaacagccctccaaacaatgatgaccagtggaaaaacaatggagtcaccaaaacctgggacaggctcatgctccaggacaattgctgtggcgtaaatggtccatcagactggcaaaaatacacatctgccttccggactgagaataatgatgctgactatccctggcctcgtcaatgctgtgttatgaacaatcttaaagaacctctcaacctggaggcttgtaaactaggcgtgcctggtttttatcacaatcagggctgctatgaactgatctctggtccaatgaaccgacacgcctggggggttgcctggtttggatttgccattctctgctggactttttgggttctcctgggtaccatgttctactggagcagaattgaatattaagcataaagtgttgccaccatacctccttccccgagtgactctggatttggtgctggaaccagctctctcctaatattccacgtttgtgccccacactaacgtgtgtgtcttacattgccaagtcagatggtacggacttcctttaggatctcaggcttctgcagttctcatgactcctacttttcatcctagtctagcattctgcaacatttatatagactgttgaaaggagaatttgaaaaatgcataataactacttccatccctgcttatttttaatttgggaaaataaatacattcgaaggaacctgtgttatcacagtaacccagagctgtatttggctagcaatctgcctgtatctctcactattatctaaaagaaaccttccaatgcttctgttgatctcagtattgtcaggggaacagagaagttgggaaaagattactgaaatataccttttgcatttctttctagagtagctcccatatatggagatgggtgattctcttgatgccaccttcagatccttttattctccagaataattcttaacagtggttcaaatttcctttcataccttgaagtatgtgtttagtagcctcaattctccattaattaaaagtgtgggctgggcgtgggggctcatgcctgtaatcccagcactttgggaggccgaggtgggcagatcacctgaggtcaggagttcaagaccagcctggccaacatggtgaaaccccgtctctacaaaaatacaaaaattagccaggcgtgatggcaggtgcctgtaatcctagctacttggcaggctaacgcaggagaatcacttgaccgggagacagaggttgcagtgagctgagatcgtacctattgcactccatcctggatgaaagagccagactctgtctcaaaacaaacaaaaaagcgtggggacttctggggacagacaaggtgcctgttatatatttactcagtctttgccctgaatggtctcagcttgagaccatttcaaactggagagaagcaagccagccaatagaatggggtgatttacagggatttctgtttactgtcaaaatatttctcatctgcactatgtttccatttgtggtcctgaaggaaattcttataactcaacatttgtctggtcttataagtaaagacagctttaaaatctgttcactttca

SEQ ID NO: 198426 - DNA, 1937 bp, Homo sapiens
  Payload ID: 19156
  Gene Name: uroplakin 1B
  ENST ID: ENST00000460625
  CDS Start-End: 5-763
gaagatggccaaagacaactcaactgttcgttgcttccagggcctgctgatttttggaaatgtgattattggttgttgcggcattgccctgactgcggagtgcatcttctttgtatctgaccaacacagcctctacccactgcttgaagccaccgacaacgatgacatctatggggctgcctggatcggcatatttgtgggcatctgcctcttctgcctgtctgttctaggcattgtaggcatcatgaagtccagcaggaaaattcttctggcgtatttcattctgatgtttatagtatatgcctttgaagtggcatcttgtatcacagcagcaacacaacaagactttcagatgctagagaggtaccaaaacaacagccctccaaacaatgatgaccagtggaaaaacaatggagtcaccaaaacctgggacaggctcatgctccaggacaattgctgtggcgtaaatggtccatcagactggcaaaaatacacatctgccttccggactgagaataatgatgctgactatccctggcctcgtcaatgctgtgttatgaacaatcttaaagaacctctcaacctggaggcttgtaaactaggcgtgcctggtttttatcacaatcagggctgctatgaactgatctctggtccaatgaaccgacacgcctggggggttgcctggtttggatttgccattctctgctggactttttgggttctcctgggtaccatgttctactggagcagaattgaatattaagcataaagtgttgccaccatacctccttccccgagtgactctggatttggtgctggaaccagctctctcctaatattccacgtttgtgccccacactaacgtgtgtgtcttacattgccaagtcagatggtacggacttcctttaggatctcaggcttctgcagttctcatgactcctacttttcatcctagtctagcattctgcaacatttatatagactgttgaaaggagaatttgaaaaatgcataataactacttccatccctgcttatttttaatttgggaaaataaatacattcgaaggaacctgtgttatcacagtaacccagagctgtatttggctagcaatctgcctgtatctctcactattatctaaaagaaaccttccaatgcttctgttgatctcagtattgtcaggggaacagagaagttgggaaaagattactgaaatataccttttgcatttctttctagagtagctcccatatatggagatgggtgattctcttgatgccaccttcagatccttttattctccagaataattcttaacagtggttcaaatttcctttcataccttgaagtatgtgtttagtagcctcaattctccattaattaaaagtgtgggctgggcgtgggggctcatgcctgtaatcccagcactttgggaggccgaggtgggcagatcacctgaggtcaggagttcaagaccagcctggccaacatggtgaaaccccgtctctacaaaaatacaaaaattagccaggcgtgatggcaggtgcctgtaatcctagctacttggcaggctaacgcaggagaatcacttgaccgggagacagaggttgcagtgagctgagatcgtacctattgcactccatcctggatgaaagagccagactctgtctcaaaacaaacaaaaaagcgtggggacttctggggacagacaaggtgcctgttatatatttactcagtctttgccctgaatggtctcagcttgagaccatttcaaactggagagaagcaagccagccaatagaatggggtgatttacagggatttctgtttactgtcaaaatatttctcatctgcactatgtttccatttgtggtcctgaaggaaattcttataactcaacatttgtctggtcttataagtaaagacagctttaaaatc

SEQ ID NO: 198427 - DNA, 687 bp, Homo sapiens
  Payload ID: 19156
  Gene Name: uroplakin 1B
  ENST ID: ENST00000479520
  CDS Start-End: 180-687
ggagcgggccctaccgtgtgcgcagaaagaggaggcgctggacttatcctaccttaagttgaagcagaccagcaattgttgtgacctacaatctccacacccatctttactctgagccaaggaagtgtctgttcttgtgctgagtttcaggtgccttcagcttgtgggaaatcccgaagatggccaaagacaactcaactgttcgttgcttccagggcctgctgatttttggaaatgtgattattggttgttgcggcattgccctgactgcggagtgcatcttctttgtatctgaccaacacagcctctacccactgcttgaagccaccgacaacgatgacatctatggggctgcctggatcggcatatttgtgggcatctgcctcttctgcctgtctgttctaggcattgtaggcatcatgaagtccagcaggaaaattcttctggcgtatttcattctgatgtttatagtatatgcctttgaagtggcatcttgtatcacagcagcaacacaacaagactttttcacacccaacctcttcctgaagcagatgctagagaggtaccaaaacaacagccctccaaacaatgatgaccagtggaaaaacaatggagtcaccaaaacctgggacaggctcatgctccaggacaattgctgtggcgtaaatggtccatcagactggcaaa

SEQ ID NO: 198428 - DNA, 670 bp, Homo sapiens
  Payload ID: 19156
  Gene Name: uroplakin 1B
  ENST ID: ENST00000494855
  CDS Start-End: 103-670
ggagcgggccctaccgtgtgcgcagaaagaggaggcgctaaactgtagcagttatttggtaatgctttcaacagtgccttcagcttgtgggaaatcccgaagatggccaaagacaactcaactgttcgttgcttccagggcctgctgatttttggaaatgtgattattggttgttgcggcattgccctgactgcggagtgcatcttctttgtatctgaccaacacagcctctacccactgcttgaagccaccgacaacgatgacatctatggggctgcctggatcggcatatttgtgggcatctgcctcttctgcctgtctgttctaggcattgtaggcatcatgaagtccagcaggaaaattcttctggcgtatttcattctgatgtttatagtatatgcctttgaagtggcatcttgtatcacagcagcaacacaacaagactttttcacacccaacctcttcctgaagcagatgctagagaggtaccaaaacaacagccctccaaacaatgatgaccagtggaaaaacaatggagtcaccaaaacctgggacaggctcatgctccaggacaattgctgtggcgtaaatggtccatcagactggcaaaaatacacatctgccttccggactgagaataatgatgctgactatccctggcctcgtcaat

SEQ ID NO: 198429 - DNA, 981 bp, Homo sapiens
  Payload ID: 19156
  Gene Name: uroplakin 1B
  ENST ID: ENST00000497685
  CDS Start-End: 294-836
aatcacagactacccttccctggtcctggaggttcaaagaattgcaggagggtagaaaagcacctgggtcgggtgcagactgcggagcgggccctaccgtgtgcgcagaaagaggaggcgcttgttgcggcattgccctgactgcggagtgcatcttctttgtatctgaccaacacagcctctacccactgcttgaagccaccgacaacgatgacatctatggggctgcctggatcggcatatttgtgggcatctgcctcttctgcctgtctgttctaggcattgtaggcatcatgaagtccagcaggaaaattcttctggcgtatttcattctgatgtttatagtatatgcctttgaagtggcatcttgtatcacagcagcaacacaacaagactttttcacacccaacctcttcctgaagcagatgctagagaggtaccaaaacaacagccctccaaacaatgatgaccagtggaaaaacaatggagtcaccaaaacctgggacaggctcatgctccaggacaattgctgtggcgtaaatggtccatcagactggcaaaaatacacatctgccttccggactgagaataatgatgctgactatccctggcctcgtcaatgctgtgttatgaacaatcttaaagaacctctcaacctggaggcttgtaaactaggcgtgcctggtttttatcacaatcagggctgctatgaactgatctctggtccaatgaaccgacacgcctggggggttgcctggtttggatttgccattctctgctggactttttgggttctcctgggtaccatgttctactggagcagaattgaatattaagcataaagtgttgccaccatacctccttccccgagtgactctggatttggtgctggaaccagctctctcctaatattccacgtttgtgccccacactaacgtgtgtgtcttacattgccaagtcagatggtacggacttccttta

SEQ ID NO: 198430 - DNA, 916 bp, Homo sapiens
  Payload ID: 19157
  Gene Name: uroplakin 2
  Uniprot ID: O00526
  ENST ID: ENST00000264031
  CDS Start-End: 36-590
agcctgccagcacctattccacctcccagcccagcatggcacccctgctgcccatccggaccttgcccttgatcctgattctgctggctctgctgtccccaggggctgcagacttcaacatctcaagcctctctggtctgctgtccccggcgctaacggagagcctgctggttgccttgcccccctgtcacctcacaggaggcaatgccacactgatggtccggagagccaatgacagcaaagtggtgacgtccagctttgtggtgcctccgtgccgtgggcgcagggaactggtgagtgtggtggacagtggtgctggcttcacagtcactcggctcagtgcataccaggtgacaaacctcgtgccaggaaccaaattctacatttcctacctagtgaagaaggggacagccactgagtccagcagagagatcccaatgtccacactccctcgaaggaacatggaatccattgggctgggtatggcccgcacagggggcatggtggtcatcacggtgctgctctctgtcgccatgttcctgctggtgctgggcttcatcattgccctggcactgggctcccgcaagtaaggaggtctgcccggagcagcagcttctccaggaagcccagggcaccatccagctccccagcccacctgctcccaggccccaggcctgtggctcccttggtgccctcgcctcctcctcctgccctcctctcccctagagccctctcctccctctgtccctctccttgcccccagtgcctcaccttccaacactccattattcctctcaccccactcctgtcagagttgactttcctcccattttaccactttaaacacccccataacaattcccccatccttcagtgaactaagtccctataataaaggctgaggctgcatctgcca

SEQ ID NO: 198431 - DNA, 1051 bp, Homo sapiens
  Payload ID: 19158
  Gene Name: uroplakin 3A
  Uniprot ID: O75631
  ENST ID: ENST00000216211
  CDS Start-End: 33-896
ccgccccgcgctctggcggctcctcccgggcgatgcctccgctctgggccctgctggccctcggctgcctgcggttcggctcggctgtgaacctgcagccccaactggccagtgtgactttcgccaccaacaaccccacacttaccactgtggccttggaaaagcctctctgcatgtttgacagcaaagaggccctcactggcacccacgaggtctacctgtatgtcctggtcgactcagccatttccaggaatgcctcagtgcaagacagcaccaacaccccactgggctcaacgttcctacaaacagagggtgggaggacaggtccctacaaagctgtggcctttgacctgatcccctgcagtgacctgcccagcctggatgccattggggatgtgtccaaggcctcacagatcctgaatgcctacctggtcagggtgggtgccaacgggacctgcctgtgggatcccaacttccagggcctctgtaacgcacccctgtcggcagccacggagtacaggttcaagtatgtcctggtcaatatgtccacgggcttggtagaggaccagaccctgtggtcagaccccatccgcaccaaccagctcaccccatactcgacgatcgacacgtggccaggccggcggagcggaggcatgatcgtcatcacttccatcctgggctccctgcccttctttctacttgtgggttttgctggcgccattgccctcagcctcgtggacatggggagttctgatggggaaacgactcacgactcccaaatcactcaggaggctgttcccaagtcgctgggggcctcggagtcttcctacacgtccgtgaaccgggggccgccactggacagggctgaggtgtattccagcaagctccaagactgagcccagcaccacccctgggcagcagcatcctcctctctggccttgccccaggccctgcagcggtggttgtcacaccctgacttcagggaaggtgaaacagggcttgtccctccaactgcaggaaaacccttaataaaatcttctgatgagttcta

SEQ ID NO: 198432 - DNA, 627 bp, Homo sapiens
  Payload ID: 19158
  Gene Name: uroplakin 3A
  Uniprot ID: O75631
  ENST ID: ENST00000396082
  CDS Start-End: 24-524
gctctggcggctcctcccgggcgatgcctccgctctgggccctgctggccctcggctgcctgcggttcggctcggctgtgaacctgcagccccaactggccagtgtgactttcgccaccaacaaccccacacttaccactgtggccttggaaaagcctctctgcatgtttgacagcaaagaggccctcactggcacccacgaggtctacctgtatgtcctggtcgactcagtcaccccatactcgacgatcgacacgtggccaggccggcggagcggaggcatgatcgtcatcacttccatcctgggctccctgcccttctttctacttgtgggttttgctggcgccattgccctcagcctcgtggacatggggagttctgatggggaaacgactcacgactcccaaatcactcaggaggctgttcccaagtcgctgggggcctcggagtcttcctacacgtccgtgaaccgggggccgccactggacagggctgaggtgtattccagcaagctccaagactgagcccagcaccacccctgggcagcagcatcctcctctctggccttgccccaggccctgcagcggtggttgtcacaccctgacttcagggaaggtgaaacagggc

SEQ ID NO: 198433 - DNA, 1296 bp, Homo sapiens
  Payload ID: 19159
  Gene Name: uroplakin 3B
  Uniprot ID: Q9BT76
  ENST ID: ENST00000257632
  CDS Start-End: 129-1091
tttgcaggtctttccagcccctggggcagcctgattaaccagcttctccagggccaagctgttgggggtgaggtgcagcccgaagcagccagaccagcccctgagcctcccgggtgctggcagctgtcatggggctaccctgggggcagcctcacctagggctgcagatgctcctcctggcgttgaactgtctccggcccagcctgagcctgggtgagtgggggtcctggatggacgcgtccagccagacccaaggggctgggggccctgctggagtgattggaccctgggcgcccgcccccctccgattgggagaggcagccccagggacccccacgcccgtctccgtggctcaccttttgtcccccgtggccacagagctggtgccctacacaccacagataacagcttgggacctggaagggaaggtcacagccaccaccttctccctggagcagccgcgctgtgtcttcgatgggcttgccagcgccagcgataccgtctggctcgtggtggccttcagcaatgcctccaggggcttccagaacccggagacactggctgacattccggcctccccacagctgctgaccgatggccactacatgacgctgcccctgtctccggaccagctgccctgtggcgaccccatggcgggcagcggaggcgcccccgtgctgcgggtgggccatgaccacggctgccaccagcagcccttctgcaacgcgcccctccctggccctggaccctatcgggaagacccccggatccatcgacacctggccagggcggcgaagtggcagcatgatcgtcattacctccatcctctcttctctggccggcctcctactcttggccttcttggcagcctctaccatgcgcttctccagcctgtggtggccggaggaggccccggagcagctgcggatcggctccttcatgggcaagcgctacatgacccaccacatcccacccagagaggccgccacactgccggtgggctgcaagcctggcctggaccccctccccagcctcagcccctagcctggcctctttgcatggggctgggggagatggggcgctgggagtgagtgcatggtgctttgtcccagctcctgcacccacaggccccctcagggctccttgcctttcccccccaccagcacaccccgtaccctgcctggaatcccagcaccagcccccctgcctctcctctgcctttctggtttctctccctctccaagcatctgtaagttgcactcaggagggtttaggggagggccatgggcaggctgg

SEQ ID NO: 198434 - DNA, 2373 bp, Homo sapiens
  Payload ID: 19159
  Gene Name: uroplakin 3B
  Uniprot ID: Q9BT76
  ENST ID: ENST00000334348
  CDS Start-End: 226-1056
cagtggggctggatactggcctgcctcccaccagagtccccccagctcctccctgctgtgggctggcctgggaggaagggggtggggtgcacttacatttgcaggtctttccagcccctggggcagcctgattaaccagcttctccagggccaagctgttgggggtgaggtgcagcccgaagcagccagaccagcccctgagcctcccgggtgctggcagctgtcatggggctaccctgggggcagcctcacctagggctgcagatgctcctcctggcgttgaactgtctccggcccagcctgagcctggagctggtgccctacacaccacagataacagcttgggacctggaagggaaggtcacagccaccaccttctccctggagcagccgcgctgtgtcttcgatgggcttgccagcgccagcgataccgtctggctcgtggtggccttcagcaatgcctccaggggcttccagaacccggagacactggctgacattccggcctccccacagctgctgaccgatggccactacatgacgctgcccctgtctccggaccagctgccctgtggcgaccccatggcgggcagcggaggcgcccccgtgctgcgggtgggccatgaccacggctgccaccagcagcccttctgcaacgcgcccctccctggccctggaccctatcgggtgaagttcctcctgatggacaccaggggctcacccagggctgagaccaagtggtcagaccccatcactctccaccaagggaagacccccggatccatcgacacctggccagggcggcgaagtggcagcatgatcgtcattacctccatcctctcttctctggccggcctcctactcttggccttcttggcagcctctaccatgcgcttctccagcctgtggtggccggaggaggccccggagcagctgcggatcggctccttcatgggcaagcgctacatgacccaccacatcccacccagagaggccgccacactgccggtgggctgcaagcctggcctggaccccctccccagcctcagcccctagcctggcctctttgcatggggctgggggagatggggcgctgggagtgagtgcatggtgctttgtcccagctcctgcacccacaggccccctcagggctccttgcctttcccccccaccagcacaccccgtaccctgcctggaatcccagcaccagcccccctgcctctcctctgcctttctggtttctctccctctccaagcatctgtaagttgcactcaggagggtttaggggagggccatgggcaggctggatacccagtccccacctccatccccacctctgtctcacctgacctcctgcgagggaggctggagactgtgtggacaggccgccctgaccgcaagcttccagaccctgggaggaggcctgcagaggactgtgctttgcctgatgcagggagctgggcccatcctggggcctatgagacctgagccaccctccgtcccccatcccacacatcagtggctgggcggggtgaggattcagaggcatctctactgcccctgggcacagcacctttctgagagtgggactctccatggtcatctgactaccaattctggccaccacctccaaccctcttgtgcatatggatggctctagcccttatccaccccctcaagcatttattaagcatctgctgtatgctacatacagtgttagacttggggcttcaggcatagccggtcctgaccttggggagatgccttctctagacctgagacgaccacgtgtccagatgtgacctgttgctgtcgggggtctatcaggcccttagaccgtcaccccagtaggctctccaggacccaggagcctccatcacctggaaggaccctctgtgcaaaacctcaagcgtccatctgtgcacaaggccggtggttcccgtcgtcgccactcggggtcgccggtgagccgcagccaggccgcctcacggccagtgtgcatgctcgctgctattcgctgccccttctgcctccgaggcggtagcagatgccacgttggcggggtcggtgaaggtcaggactctaggcctccctccgccaagccagagggatgagcaatcacgcctgagagcccactgcgtgccatgcagtccgcacagccgcagcggttttctagatggagaaactgaggctcagtgacttgcccgctgcactctgtccacggccgctgcacacgcccccttgggctgcgctcccggaccttctaatgtgaccacggctcccggcatgcaggccctgccagcggagggagcccggtggtgacccttggtctgcagccctctttggaggtgaataaatgcggtctggagccc

SEQ ID NO: 198435 - DNA, 1041 bp, Homo sapiens
  Payload ID: 19159
  Gene Name: uroplakin 3B
  Uniprot ID: Q9BT76
  ENST ID: ENST00000394849
  CDS Start-End: 39-836
agaccagcccctgagcctcccgggtgctggcagctgtcatggggctaccctgggggcagcctcacctagggctgcagatgctcctcctggcgttgaactgtctccggcccagcctgagcctggagctggtgccctacacaccacagataacagcttgggacctggaagggaaggtcacagccaccaccttctccctggagcagccgcgctgtgtcttcgatgggcttgccagcgccagcgataccgtctggctcgtggtggccttcagcaatgcctccaggggcttccagaacccggagacactggctgacattccggcctccccacagctgctgaccgatggccactacatgacgctgcccctgtctccggaccagctgccctgtggcgaccccatggcgggcagcggaggcgcccccgtgctgcgggtgggccatgaccacggctgccaccagcagcccttctgcaacgcgcccctccctggccctggaccctatcgggaagacccccggatccatcgacacctggccagggcggcgaagtggcagcatgatcgtcattacctccatcctctcttctctggccggcctcctactcttggccttcttggcagcctctaccatgcgcttctccagcctgtggtggccggaggaggccccggagcagctgcggatcggctccttcatgggcaagcgctacatgacccaccacatcccacccagagaggccgccacactgccggtgggctgcaagcctggcctggaccccctccccagcctcagcccctagcctggcctctttgcatggggctgggggagatggggcgctgggagtgagtgcatggtgctttgtcccagctcctgcacccacaggccccctcagggctccttgcctttcccccccaccagcacaccccgtaccctgcctggaatcccagcaccagcccccctgcctctcctctgcctttctggtttctctccctctccaagcatctgtaagttgcactcaggagggtttaggggagggccatgggcaggctgg

SEQ ID NO: 198436 - DNA, 1516 bp, Homo sapiens
  Payload ID: 19159
  Gene Name: uroplakin 3B
  Uniprot ID: Q9BT76
  ENST ID: ENST00000448265
  CDS Start-End: 129-1091
tttgcaggtctttccagcccctggggcagcctgattaaccagcttctccagggccaagctgttgggggtgaggtgcagcccgaagcagccagaccagcccctgagcctcccgggtgctggcagctgtcatggggctaccctgggggcagcctcacctagggctgcagatgctcctcctggcattgaactgtctccggcccagcctgagcctgggtgagtgggggtcctggatggacgcgtccagccagacccaaggggctgggggccctgctggagtgattggaccctgggcgcccgcccccctccgattgggagaggcagccccagggacccccacgcccgtctccgtggctcaccttttgtcccccgtggccacagagctggtgccctacacaccacagataacagcttgggacctggaagggaaggtcacagccaccaccttctccctggagcagccgcgctgtgtcttcgatgggcttgccagcgccagcgataccgtctggctcgtggtggccttcagcaatgcctccaggggcttccagaacccggagacactggctgacattccggcctccccacagctgctgaccgatggccactacatgacgctgcccctgtctccggaccagctgccctgtggcgaccccatggcgggcagcggaggcgcccccgtgctgcgggtgggccatgaccacggctgccaccagcagcccttctgcaacgcgcccctccctggccctggaccctatcgggaagacccccggatccatcgacacctggccagggcggcgaagtggcagcatgatcgtcattacctccatcctctcttctctggccggcctcctactcttggccttcttggcagcctctaccatgcgcttctccagcctgtggtggccggaggaggccccggagcagctgcggatcggctccttcatgggcaagcgctacatgacccaccacatcccacccagcgaggccgccacactgccggtgggctgcaagcctggcctggaccccctccccagcctcagcccctagcctggcctctttgcatggggctgggggagatggggcgccgggagtgagtgcatggtgctttgtcccagctcctgcacccacaggccccctcagggctccttgcctttcccccccaccagcacaccccgtaccctgcctggaatcccagcaccagcccccctgcctctcctctgcctttctggtttctctccctctccaagcatctgtaagttgcactcaggagggtttaggggagggccatgggcaggctggtctcgtgatagtgagtgagtgctcatgggatctggttgtttagaagcatgcagcacctcctgcttcactctctctgtctctcctgctccaccatggccagaaacgtgcctgcttccccttcgccttctgccgtgattgtcagtttcttgagggctccccagccatgcttcctgtacagcctgcaaaactgtgagtcaattaaacctcttttcttcataaa

SEQ ID NO: 198437 - DNA, 1528 bp, Homo sapiens
  Payload ID: 19159
  Gene Name: uroplakin 3B
  Uniprot ID: Q9BT76
  ENST ID: ENST00000615976
  CDS Start-End: 226-1056
cagtggggctggatactggcctgcctcccaccagagtccccccagctcctccctgctgtgggctggcctgggaggaagggggtggggtgcacttacatttgcaggtctttccagcccctggggcagcctgattaaccagcttctccagggccaagctgttgggggtgaggtgcagcccgaagcagccagaccagcccctgagcctcccgggtgctggcagctgtcatggggctaccctgggggcagcctcacctagggctgcagatgctcctcctggcattgaactgtctccggcccagcctgagcctggagctggtgccctacacaccacagataacagcttgggacctggaagggaaggtcacagccaccaccttctccctggagcagccgcgctgtgtcttcgatgggcttgccagcgccagcgataccgtctggctcgtggtggccttcagcaatgcctccaggggcttccagaacccggagacactggctgacattccggcctccccacagctgctgaccgatggccactacatgacgctgcccctgtctccggaccagctgccctgtggcgaccccatggcgggcagcggaggcgcccccgtgctgcgggtgggccatgaccacggctgccaccagcagcccttctgcaacgcgcccctccctggccctggaccctatcgggtgaagttcctcctgatggacaccaggggctcacccagggctgagaccaagtggtcagaccccatcactctccaccaagggaagacccccggatccatcgacacctggccagggcggcgaagtggcagcatgatcgtcattacctccatcctctcttctctggccggcctcctactcttggccttcttggcagcctctaccatgcgcttctccagcctgtggtggccggaggaggccccggagcagctgcggatcggctccttcatgggcaagcgctacatgacccaccacatcccacccagcgaggccgccacactgccggtgggctgcaagcctggcctggaccccctccccagcctcagcccctagcctggcctctttgcatggggctgggggagatggggcgccgggagtgagtgcatggtgctttgtcccagctcctgcacccacaggccccctcagggctccttgcctttcccccccaccagcacaccccgtaccctgcctggaatcccagcaccagcccccctgcctctcctctgcctttctggtttctctccctctccaagcatctgtaagttgcactcaggagggtttaggggagggccatgggcaggctggtctcgtgatagtgagtgagtgctcatgggatctggttgtttagaagcatgcagcacctcctgcttcactctctctgtctctcctgctccaccatggccagaaacgtgcctgcttccccttcgccttctgccgtgattgtcagtttcttgagggctccccagccatgcttcctgtacagcctgcaaaactgtgagtcaattaaacctcttttcttcataaa

SEQ ID NO: 198438 - DNA, 1041 bp, Homo sapiens
  Payload ID: 19159
  Gene Name: uroplakin 3B
  ENST ID: ENST00000631529
  CDS Start-End: 39-836
agaccagcccctgagcctcccgggtgctggcagctgtcatggggctaccctgggggcagcctcacctagggctgcagatgctcctcctggcattgaactgtctccggcccagcctgagcctggagctggtgccctacacaccacagataacagcttgggacctggaagggaaggtcacagccaccaccttctccctggagcagccgcgctgtgtcttcgatgggcttgccagcgccagcgataccgtctggctcgtggtggccttcagcaatgcctccaggggcttccagaacccggagacactggctgacattccggcctccccacagctgctgaccgatggccactacatgacgctgcccctgtctccggaccagctgccctgtggcgaccccatggcgggcagcggaggcgcccccgtgctgcgggtgggccatgaccacggctgccaccagcagcccttctgcaacgcgcccctccctggccctggaccctatcgggaagacccccggatccatcgacacctggccagggcggcgaagtggcagcatgatcgtcattacctccatcctctcttctctggccggcctcctactcttggccttcttggcagcctctaccatgcgcttctccagcctgtggtggccggaggaggccccggagcagctgcggatcggctccttcatgggcaagcgctacatgacccaccacatcccacccagcgaggccgccacactgccggtgggctgcaagcctggcctggaccccctccccagcctcagcccctagcctggcctctttgcatggggctgggggagatggggcgccgggagtgagtgcatggtgctttgtcccagctcctgcacccacaggccccctcagggctccttgcctttcccccccaccagcacaccccgtaccctgcctggaatcccagcaccagcccccctgcctctcctctgcctttctggtttctctccctctccaagcatctgtaagttgcactcaggagggtttaggggagggccatgggcaggctgg

SEQ ID NO: 198439 - DNA, 1342 bp, Homo sapiens
  Payload ID: 19160
  Gene Name: uroplakin 3B-like
  Uniprot ID: B0FP48
  ENST ID: ENST00000340457
  CDS Start-End: 51-842
gacaggggagcctctggggctgcagacactgcagacggacggacagacagatggacaacagctggaggcttggcccggccatagggctctctgcgggacagtcccagctgctagtgtcgctgttgctgctactgacccgtgtccagcctgggacagacgtggctgccccagagcacatcagctatgtgccccagctctcaaacgacaccttggcggggaggctcaccctgtccaccttcacgctggagcagcctctaggccagttcagcagccacaacatctctgacttggataccatctggctggtggtggccctcagcaacgccacccagagcttcacggccccacggacaaaccaggacatccctgctcctgccaacttctcccagaggggctactatctcacactgagggccaaccgggtgctgtaccagaccagaggccagctccatgtcctccgcgtcggcaatgatacccactgccaaccaacaaaaattggctgcaaccatcccctaccaggacccggcccctacagggtgaagttcctggtgatgaatgacgaaggacccgtggctgaaaccaagtggtccagcgacactcgcctgcagcaagcccaggcacttcgggctgtccccggcccccagagcccgggcaccgtggtcatcatcgccatcctgtctatcctcctggccgtcctcctcacggtcctcctggctgtgctcatatacacctgcttcaacagctgcaggagcacttccctatcaggcccagaggaggcagggagtgtgagaagatacaccacgcacctcgcgttcagcactcctgccgagggggcttcctgaggggttccagaggggcccacgtgtccctccacctcctccctggcccaggctgcagagcctgagctgggacacgccctgaagcttctggaccctgagagagattgtttcttttctttactatttttttttttttttttttgagacggagtctcactctgtcgccaggctggcgcgatcttggctcactgcaacctctgcctcacgggttcaagcgattttcctgcttcagcctcctgagtagctgggactacaggcacacgccaccatgcccagctcatttttgtatttttagtagagatggggtttcaccatgttggccaggatggcctccatctcttgaccttgtgatccgcccgactcggcctcccaaaatgctgggattacaggcgtgagccatcaagtctggcgagagagattgtttctagatgagggtgggggcgggtgtccttagcccaaagcttgtgccagtctctatcggaaataaatgcccccaaaacctc

SEQ ID NO: 198440 - DNA, 1300 bp, Homo sapiens
  Payload ID: 19161
  Gene Name: uroporphyrinogen decarboxylase
  Uniprot ID: P06132
  ENST ID: ENST00000246337
  CDS Start-End: 120-1223
tgatcttcaacatggcgacgctcttggttccctacagaaaggggcggagcctggactggggggcaggctcagattcaggttaaattgtggattgagctcgcagttacagacagctgaccatggaagcgaatgggttgggacctcagggttttccggagctgaagaatgacacattcctgcgagcagcctggggagaggaaacagactacactcccgtttggtgcatgcgccaggcaggccgttacttaccagagtttagggaaacccgggctgcccaggactttttcagcacgtgtcgctctcctgaggcctgctgtgaactgactctgcagccactgcgtcgcttccctctggatgctgccatcattttctccgacatccttgttgtaccccaggcactgggcatggaggtgaccatggtacctggcaaaggacccagcttcccagagccattaagagaagagcaggacctagaacgcctacgggatccagaagtggtagcctctgagctaggctatgtgttccaagccatcacccttacccgacaacgactggctggacgtgtgccgctgattggctttgctggtgccccatggaccctgatgacatacatggttgagggtggtggctcaagcaccatggctcaggccaagcgctggctctatcagagacctcaggctagtcaccagctgcttcgcatcctcactgatgctctggtcccatatctggtaggacaagtggtggctggtgcccaggcattgcagctgtttgagtcccatgcagggcatcttggcccacagctcttcaacaagtttgcactgccttacatccgtgatgtggccaagcaagtgaaggccaggttgcgggaggcaggcctggcaccagtgcccatgatcatctttgctaaggatgggcattttgccctggaggagctggcccaagctggctatgaggtggttgggcttgactggacagtggccccaaagaaagcccgggagtgtgtggggaagacggtgacattgcagggcaacctggacccctgtgccttgtatgcatctgaggaggagatcgggcagttggtgaagcagatgctggatgactttggaccacatcgctacattgccaacctgggccatgggctttatcctgacatggacccagaacatgtgggcgcctttgtggatgctgtgcataaacactcacgtctgcttcgacagaactgagtgtatacctttaccctcaagtaccactaacacagatgattgatcgtttccaggacaataaaagtttcggagttgaa

SEQ ID NO: 198441 - DNA, 682 bp, Homo sapiens
  Payload ID: 19161
  Gene Name: uroporphyrinogen decarboxylase
  ENST ID: ENST00000428106
  CDS Start-End: 1-682
acctcagggttttccggagctgaagaatgacacattcctgcgagcagcctggggagaggaaacagactacactcccgtttggtgcatgcgccaggcaggccgttacttaccagagtttagggaaacccgggctgcccaggactttttcagcacgtgtcgctctcctgaggcctgctgtgaactgactctgcagccactgcgtcgcttccctctggatgctgccatcattttctccgacatccttgttgtaccccaggcactgggcatggaggtgaccatggtacctggcaaaggacccagcttcccagagccattaagagaagagcaggacctagaacgcctacgggatccagaagtggtagcctctgagctaggctatgtgttccaagccatcacccttacccgacaacgactggctggacgtgtgccgctgattggctttgctggtgccccagcattgcagctgtttgagtcccatgcagggcatcttggcccacagctcttcaacaagtttgcactgccttacatccgtgatgtggccaagcaagtgaaggccaggttgcgggaggcaggcctggcaccagtgcccatgatcatctttgctaaggatgggcattttgccctggaggagctggcccaagctggctatgaggtggttgggcttgactggacagtggcccca

SEQ ID NO: 198442 - DNA, 600 bp, Homo sapiens
  Payload ID: 19161
  Gene Name: uroporphyrinogen decarboxylase
  ENST ID: ENST00000434478
  CDS Start-End: 21-600
gcagttacagacagctgaccatggaagcgaatgggttgggacctcagggttttccggagctgaagaatgacacattcctgcgagcagcctggggagaggaaacagactacactcccgtttggtgcatgcgccaggcaggccgttacttaccagagtttagggaaacccgggctgcccaggactttttcagcacgtgtcgctctcctgaggcctgctgtgaactgactctgcaggcactgggcatggaggtgaccatggtacctggcaaaggacccagcttcccagagccattaagagaagagcaggacctagaacgcctacgggatccagaagtggtagcctctgagctaggctatgtgttccaagccatcacccttacccgacaacgactggctggacgtgtgccgctgattggctttgctggtgccccatggaccctgatgacatacatggttgagggtggtggctcaagcaccatggctcaggccaagcgctggctctatcagagacctcaggctagtcaccagctgcttcgcatcctcactgatgctctggtcccatatctggtaggacaagtggtggctggtgcccaggcattgc

SEQ ID NO: 198443 - DNA, 744 bp, Homo sapiens
  Payload ID: 19162
  Gene Name: uroporphyrinogen III synthase
  ENST ID: ENST00000368774
  CDS Start-End: 88-489
accgccccccgaccgggtgcccgctgtgtgccaggccgggtgctgggcacggtcccgcgagtgccctataaggactgccaggcaataatgaaggttcttttactgaaggatgcgaaggaagatgactgtggccaggatccgtatatcagggaattaggattatatggacttgaagccactttgatccctgttttatcgtttgagtttttgtctcttcccagtttctctgagaagctttctcatcctgaagattacgggggactcatttttaccagccccagagcagtggaagcagcagagttatgtttggagcaaaacaataaaactgaagtctgggaaaggtctctgaaagaaaaatggaatgccaagtcagtgtatgtggttggaaatgctactgcttctctagtgagtaaaattggcctggatacagaaggagaaacctgtggaaatgcagaaaagcttgcagaatatatttgttccagtaagtagaaaaacatcactccaaatgaagccatttattttttgttgacctcacaaccactacctagggaaaagaatatttcctcagtgcattcttggtggtgagattgattggtgagcatcgtataacccactctgggagcatagcctatttgtatttgtgtatgtctatactttgtgaggtttagcccacttccttctaccccctgtaccaaagaacttgacttgaacataacacaaaataaaacatttgggagataaaaa

SEQ ID NO: 198444 - DNA, 1556 bp, Homo sapiens
  Payload ID: 19162
  Gene Name: uroporphyrinogen III synthase
  ENST ID: ENST00000368778
  CDS Start-End: 195-614
ctggggcccggcgcgggtggccgccgcggcccctcgggctgcgtggggagggggcttccgcccctgttgtcattgctcctgcagccttttcgctgggactgcgcgacaccgccccccgaccgggtgcccgctgtgtgccaggccgggtgctgggcacggtcccgcgagtgccctataaggactgccaggcaataatgaaggttcttttactgaaggatgcgaaggaagatgactgtggccaggatccgtatatcagggaattaggattatatggacttgaagccactttgatccctgttttatcgtttgagtttttgtctcttcccagtttctctgagaagctttctcatcctgaagattacgggggactcatttttaccagccccagagcagtggaagcagcagagttatgtttggagcaaaacaataaaactgaagtctgggaaaggtctctgaaagaaaaatggaatgccaagtcagtgtatgtggttggaaatgctactgcttctctagtgagtaaaattggcctggatacagaaggagaaacctgtggaaatgcagaaaagcttgcagaatatatttgttccagtgaagaagtcaaaggaatcttttgaagtgaagaaagtgggtttggacgtgcccttatgctgatgaatcattggagtaatatctggggtttagccgcatccttggtggcaaggcggtggggaaagcccctgagggtgaggccagcctgagccccaagggaaaggggctgctgggacctcctgacctcaactcatctccaggagcgcacagggcctcgcacagatgcctcagtctgtaccgctgggagttcgtgccatctcagacctaccctccctacctgggctgtacctaaagagatactgctaggctttctctagaatgtttcatgagccagcactgtgagacattttcaagctaaaaacatacagttcaggagactgtaatctgtggtagaaagtgttcaccatttgctgctagtaaagacggttggccctgtgcttctctggccacttgtgccacatggtgttctcggaagaggcctctccatgcaccagtgtggagaagccctctggaggccaattcaaagagcatctgaggctaagcaactgaaaggaaaaggcctgatggccaacgtgttgctttctgtggaatgttccagactggattgctgggggtcattttctttaacagcagcctagacaggcagtgactctcttttattcagccaggtgttgaaatagctgcagggaagccacagacagttgttccagctttccggatcagagagcactggttgggccccgtgccatgtggccccagccccatgggatcgctcctcaggtcatggagccacacatcagtgtggagggttcgctccaggggttcctggtacaggatgcagatgggtcttgtctggctccaggctttttgtttctaatgttgtttctagagagtcatcatcaccgcataaatggtatcaaagcccttcttttaaaaatgtagaaataaatgtaaatggtagatcttga

SEQ ID NO: 198445 - DNA, 1216 bp, Homo sapiens
  Payload ID: 19162
  Gene Name: uroporphyrinogen III synthase
  Uniprot ID: P10746
  ENST ID: ENST00000368786
  CDS Start-End: 134-931
ttccacaagcatttgattgccttcttcttgtgtaccgtccccatcggaaattgcttaggaagagtctttgagatctaattaagatctgtttccttgctctgtcgcagtgccctataaggactgccaggcaataatgaaggttcttttactgaaggatgcgaaggaagatgactgtggccaggatccgtatatcagggaattaggattatatggacttgaagccactttgatccctgttttatcgtttgagtttttgtctcttcccagtttctctgagaagctttctcatcctgaagattacgggggactcatttttaccagccccagagcagtggaagcagcagagttatgtttggagcaaaacaataaaactgaagtctgggaaaggtctctgaaagaaaaatggaatgccaagtcagtgtatgtggttggaaatgctactgcttctctagtgagtaaaattggcctggatacagaaggagaaacctgtggaaatgcagaaaagcttgcagaatatatttgttccagggagtcctcagcactgcctcttctatttccctgtggaaacctcaaaagagaaatcctgccaaaagcgctcaaggacaaagggattgccatggaaagcataactgtgtatcagacagttgcacacccaggaatccaagggaacctgaacagctactattcccagcagggggttccagccagcatcacattttttagtccctctggcctcacatacagtctcaagcacattcaggagttatctggtgacaatatcgatcaaattaagtttgcagccatcggccccactacggctcgcgcgctggccgcccagggccttcctgtaagctgcactgcagagagccccacgccacaagccctggccactggcatcaggaaggctctccagccccatggctgctgctgagtcagccacctagcgctggccccatgcagcctccctgggctgggctggctctggatggagccaggcatcggcaagggctctcgggagctgctgccgtcagactcctgcctcaagcctgagtggaagcacctgaggaccggggatcgggacctgacctggggctggcctcaggcccacgtgcacgtgactgccctctgtggaagccagcttaaaccctagccctgtgagagcttcctgtgcccagcaggaaggaagtcaaataaaccacactgactacctgtgctt

SEQ ID NO: 198446 - DNA, 1313 bp, Homo sapiens
  Payload ID: 19162
  Gene Name: uroporphyrinogen III synthase
  Uniprot ID: P10746
  ENST ID: ENST00000368797
  CDS Start-End: 226-1023
cccacgcgaccccagtctgaggtgcggggtcctggggcccggcgcgggtggccgccgcggcccctcgggctgcgtggggagggggcttccgcccctgttgtcattgctcctgcagccttttcgctgggactgcgcgacaccgccccccgaccgggtgcccgctgtgtgccaggccgggtgctgggcacggtcccgcgagtgccctataaggactgccaggcaataatgaaggttcttttactgaaggatgcgaaggaagatgactgtggccaggatccgtatatcagggaattaggattatatggacttgaagccactttgatccctgttttatcgtttgagtttttgtctcttcccagtttctctgagaagctttctcatcctgaagattacgggggactcatttttaccagccccagagcagtggaagcagcagagttatgtttggagcaaaacaataaaactgaagtctgggaaaggtctctgaaagaaaaatggaatgccaagtcagtgtatgtggttggaaatgctactgcttctctagtgagtaaaattggcctggatacagaaggagaaacctgtggaaatgcagaaaagcttgcagaatatatttgttccagggagtcctcagcactgcctcttctatttccctgtggaaacctcaaaagagaaatcctgccaaaagcgctcaaggacaaagggattgccatggaaagcataactgtgtatcagacagttgcacacccaggaatccaagggaacctgaacagctactattcccagcagggggttccagccagcatcacattttttagtccctctggcctcacatacagtctcaagcacattcaggagttatctggtgacaatatcgatcaaattaagtttgcagccatcggccccactacggctcgcgcgctggccgcccagggccttcctgtaagctgcactgcagagagccccacgccacaagccctggccactggcatcaggaaggctctccagccccatggctgctgctgagtcagccacctagcgctggccccatgcagcctccctgggctgggctggctctggatggagccaggcatcggcaagggctctcgggagctgctgccgtcagactcctgcctcaagcctgagtggaagcacctgaggaccggggatcgggacctgacctggggctggcctcaggcccacgtgcacgtgactgccctctgtggaagccagcttaaaccctagccctgtgagagcttcctgtgcccagcaggaaggaagtcaaataaaccacactgactacctgtgcttactga

SEQ ID NO: 198447 - DNA, 802 bp, Homo sapiens
  Payload ID: 19162
  Gene Name: uroporphyrinogen III synthase
  ENST ID: ENST00000420761
  CDS Start-End: 247-802
gcgcctagctgcgcgcagccacccacgcgaccccagtctgaggtgcggggtcctggggcccggcgcgggtggccgccgcggcccctcgggctgcgtggggagggggcttccgcccctgttgtcattgctcctgcagccttttcgctgggactgcgcgacaccgccccccgaccgggtgcccgctgtgtgccaggccgggtgctgggcacggtcccgcgagtgccctataaggactgccaggcaataatgaaggttcttttactgaaggatgcgaaggaagatgactgtggccaggatccgtatatcaggctttctcatcctgaagattacgggggactcatttttaccagccccagagcagtggaagcagcagagttatgtttggagcaaaacaataaaactgaagtctgggaaaggtctctgaaagaaaaatggaatgccaagtcagtgtatgtggttggaaatgctactgcttctctagtgagtaaaattggcctggatacagaaggagaaacctgtggaaatgcagaaaagcttgcagaatatatttgttccagggagtcctcagcactgcctcttctatttccctgtggaaacctcaaaagagaaatcctgccaaaagcgctcaaggacaaagggattgccatggaaagcataactgtgtatcagacagttgcacacccaggaatccaagggaacctgaacagctactattcccagcagggggttccagccagcatcacattttttagtccctctggcctcacatacagtctcaagcacattcaggagttatctggtg

SEQ ID NO: 198448 - DNA, 3188 bp, Homo sapiens
  Payload ID: 19162
  Gene Name: uroporphyrinogen III synthase
  ENST ID: ENST00000462490
  CDS Start-End: 1-331
agaaggagaaacctgtggaaatgcagaaaagcttgcagaatatatttgttccagggagtcctcagcactgcctcttctatttccctgtggaaacctcaaaagagaaatcctgccaaaagcgctcaaggacaaagggattgccatggaaagcataactgtgtatcagacagttgcacacccaggaatccaagggaacctgaacagctactattcccagcagggggttccagccagcatcacattttttagtccctctggcctcacatacagtctcaagcacattcaggagttatctggtgacaatatcgatcaaattaagaaacacccttgaactggctccagagggactgaggagagggtgcaggatgtgacccagagcccaaggacagacactgccactcactgcagtcaggaagagcaaaaggcttcacctgccttctcacaggtgcatctcatgtggggagtatgcaccgctctcccagttttaaagatggagcacggggctcagagacatcatatggcctgtctgtaggtcacactgctgagaaggaagagctgcagttgaacctgggaagactgattccacattgtcagccatggtgatgccttgccatggtctcaggagctgctgagcagttgatgcacttctgggcagtaactgatacaattctcacaccagtccagtggtgggtatccagaaaaagaggtcagtgttcctcattacaggtgaggacactgagggctagagaggtgaaacaacttgccaaagtcatgttttgagttcctagaaggcccaggactcacacaggtcaccgaggaagaaaaacaatatctgaatcttgtggttagaaagattagagagaggccgggcgctgtggctcccacctggaatcccagcactttgggaggcctcaggcggatcacctgaggtcaggtgttccagaccagcctgtccaatatgatgaaaaccccgtctttactaaaaatataaaaattagctgggcatggtggcatgcgcctataatcccagctacatgggaggctgagacaggagaatcgcttgaaccctggagactgaggttgcagtgagccgagatcgcgccacggcactccagcctgggtgacaagagtgaaactccgtacctgccccataaaagaaaaaaagaaagaaaaagaaaaattaaagagataggacccataaagtgcttagcatggcaactggtccatatgaccagcgcttacgtcatattgcaggtcaggatgggtcacggtgctggtcctgctctggttcttgtccctctgtgccctgctgcctctcccctgggcctgtaggaggagtccccacctccaccccacccacccacccccaagtcacacaatgctgtgagatgcctggtggtataagcctaacacagttttccccaagcttcttagtgtttgcctagaggaagaacaaaagatttatactctatcttctttcaaagtgagcatatttaaaagcacaaatggatactcagcatctgaaccaagaactcaggcctttctgaatagactgctgcctgcattgtccacacccatggcagctgggggctgagtgcgtgttcctatcctgtatctgtcacacccatttctgcagccctccagacactctgaggagctctcagtagccccctcgcctcttactacagtgattgattaccctgcctgccagtagttaacacctctgccattgctgaggaggagaaagtgacagagctggccttgctcacagtgactatggactgcttgggggccacgaaggcactgtgtgtgggttgtgagttgtccctcgacactgggacttggcgctggatagtgaggtgctttcaaggttcacagaggacacagtcctagcccgtgagttggtagttaggcttttctgtctcagctcagcctcagatttgctactgtcctccctccccaggagtccctgtagggcccactgtttgtacagcattgcacaacatgcaggcgcaccacaaaagatcaaagggggtgacttccgacctgaacttgctacttatccattgacttgggaagaccacgcacttgtctataaatgccacagagatgtcactgcaaagcagtaggtaagcagattcgtaatcaccaccaccacactaatggcagcagctgaatttcctgtgtacagcaaaatgcccttgcagcctgtgaggtgggtatcttcacacctagtgctcactagccacagtggcagagccaggctgtgaacgtggctgctgcccccaaagccaggctggtgcactcacgtccagtttgtgccagggatggagaaagaacgttgatgctgggccccctcgcctggcctggggaagactgctgctctgtggggcagcatcatgtgagcattcattgacacaggagtgaaaggctcctgtgaaaaagctgctgtttcaccaaactgttgatacccctgctctaggactacagtcatgtttgccatttgctggttcccagtcccagggagtttctttttttcaaatttttaaatagctttattgagatgtaattcacaaaccataaaatttactttttatgattttaatatgtaaacttaaaaattttttttttatttttttagagatggggtctcactgtgttgcctaggctgatctcaaactcctggcctcaagtaatcttcccaccttggcctcccaaaatgtagggattacaggtgtgagccaccacgcccagcccaatatgtaaactttaacatgatttttatgagagtcacagatttgtgcaaccatcaccactgtctagttccaggacatatcatcaccccaaagagaaacccggtacccattcgcagccacccctcattccctcattcctcccactccttggcaaccactcaactgtttttcatctccatggatttacctattccggacatctcatattaatagaatcatacagtatgtggtcttttgtaactgactcttttcactagcatagtgttttcaaggttcatccatgctgtagctggtaccagtacttcatccctttttagtgccaaataatagtacatgctgaggaccgttttatttacccattcactagttgatggatatttggattgttttccactttcaggctattaaataatgctaaacattcaaatacaa

SEQ ID NO: 198449 - DNA, 441 bp, Homo sapiens
  Payload ID: 19162
  Gene Name: uroporphyrinogen III synthase
  ENST ID: ENST00000616800
  CDS Start-End: 1-205
gtatcagacagttgcacacccaggaatccaagggaacctgaacagctactattcccagcagggggttccagccagcatcacattttttagtccctctggcctcacatacagtctcaagcacattcaggagttatctggtgacaatatcgatcaaattaagatcgaagagctggagctccagtgggcatcttgggccctgagatgacattggggaaagaaagttttctggaacaaggtgacactgtgggcacaaaaactatcccaactctagacttcttgagtgtaaaagacatatcgacttctatcttgtttaagccactattactacgagattttttcttttacaatcaaatctaaatgataaaataatcaagtgaattggtagagtaaacatcaagataaaccgtttccgagtttgaataaaatgcccttttaagaaaa

SEQ ID NO: 198450 - DNA, 563 bp, Homo sapiens
  Payload ID: 19162
  Gene Name: uroporphyrinogen III synthase
  ENST ID: ENST00000622016
  CDS Start-End: 1-369
tttccctgtggaaacctcaaaagagaaatcctgccaaaagcgctcaaggacaaagggattgccatggaaagcataactgtgtatcagacagttgcacacccaggaatccaagggaacctgaacagctactattcccagcagggggttccagccagcatcacattttttagtccctctggcctcacatacagtctcaagcacattcaggagttatctggtgacaatatcgatcaaattaagctcctggatggaggagagttgctgaagaagttcatgcagggaaggaataaaggatcacacaggaatttgagagccaaagtaaagtgcaactggccccccaggcccagaggggctagcagtgagaactgaagatgttccctctggaccttccggccacagctcattgatgggacatgttctcagacagtgttgtaagttttgtgtgctttaactcatgagttacacgtggtcactcacttaatgagttaagcgttaatacaacttccctgtgaatagaaggtaacaaaataaaaacattgtgttgtatacaagtcttcagaaaa

SEQ ID NO: 198451 - DNA, 420 bp, Homo sapiens
  Payload ID: 19163
  Gene Name: urotensin 2
  Uniprot ID: O95399
  ENST ID: ENST00000054668
  CDS Start-End: 1-420
atggaaaccaacgtatttcatcttatgctctgcgtcacttctgctcggactcataaatccacgtctctttgctttggccacttcaactcatatccaagccttcctttaattcatgatttattgctggaaatatcctttcaactctcagcacctcatgaagacgcgcgcttaactccggaggagctagaaagagcttcccttctacagatactgccagagatgctgggtgcagaaagaggggatattctcaggaaagcagactcaagtaccaacatttttaacccaagaggaaatttgagaaagtttcaggatttctctggacaagatcctaacattttactgagtcatcttttggccagaatctggaaaccatacaagaaacgtgagactcctgattgcttctggaaatactgtgtctga

SEQ ID NO: 198452 - DNA, 559 bp, Homo sapiens
  Payload ID: 19163
  Gene Name: urotensin 2
  Uniprot ID: O95399
  ENST ID: ENST00000361696
  CDS Start-End: 33-407
ccaagaaggaagccgtctatcttgtggcgatcatgtataagctggcctcctgctgtttgcttttcataggattcttaaatcctctcttatctcttcctctccttgactccagggaaatatcctttcaactctcagcacctcatgaagacgcgcgcttaactccggaggagctagaaagagcttcccttctacagatactgccagagatgctgggtgcagaaagaggggatattctcaggaaagcagactcaagtaccaacatttttaacccaagaggaaatttgagaaagtttcaggatttctctggacaagatcctaacattttactgagtcatcttttggccagaatctggaaaccatacaagaaacgtgagactcctgattgcttctggaaatactgtgtctgaagtgaaataagcatctgttagtcagctcagaaacacccatcttagaatatgaaaaataacacaatgcttgatttgaaaacagtgtggagaaaaactaggcaaactacaccctgttcattgttacctggaaaataaatcctctatgttttgca

SEQ ID NO: 198453 - DNA, 1601 bp, Homo sapiens
  Payload ID: 19163
  Gene Name: urotensin 2
  ENST ID: ENST00000377516
  CDS Start-End: 322-741
tccacagattgtcattcttcagggatggcagccctaaacacagcatggcaactcatctactcactcatgaaagattaaaaaatggaaaccaacgtatttcatcttatgctctgcgtcacttctgctcggactcataaatccacgtctctttgctttggccacttcaactcatatccaagccttcctttaattcatgatttattgctgatgatgtcaggtcataggatgatatatataatcagtgagcaggcagaatgaggagacagttgaaagttctctacaacagaagccaagaaggaagccgtctatcttgtggcgatcatgtataagctggcctcctgctgtttgcttttcataggattcttaaatcctctcttatctcttcctctccttgactccagggaaatatcctttcaactctcagcacctcatgaagacgcgcgcttaactccggaggagctagaaagagcttcccttctacagatactgccagagatgctgggtgcagaaagaggggatattctcaggaaagcagactcaagtaccaacatttttaacccaagaggaaatttgagaaagtttcaggatttctctggacaagatcctaacattttactgagtcatcttttggccagaatctggaaaccatacaagaaacagagaagaaagctgaggcaagatttaagattgtggaagaaagagcctggcttacgaatttttaaaaactatgtgtgggtgtgaatttcatctatcattccaagtttaagaaggaatcagggacttctctaaaaagcaccagagagtgagctgatttatcaagtaaacaatcacactcacttcttaaaagacacaactacaaacgccatagaaagcggtgactgatggagcctgcaggaccctgtgggcgaggacaactgggctcgcctggacgttttctcttttgcagtccccacaacactgccctgttcaagggcaaacaaaaggcagtgccagtcagacctgtggtagggctggagcgacctcttttgtataaattgattggaaagaaagagttaactgttttggtaagaatgaaaatttaaacacagaagtatgtaagaatgatactagcttttacattacttgtaaaacattttacaatcattattttaaaaacaaaaatactcaaaagggcaacagcactgggtaagaagctctttcattttaatattacacatgcaaatgctaactgaaacttacaagaataggcccatggtaagcggatcgatttttaagataagactttcagaatttcactggaaggtgggaaatcaataggaaagggatctacaaggatgaaggccaaaactcaacccccaaaacctggttatcccagatatgctaatggacagtatgtgctaatgtgttgtgagaaaaccggaatgtttcatcttaattatggaggggaacgccaggttgaatgaagcctgtatgaacgtactacattcatggaaaccattatgaaaagtacacaacctgtaggtggcatttcttcaagcactctaaggggaaaatgacttatgtaacagaacaaaataaatgaggctaaggtttggggctca

SEQ ID NO: 198454 - DNA, 1357 bp, Homo sapiens
  Payload ID: 19164
  Gene Name: urotensin 2 receptor
  Uniprot ID: Q9UKP6
  ENST ID: ENST00000313135
  CDS Start-End: 96-1265
tctttccccacaggctgagctggttgcccacaggggcccccgccccatctcagggagtgtccacccagccctgagcccgtcgtgaggggtcagagatggcgctgacccccgagtccccgagcagcttccctgggctggccgccactggcagctctgtgccggagccgcctggcggccccaacgcaaccctcaacagctcctgggccagcccgaccgagcccagctccctggaggacctggtggccacgggcaccattgggactctgctgtcggccatgggcgtggtgggcgtggtgggcaacgcctacacgctggtggtcacctgccgctccctgcgtgcggtggcctccatgtacgtctacgtggtcaacctggcgctggccgacctgctgtacctgctcagcatccccttcatcgtggccacctacgtcaccaaggagtggcacttcggggacgtgggctgccgcgtgctcttcggcctggacttcctgaccatgcacgccagcatcttcacgctgaccgtcatgagcagcgagcgctacgctgcggtgctgcggccgctggacaccgtgcagcgccccaagggctaccgcaagctgctggcgctgggcacctggctgctggcgctgctgctgacgctgcccgtgatgctggccatgcggctggtgcgccggggtcccaagagcctgtgcctgcccgcctggggcccgcgcgcccaccgcgcctacctgacgctgctcttcgccaccagcatcgcggggcccgggctgctcatcgggctgctctacgcgcgcctggcccgcgcctaccgccgctcgcagcgcgcctccttcaagcgggcccggcggccgggggcgcgcgcgctgcgcctggtgctgggcatcgtgctgctcttctgggcctgcttcctgcccttctggctgtggcagctgctcgcccagtaccaccaggccccgctggcgccgcggacggcgcgcatcgtcaactacctgaccacctgcctcacctacggcaacagctgcgccaaccccttcctctacacgctgctcaccaggaactaccgcgaccacctgcgcggccgcgtgcggggcccgggcagcgggggaggccgggggcccgttccctccctgcagccccgcgcccgcttccagcgctgttcgggccgctccctgtcttcctgcagcccacagcccactgacagcctcgtgctggccccagcggccccggcccgacctgcgcccgagggtcccagggccccggcgtgagcacgcggaggggcggctggagtccaggcggggacgcgccccaaagccccagccactcccgggagcccccccaactcccaaatcacaggccc

SEQ ID NO: 198455 - DNA, 2395 bp, Homo sapiens
  Payload ID: 19165
  Gene Name: urotensin 2B
  Uniprot ID: Q765I0
  ENST ID: ENST00000340524
  CDS Start-End: 788-1147
aactcaaggcataaggcgatccagcacctaagatctcagcaaaaaaaagctaggtcctgaggcagctagtggaaaaacaagagaagggaagtcaaaaggctacttgctgtcagctaaagccagacaacctctcctgtttcatctcctggcaacagaatgcatcctccttttgggaaactgcctctttccccactcctcagagtaaatcttgctgctgctcactctttgggtctgcactgcccataagagctgtagcactcaccgcgaaggtctgcagcttcactcttgaaaccagagagaccacgaacctaccgggagaaatgaacaaattccggacgcaccatctttaagaactgtaacactcactgcgaggatctgcggcttcattctttaagtctgtgagaccaagaacccaccaattccggcacactaatatgctgttggaaactggctatatggaaaggctatgtggaagaaaacaaacaccccagccaacataatggagctcccagctgacagctgacatctagctgattgccaaccactttggaaactgatcttcaaaacccacttgagctatgtcaagagaagccacctgtgacacagaagcagaaggatccaagtcaaaggagtttatttgggaggaaatagcacgagagaatgatcattcgtaactgaggcacacttgccttttgcaactaagctctactgaattccaaagctatagaaatatccatcttgacctggaaagtctgtttctttgctagtccagaaggttttttttaacatgaacaagatcctctcaagcactgtttgctttggactcctaactttgttatccgtgttgagttttttacaatctgtgcatggacgaccatatcttacccaaggaaatgaaatatttccagataaaaaatatacaaatcgtgaggaactattgctggctctactgaataaaaattttgatttccaaagacctttcaacactgacctagccttacctaacaaactggaagaacttaaccagctggaaaagctaaaagaacagctagtggaggagaaggattctgagacgtcctatgctgtagatggtctattctcttctcatcctagcaaacgagcttgcttttggaaatactgtgtttaaagctttttctctggatgcaaaaaaagataagaatatcaggaaaatatatgtatctactcactctgctgtaggcagaccccctgaaactattgctgtggaataaaagatgaaatgctcctgattattgtaaatacaaaattgcatgcgggattgtgtaaagacaatgccaggttggactgccagaatgagccaacagcacttgcttccccctgtagagagcctatgaatggacgtgcagtcagggaggtttcatatcaccaagattcctatcccagaaaagcagatgttcatagctctgggaatggaatgcgcccctcgtggagagcctataaacggatgcatggaaggcgcctgtccatatggataagatagggttgtaaacgtcctcatcttgccatggctcttctaggcctctttagggttaaggcatatttccttctgagaatttctggtctaagcggttgtctagcttcatgtcctgtttccatggattgtttgtaaccagcttttgttacaattgttactgctgattaatatcttgctaatcataggttatggaaagattgtgtttctgttttaaggctctgttagaaattacacacacagtatattgtaaattcttatctctgtatactgtacttctacatacaaatgtactgtacttctacatacaaatgttatgttaaagaattacttcatccccatgtgaccatctcacctcataatcaaatgaccctaaatccctcattaacctacccctgcccttgctaaacttaataataaatgctggtatatccagtgcattgttggcaccatgggaccagaaggtggtgacccccctggacccagctttcactatcttgtgtgtgtctgttatttctcaacctgctgatccgcctgggaacaaagagccccgttgcattgcgggctactggccagatcccgcaatactctgctatttaaaattgtagctgtttcaatcataaagaaactggcatttattatgcatatgattttttcaccttgttcttgttactaagtcaattatgataagcttaaggtttatgttgtgaataatcactaatcagttgcacttttgaaggtatgtcactatcaaaatggttttgtagagctagagttgaaaatgctgtatctattgtatgctttccataaattcattgcttatgtaaagttttgtcctgttgtgactatgctgttgaactattaattaaaacattttgaaaagca

SEQ ID NO: 198456 - DNA, 839 bp, Homo sapiens
  Payload ID: 19165
  Gene Name: urotensin 2B
  ENST ID: ENST00000440476
  CDS Start-End: 143-388
tctttttccttcatctagatcattcgtaactgaggcacacttgccttttgcaactaagctctactgaattccaaagctatagaaatatccatcttgacctggaaagtctgtttctttgctagtccagaaggttttttttaacatgaacaagatcctctcaagcactgtttgctttggactcctaactttgttatccgtgttgagttttttacaatctgtgcatggacgaccatatcttacccaaggaaatgaaatatttccagataaaaaatatacaaatcgtgaggaactattgctggctctactgaataaaaattttgatttccaaagacctttcaacactgctggaaaagctaaaagaacagctagtggaggagaaggattctgagacgtcctatgctgtagatggtctattctcttctcatcctagcaaacgagcttgcttttggaaatactgtgtttaaagctttttctctggatgcaaaaaaagataagaatatcaggaaaatatatgtatctactcactctgctgtaggcagaccccctgaaactattgctgtggaataaaagatgaaatgctcctgattattgtaaatacaaaattgcatgcgggattgtgtaaagacaatgccaggttggactgccagaatgagccaacagcacttgcttccccctgtagagagcctatgaatggacgtgcagtcagggaggtttcatatcaccaagattcctatcccagaaaagcagatgttcatagctctgggaatggaatgcgcccctcgtggagagcctataaacggatgcatggaaggcgcctgtccatatggataagatagggt

SEQ ID NO: 198457 - DNA, 676 bp, Homo sapiens
  Payload ID: 19165
  Gene Name: urotensin 2B
  Uniprot ID: Q765I0
  ENST ID: ENST00000427544
  CDS Start-End: 215-574
gtcacttctccaagtagtgaatcatgttaactacttgattgcattgcattttatagatttattttctttctttctttttccttcatctagatcattcgtaactgaggcacacttgccttttgcaactaagctctactgaattccaaagctatagaaatatccatcttgacctggaaagtctgtttctttgctagtccagaaggttttttttaacatgaacaagatcctctcaagcactgtttgctttggactcctaactttgttatccgtgttgagttttttacaatctgtgcatggacgaccatatcttacccaaggaaatgaaatatttccagataaaaaatatacaaatcgtgaggaactattgctggctctactgaataaaaattttgatttccaaagacctttcaacactgacctagccttacctaacaaactggaagaacttaaccagctggaaaagctaaaagaacagctagtggaggagaaggattctgagacgtcctatgctgtagatggtctattctcttctcatcctagcaaacgagcttgcttttggaaatactgtgtttaaagctttttctctggatgcaaaaaaagataagaatatcaggaaaatatatgtatctactcactctgctgtaggcagaccccctgaaactattgctgtggaata

SEQ ID NO: 198458 - DNA, 1005 bp, Homo sapiens
  Payload ID: 19165
  Gene Name: urotensin 2B
  ENST ID: ENST00000432514
  CDS Start-End: 892-1005
agctagtggaaaaacaagagaagggaagtcaaaaggctacttgctgtcagctaaagccagacaacctctcctgtttcatctcctggcaacagaatgcatcctccttttgggaaactgcctctttccccactcctcagagtaaatcttgctgctgctcactctttgggtctgcactgcccataagagctgtagcactcaccgcgaaggtctgcagcttcactcttgaaaccagagagaccacgaacctaccgggagaaatgaacaaattccggacgcaccatctttaagaactgtaacactcactgcgaggatctgcggcttcattctttaagtctgtgagaccaagaacccaccaattccggcacactaatatgctgttggaaactggctatatggaaaggctatgtggaagaaaacaaacaccccagccaacataatggagctcccagctgacagctgacatctagctgattgccaaccactttggaaactgatcttcaaaacccacttgagctatgtcaagagaagccacctgtgacacagaagcagaaggatccaagtcaaaggagtttatttgggaggaaatagcacgagagaatgtgatacttgggaaaattatgtagagagagagattaaagatgcaagctataaaaggaattgataatataaaagctcctgagaagattggaagaatacatataagagaccctgatccttgataggatggaccttttctagaactaccatcaccctggaagctgaagaaaatcattcgtaactgaggcacacttgccttttgcaactaagctctactgaattccaaagctatagaaatatccatcttgacctggaaagtctgtttctttgctagtccagaaggttttttttaacatgaacaagatcctctcaagcactgtttgctttggactcctaactttgttatccgtgttgagttttttacaatctgtgcatggacgaccatatcttacccaaggaaatgaaata

SEQ ID NO: 198459 - DNA, 701 bp, Homo sapiens
  Payload ID: 19165
  Gene Name: urotensin 2B
  ENST ID: ENST00000425357
  CDS Start-End: 122-367
attcgtaactgaggcacacttgccttttgcaactaagctctactgaattccaaagctatagaaatatccatcttgacctggaaagtctgtttctttgctagtccagaaggttttttttaacatgaacaagatcctctcaagcactgtttgctttggactcctaactttgttatccgtgttgagttttttacaatctgtgcatggacgaccatatcttacccaaggaaatgaaatatttccagataaaaaatatacaaatcgtgaggaactattgctggctctactgaataaaaattttgatttccaaagacctttcaacactgctggaaaagctaaaagaacagctagtggaggagaaggattctgagacgtcctatgctgtagatggtctattctcttctcatcctagcaaacgagccctatcatccagaacgttgatacagcttaactgcctccaacattgccaaaacagaagaggataaaggatacatcccagctttcaattgcctcagttcggaagggacacacatcatttctactgaagtccattggccgggattagtcactgggactaccaccaacatatggcaaggcagcttgcttttggaaatactgtgtttaaagctttttctctggatgcaaaaaaagataagaatatcaggaaaatatatgtatctactcactctgctgtaggcagaccc

SEQ ID NO: 198460 - DNA, 836 bp, Homo sapiens
  Payload ID: 19165
  Gene Name: urotensin 2B
  ENST ID: ENST00000446788
  CDS Start-End: 73-471
ccaaagctatagaaatatccatcttgacctggaaagtctgtttctttgctagtccagaaggttttttttaacatgaacaagatcctctcaagcactgtttgctttggactcctaactttgttatccgtgttgagttttttacaatctgtgcatggacgaccatatcttacccaaggaaatgaaatatttccagataaaaaatatacaaatcgtgaggaactattgctggctctactgaataaaaattttgatttccaaagacctttcaacactgacctagccttacctaacaaactggaagaacttaaccagctggaaaagctaaaagaacagctagtggaggagaaggattctgagacgtcctatgctgtagatggtctattctcttctcatcctagcaaacgagccctatcatccagaacgttgatacagcttaactgcctccaacattgccaaaacagaagaggataaaggatacatcccagctttcaattgcctcagttcggaagggacacacatcatttctactgaagtccattggccgggattagtcactgggactaccaccaacatatggcaaggcagcttgcttttggaaatactgtgtttaaagctttttctctggatgcaaaaaaagataagaatatcaggaaaatatatgtatctactcactctgctgtaggcagaccccctgaaactattgctgtggaataaaagatgaaatgctcctgattattgtaaatacaaaattgcatgcgggattgtgtaaagacaatgccaggttggactgccagaatgagccaacagcacttgcttccccctgtagagagcctatg

SEQ ID NO: 198461 - DNA, 2700 bp, Homo sapiens
  Payload ID: 19166
  Gene Name: Usher syndrome 1C
  Uniprot ID: Q9Y6N9
  ENST ID: ENST00000005226
  CDS Start-End: 1-2700
atggaccgaaaagtggcccgagaattccggcataaggtggattttctgattgaaaatgatgcagagaaggactatctctatgatgtgctgcgaatgtaccaccagaccatggacgtggccgtgctcgtgggagacctgaagctggtcatcaatgaacccagccgtctgcctctgtttgatgccattcggccgctgatcccactgaagcaccaggtggaatatgatcagctgaccccccggcgctccaggaagctgaaggaggtgcgtctggaccgtctgcaccccgaaggcctcggcctgagtgtgcgtggtggcctggagtttggctgtgggctcttcatctcccacctcatcaaaggcggtcaggcagacagcgtcgggctccaggtaggggacgagatcgtccggatcaatggatattccatctcctcctgtacccatgaggaggtcatcaacctcattcgaaccaagaaaactgtgtccatcaaagtgagacacatcggcctgatccccgtgaaaagctctcctgatgagcccctcacttggcagtatgtggatcagtttgtgtcggaatctgggggcgtgcgaggcagcctgggctcccctggaaatcgggaaaacaaggagaagaaggtcttcatcagcctggtaggctcccgaggccttggctgcagcatttccagcggccccatccagaagcctggcatctttatcagccatgtgaaacctggctccctgtctgctgaggtgggattggagataggggaccagattgtcgaagtcaatggcgtcgacttctctaacctggatcacaaggaggctgtaaatgtgctgaagagtagccgcagcctgaccatctccattgtagctgcagctggccgggagctgttcatgacagaccgggagcggctggcagaggcgcggcagcgtgagctgcagcggcaggagcttctcatgcagaagcggctggcgatggagtccaacaagatcctccaggagcagcaggagatggagcggcaaaggagaaaagaaattgcccagaaggcagcagaggaaaatgagagataccggaaggagatggaacagattgtagaggaggaagagaagtttaagaagcaatgggaagaagactggggctcaaaggaacagctactcttgcctaaaaccatcactgctgaggtacacccagtaccccttcgcaagccaaagtcttttggatggttttatcgttacgatggcaaattcccaaccatccggaagaaaggaaaagataagaagaaagccaagtatggcagcctgcaggacttgagaaagaataagaaagaactggagtttgagcaaaagctttacaaagagaaagaggaaatgctggagaaggaaaagcagctaaagatcaaccggctggcccaggaggtgtctgagacagagcgggaagaccttgaagaatcggaaaagattcaatattgggtggagaggctctgtcaaacgcgcctcgagcagatttcctctgctgataatgagatttcagagatgaccacagggcccccgcctcccccgccttctgtgtctcccctggccccacccttgagacgcttcgcaggcggactgcacctgcacaccactgacctggacgacatccctttggacatgttctactatccccccaagactccctctgccttgcctgtgatgccccaccctccaccctccaacccaccccacaaggtcccggcgccccctgtccttcccttatctggccatgtgagcgcctcatcctctccatgggtgcagcgcactccaccccccattcccatccctcccccgccatccgttcccacccaagacctcactcccacccgcccactgccctcggcgctggaagaagcactgagcaaccatcccttccgcactggggacacaggcaatccagtggaggactgggaggcaaagaaccacagtgggaagcccactaactcccctgtccctgaacagagcttcccacccaccccaaagacattttgcccaagcccacagcctccacgaggccctggcgtgtccaccatctccaaacctgtcatggtccaccaggagcccaatttcatctacaggccagctgtgaaatctgaagttctgccacaggagatgttgaagaggatggtggtttatcagacagcattcagacaagatttccggaaatatgaggaaggctttgacccctactctatgttcaccccagagcagatcatggggaaggatgtccggctcctacgcatcaagaaggagggatccttagacctggccctggaaggcggtgtggactcccccattgggaaggtggtcgtttctgctgtgtatgagcggggagctgctgagcggcatggtggcattgtgaaaggggacgagatcatggcaatcaacggcaagattgtgacagactacaccctggctgaggctgaggctgccctgcagaaggcctggaatcagggcggggactggatcgaccttgtggttgccgtctgccccccaaaggagtatgacgatgagctagcttctcttccctcctccgtagctgaaagcccccaaccggtccgaaagctccttgaagaccgtgctgccgtgcacagacacgggttcctcctgcagctggagcccacggaccttcttctgaagtccaaaaggggaaaccaaattcaccgttag

SEQ ID NO: 198462 - DNA, 2237 bp, Homo sapiens
  Payload ID: 19166
  Gene Name: Usher syndrome 1C
  Uniprot ID: Q9Y6N9
  ENST ID: ENST00000318024
  CDS Start-End: 110-1768
agctccgagggcggctggcccggtcgcggtcgcggctctttccagctcctggcagccgggcacccgaaggaacgggtcgtgcaacgacgcagctggacctggcccagccatggaccgaaaagtggcccgagaattccggcataaggtggattttctgattgaaaatgatgcagagaaggactatctctatgatgtgctgcgaatgtaccaccagaccatggacgtggccgtgctcgtgggagacctgaagctggtcatcaatgaacccagccgtctgcctctgtttgatgccattcggccgctgatcccactgaagcaccaggtggaatatgatcagctgaccccccggcgctccaggaagctgaaggaggtgcgtctggaccgtctgcaccccgaaggcctcggcctgagtgtgcgtggtggcctggagtttggctgtgggctcttcatctcccacctcatcaaaggcggtcaggcagacagcgtcgggctccaggtaggggacgagatcgtccggatcaatggatattccatctcctcctgtacccatgaggaggtcatcaacctcattcgaaccaagaaaactgtgtccatcaaagtgagacacatcggcctgatccccgtgaaaagctctcctgatgagcccctcacttggcagtatgtggatcagtttgtgtcggaatctgggggcgtgcgaggcagcctgggctcccctggaaatcgggaaaacaaggagaagaaggtcttcatcagcctggtaggctcccgaggccttggctgcagcatttccagcggccccatccagaagcctggcatctttatcagccatgtgaaacctggctccctgtctgctgaggtgggattggagataggggaccagattgtcgaagtcaatggcgtcgacttctctaacctggatcacaaggaggctgtaaatgtgctgaagagtagccgcagcctgaccatctccattgtagctgcagctggccgggagctgttcatgacagaccgggagcggctggcagaggcgcggcagcgtgagctgcagcggcaggagcttctcatgcagaagcggctggcgatggagtccaacaagatcctccaggagcagcaggagatggagcggcaaaggagaaaagaaattgcccagaaggcagcagaggaaaatgagagataccggaaggagatggaacagattgtagaggaggaagagaagtttaagaagcaatgggaagaagactggggctcaaaggaacagctactcttgcctaaaaccatcactgctgaggtacacccagtaccccttcgcaagccaaagtatgatcagggagtggaacctgagctcgagcccgcagatgacctggatggaggcacggaggagcagggagagcaggatttccggaaatatgaggaaggctttgacccctactctatgttcaccccagagcagatcatggggaaggatgtccggctcctacgcatcaagaaggagggatccttagacctggccctggaaggcggtgtggactcccccattgggaaggtggtcgtttctgctgtgtatgagcggggagctgctgagcggcatggtggcattgtgaaaggggacgagatcatggcaatcaacggcaagattgtgacagactacaccctggctgaggctgaggctgccctgcagaaggcctggaatcagggcggggactggatcgaccttgtggttgccgtctgccccccaaaggagtatgacgatgagctgaccttcttctgaagtccaaaaggggaaaccaaattcaccgttaggaaacagtgagctccggccccacctcgtgaacacaaagcctcggatcagccttgagagaggccacactacacacaccagatggcatccttgggacctgaatctatcacccaggaatctcaaactccctttggccctgaaccagggccagataaggaacagctcgggccactcttctgaaggccaacgtggaggaaagggagcagccagccatttgggagaagatctcaaggatccagactctcattcctttcctctggcccagtgaatttggtctctcccagctctgggggactccttccttgaaccctaataagaccccactggagtctctctctctccatccctctcctctgccctctgctctaattgctgccaggattgtcactccaaaccttactctgagctcattaataaaatagatttattttccagctta

SEQ ID NO: 198463 - DNA, 2149 bp, Homo sapiens
  Payload ID: 19166
  Gene Name: Usher syndrome 1C
  Uniprot ID: Q9Y6N9
  ENST ID: ENST00000526313
  CDS Start-End: 96-1307
ctggcccggtcgcggtcgcggctctttccagctcctggcagccgggcacccgaaggaacgggtcgtgcaacgacgcagctggacctggcccagccatggaccgaaaagtggcccgagaattccggcataaggtggattttctgattgaaaatgatgcagagaaggactatctctatgatgtgctgcgaatgtaccaccagaccatggacgtggccgtgctcgtgggagacctgaagctggtcatcaatgaacccagccgtctgcctctgtttgatgccattcggccgctgatcccactgaagcaccaggtggaatatgatcagctgaccccccggcgctccaggaagctgaaggaggtgcgtctggaccgtctgcaccccgaaggcctcggcctgagtgtgcgtggtggcctggagtttggctgtgggctcttcatctcccacctcatcaaaggcggtcaggcagacagcgtcgggctccaggtaggggacgagatcgtccggatcaatggatattccatctcctcctgtacccatgaggaggtcatcaacctcattcgaaccaagaaaactgtgtccatcaaagtgagacacatcggcctgatccccgtgaaaagctctcctgatgagcccctcacttggcagtatgtggatcagtttgtgtcggaatctgggggcgtgcgaggcagcctgggctcccctggaaatcgggaaaacaaggagaagaaggtcttcatcagcctggtaggctcccgaggccttggctgcagcatttccagcggccccatccagaagcctggcatctttatcagccatgtgaaacctggctccctgtctgctgaggtgggattggagataggggaccagattgtcgaagtcaatggcgtcgacttctctaacctggatcacaaggaggctgtaaatgtgctgaagagtagccgcagcctgaccatctccattgtagctgcagctggccgggagctgttcatgacagaccgggagcggctggcagaggcgcggcagcgtgagctgcagcggcaggagcttctcatgcagaagcggctggcgatggagtccaacaagatcctccaggagcagcaggagatggagcggcaaaggagaaaagaaattgcccagaaggcagcagaggaaaatgagagataccggaaggagatggaacagattgtagaggaggaagagaagtttaagaagcaatgggaagaagactggggctcaaaggaacagctactcttgcctaaaaccatcactgctgaggtacacccagtaccccttcgcaagccaaagtgatttccggaaatatgaggaaggctttgacccctactctatgttcaccccagagcagatcatggggaaggatgtccggctcctacgcatcaagaaggagggatccttagacctggccctggaaggcggtgtggactcccccattgggaaggtggtcgtttctgctgtgtatgagcggggagctgctgagcggcatggtggcattgtgaaaggggacgagatcatggcaatcaacggcaagattgtgacagactacaccctggctgaggctgaggctgccctgcagaaggcctggaatcagggcggggactggatcgaccttgtggttgccgtctgccccccaaaggagtatgacgatgagctgaccttcttctgaagtccaaaaggggaaaccaaattcaccgttaggaaacagtgagctccggccccacctcgtgaacacaaagcctcggatcagccttgagagaggccacactacacacaccagatggcatccttgggacctgaatctatcacccaggaatctcaaactccctttggccctgaaccagggccagataaggaacagctcgggccactcttctgaaggccaacgtggaggaaagggagcagccagccatttgggagaagatctcaaggatccagactctcattcctttcctctggcccagtgaatttggtctctcccagctctgggggactccttccttgaaccctaataagaccccactggagtctctctctctccatccctctcctctgccctctgctctaattgctgccaggattgtcactccaaaccttactctgagctcattaataaaatagatttattttccagctta

SEQ ID NO: 198464 - DNA, 2278 bp, Homo sapiens
  Payload ID: 19166
  Gene Name: Usher syndrome 1C
  Uniprot ID: Q9Y6N9
  ENST ID: ENST00000527720
  CDS Start-End: 246-1811
gtggtctgcataggtctgatgcattggggtcagaggggcagcctggcctgtggctcctcttctctcctcacaactccagccctgaaaagctgctggggaggcccttggggatgacctctcctccctgaggtctgctatgggggcgggtgctgagcctggagctgtgattctgctattggattttccaggtggattttctgattgaaaatgatgcagagaaggactatctctatgatgtgctgcgaatgtaccaccagaccatggacgtggccgtgctcgtgggagacctgaagctggtcatcaatgaacccagccgtctgcctctgtttgatgccattcggccgctgatcccactgaagcaccaggtggaatatgatcagctgaccccccggcgctccaggaagctgaaggaggtgcgtctggaccgtctgcaccccgaaggcctcggcctgagtgtgcgtggtggcctggagtttggctgtgggctcttcatctcccacctcatcaaaggcggtcaggcagacagcgtcgggctccaggtaggggacgagatcgtccggatcaatggatattccatctcctcctgtacccatgaggaggtcatcaacctcattcgaaccaagaaaactgtgtccatcaaagtgagacacatcggcctgatccccgtgaaaagctctcctgatgagcccctcacttggcagtatgtggatcagtttgtgtcggaatctgggggcgtgcgaggcagcctgggctcccctggaaatcgggaaaacaaggagaagaaggtcttcatcagcctggtaggctcccgaggccttggctgcagcatttccagcggccccatccagaagcctggcatctttatcagccatgtgaaacctggctccctgtctgctgaggtgggattggagataggggaccagattgtcgaagtcaatggcgtcgacttctctaacctggatcacaaggaggctgtaaatgtgctgaagagtagccgcagcctgaccatctccattgtagctgcagctggccgggagctgttcatgacagaccgggagcggctggcagaggcgcggcagcgtgagctgcagcggcaggagcttctcatgcagaagcggctggcgatggagtccaacaagatcctccaggagcagcaggagatggagcggcaaaggagaaaagaaattgcccagaaggcagcagaggaaaatgagagataccggaaggagatggaacagattgtagaggaggaagagaagtttaagaagcaatgggaagaagactggggctcaaaggaacagctactcttgcctaaaaccatcactgctgaggtacacccagtaccccttcgcaagccaaagtatgatcagggagtggaacctgagctcgagcccgcagatgacctggatggaggcacggaggagcagggagagcaggatttccggaaatatgaggaaggctttgacccctactctatgttcaccccagagcagatcatggggaaggatgtccggctcctacgcatcaagaaggagggatccttagacctggccctggaaggcggtgtggactcccccattgggaaggtggtcgtttctgctgtgtatgagcggggagctgctgagcggcatggtggcattgtgaaaggggacgagatcatggcaatcaacggcaagattgtgacagactacaccctggctgaggctgaggctgccctgcagaaggcctggaatcagggcggggactggatcgaccttgtggttgccgtctgccccccaaaggagtatgacgatgagctgaccttcttctgaagtccaaaaggggaaaccaaattcaccgttaggaaacagtgagctccggccccacctcgtgaacacaaagcctcggatcagccttgagagaggccacactacacacaccagatggcatccttgggacctgaatctatcacccaggaatctcaaactccctttggccctgaaccagggccagataaggaacagctcgggccactcttctgaaggccaacgtggaggaaagggagcagccagccatttgggagaagatctcaaggatccagactctcattcctttcctctggcccagtgaatttggtctctcccagctctgggggactccttccttgaaccctaataagaccccactggagtctctctctctccatccctctcctctgccctctgctctaattgctgccaggattgtcactccaaaccttactctgagctcattaataaaatagatttattttccagct

SEQ ID NO: 198465 - DNA, 2159 bp, Homo sapiens
  Payload ID: 19166
  Gene Name: Usher syndrome 1C
  Uniprot ID: Q9Y6N9
  ENST ID: ENST00000527020
  CDS Start-End: 94-1695
ggcccggtcgcggtcgcggctctttccagctcctggcagccgggcacccgaaggaacgggtcgtgcaacgacgcagctggacctggcccagccatggaccgaaaagtggcccgagaattccggcataaggtggattttctgattgaaaatgatgcagagaaggactatctctatgatgtgctgcgaatgtaccaccagaccatggacgtggccgtgctcgtgggagacctgaagctggtcatcaatgaacccagccgtctgcctctgtttgatgccattcggccgctgatcccactgaagcaccaggtggaatatgatcagctgaccccccggcgctccaggaagctgaaggaggtgcgtctggaccgtctgcaccccgaaggcctcggcctgagtgtgcgtggtggcctggagtttggctgtgggctcttcatctcccacctcatcaaaggcggtcaggcagacagcgtcgggctccaggtaggggacgagatcgtccggatcaatggatattccatctcctcctgtacccatgaggaggtcatcaacctcattcgaaccaagaaaactgtgtccatcaaagtgagacacatcggcctgatccccgtgaaaagctctcctgatgagcccctcacttggcagtatgtggatcagtttgtgtcggaatctgggggcgtgcgaggcagcctgggctcccctggaaatcgggaaaacaaggagaagaaggtcttcatcagcctggtaggctcccgaggccttggctgcagcatttccagcggccccatccagaagcctggcatctttatcagccatgtgaaacctggctccctgtctgctgaggtgggattggagataggggaccagattgtcgaagtcaatggcgtcgacttctctaacctggatcacaaggagggccgggagctgttcatgacagaccgggagcggctggcagaggcgcggcagcgtgagctgcagcggcaggagcttctcatgcagaagcggctggcgatggagtccaacaagatcctccaggagcagcaggagatggagcggcaaaggagaaaagaaattgcccagaaggcagcagaggaaaatgagagataccggaaggagatggaacagattgtagaggaggaagagaagtttaagaagcaatgggaagaagactggggctcaaaggaacagctactcttgcctaaaaccatcactgctgaggtacacccagtaccccttcgcaagccaaagtatgatcagggagtggaacctgagctcgagcccgcagatgacctggatggaggcacggaggagcagggagagcaggatttccggaaatatgaggaaggctttgacccctactctatgttcaccccagagcagatcatggggaaggatgtccggctcctacgcatcaagaaggagggatccttagacctggccctggaaggcggtgtggactcccccattgggaaggtggtcgtttctgctgtgtatgagcggggagctgctgagcggcatggtggcattgtgaaaggggacgagatcatggcaatcaacggcaagattgtgacagactacaccctggctgaggctgaggctgccctgcagaaggcctggaatcagggcggggactggatcgaccttgtggttgccgtctgccccccaaaggagtatgacgatgagctgaccttcttctgaagtccaaaaggggaaaccaaattcaccgttaggaaacagtgagctccggccccacctcgtgaacacaaagcctcggatcagccttgagagaggccacactacacacaccagatggcatccttgggacctgaatctatcacccaggaatctcaaactccctttggccctgaaccagggccagataaggaacagctcgggccactcttctgaaggccaacgtggaggaaagggagcagccagccatttgggagaagatctcaaggatccagactctcattcctttcctctggcccagtgaatttggtctctcccagctctgggggactccttccttgaaccctaataagaccccactggagtctctctctctccatccctctcctctgccctctgctctaattgctgccaggattgtcactccaaaccttactctgagctcattaataaaatagatttattttcca

SEQ ID NO: 198466 - DNA, 1040 bp, Homo sapiens
  Payload ID: 19166
  Gene Name: Usher syndrome 1C
  ENST ID: ENST00000526181
  CDS Start-End: 88-1040
agctaaggtcaggacaagacagagtgaaggtcccctggcactgatgttacagaagaattcggtggtaaggggcttctggagagtggcatgtgctatctaagcgagtggcccaaatccttcctgaaagcatttatccggcactacagccaccatcaggtggattttctgattgaaaatgatgcagagaaggactatctctatgatgtgctgcgaatgtaccaccagaccatggacgtggccgtgctcgtgggagacctgaagctggtcatcaatgaacccagccgtctgcctctgtttgatgccattcggccgctgatcccactgaagcaccaggtggaatatgatcagctgaccccccggcgctccaggaagctgaaggaggtgcgtctggaccgtctgcaccccgaaggcctcggcctgagtgtgcgtggtggcctggagtttggctgtgggctcttcatctcccacctcatcaaaggcggtcaggcagacagcgtcgggctccaggtaggggacgagatcgtccggatcaatggatattccatctcctcctgtacccatgaggaggtcatcaacctcattcgaaccaagaaaactgtgtccatcaaagtgagacacatcggcctgatccccgtgaaaagctctcctgatgagcccctcacttggcagtatgtggatcagtttgtgtcggaatctgggggcgtgcgaggcagcctgggctcccctggaaatcgggaaaacaaggagaagaaggtcttcatcagcctggtaggctcccgaggccttggctgcagcatttccagcggccccatccagaagcctggcatctttatcagccatgtgaaacctggctccctgtctgctgaggtgggattggagataggggaccagattgtcgaagtcaatggcgtcgacttctctaacctggatcacaaggaggctgtaaatgtgctgaagagtagccgcagcctgaccatctccattgtagctgcagctggccgggagctgttcatgacagaccgggagcggctggcagaggc

SEQ ID NO: 198467 - DNA, 3335 bp, Homo sapiens
  Payload ID: 19167
  Gene Name: Usher syndrome 1C binding protein 1
  Uniprot ID: Q8N6Y0
  ENST ID: ENST00000252597
  CDS Start-End: 175-2286
gtttcccagcccctcccaggccaggcttggccagcccaggcctgaacaggcagtggtcagagtgaccccaacagagtgtcccgggactcaggcctctgatcaagttacccccagaggatcagagaggggttgacgaaggagaagcattcagagggcactggcttctggacagcaatgagtgcccgggccacgcggccccgaagccggcgagggaggcatgctccacccggtgaactggatcccgtggctgagagttcagaggaggtcgaggcagccagtgggagctccaagcccagctttgccccacctccggtgagctccgggctggagcagctgggccccatggaggaggtcagtggccaaggcctaggaagcaggactgacaagaagatggatgggggctctggcagggaactggcctcagcccccgaagtgccccacaaacctgcagtggaagcccaccaagccccagaagcagccctacagtacaaggagactgtgccccctgggaatggggcccccgatgtgtttcagaccctccagcacactctgagctccctggaggcagcggctgcagcctggcgccaccagccccccagccattctgggccgatggagttcgaaggcacaagcgaagggggagcaggttcccttgggaagcaggaaggggcagggagctgccagcgagaggcagctcgcctggccgagaggaatgcctggctccggctggccctgagtagccgagaggatgagctggtccgcacgcaggcctccctggaggccatccgagctgagaaggagacgctgcagaaagaggttcaagagctgcaggattccctcttgaggctggagccctgcccacatctttcccacaaccaagcaggtggctcaggcagtggttctagcagctctgaggcagacagggaaccctgggagactcaggactccttctccctggctcaccccctgcttcggcgcctccgcagccattccagcacccagatccttgggtctcttcccaaccagcccctcagtcctgagatgcacatcatggaagcccagatggagcaactccgggggagcattgagaagctcaaatgctttaatcgtctgctatcagctgtgctacagggatacaagggccgctgtgaaggcctcagcatgcagctaggccagcgggaggctgaggccacagcattgcatctggccttgcagtacagtgaacactgtgaagaggcatacagggttctgcttgctctgcgggaggccgactcaggagcaggagacgaagcccccatgagtgacctgcaagcagctgaaaaggaagcatggaggctgctggcacaagaggaggctgccatggatgcaggagcacagcagaatccacagccaagccctgaaggcagcagtgtggataagcccaccccacaggaagtggctttccagctccgaagctatgtccagcgtctccaggagcgccgttctctaatgaagattctctcagagcctggccccaccttggcacccatgcccactgtgccccgtgcagaagccatggtgcaggccattctggggacccaggctggcccagctcttccccgactggagaagacacaaattcagcaggacctggtggccgcaagggaggccctggcggacctgatgcttcggctgcagctggtgcggcgtgagaagcggggcctagagctgcgggaggctgccctccgagccctgggtccagctcacgtgctcctgctggagcagctgcggtgggaacgggcagagctccaggctggtggggcaaacagcagtggcggacatagcagcggaggtggcagcagcggggacgaggaagagtggtatcagggccttcctgctgtccctggtggcaccagtggcattgatggtggccaggtgggcagagcctgggacccagagaagttagcccaggaactggcagcatcgctcaccaggacactggacctgcaggagcagctgcagtctctgcgcagggagctggaacaggtggctcagaaggggcgagccagacggtctcagagtgccgagctgaacagggatttatgcaaagcccacagcgccctggtcctggccttccgaggagcccaccggaagcaggaagagcaacgccggaagttggagcagcagatggcactcatggaggctcagcaggccgaggaggtggcggtgctcgaagccactgcaagggccctggggaagcccaggcctcccctcccgcctccccagcttggggacacctttctgtaggccccttacccagccatgtctggacatgccagacagctgtggcatgtcataaactgtcctggagtgacatcatgtcatgttgcatgatttggcatgttggggcacatttggcgtgagggaagctggtgcacatgggtgtccagggcctgatggggtgtggccaggcaatgaagaaagactcaggtgtctttggcctggcaccaagtggaatgtgaacttcatatcagtggggtcaggccagaagcaacctgggctatgggaccaggtccctgggactgacgcatttcgggggtccgtgaggttgcatagccacagctgaagttccaactggcctgtctcccgaagcccagggagggattcatggggactggacagagcttctcctggcagccccttcccagggagatgctgggtttggctggcagattttcctgaagggggccgggctcagtggtgcacatctgtaatcccagcattttgggaggccaaggtgggtagatcacttgagcccaggagttcaagaccagcctgggcaacatggcaaaaccccatttctacaaaaaaatacaaaaattagccaggcgtggtggcatgtgcctataaagatatttaggaggctaaagtgggagggtaacttgagcttgggaagtggaggttgcagtgagctgagatcacgccactgcactccagtctgggtcacagagtaagaccttgtctcaaaaaaaaaaacaggccaggcgtggtgactcatgcctgtaatcccagcactttgggaggctgaggcggggaggatcacctgaggtcaggagcttgagaccagcttggccaacatggtgaaacccccgtctctactaaaaatacaaaaattggctgggtgttgtggcacatgcctgtaatcccggctactcgggagactgaggcaggataattgcttgaacctgagaggcgggggttgcagtgaaccgagatcgcgccaacaacaagatcgtgcccgggcaataagagcaaaactctgtctctaaataaataaataaaacacaaaacaaaac

SEQ ID NO: 198468 - DNA, 2402 bp, Homo sapiens
  Payload ID: 19167
  Gene Name: Usher syndrome 1C binding protein 1
  ENST ID: ENST00000324554
  CDS Start-End: 107-1258
caacagagtgtcccgggactcaggcctctgatcaagttacccccagaggatcagagaggggttgacgaaggagaagcattcagagggcactggcttctggacagcaatgagtgcccgggccacgcggccccgaagccggcgagggaggcatgctccacccggtgaactggatcccgtggctgagagttcagaggaggtcgaggcagccagtgggagctccaagcccagctttgccccacctccggtgagctccgggctggagcagctgggccccatggaggaggtcagtggccaaggcctaggaagcaggactgacaagaagatggatgggggctctggcagggaactggcctcagcccccgaagtgccccacaaacctgcagtggaagcccaccaagccccagaagcagccctacagtacaaggagactgtgccccctgggaatggggcccccgatgtgtttcagaccctccagcacactctgagctccctggaggcagcggctgcagcctggcgccaccagccccccagccattctgggccgatggagttcgaaggcacaagcgaagggggagcaggttcccttgggaagcaggaaggggcagggagctgccagcgagaggcagctcgcctggccgagaggaatgcctggctccggctggccctgagtagccgagaggatgagctggtccgcacgcaggcctccctggaggccatccgagctgagaaggagacgctgcagaaagaggttcaagagctgcaggattccctcttgaggctggagccctgcccacatctttcccacaaccaagcaggtggctcaggcagtggttctagcagctctgaggcagacagggaaccctgggagactcaggactccttctccctggctcaccccctgcttcggcgcctccgcagccattccagcacccagatccttgggtctcttcccaaccagcccctcagtcctgagatgcacatcatggaagcccagatggagcaactccgggggagcattgagaagctcaaatgctttaatcgtctgctatcagctgtgctacagggatacaagggccgctgtgaaggcctcagcatgcagctaggccagcgggaggctgaggccacagcattgcatctggccttgcagtacagagtcttgctctgtcacccaggctggagtgcagtggtgccatcttggctcactgcaacctccgcctccccagttcaagtgattctcctgcctcagcctcctgagtagctggaactacagtgaacactgtgaagaggcatacagggttctgcttgctctgcgggaggccgactcaggagcaggagacgaagcccccatgagtgacctgcaagcagctgaaaaggaagcatggaggctgctggcacaagaggaggctgccatggatgcaggagcacagcagaatccacagccaagccctgaaggcagcagtgtggataagcccaccccacaggaagtggctttccagctccgaagctatgtccagcgtctccaggagcgccgttctctaatgaagattctctcagagcctggccccaccttggcacccatgcccactgtgccccgtgcagaagccatggtgcaggccattctggggacccaggctggcccagctcttccccgactggagaagacacaaattcagcaggacctggtggccgcaagggaggccctggcggacctgatgcttcggctgcagctggtgcggcgtgagaagcggggcctagagctgcgggaggctgccctccgagccctgggtccagctcacgtgctcctgctggagcagctgcggtgggaacgggcagagctccaggctggtggggcaaacagcagtggcggacatagcagcggaggtggcagcagcggggacgaggaagagtggtatcagggccttcctgctgtccctggtggcaccagtggcattgatggtggccaggtgggcagagcctgggacccagagaagttagcccaggaactggcagcatcgctcaccaggacactggacctgcaggagcagctgcagtctctgcgcagggagctggaacaggtggctcagaaggggcgagccagacggtctcagagtgccgagctgaacagggatttatgcaaagcccacagcgccctggtcctggccttccgaggagcccaccggaagcaggaagagcaacgccggaagttggagcagcagatggcactcatggaggctcagcaggccgaggaggtggcggtgctcgaagccactgcaagggccctggggaagcccaggcctcccctcccgcctccccagcttggggacacctttctgtaggccccttacccagccatgtctggacatgccagacagctgtggcatgtcataaactgtcctggagtg

SEQ ID NO: 198469 - DNA, 2136 bp, Homo sapiens
  Payload ID: 19167
  Gene Name: Usher syndrome 1C binding protein 1
  ENST ID: ENST00000431146
  CDS Start-End: 146-2065
agagtgtcccgggactcaggcctctgatcaagttacccccagaggatcagagaggggttgacgaaggagaagcattcagagggcactggcttctggacagcaatgagtgcccgggccacgcggccccgaagccggcgagggaggcatgctccacccgactgacaagaagatggatgggggctctggcagggaactggcctcagcccccgaagtgccccacaaacctgcagtggaagcccaccaagccccagaagcagccctacagtacaaggagactgtgccccctgggaatggggcccccgatgtgtttcagaccctccagcacactctgagctccctggaggcagcggctgcagcctggcgccaccagccccccagccattctgggccgatggagttcgaaggcacaagcgaagggggagcaggttcccttgggaagcaggaaggggcagggagctgccagcgagaggcagctcgcctggccgagaggaatgcctggctccggctggccctgagtagccgagaggatgagctggtccgcacgcaggcctccctggaggccatccgagctgagaaggagacgctgcagaaagaggttcaagagctgcaggattccctcttgaggctggagccctgcccacatctttcccacaaccaagcaggtggctcaggcagtggttctagcagctctgaggcagacagggaaccctgggagactcaggactccttctccctggctcaccccctgcttcggcgcctccgcagccattccagcacccagatccttgggtctcttcccaaccagcccctcagtcctgagatgcacatcatggaagcccagatggagcaactccgggggagcattgagaagctcaaatgctttaatcgtctgctatcagctgtgctacagggatacaagggccgctgtgaaggcctcagcatgcagctaggccagcgggaggctgaggccacagcattgcatctggccttgcagtacagtgaacactgtgaagaggcatacagggttctgcttgctctgcgggaggccgactcaggagcaggagacgaagcccccatgagtgacctgcaagcagctgaaaaggaagcatggaggctgctggcacaagaggaggctgccatggatgcaggagcacagcagaatccacagccaagccctgaaggcagcagtgtggataagcccaccccacaggaagtggctttccagctccgaagctatgtccagcgtctccaggagcgccgttctctaatgaagattctctcagagcctggccccaccttggcacccatgcccactgtgccccgtgcagaagccatggtgcaggccattctggggacccaggctggcccagctcttccccgactggagaagacacaaattcagcaggacctggtggccgcaagggaggccctggcggacctgatgcttcggctgcagctggtgcggcgtgagaagcggggcctagagctgcgggaggctgccctccgagccctgggtccagctcacgtgctcctgctggagcagctgcggtgggaacgggcagagctccaggctggtggggcaaacagcagtggcggacatagcagcggaggtggcagcagcggggacgaggaagagtggtatcagggccttcctgctgtccctggtggcaccagtggcattgatggtggccaggtgggcagagcctgggacccagagaagttagcccaggaactggcagcatcgctcaccaggacactggacctgcaggagcagctgcagtctctgcgcagggagctggaacaggtggctcagaaggggcgagccagacggtctcagagtgccgagctgaacagggatttatgcaaagcccacagcgccctggtcctggccttccgaggagcccaccggaagcaggaagagcaacgccggaagttggagcagcagatggcactcatggaggctcagcaggccgaggaggtggcggtgctcgaagccactgcaagggccctggggaagcccaggcctcccctcccgcctccccagcttggggacacctttctgtaggccccttacccagccatgtctggacatgccagacagctgtggcatgtcataaactgtcctggagtgacatc

SEQ ID NO: 198470 - DNA, 3598 bp, Homo sapiens
  Payload ID: 19167
  Gene Name: Usher syndrome 1C binding protein 1
  Uniprot ID: Q8N6Y0
  ENST ID: ENST00000597928
  CDS Start-End: 93-299
gggactcaggcctctgatcaagttacccccagaggatcagagaggggttgacgaaggagaagcattcagagggcactggcttctggacagcaatgagtgcccgggccacgcggccccgaagccggcgagggaggcatgctccacccggtgaactggatcccgtggctgagagttcagaggaggtcgaggcagccagtgggagctccaagcccagctttgccccacctccggtgagctccgggctggagcagctgggccccatggaggaggtcagtggccaaggcctaggaagcaggtaagacccgcttggtctgtgcccttcactccagtccagacgcatctttgccatccacagatctgctgatgtgcctgctctgctcacacacctaccatagctccctattgccttcagcctgactttcttttttttttgagtcttgctgtgtcacccaggctgtagtgcagtgcagtggcacaatctcggctcacagcaacccctgcctcccggttcaagcgggagcctcagcttcctgagtagttgggattacaggtgtgcgccaccacatccggctaagttttgcatttttagtgagacaggccacattagccaggctggtcttgaactcctgcccttaagtgatcccccaactttggcctccaaaagtgctgggattacaagtgtaagccgccgccccagaagaccctatttccagaaacttctgtctctcaccttcaggcctttcccagtgcccgtcacagtccaacttcactctgtttctcagctccaggtctcccctccaacttcttcaccacctctatctagcctcttccttgaattcacagcctcccagtctcaccctgggatgccagtcccagaacacgcagctcttgccaactccctgctccgctcacacctccccaagaccatgaagtttaagccctcagaattccctgcccagggccgagcatggtggctcatgcctataatcccagcactttgggaggccgagttgggcggatcacctgaggtcaggagtttgacaccagcctagccaacatggtgaaaccctgtctctactaaaaatacaaaaattagccaggcgtggtggtgggagcctgtaatcccagctacttgggggaccgaggcaggagaatcacttgaacccaggaggtggaggttgcagtgagccgagatcgcgccactgcactccaggctgggcaacagagtgagactccgtctcaaaaaataaaaaagaattccttgcccagcatggagtgactcaagtgcctgagttggtgtccacaggactgacaagaagatggatgggggctctggcagggaactggcctcagcccccgaagtgccccacaaacctgcagtggaagcccaccaagccccagaagcagccctacagtacaaggagactgtgccccctgggaatggggcccccgatgtgtttcagaccctccagcacactctgagctccctggaggcagcggctgcagcctggcgccaccagccccccagccattctgggccgatggagttcgaaggcacaagcgaagggggagcaggttcccttgggaagcaggaaggggcagggagctgccagcgagaggcagctcgcctggccgagaggaatgcctggctccggctggccctgagtagccgagaggatgagctggtccgcacgcaggcctccctggaggccatccgagctgagaaggagacgctgcagaaagaggttcaagagctgcaggattccctcttgaggctggagccctgcccacatctttcccacaaccaagcaggtggctcaggcagtggttctagcagctctgaggcagacagggaaccctgggagactcaggactccttctccctggctcaccccctgcttcggcgcctccgcagccattccagcacccagatccttgggtctcttcccaaccagcccctcagtcctgagatgcacatcatggaagcccagatggagcaactccgggggagcattgagaagctcaaatgctttaatcgtctgctatcagctgtgctacagggatacaagggccgctgtgaaggcctcagcatgcagctaggccagcgggaggctgaggccacagcattgcatctggccttgcagtacagagtcttgctctgtcacccaggctggagtgcagtggtgccatcttggctcactgcaacctccgcctccccagttcaagtgattctcctgcctcagcctcctgagtagctggaactacaggtgcgtaccaccacaccttgctaatctttgtctttttagtagagacggggtttcaccatgttggtcaggctggtctcgaactcctgacctcaggtaatcctcccgcctcagcctcccaaagtgctgggactacaggtgagggccattgcacccagccgagctgagtgtcctgaagcactcagaaccagtgtcccacagtgaacactgtgaagaggcatacagggttctgcttgctctgcgggaggccgactcaggagcaggagacgaagcccccatgagtgacctgcaagcagctgaaaaggaagcatggaggctgctggcacaagaggaggctgccatggatgcaggagcacagcagaatccacagccaagccctgaaggcagcagtgtggataagcccaccccacaggaagtggctttccagctccgaagctatgtccagcgtctccaggagcgccgttctctaatgaagattctctcagagcctggccccaccttggcacccatgcccactgtgccccgtgcagaagccatggtgcaggccattctggggacccaggctggcccagctcttccccgactggagaagacacaaattcagcaggacctggtggccgcaagggaggccctggcggacctgatgcttcggctgcagctggtgcggcgtgagaagcggggcctagagctgcgggaggctgccctccgagccctgggtccagctcacgtgctcctgctggagcagctgcggtgggaacgggcagagctccaggctggtggggcaaacagcagtggcggacatagcagcggaggtggcagcagcggggacgaggaagagtggtatcagggccttcctgctgtccctggtggcaccagtggcattgatggtggccaggtgggcagagcctgggacccagagaagttagcccaggaactggcagcatcgctcaccaggacactggacctgcaggagcagctgcagtctctgcgcagggagctggaacaggtggctcagaaggggcgagccagacggtctcagagtgccgagctgaacagggatttatgcaaagcccacagcgccctggtcctggccttccgaggagcccaccggaagcaggaagagcaacgccggaagttggagcagcagatggcactcatggaggctcagcaggccgaggaggtggcggtgctcgaagccactgcaagggccctggggaagcccaggcctcccctcccgcctccccagcttggggacacctttctgtaggccccttacccagccatgtctggacatgccagacagctgtggcatgtcataaactgtcctggagtga

SEQ ID NO: 198471 - DNA, 549 bp, Homo sapiens
  Payload ID: 19167
  Gene Name: Usher syndrome 1C binding protein 1
  ENST ID: ENST00000598309
  CDS Start-End: 452-549
ctttgcccgcgcagtgcctcccaacctggtcgcgcagcgccgggtccgctccttggctcagcagcagctccaggccgcggcggcagccccacgcggcggccacatgcagcggcgtcagtgcctcgacagatctggggcggcagcgcaagaggggtcattgcggactcagcctcccggcaggaaccccgatctccgctctggggacctggagccttcgttctcggcctcccggatctccgccgtccaccctgacggagtctcactctgtctcccaggctggagtacagtggcaagatctcagctcactgcaacctccgcctcccggactcaagtgattcttgtgcctcagcctcgcaagtcgctgggattataggcatggaccaccatgcccggaccaaatcaggggttgacgaaggagaagcattcagagggcactggcttctggacagcaatgagtgcccgggccacgcggccccgaagccggcgagggaggcatgctccacccggtgaactggatcccgtggctgagagttcagaggaggtcgaggc

SEQ ID NO: 198472 - DNA, 577 bp, Homo sapiens
  Payload ID: 19167
  Gene Name: Usher syndrome 1C binding protein 1
  ENST ID: ENST00000594190
  CDS Start-End: 213-577
agagtgtcccgggactcaggcctctgatcaagttacccccagaggatcagagaggtagagagagctgaacctctcatttaggagggccggggaggagagggaattcttgagatcgcattcccaggctcaaatagaggaggaaagtggacaaagacgtagtgaaggggttgacgaaggagaagcattcagagggcactggcttctggacagcaatgagtgcccgggccacgcggccccgaagccggcgagggaggcatgctccacccggtgaactggatcccgtggctgagagttcagaggaggtcgaggcagccagtgggagctccaagcccagctttgccccacctccggtgagctccgggctggagcagctgggccccatggaggaggtcagtggccaaggcctaggaagcaggactgacaagaagatggatgggggctctggcagggaactggcctcagcccccgaagtgccccacaaacctgcagtggaagcccaccaagccccagaagcagccctacagtacaaggagactgtgccccctgggaatggggcccccgatgtgtttcagaccct

SEQ ID NO: 198473 - DNA, 1673 bp, Homo sapiens
  Payload ID: 19168
  Gene Name: Usher syndrome 1G (autosomal recessive)
  ENST ID: ENST00000579243
  CDS Start-End: 184-531
cagatgtcttggtagtcgcggctctggcgctccgcaccctccgtctgcggcagcgggggctggcggccccggcccctgcccggccccgtcctccaacctcatgcctcagccctaataccgccgccctcccctgcggggggcctttctccgtgtcccccgcccgccccgtccacttcgggcgccatgaacgaccagtaccaccgggcagcccgggatggctacctggagctcctcaaggaggccacccgaaaggagctgaatgcccccgacgaggatggcatgacccccactctctgggctgcctaccatggcaacctcgagtcgctgcgtctcattgtgagccgcggcttccaatggccacttgcactgcctgtccttcctggtgtccttcggagccaacatctggtgcctagacaacgactaccacacgccgctggacatggctgccatgaagggccacatggaatgcgtgcgctacctggactccatcgcggccaagcagagcagcctcaaccccaagctggtgggtaagctgaaggacaaggccttccgcgaggcggagcggcgcatccgcgagtgcgccaagctgcagcggaggcaccacgaacgcatggagcggcgataccggcgcgagctggccgagcgttccgacaccctcagcttctccagcctcacgtccagcaccctgagccgccggctgcagcatctggcgctgggcagccacctgccgtactctcaggccacgctgcacggcacggccaggggcaagaccaagatgcagaagaagctggagcggcgcaagcagggcggcgaaggcaccttcaaggtctccgaggatgggcgcaagagcgcccgctcgctctcgggcctgcagctgggcagcgacgtgatgttcgtgcgccagggcacctacgccaatcccaaggagtggggccgagccccgctccgggacatgttcctctcggacgaggacagcgtctcccgtgccacgctggcggccgagcctgcccactcggaggtcagcaccgactcaggccacgactccctgtttacccgccccggcctgggcaccatggtgttccgcagaaattacttgagcagtgggctgcacggactgggccgcgaggatgggggtctggatggggtgggagcgccgcggggtcggctgcagagctcccccagcctggacgatgacagcctgggcagtgccaacagcctgcaggaccgcagctgtggggaggagctgccctgggatgagctcgatttaggcttggacgaggacctggagcccgagactagcccgctggagaccttcctggcctctctgcacatggaggactttgccgccctcctgcggcaggagaagatcgacctcgaggctttgatgctgtgctctgacctcgacctccgcagcatcagcgtcccactggggccccgaaagaagatcttgggggccgtgaggaggcggcggcaggcgatggagcgcccgccggccctggaggacacagagctataaccgggggctcctctccccagaccaaaatgaattgcaagttgccacaacctatggtggggtctcgaggtcctcacagttgccagccctgcagcccccttccccaggagcaaggaccagttggggcgactcctttgaaagtctgtctgcaccttgaagc

SEQ ID NO: 198474 - DNA, 3558 bp, Homo sapiens
  Payload ID: 19168
  Gene Name: Usher syndrome 1G (autosomal recessive)
  Uniprot ID: Q495M9
  ENST ID: ENST00000614341
  CDS Start-End: 184-1569
cagatgtcttggtagtcgcggctctggcgctccgcaccctccgtctgcggcagcgggggctggcggccccggcccctgcccggccccgtcctccaacctcatgcctcagccctaataccgccgccctcccctgcggggggcctttctccgtgtcccccgcccgccccgtccacttcgggcgccatgaacgaccagtaccaccgggcagcccgggatggctacctggagctcctcaaggaggccacccgaaaggagctgaatgcccccgacgaggatggcatgacccccactctctgggctgcctaccatggcaacctcgagtcgctgcgtctcattgtgagccgcgggggtgacccggacaagtgtgacatctggggcaacacacccctgcatctggcagcttccaatggccacttgcactgcctgtccttcctggtgtccttcggagccaacatctggtgcctagacaacgactaccacacgccgctggacatggctgccatgaagggccacatggaatgcgtgcgctacctggactccatcgcggccaagcagagcagcctcaaccccaagctggtgggtaagctgaaggacaaggccttccgcgaggcggagcggcgcatccgcgagtgcgccaagctgcagcggaggcaccacgaacgcatggagcggcgataccggcgcgagctggccgagcgttccgacaccctcagcttctccagcctcacgtccagcaccctgagccgccggctgcagcatctggcgctgggcagccacctgccgtactctcaggccacgctgcacggcacggccaggggcaagaccaagatgcagaagaagctggagcggcgcaagcagggcggcgaaggcaccttcaaggtctccgaggatgggcgcaagagcgcccgctcgctctcgggcctgcagctgggcagcgacgtgatgttcgtgcgccagggcacctacgccaatcccaaggagtggggccgagccccgctccgggacatgttcctctcggacgaggacagcgtctcccgtgccacgctggcggccgagcctgcccactcggaggtcagcaccgactcaggccacgactccctgtttacccgccccggcctgggcaccatggtgttccgcagaaattacttgagcagtgggctgcacggactgggccgcgaggatgggggtctggatggggtgggagcgccgcggggtcggctgcagagctcccccagcctggacgatgacagcctgggcagtgccaacagcctgcaggaccgcagctgtggggaggagctgccctgggatgagctcgatttaggcttggacgaggacctggagcccgagactagcccgctggagaccttcctggcctctctgcacatggaggactttgccgccctcctgcggcaggagaagatcgacctcgaggctttgatgctgtgctctgacctcgacctccgcagcatcagcgtcccactggggccccgaaagaagatcttgggggccgtgaggaggcggcggcaggcgatggagcgcccgccggccctggaggacacagagctataaccgggggctcctctccccagaccaaaatgaattgcaagttgccacaacctatggtggggtctcgaggtcctcacagttgccagccctgcagcccccttccccaggagcaaggaccagttggggcgactcctttgaaagtctgtctgcaccttgaagctgagggtgtggcctggaggcaccagaggggcaagagaatgttccggaactccagttctgaggggtcttgaaggccctgagccacccattctgagcagccgtaaaggacatgtagacttgggggaggcctgccccagagggagggcaggggcatcggaactggatgagagtgtgggaggtggatgcgggagggtgcacctgtcccgggcgccgtggcctctcccacccctcccctgatggtcttgttctcttgtgctcaggccagagacttgctcacttcctgcattgttgtgaagggaagagtttgggctgcctcccctcctcccgtccaccccagaggggaagttcctcagccagactcttcagccaaatgccccaactttcagtctgtaccccatcccaagcatagccagctccccctccttcacctagtggtcaaggcccggagctggaaagccgggttggggtggggtgggggtactgacgcccttcccagctcatccaggggtggagcctggcctgtcttcctccaacctccccctttttcgttgtgcagcctggccccccagggaccccagagggccagggcgctagatgcaaggtgctagaccaatgggctgcagtattatagcccccaggcctggcaggcatgcgctgggctagagaaaggtgtccgccaacctcctcagtctcccaggcctgggacaggcagaacagggtgtggctgggtgtcaggcctggggtgggtaagtcctgcgatgtggacactggagaaagtggatcctctaaactgcagattgtccccaggtcaccagggctgtgtgcgtgtgcatgtttgtgtgcatgtatgcgtgtgtgcatgcatgtgtgtgtaagtatgtggtatgtgtgagcacgggtgtgtgcttgggtgtgtgtgttcttgcatacatgtgtgcgtgtgtgtgcacgtgaacgcgtgcgtgtttgtgtgtgtgcatgcatgtgtgtgcatgtgtgtgtgtgcatgcatgtgtgtgtgtgtgcatgtgtgcgtgtgtgcacactcacgttgggtggtgtttggtaggtttccctccaggtctggtagggactgggctgttgcgtgattctgcgtggatcgggggtaagagagctcacctgtgtcccagccctctgatggtggtgagaccaggggaaaggccagctcagagggtggtcacagcatgtgtcctctgacgtatgcccccaaagctctccagccagactgaggtcacagatgtgggagagtccctgatgagcccgctgacacgtgtgcgcccctttgcaccccatgcagaggtgctctcctcctttctcagccatggccccccatccctgacctcagcttgggaagcagctcctgctgggagcatggcctcagcccccagcatctcctggggcccccatggctggggcaggggaaagagagccctcaaaggcctctttctggtctgtctgggggttcccattcccacacatgtgcccagagtagggggcatggaggagatggtccctgtcctactgcaggacactgagggcttggctgcctgccaccgccatctggagcccaccacagctcttctccctgttctctgggcctgagcctggggccacccccaagtgccgacttgtttctcccagagccccaggtgctgccccttctctcctgttcctcgtccgtttactgccgcagcccctcctggttcttctggtgctggggtggagcaggctctgtgctcccaccactgtaccccgaatccctcctgcaggctcattgccacttttgtagagaatgttctctatcagtatcgt

SEQ ID NO: 198475 - DNA, 18883 bp, Homo sapiens
  Payload ID: 19169
  Gene Name: Usher syndrome 2A (autosomal recessive, mild)
  Uniprot ID: O75445
  ENST ID: ENST00000307340
  CDS Start-End: 388-15996
tgtttgctctgcagaatactttacctgggcacccaagtcttccttccagcattcctgctgctacagcctatttgctgagtaaccaggggttacagcagcgttgccaggcaacgagggacagcggtcctgttgaagagccatttgtcacactgaggggactggttgaaatgcaataaagaaatgataccagcagctactcatgtcttcgccattgctaagaacgtcgttggtattaccttactctgagaacgtgtctgcagtttccagaaaatggagtatcgcaacatcacttaaagtaccctgcttcaaagtattgctggcaagtggcgtgggcctgattatttatttagaaatgctttatcaggaggagaatgcttttttgtaaacatgaattgcccagttctttcattgggctctggcttcttgtttcaggtcattgaaatgttgatctttgcctattttgcttcaatatccttgactgagtcacgaggtcttttcccaaggctggagaacgtgggagctttcaagaaagtttccatcgtgccaacccaagcagtatgtggactcccagaccgaagcactttttgtcacagctctgctgctgctgaaagtattcagttctgtacccagcggttttgtattcaggattgcccatacagatcttcacaccctacctacactgcccttttctcagcaggcctcagtagctgcatcacaccagacaagaatgatctgcatcctaacgcccatagcaattctgcaagttttatttttggaaatcacaagagctgcttttcttctcctccttctccaaagctgatggcatcatttaccttagctgtatggctgaaacctgagcaacaaggtgtaatgtgtgttatagaaaagacagtagatgggcagattgtgttcaaacttacaatatctgagaaagagaccatgttttattatcgcacagtaaatggtttgcaacctccaataaaagtaatgacactggggagaattcttgtgaagaaatggattcatcttagtgtgcaggtgcatcagacaaaaatcagcttctttatcaatggcgtggagaaggatcatacacctttcaatgcaagaactctaagtggttcaattacagattttgcatctggtactgtgcaaataggacagagtttaaatggtttagagcagtttgtcggaagaatgcaagattttcgattataccaagtggcacttacaaacagagagattctggaagtcttctctggagatcttctcagattgcatgcccaatcacattgccgttgccctggcagccacccgcgggtccaccctttggcacagcggtactgcattcctaatgatgcaggagacacagctgataatagagtgtcacggttgaatcctgaagcccatcctctctcttttgtcaatgataatgatgttggtacttcatgggtttcaaatgtgtttacaaacattacacagcttaatcaaggagtgactatttcagttgatttggaaaatggacagtatcaggtgttttatattatcattcagttctttagtccacaaccaacggaaataaggattcaaaggaagaaggaaaatagtttagattgggaggactggcaatattttgccaggaattgtggtgcttttggaatgaaaaacaatggagatttggaaaaacctgattctgtcaactgtcttcagctttccaattttactccatattcccgtggcaatgtcacatttagcatcctgacacctggaccaaattatcgtcctggatacaataacttctataataccccatctcttcaagagttcgtaaaagccacgcaaataaggtttcattttcatgggcagtactatacaactgagactgctgttaacctcagacacagatattatgcagtggacgaaatcaccattagtgggagatgtcagtgccatggtcatgccgataactgcgacacaacaagccagccatatagatgcctctgctcccaggagagcttcactgaaggacttcattgtgatcgctgcttgcctctttataatgacaagcctttccgccaaggtgatcaagtttacgctttcaattgtaaaccttgtcaatgcaacagccattccaaaagctgccattacaacatctctgtagacccatttccttttgagcacttcagagggggaggaggagtttgtgatgattgtgagcataacactacaggaaggaactgtgagctgtgcaaggattactttttccgacaagttggtgcagatccttcggccatagatgtttgcaaaccctgtgactgtgatacagttggcactagaaatggtagcattctttgtgatcagattggaggacagtgtaattgtaagagacacgtgtctggcaggcagtgcaatcagtgccagaatggattctacaatctacaagagttggatcctgatggctgcagtccctgtaactgcaatacctctgggacagtggatggagatattacctgtcaccaaaattcaggccagtgcaagtgcaaagcaaacgttattgggcttaggtgtgatcattgcaattttggatttaaatttctccgaagctttaatgatgttggatgtgagccctgccagtgtaacctccatggctcagtgaacaaattctgcaatcctcactctgggcagtgtgagtgcaaaaaagaagccaaaggacttcagtgtgacacctgcagagaaaacttttatgggttagatgtcaccaattgtaaggcctgtgactgtgacacagctggatccctccctgggactgtctgtaatgctaagacagggcagtgcatctgcaagcccaatgttgaagggagacagtgcaataaatgtttggagggaaacttctacctacggcaaaataattctttcctctgtctgccttgcaactgtgataagactgggacaataaatggctctctgctgtgtaacaaatcaacaggacaatgtccttgcaaattaggggtaacaggtcttcgctgtaatcagtgtgagcctcacaggtacaatttgaccattgacaattttcaacactgccagatgtgtgagtgtgattccttggggacattacctgggaccatttgtgacccaatcagtggccagtgcctgtgtgtgcctaatcgtcaaggaagaaggtgtaatcagtgtcaaccaggtttttatatttctccaggcaatgccactggctgcctgccatgctcatgccatacaactggtgcagttaatcacatctgtaatagcctgactggtcagtgtgtttgccaagatgcttccattgctgggcaacgttgtgaccaatgcaaagaccattactttggatttgatcctcagactggaagatgtcagccttgtaattgtcatctctcaggagccttgaatgaaacctgtcacttggtcacaggccagtgtttctgtaaacaatttgtcactggctcaaagtgtgatgcttgtgttcccagtgcaagccacttggatgtcaacaatctattgggttgcagcaaaactccattccagcaacctccgcccagaggacaagttcaaagttcttctgctatcaatctctcctggagtccacctgattctccaaatgcccactggcttacttacagtttactcagggatggttttgaaatctacacaacagaggatcaatacccatacagtattcaatacttcttagacacagacctgttaccatataccaaatattcctattacattgagaccaccaatgtgcatggttcaacaaggagtgtagctgtcacttacaagacaaaaccaggggtcccagagggaaacttgactttaagttatatcattcctattggctcagactctgtgacacttacctggacaacactctcaaatcaatctggtcccatagagaaatatattttgtcctgtgcccctttggctggtggtcagccatgtgtttcctacgaaggtcatgaaacctcagctaccatctggaatctggttccatttgccaagtacgatttttctgtacaggcgtgtactagcgggggctgtttacacagcttgcccattacagtgaccacagcccaggcccctccccaaagactaagtccacctaagatgcagaaaatcagttctacagaacttcatgtagaatggtctccaccagcggaactaaatggaataattataagatatgaactatacatgagaagactgagatctactaaagaaaccacatctgaggaaagtcgagtttttcagagcagtggttggctcagtcctcattcatttgtagaatcggccaatgaaaatgcattaaaacctcctcaaacaatgacaaccatcactggcttggagccatacaccaagtatgagttcagagtcttagctgtgaatatggctggaagtgtgtcttctgcctgggtctcagaaagaacgggagaatcagcacctgtattcatgatccctccttcagtctttcccctctcttcgtactctctcaatatctcctgggagaagccagcagataatgttacaagaggaaaagttgtggggtatgacatcaatatgctttctgaacaatcacctcaacagtctattcccatggcgttttcacagctgttgcacactgctaaatcccaagaactatcttacactgtagaaggactgaaaccttataggatatatgagtttactattactctctgcaattcagttggttgtgtgaccagtgcttcgggagcaggacaaactttagcagcagcaccagcacaactgaggccacctctggttaaaggaatcaacagcacaacaatccatcttaggtggtttccacctgaagaactgaatggaccctctcctatatatcagctggaaaggagagagtcatctctaccagctctgatgaccacgatgatgaaaggaatccgtttcataggaaatgggtattgtaaatttcccagctccactcacccagtcaatacagacttcactggcattaaggccagctttcgaacaaaagtgcctgaaggtttgattgtctttgcagcatcacctggcaatcaggaagagtattttgcacttcagttgaagaagggacgtctttattttctttttgatcctcaggggtcaccagtggaagtaactacaactaatgatcatggcaaacaatatagtgatggaaaatggcatgaaataattgctattaggcatcaggcttttggccaaatcactctggatgggatatatacaggttcctctgccatcctgaatggtagtactgttattggagataacacaggagtctttctgggagggctcccgcgaagttataccatcctcaggaaggatcctgagataatccaaaaaggttttgtgggctgtctcaaggatgtacattttatgaagaattacaatccgtcagctatttgggaacctctggattggcagagttctgaagaacaaatcaacgtgtataacagctgggagggatgtcccgcttcattaaatgagggagctcagttcctaggagcagggttcctggaacttcatccatatatgtttcatggtggaatgaactttgagatttcctttaagttcagaactgaccaattaaatggattgcttcttttcgtttataacaaagatggacctgattttcttgctatggagctgaaaagtggaatattgaccttccggttaaataccagtcttgcctttacacaagtggatctattgctggggctatcctattgtaatggaaagtggaataaagtcattattaaaaaggaaggctctttcatatcagcaagtgtgaatggactgatgaagcatgcatcggagtccggagaccagccactggtggtgaattcaccagtttatgtgggaggaatcccacaggaactgctgaactcttatcaacatttgtgtttggaacaaggtttcggtggttgcatgaaggatgttaaatttacacggggtgctgtcgttaacttggcatctgtgtccagcggtgctgtcagagtcaatctggatggatgcctatcaactgacagtgctgttaactgcaggggaaatgactccatcctggtttaccagggaaaagagcagagtgtttacgagggtggtctccagccttttacagaatacctgtatcgagtgatagcctcgcatgaaggaggttcagtatatagtgattggagtcgaggacgtacaacaggagcagctccacaaagtgtgccaactccctcaagagtccgcagcttaaatggatacagcattgaggtgacctgggatgaacctgttgtcagaggtgtaattgagaagtacattctgaaagcctatagtgaggacagcacccgtccaccccgcatgccctctgccagtgctgaatttgtcaatacaagcaacctcacaggcatattgacaggcttgctacccttcaaaaactatgcagtaaccctaactgcttgcactttggctggctgtactgagagctcacatgcattgaacatctctactccacaagaagccccacaagaggttcagccaccagtagccaaatcccttcccagttctttgctgctctcctggaacccacccaaaaaggcaaatggtattataactcagtactgtttatacatggatgggaggctgatctattcaggcagtgaggagaactacatagtcacagatttagcagtatttacaccccaccagtttctactaagtgcatgcacacatgtgggctgtacaaacagttcctgggtcctactgtacacagcacagctgccaccagaacacgtggattccccagttctgactgtcctggattctagaactatacacatacagtggaaacaaccaagaaaaataagtgggattctggaacgctatgtattatatatgtcaaaccatacacatgattttacaatttggagtgtcatctataacagtacagaacttttccaggatcatatgctacaatacgttttacctggtaataaatatctcatcaagctgggagcttgcacaggtggtgggtgcacagtgagtgaggccagtgaggccctaactgacgaggacatacccgaaggcgtgccagcccccaaagcccactcatattcacctgactcctttaatgtctcctggactgagcctgaatatccgaatggtgttatcacgagttatggattatatctagatggtatattaatccacaattcctcagaactcagctatcgtgcttacggatttgctccttggagtttacattccttcagagtccaagcatgcacggccaaaggttgtgctctgggcccactggtggaaaatcgaactctagaagctcctcctgaaggaacagtaaatgtgtttgtcaaaacacagggatcccggaaagcccacgtgaggtgggaagcaccttttcgccctaatggactcttaacacactcagtccttttcactgggatattctatgtagacccagtaggtaataactacacccttctgaatgtcacaaaagtcatgtacagcggagaagagacaaacctttgggtgctcatcgatgggctggttccttttaccaactatactgtacaagtgaatatttcaaatagccaaggcagcttgataactgatcctataacaattgcaatgcctccaggagctccagatggcgtgctgcctcccaggctttcatctgccactccaaccagtcttcaggttgtctggtctacaccagctcgtaataacgctcctggctctcccagataccaactccagatgaggtctggcgactccacccatggatttctagagttattttccaatccttctgcatcgttaagctatgaagtgagtgatctccaaccgtacacagagtatatgtttcggttggttgcctccaatggatttggcagtgcacatagttcttggattccattcatgaccgcagaggacaaacctggacctgtagttcctccgattcttctggatgtgaagtcaagaatgatgttggtcacctggcagcatcctagaaaatccaatggggttattacccattataacatttatctacatggccgtctatacttgagaactcctggaaatgtcactaattgcacagtgatgcatttacacccatacactgcctataagtttcaggtagaagcctgcacttcaaaaggatgttccctttcaccagagtcccagactgtatggacactcccaggggcaccggaagggatcccaagtccagagctgttctctgatactccaacatctgtgattatatcttggcaaccccctacccaccccaatggcttggtggagaatttcacaattgagagaagagtcaaaggaaaggaagaagttactaccctggtgactctcccgaggagtcattccatgaggtttattgacaagacttctgctcttagcccatggacaaaatatgaatatcgggtactgatgagcactcttcatggaggcacaaacagcagtgcttgggtagaagttaccacaagaccctcacgacctgctggggtgcagccacctgtggtgacagtgctggaacccgatgcagtccaggtcacttggaaacccccactcatccagaacggagacatacttagctatgagattcacatgcctgaccctcacatcactttaaccaatgtgacttccgcagtgttaagtcaaaaagttactcatctgattcctttcactaattattctgtcaccattgttgcttgctcagggggtaatgggtaccttggagggtgcacagagagtttacctacctatgttaccactcaccccaccgtacctcagaatgttggcccattgtctgtgattccactaagtgaatcatatgttgtgatttcttggcaaccaccatccaagccaaatggacctaatttgagatatgagcttctgagacgtaaaatccagcagccacttgcatcaaatcccccagaagatttaaatcggtggcacaatatttattcaggaactcagtggctttatgaagataagggtcttagcaggtttacaacctatgaatatatgctcttcgtacacaacagtgtgggttttacaccgagccgagaagtgactgtgacaacgttagctggtcttccagagagaggagccaatctcactgcgagtgtccttaaccacacagccatcgacgtgaggtgggctaaaccaactgttcaagacctacaaggtgaagttgaatattacacacttttttggagttctgctacctcaaacgactctctaaaaatcttgccagatgtaaactctcatgtcattggccacctaaagccaaacacagagtattggatctttatctctgtcttcaatggagtccacagcatcaacagtgcaggacttcatgcaaccacttgcgatggggagcctcagggcatgcttcctccagaggttgtcatcatcaacagtacagctgtacgtgtcatctggacatctccttcaaacccaaatggtgttgtcactgagtattctatctatgtaaataataagctctacaagactggaatgaatgtgcctgggtcgtttattctgagagacctgtctcccttcactatctatgacattcaggttgaagtctgcacaatatatgcctgcgtgaaaagcaatggaacccaaattaccactgtggaagacactccaagtgatataccaacacccacaattcgtggcatcacttcaagatctcttcaaattgattgggtgtctccacggaagccaaatggcatcattcttggatatgatctcctatggaaaacatggtatccatgcgctaaaactcaaaagttagtgcaggatcagagtgatgagctctgcaaggcagtgaggtgtcaaaaacctgaatctatctgtggacacatttgctattcttctgaagctaaggtttgttgtaacggagtgctctataaccccaagcctggacatcgctgttgtgaagaaaagtatatcccgtttgttctgaattctactggagtttgttgtggtggccgaatacaggaggcacaaccaaatcatcagtgctgctctgggtattacgctagaattctaccaggtgaagtatgctgtccagatgaacagcacaatcgggtttctgttggcattggtgattcctgctgtggcagaatgccgtactccacctcaggaaaccagatttgctgtgctgggaggcttcatgatggccatggccagaagtgctgtggcagacagattgtgagcaacgatttagagtgttgtggtggagaagaaggagtggtgtacaatcgccttccaggtatgttctgttgtgggcaggattatgtgaatatgtcagataccatatgctgctcagcttccagtggagagtctaaagcacatattaaaaagaatgacccggtgccagtaaaatgctgtgagactgaacttattccaaagagccagaaatgctgtaatggagttggatataatcctttgaaatatgtttgctctgacaagatttcaactggaatgatgatgaaggaaaccaaagagtgcaggatcctctgcccagcatctatggaagccacagaacattgtggcaggtgtgacttcaactttaccagccacatttgcactgtgataagagggtctcacaattccacagggaaggcatcaattgaagaaatgtgttcatctgccgaagaaaccattcatacagggagtgtaaacacgtactcttacacagatgtgaacctcaagccctacatgacatatgagtacaggatttctgcctggaacagctatgggcgaggactcagcaaagctgtgagagccagaacaaaagaagatgtgcctcaaggagtgagtccccctacgtggaccaaaatagacaatcttgaagatacaattgtcttaaactggagaaaacctatacaatcaaatggtcctattatttactacatccttcttcgaaatggaattgaacgttttcggggaacatcactgagcttctctgataaagagggaattcaaccatttcaggaatattcatatcagctgaaagcttgcacggttgctggctgtgccaccagtagcaaggtagttgcagctactacccaaggagttccggagagcatcctgccaccaagcatcacagccctaagtgcagtggctctgcatctgagctggagtgtccctgagaaatcaaacggcgtcattaaagagtaccagatcaggcaggttgggaaaggtctcatccacactgacaccactgacaggagacagcatacggtcacaggtctccagccatacaccaactacagcttcactcttacagcttgtacatctgctgggtgcacttcaagcgagccttttctaggtcagacactgcaggcagctcctgaaggagtttgggtgacacctcgacacattatcatcaattctacaacagtggaattatattggagtctgccagaaaagcccaatggcctcgtttctcaatatcaattgagtcgtaatggaaacttgcttttcctgggtggcagtgaggagcagaatttcactgataaaaacctggagcccaatagcagatacacttacaagttagaagtcaaaactggaggtggcagcagtgctagtgatgattacattgttcaaacacctatgtcaacaccagaagaaatctatcctccatataatatcacagtaattgggccttattctatatttgtagcttggataccaccagggatcctcatccccgaaattcctgtggagtacaatgtcttactcaatgatggaagtgtaacacctctggccttctccgttggtcatcatcaatccacccttctggaaaatttgactccattcacacagtatgagataaggatacaagcatgtcaaaatggaagttgtggagttagcagtaggatgtttgtcaaaacacctgaagcagccccaatggatcttaattctcctgttcttaaggcactggggtcagcttgcatagagattaagtggatgccacctgaaaaaccaaatggaatcatcatcaactactttatttacagacgccctgctggcattgaagaggagtctgttttatttgtctggtcagaaggagcccttgaatttatggatgaaggagacaccctgaggcctttcacactctacgaatatcgggtcagagcctgtaactccaagggttcagtggagagtctgtggtcattaacacaaactctggaagctccacctcaagattttccagctccttgggctcaagccacgagtgctcattcagttctgttgaattggacaaagccagaatctcccaatggcattatctcccattaccgtgtggtctaccaggagagacccgacgatcctacatttaacagccctaccgtgcatgctttcacagtgaagggaacaagccatcaagcccacctgtacgggttagaaccattcacaacatatcgcattggtgttgtggctgcaaaccatgcaggagaaattttaagcccttggactctgattcaaaccttagaatcttccccaagtggactgagaaactttatagtagaacagaaagagaatggccgggcattgctactacagtggtcagaacctatgagaaccaatggtgtgattaagacatacaacatcttcagtgacgggttcctggagtactctggtttgaatcgtcagtttctcttccgccgcctggatcctttcactctctacacactgaccctggaggcctgcaccagagcaggttgtgcacactcggcgcctcagcctctgtggacagatgaagcccctccagactctcagctggctcctactgtccactctgtgaagtccaccagtgttgagctgagctggtctgagcctgttaacccaaatggaaaaataattcgctatgaagtgattcgcagatgcttcgagggaaaagcttggggaaatcagacaatccaggccgacgagaaaattgttttcacagaatataacactgaaaggaatacatttatgtataatgacacaggtttgcaaccatggacgcagtgtgaatataaaatctacacttggaattcagctgggcatacctgtagctcttggaatgtggtgaggacattgcaagcacctccagaaggtctctctccacctgtgatatcctatgtttctatgaatccccaaaaactgctgatttcctggatcccaccagaacagtctaatggtattatccagtcctataggcttcaaaggaatgaaatgctctatccttttagctttgatcctgtgactttcaattacactgatgaagagcttcttcctttttccacctatagctatgcactccaagcctgcacgagtggaggatgctccaccagcaaacccaccagcatcacaactctggaggctgctccatcagaagtcagccctccagatctttgggccgtcagtgccactcaaatgaatgtatgttggtcaccgcccacagtgcaaaatggaaagattactaaatatttagttagatatgataataaagagtcccttgctggccagggcctgtgcctgctggtttcccacctgcagccttactctcagtataacttctcccttgtagcctgcacgaatggaggttgcacagctagtgtgtcaaaatctgcctggacaatggaggccctgccagagaacatggactctccaacattgcaagtcacaggctcagaatcaatagaaatcacctggaaacctccaagaaacccaaatggccagatcagaagttatgaacttaggagggatggaaccattgtatatacaggcttggaaacacgctatcgtgattttactctcaccccaggtgtggagtatagctacacagtaactgccagcaacagccaagggggtattttgagtcctcttgtcaaagatcgaaccagcccctcagcaccctcagggatggaacctccaaaattgcaggccaggggtcctcaggagatcttagtgaactgggaccctccagtgagaacaaatggtgatatcatcaattataccctcttcatccgtgaactatttgaaagagaaactaaaatcatacacataaacacaactcataattcttttggtatgcagtcatatatagtaaaccagctgaagccatttcacaggtatgaaatacgaattcaagcgtgcaccaccctgggatgtgcatcaagtgactggacattcatacagacccctgagattgcacctttgatgcaaccccctccacatctggaggtacaaatggctccaggaggattccagccaactgtttctcttttgtggacaggaccgctgcagccaaatggaaaagttttgtattacgaattatacagaagacaaatagcaactcagcctagaaaatccaatccagtcctaatctataacggaagctcaacatcttttatagattccgaactattgcctttcacagagtatgagtatcaggtctgggcagtgaattctgcaggaaaagcccccagtagctggacatggtgcagaaccgggccagccccaccagaaggtctcagagcccccacgttccatgtgatctcttctacccaagcagtggtcaacatcagtgcccctgggaagcccaacgggatcgtcagtctctacaggctgttctccagcagcgcccatggggctgagacagtgctatccgaaggcatggccacccagcagactctccatggccttcaagccttcactaactactctattggagtagaggcctgcacctgcttcaactgttgcagcaaaggaccgacagctgaactgagaacccatcctgccccaccctcaggactgtcctctccacaaatcgggacgctggcctcaaggacggcctccttccggtggagtccccccatgttccccaatggtgtcattcacagctatgaactccaattccacgtggcttgccctcctgactcagccctcccctgtactcccagccaaatagaaacaaagtacacggggctggggcagaaagccagccttgggggtctccagccctacaccacatacaagctgagagtggtggcacacaacgaggtgggcagtacggcttccgagtggatcagtttcaccacccaaaaagaattgcctcagtaccgagccccattttcggtggacagcaatttgtctgtggtgtgtgtgaactggagtgacaccttcctcctgaacggccaactgaaggagtacgtgttaaccgacggagggcgacgcgtgtacagcggcttggacaccaccctctacataccgagaacggcggacaaaaccttctttttccaggtcatctgcacgactgacgaaggaagtgttaagacgccgttgatccaatatgatacctctactggacttggcttggtcctaacaactcctgggaaaaagaagggatcgcggagcaaaagcacagagttctacagcgagctgtggttcatagtgttaatggcgatgctgggcttgatcttgttggccatttttctgtccctgatactacaaagaaaaatccacaaagagccatatatcagagaaagacctcccttggtacctcttcagaagaggatgtctccattgaatgtttacccaccgggggaaaaccatatggggttagccgataccaaaattccccggtctgggacacctgtgagtatccgcagcaaccggagtgcatgtgtcctgcgcatcccgagtcaaaaccaaaccagcctaacctactcccagggttctcttcaccgcagcgtcagccagctcatggacattcaagacaagaaagtcttgatggacaactcactgtgggaagccatcatgggccacaacagtggactgtatgtggatgaagaggacctgatgaacgccatcaaggatttcagctcagtgactaaggaacgcaccacattcacagacacccacctgtaaaggatggaaacccagaagacgtaaccctggaatgcaaggtctgcacccatttcctcctgggttatcactcacacatcataaatgctgaaaagccattgtttattatcctataattctttaaagaaatgatgactgtttttgaaagtgttccttcctaatagaggtctaagaaatgatatttttctcatcttaaatgagagagaatattcatatgaaaatacttgatttgctcttattttgtagaagacaaagaagtatgtaattgtcacttggttctgtttggcagtgatgctcctggttaactgaataatcagtggcaatttcaagatggctcacagttgttagaagtagtaagttagttactggctcaaaaatgattctgttgaaaggatgtcactgctgttcatttctatctgccatttctgtcagggttgacacaatcctgcaagaatagttattctaatgatcacagctgctaaatgaatcccaaactttgcaccaggtcgacaaacttttctgaaggttctatttatttaccatacatagggttacttaccaaactttttgacaaggctgaaggttctatttatttacaatacatagggttactcaccaaactttttgacaaggcaacacataacttacacataaatgtctctgttcttgcatttatgaattttccaaaaatctaaggagtaaacagcttatttatacattttgaggagaaaacaaagtgtttcactaggaacacctctacttgaaccaatgtttttatttcatatattttatagttttgaaactagtttctcataaaattctgtcaattcactgaatatcagagaatactgacatcttcaacctagcacatttcaaatggaaactactgttctatttgcaatattaggctgcgtgaaattttaaaaggaaaaatgtatctgttccttctagcattaacatatatacatgtagagacaagactatacctatgtgtatatatatgtatatcatgtatatattactctgcactatatcccttctttttggagaactagccattattttagccacagaatcagtaagaacagatgatatgcaacagtaccaattacggttcaaaaatgtctgtcacctgctctagttggattacaaagtcattggtgaaagtcctatggcaagaaaaattttcttgcaaatcatccacataaaatcagatatttaaatttgttcttcatggaaaacagagtaagaaaacctcttgtcttccttcatccttaaaggtctttgtgaccccaggaaaatattgactctgtctaacacacaatagtcacaatactttttgtgaatctacaaccagagacaggcaaaaacttgtaaagtaagggatagtcttacttattctgcctgaaaacaatgtattaccccagggcccaacagtaaaagattgtggactttttgggtattgagatttcatctagctctgtgagagagcagctcctcagactgaccaactcctagacaaagtttgccaaccataagtgtcaaaagcacaggccagtattaagcagaagttctaccaccttattagaactgctataaacaaaagcatctgaaataattgtgcacatctggcagtgactgtagaaaatacgaaatatatatttctcgccaagtttttatactttctgaaatgaaaacataggattgactagtttactggtttttattcccatatgccgattctgggacaataaagttgtttaaagctggcacaaataagcattaaccaaggctgtgtccaccttctgtgagctacttaaggtatataggaaaggagtggtcacaaacttgcatcctaatccttggtggactcttctaagaatacagtttgctagtcacaaagaatagtctacaaatatgctttgctaggttcagaagattgagtttatcctgatttttgaaaaattaaccaggtatctttatcactgtgtatttttccaagcacagtataaaattttaacaacgcacaaaaaaatacagaactgcaggggattttatcttggatcattatccatttaatcatctaattagacatgaactcagttagctgaatcatttacattttgactccatagcttagggcagacagaagcctgtatggcttctgcccagaactctgtcccctgctacatgtctaagtttacttgtatttatttcagagaagaactctaagatgttgctttgctactttaagtggtattgcgtgccaagcctctattatacaaaccatgcagactcgcctctagagattctgattcggttgatctggggtgtgtggctgaggcatcagtactttttaaagcttccaggtgttctaatgttgagacccactgatgttccacaatctggaagaaatcatgtacaggaataatatgctatgcacagggactatgctccttggctcaccccttctcccttataaacaatgagcagttcttgatgaacctctttaaatttaaatctcctgactcacattttaccaattgtacatgccacattctcagcttacgaactaccatgttttgttattcttaatatcaactgtttggtaagagtacagttgtttttatacactctaagaaatgtgtttataatctactgtaatttccactaaatggaacccaaatattaatgttatggtaccatatactgatgtaaaaatcatgctggcatccatgaacacaccggtaaataaaacatagtccaagtggaagaattcattaataaggaacttttaattatgtcacaaatgaatagttggtttccaatgcacaaatatcatgtaaactaatctaaagatggtttgcttaataaatatttgaatgtgacc

SEQ ID NO: 198476 - DNA, 6320 bp, Homo sapiens
  Payload ID: 19169
  Gene Name: Usher syndrome 2A (autosomal recessive, mild)
  Uniprot ID: O75445
  ENST ID: ENST00000366942
  CDS Start-End: 388-5028
tgtttgctctgcagaatactttacctgggcacccaagtcttccttccagcattcctgctgctacagcctatttgctgagtaaccaggggttacagcagcgttgccaggcaacgagggacagcggtcctgttgaagagccatttgtcacactgaggggactggttgaaatgcaataaagaaatgataccagcagctactcatgtcttcgccattgctaagaacgtcgttggtattaccttactctgagaacgtgtctgcagtttccagaaaatggagtatcgcaacatcacttaaagtaccctgcttcaaagtattgctggcaagtggcgtgggcctgattatttatttagaaatgctttatcaggaggagaatgcttttttgtaaacatgaattgcccagttctttcattgggctctggcttcttgtttcaggtcattgaaatgttgatctttgcctattttgcttcaatatccttgactgagtcacgaggtcttttcccaaggctggagaacgtgggagctttcaagaaagtttccatcgtgccaacccaagcagtatgtggactcccagaccgaagcactttttgtcacagctctgctgctgctgaaagtattcagttctgtacccagcggttttgtattcaggattgcccatacagatcttcacaccctacctacactgcccttttctcagcaggcctcagtagctgcatcacaccagacaagaatgatctgcatcctaacgcccatagcaattctgcaagttttatttttggaaatcacaagagctgcttttcttctcctccttctccaaagctgatggcatcatttaccttagctgtatggctgaaacctgagcaacaaggtgtaatgtgtgttatagaaaagacagtagatgggcagattgtgttcaaacttacaatatctgagaaagagaccatgttttattatcgcacagtaaatggtttgcaacctccaataaaagtaatgacactggggagaattcttgtgaagaaatggattcatcttagtgtgcaggtgcatcagacaaaaatcagcttctttatcaatggcgtggagaaggatcatacacctttcaatgcaagaactctaagtggttcaattacagattttgcatctggtactgtgcaaataggacagagtttaaatggtttagagcagtttgtcggaagaatgcaagattttcgattataccaagtggcacttacaaacagagagattctggaagtcttctctggagatcttctcagattgcatgcccaatcacattgccgttgccctggcagccacccgcgggtccaccctttggcacagcggtactgcattcctaatgatgcaggagacacagctgataatagagtgtcacggttgaatcctgaagcccatcctctctcttttgtcaatgataatgatgttggtacttcatgggtttcaaatgtgtttacaaacattacacagcttaatcaaggagtgactatttcagttgatttggaaaatggacagtatcaggtgttttatattatcattcagttctttagtccacaaccaacggaaataaggattcaaaggaagaaggaaaatagtttagattgggaggactggcaatattttgccaggaattgtggtgcttttggaatgaaaaacaatggagatttggaaaaacctgattctgtcaactgtcttcagctttccaattttactccatattcccgtggcaatgtcacatttagcatcctgacacctggaccaaattatcgtcctggatacaataacttctataataccccatctcttcaagagttcgtaaaagccacgcaaataaggtttcattttcatgggcagtactatacaactgagactgctgttaacctcagacacagatattatgcagtggacgaaatcaccattagtgggagatgtcagtgccatggtcatgccgataactgcgacacaacaagccagccatatagatgcctctgctcccaggagagcttcactgaaggacttcattgtgatcgctgcttgcctctttataatgacaagcctttccgccaaggtgatcaagtttacgctttcaattgtaaaccttgtcaatgcaacagccattccaaaagctgccattacaacatctctgtagacccatttccttttgagcacttcagagggggaggaggagtttgtgatgattgtgagcataacactacaggaaggaactgtgagctgtgcaaggattactttttccgacaagttggtgcagatccttcggccatagatgtttgcaaaccctgtgactgtgatacagttggcactagaaatggtagcattctttgtgatcagattggaggacagtgtaattgtaagagacacgtgtctggcaggcagtgcaatcagtgccagaatggattctacaatctacaagagttggatcctgatggctgcagtccctgtaactgcaatacctctgggacagtggatggagatattacctgtcaccaaaattcaggccagtgcaagtgcaaagcaaacgttattgggcttaggtgtgatcattgcaattttggatttaaatttctccgaagctttaatgatgttggatgtgagccctgccagtgtaacctccatggctcagtgaacaaattctgcaatcctcactctgggcagtgtgagtgcaaaaaagaagccaaaggacttcagtgtgacacctgcagagaaaacttttatgggttagatgtcaccaattgtaaggcctgtgactgtgacacagctggatccctccctgggactgtctgtaatgctaagacagggcagtgcatctgcaagcccaatgttgaagggagacagtgcaataaatgtttggagggaaacttctacctacggcaaaataattctttcctctgtctgccttgcaactgtgataagactgggacaataaatggctctctgctgtgtaacaaatcaacaggacaatgtccttgcaaattaggggtaacaggtcttcgctgtaatcagtgtgagcctcacaggtacaatttgaccattgacaattttcaacactgccagatgtgtgagtgtgattccttggggacattacctgggaccatttgtgacccaatcagtggccagtgcctgtgtgtgcctaatcgtcaaggaagaaggtgtaatcagtgtcaaccaggtttttatatttctccaggcaatgccactggctgcctgccatgctcatgccatacaactggtgcagttaatcacatctgtaatagcctgactggtcagtgtgtttgccaagatgcttccattgctgggcaacgttgtgaccaatgcaaagaccattactttggatttgatcctcagactggaagatgtcagccttgtaattgtcatctctcaggagccttgaatgaaacctgtcacttggtcacaggccagtgtttctgtaaacaatttgtcactggctcaaagtgtgatgcttgtgttcccagtgcaagccacttggatgtcaacaatctattgggttgcagcaaaactccattccagcaacctccgcccagaggacaagttcaaagttcttctgctatcaatctctcctggagtccacctgattctccaaatgcccactggcttacttacagtttactcagggatggttttgaaatctacacaacagaggatcaatacccatacagtattcaatacttcttagacacagacctgttaccatataccaaatattcctattacattgagaccaccaatgtgcatggttcaacaaggagtgtagctgtcacttacaagacaaaaccaggggtcccagagggaaacttgactttaagttatatcattcctattggctcagactctgtgacacttacctggacaacactctcaaatcaatctggtcccatagagaaatatattttgtcctgtgcccctttggctggtggtcagccatgtgtttcctacgaaggtcatgaaacctcagctaccatctggaatctggttccatttgccaagtacgatttttctgtacaggcgtgtactagcgggggctgtttacacagcttgcccattacagtgaccacagcccaggcccctccccaaagactaagtccacctaagatgcagaaaatcagttctacagaacttcatgtagaatggtctccaccagcggaactaaatggaataattataagatatgaactatacatgagaagactgagatctactaaagaaaccacatctgaggaaagtcgagtttttcagagcagtggttggctcagtcctcattcatttgtagaatcggccaatgaaaatgcattaaaacctcctcaaacaatgacaaccatcactggcttggagccatacaccaagtatgagttcagagtcttagctgtgaatatggctggaagtgtgtcttctgcctgggtctcagaaagaacgggagaatcagcacctgtattcatgatccctccttcagtctttcccctctcttcgtactctctcaatatctcctgggagaagccagcagataatgttacaagaggaaaagttgtggggtatgacatcaatatgctttctgaacaatcacctcaacagtctattcccatggcgttttcacagctgttgcacactgctaaatcccaagaactatcttacactgtagaaggactgaaaccttataggatatatgagtttactattactctctgcaattcagttggttgtgtgaccagtgcttcgggagcaggacaaactttagcagcagcaccagcacaactgaggccacctctggttaaaggaatcaacagcacaacaatccatcttaggtggtttccacctgaagaactgaatggaccctctcctatatatcagctggaaaggagagagtcatctctaccagctctgatgaccacgatgatgaaaggaatccgtttcataggaaatgggtattgtaaatttcccagctccactcacccagtcaatacagacttcactggtaagtgtgtttgacattgctttatttaggagacacgaagctccaaaatgttttctatattttcatatccctttacaatgaatttttattatacctacttagagaaatactaattcagccctttgatagcttttgcctgattgtttcagcatgtccatctttttagaattctggggaaaaaagtcaggtaagtgaaggaaaggaaaaataaaagatgaagatgaagaagcagccttattggatcaaagtatgtgctttgtatttgtctttttgtgaagtatgtgccaggacatgtttcttgaaatattattcactgtgttctctgagcaaatgagtttgcaaaatgccctcatgctattggagattctcagtatgcaccccgttactgaaactccaaaaagcattgtaagaaagctattcaactttgcttagctaatcatgcctaacagatatttgatgtaatgttttctttttctttctcttgctgtttccttcttctttttttcactgtgacaacttaatatctcatgttctatgaagaacattgtggggaaaactaatcccagggaaaagataacttctctaagccaggactatggtaaagcaagtgaggctcttgtttcggtcacaaaatttaaaggcactaaaaaactcagtgttaatgtaaattttaatgcaatatttttaaaaatgaaaatcaatgtgaaagcactataaaaatattatcaaaagcttaaataaagacagattgaactctgtaccagcacaatcctgcctcactggccttaccctcctcctggccttactagtaccgcaatattttggaagtcccatgacctctgtgacttacagcttctaatagcatgatttcaatatagctgtaaaaaaactctacttatggtacaccatttttccaatttttaaaaaaatttacaaagtataagatatatattattatgtaaactcataaagatgttcatttaatcatccatgagaaagtcattttggagcaaatagctagtctttaaaatattgcatatgtgaagacaatgaaatggaattcgagctataaaaatttgtattgttttatttttacttaaaatagtaaatagtttgcttttcattgagactggctgctgatgcaccttggtaatgaatcatgattatattctaactgagatatattgagattaatgcatgattaactactctctcagtacatcaaaatcattgcagagtattagaaattgaaccattgagctaaaaatgctcaacttctgctttatattcttaaaatggcaaaaaa

SEQ ID NO: 198477 - DNA, 4135 bp, Homo sapiens
  Payload ID: 19170
  Gene Name: USO1 vesicle transport factor
  Uniprot ID: O60763
  ENST ID: ENST00000264904
  CDS Start-End: 223-3144
agccgccacgtaatgccacgtccccgcgcatgcgcatcttggccgctgctggcggctgtttccgggcttagagggctggagtggccgccgagttggaggcggtggtggcagcagtaggagtgtgtagagtgcgggattggggcccaggccctgcggagggcgggggaagttgtcttcttttttttccggaggggccggtaaacctggtggctgaacggcaagatgaatttcctccgcggggtaatggggggtcagagtgccggaccccagcacacagaagccgagacgattcaaaagctttgtgacagagtagcttcatctactttattggatgatcgaagaaatgctgttcgtgctctcaaatcattatctaagaaataccgcttggaagtgggtatacaagctatggaacatcttattcatgttttacaaacagatcgttcagattctgaaataataggttatgctttggacacactatataatataatatctaatgaagaagaagaagaagtagatgatgttgaagaagaaaattccacaagacagagtgaagatttgggaagccaatttacagaaattttcattaagcagcaggaaaatgtcactcttctgttatctttattggaggagtttgatttccatgtccgctggcctggtgtgaagcttcttacttctcttttaaaacaactagggcctcaggtgcaacaaattattttagtcagtcctatgggtgtttcaagattgatggacttactagcggattccagggaagttatacgtaatgatggcgtcttactactgcaggcactaacaagaagcaatggtgcaatccagaaaattgttgcttttgaaaatgctttcgagagactactggacattatttcagaggaggggaacagtgatggaggtatagtagttgaagattgtttgattttgctccaaaacttattaaaaaacaacaactccaatcaaaatttttttaaagaaggctcatatattcaacgtatgaaaccttggtttgaagttggagatgaaaattctggctggtctgcacagaaagtgaccaatctacatctaatgctacagcttgttcgtgtattggtatctcccaccaaccctcctggtgctaccagtagctgccagaaggctatgttccagtgtgggttattgcagcagctttgtactatcctaatggctactggggttcctgctgatatcctgactgagaccataaatactgtatcagaagttattcgaggctgccaagtaaaccaagactactttgcatctgtaaatgcaccttcaaacccaccaagaccggcaattgtagtacttctcatgtccatggttaatgaaaggcagccatttgttttgcgctgtgctgttctctattgtttccagtgtttcttgtataaaaaccaaaaaggacaaggagaaatcgtgtcaacacttttaccttctaccattgatgcaacaggtaattcagtttcagctggccagttattatgtggaggtttgttttctactgattcactttcaaactggtgtgctgctgtggcccttgcccatgcgttgcaagaaaatgccacccagaaagaacagttgctcagggttcaacttgctacaagtattggcaaccctccagtttctttacttcaacagtgcaccaatattctttcacagggtgataagatcgacagacggggaagcaaaatacaaacaagagttggattattaatgttgctttgtacctggctaagcaattgtcccattgcagtaacgcattttcttcacaattcagccaatgttccatttcttacaggacaaattgcagaaaatcttggagaagaagagcagttggtccaaggcttatgtgcccttttgttgggcatttcgatttatttcaatgataactcacttgagagctacatgaaagagaagctaaaacaactgattgagaagaggattggcaaagagaatttcatagagaaactaggatttattagcaaacatgagttgtattccagagcatctcagaaaccccagccaaactttcccagtccagaatacatgatatttgatcatgagtttacgaagctggtaaaagaacttgaaggtgttataactaaggctatttataagtccagtgaagaagataaaaaagaagaagaggtgaaaaaaacattagaacagcatgacaatattgtgactcactacaaaaatatgattcgagagcaggatctccaacttgaggaattaaggcagcaggtttctacattaaaatgtcaaaatgaacagctccagacggcagtcacacagcaagtatcacagatccagcagcacaaagaccagtataatcttcttaaaatacagctaggaaaagacaatcagcatcaaggttcttacagtgagggggctcagatgaatggcattcagccagaagaaattggtagattgcgagaagagatagaagaattaaaacgtaatcaggaacttttacaaagccagctgactgaaaaggactctatgattgaaaatatgaaatcttcccaaacatctggcacaaatgaacagtcttcagcaatagtttcagctagagattctgaacaagttgcagaattaaaacaggaactggcaactttaaagtctcagttaaactcacaatctgtggagatcaccaaactacagacagaaaagcaggaactgttacagaaaacagaagcgtttgcaaaatcagttgaggtacaaggagagaccgagactataatagccaccaaaactactgatgtagaaggaagactgtcagcattattacaagagaccaaagagttaaagaatgaaattaaagctctgtctgaggaaagaactgccattaaagagcagctggattcatctaatagtaccattgccattttacaaactgagaaagacaaactagagttggaaattacagattctaaaaaagaacaagatgatctcttggtgctcttggccgatcaagatcagaaaatactgtcattgaagaataaactcaaggatcttggtcatccagttgaagaagaggatgaacttgaatctggagaccaagaggatgaggatgatgaaagtgaagatcctggcaaggatctagatcatatctagttttcaaatctctaggaacaatagagattatatcataactctgaagatggactctaaactttggtttacctccatggaaaataaagatttagaaaccaggtggaaaacattcactattaagactattgatatatttttgtaatgttgccacccatgttgaaaaccttaaaactgaatttatgtagaacacacatcttttatttaaatccatctgaactgtcccaaaatgtaatttgcaaagagcttcaaacaccaaaaatataccattttaaggcatgtggtgacaatgctatttgccttagttcattcgttgtttactttgcaaaatttgtgacttttaagtactaacacatttgattgaatgtgtattgaattggaattattatttctaaattcagcatttgagtccttagttgatgattttcttttaaagaaattagtttatttaaaagcaagatagcctgggttgggagttagtgcatatcatcagccctccatctaatgtgattgctaagatgtgcaggataggacagcttagaatgagtgccttgacacctacatatggctgcattccatacctcagtgaagaagccgaaggatgctgacacacagtgatgtggagggcattccggagaaacttttgcaacagtgtattaatgtgattggttttctttttgttttaagctaaacatctaaaacaaatttcaagttaacagttcatacaactcagatttagtagtattgtttatcataaaacatattatgttcctagttttaaaaagacccaaagtatgattaatataatttattggcatttttgctgaataggtttaagtcagataatagattttaaaaaagcaaatgaggcaatgtgtcaaaatttaatgtttcataataaaaatagatacgttgacttaatccttggtcatggttccctttgtttacatcttaaaagtattttattcttaataaaagatgaggcaagtgaaaa

SEQ ID NO: 198478 - DNA, 4034 bp, Homo sapiens
  Payload ID: 19170
  Gene Name: USO1 vesicle transport factor
  Uniprot ID: O60763
  ENST ID: ENST00000514213
  CDS Start-End: 228-3116
cttcgagccgccacgtaatgccacgtccccgcgcatgcgcatcttggccgctgctggcggctgtttccgggcttagagggctggagtggccgccgagttggaggcggtggtggcagcagtaggagtgtgtagagtgcgggattggggcccaggccctgcggagggcgggggaagttgtcttcttttttttccggaggggccggtaaacctggtggctgaacggcaagatgaatttcctccgcggggtaatggggggtcagagtgccggaccccagcacacagaagccgagacgattcaaaagctttgtgacagagtagcttcatctactttattggatgatcgaagaaatgctgttcgtgctctcaaatcattatctaagaaataccgcttggaagtgggtatacaagctatggaacatcttattcatgttttacaaacagatcgttcagattctgaaataataggttatgctttggacacactatataatataatatctaatgaagaagaagaagaagtagaagaaaattccacaagacagagtgaagatttgggaagccaatttacagaaattttcattaagcagcaggaaaatgtcactcttctgttatctttattggaggagtttgatttccatgtccgctggcctggtgtgaagcttcttacttctcttttaaaacaactagggcctcaggtgcaacaaattattttagtcagtcctatgggtgtttcaagattgatggacttactagcggattccagggaagttatacgtaatgatggcgtcttactactgcaggcactaacaagaagcaatggtgcaatccagaaaattgttgcttttgaaaatgctttcgagagactactggacattatttcagaggaggggaacagtgatggaggtatagtagttgaagattgtttgattttgctccaaaacttattaaaaaacaacaactccaatcaaaatttttttaaagaaggctcatatattcaacgtatgaaaccttggtttgaagttggagatgaaaattctggctggtctgcacagaaagtgaccaatctacatctaatgctacagcttgttcgtgtattggtatctcccaccaaccctcctggtgctaccagtagctgccagaaggctatgttccagtgtgggttattgcagcagctttgtactatcctaatggctactggggttcctgctgatatcctgactgagaccataaatactgtatcagaagttattcgaggctgccaagtaaaccaagactactttgcatctgtaaatgcaccttcaaacccaccaagaccggcaattgtagtacttctcatgtccatggttaatgaaaggcagccatttgttttgcgctgtgctgttctctattgtttccagtgtttcttgtataaaaaccaaaaaggacaaggagaaatcgtgtcaacacttttaccttctaccattgatgcaacaggtaattcagtttcagctggccagttattatgtggaggtttgttttctactgattcactttcaaactggtgtgctgctgtggcccttgcccatgcgttgcaagaaaatgccacccagaaagaacagttgctcagggttcaacttgctacaagtattggcaaccctccagtttctttacttcaacagtgcaccaatattctttcacagggaagcaaaatacaaacaagagttggattattaatgttgctttgtacctggctaagcaattgtcccattgcagtaacgcattttcttcacaattcagccaatgttccatttcttacaggacaaattgcagaaaatcttggagaagaagagcagttggtccaaggcttatgtgcccttttgttgggcatttcgatttatttcaatgataactcacttgagagctacatgaaagagaagctaaaacaactgattgagaagaggattggcaaagagaatttcatagagaaactaggatttattagcaaacatgagttgtattccagagcatctcagaaaccccagccaaactttcccagtccagaatacatgatatttgatcatgagtttacgaagctggtaaaagaacttgaaggtgttataactaaggctatttataagtccagtgaagaagataaaaaagaagaagaggtgaaaaaaacattagaacagcatgacaatattgtgactcactacaaaaatatgattcgagagcaggatctccaacttgaggaattaaggcagcaggtttctacattaaaatgtcaaaatgaacagctccagacggcagtcacacagcaagtatcacagatccagcagcacaaagaccagtataatcttcttaaaatacagctaggaaaagacaatcagcatcaaggttcttacagtgagggggctcagatgaatggcattcagccagaagaaattggtagattgcgagaagagatagaagaattaaaacgtaatcaggaacttttacaaagccagctgactgaaaaggactctatgattgaaaatatgaaatcttcccaaacatctggcacaaatgaacagtcttcagcaatagtttcagctagagattctgaacaagttgcagaattaaaacaggaactggcaactttaaagtctcagttaaactcacaatctgtggagatcaccaaactacagacagaaaagcaggaactgttacagaaaacagaagcgtttgcaaaatcagttgaggtacaaggagagaccgagactataatagccaccaaaactactgatgtagaaggaagactgtcagcattattacaagagaccaaagagttaaagaatgaaattaaagctctgtctgaggaaagaactgccattaaagagcagctggattcatctaatagtaccattgccattttacaaactgagaaagacaaactagagttggaaattacagattctaaaaaagaacaagatgatctcttggtgctcttggccgatcaagatcagaaaatactgtcattgaagaataaactcaaggatcttggtcatccagttgaagaagaggatgaacttgaatctggagaccaagaggatgaggatgatgaaagtgaagatcctggcaaggatctagatcatatctagttttcaaatctctaggaacaatagagattatatcataactctgaagatggactctaaactttggtttacctccatggaaaataaagatttagaaaccaggtggaaaacattcactattaagactattgatatatttttgtaatgttgccacccatgttgaaaaccttaaaactgaatttatgtagaacacacatcttttatttaaatccatctgaactgtcccaaaatgtaatttgcaaagagcttcaaacaccaaaaatataccattttaaggcatgtggtgacaatgctatttgccttagttcattcgttgtttactttgcaaaatttgtgacttttaagtactaacacatttgattgaatgtgtattgaattggaattattatttctaaattcagcatttgagtccttagttgatgattttcttttaaagaaattagtttatttaaaagcaagatagcctgggttgggagttagtgcatatcatcagccctccatctaatgtgattgctaagatgtgcaggataggacagcttagaatgagtgccttgacacctacatatggctgcattccatacctcagtgaagaagccgaaggatgctgacacacagtgatgtggagggcattccggagaaacttttgcaacagtgtattaatgtgattggttttctttttgttttaagctaaacatctaaaacaaatttcaagttaacagttcatacaactcagatttagtagtattgtttatcataaaacatattatgttcctagttttaaaaagacccaaagtatgattaatataatttattggcatttttgctgaataggtttaagtcagataatagattttaaaaaagcaaatgaggcaatgtgtcaaaatttaatgtttcataataaaaatagatacgttgacttaa

SEQ ID NO: 198479 - DNA, 4512 bp, Homo sapiens
  Payload ID: 19171
  Gene Name: USP6 N-terminal like
  Uniprot ID: Q92738
  ENST ID: ENST00000277575
  CDS Start-End: 44-2581
actataaaataataatgaaatcttggaatagataagttactctatgaggactgaagctgttgttaattcccaaggccagactgattatctcacaaaggattcagaccaggatgtagcactcaaacttgcccaggagcgagctgaaatagttgctaaatatgacagaggacgagaaggtgcagagattgaaccttgggaagatgctgattaccttgtttacaaagtcacagatagatttggctttttacatgaggaggagctcccagatcataatgtggctgtggaacggcaaaagcacctggaaattgaaagaactaccaaatggctgaaaatgctgaaaggatgggaaaaatacaagaacactgaaaagtttcataggcgaatttacaaaggaataccactccagctcagaggtgaagtctgggccctccttcttgagatccctaaaatgaaagaagaaacaagggacctgtatagtaaattaaaacacagagcacggggctgttcacctgacatcagacaaatagacctggatgtcaaccgcacatttcgggaccacattatgtttagagacagatatggtgttaagcaacaatccttattccatgtgcttgctgcctattctatttataacacggaagtcgggtattgtcaggggatgagccagatcacagctttactcctcatgtatatgaacgaggaagatgccttctgggccctggtcaaactcttctcaggccctaaacatgccatgcatggcttttttgtccaaggttttcctaaactcttgaggtttcaagaacatcatgaaaaaatactgaacaaatttctgtccaagcttaagcaacacttggattctcaagaaatctacacaagtttttacacaatgaaatggttttttcagtgtttccttgatcgtactccctttacactaaacctcagaatatgggatatctacatctttgaaggagaacgagttcttactgctatgtcttacaccatcttaaaattacacaaaaaacatctaatgaaattgtccatggaagaacttgtagaattttttcaggagaccctggcaaaggattttttctttgaagatgattttgtgatagagcaacttcagatttctatgacagaactaaagcgggcaaagttagaccttccagaacctggtaaagaggatgaatatccaaagaagcccttggggcagcttccacctgaacttcagtcttggggcgtccatcacttgagcaacggacagaggagcgtgggccggccgagcccgctggccagcggcaggagggagagcggggcgccccacaggaggcacgagcactccccgcacccccagagcaggaccgggacgcccgagagagcacagccgccaagacggaaatcggtggaggaggagagcaaaaagcttaaagatgaggcagattttcaaagaaaactcccatcgggtccacaggacagttccaggcaatataatcacgcagctgccaaccaaaatagcaacgccacttcaaatatcaggaaggagtttgtgcccaaatggaataaaccgtcagacgtctcagctacagagagaactgccaaatacaccatggaaggcaaaggtcgagcagcgcaccccgcgctcgcagttaccgtcccaggtcctgccgaggtgcgggtgtcaaacgtgcggccaaagatgaaggccctggatgctgaggacgggaagcggggctccactgcatcgcagtacgacaacgtgccaggcccggagctggacagcggcgcttccgtggaggaggcgctggaaagggcttactcccagagcccccggcatgccctttaccctcctagcccgagaaagcacgctgagccaagttctagtccatcaaaagtatccaacaagtttacttttaaagtacagcctccaagtcatgcacgatatccgtcccagctagatggggaagcccgagggctagctcatcccccctcctacagcaatccccccgtttaccacggaaactctcccaaacacttccctactgccaacagcagctttgcttctccacagtttagccctgggactcaactgaatccttccaggagacctcatggttctactctttccgtcagtgcttctccggagaaatcttacagccgcccaagcccccttgtactgccgtctagtcgaatagaagtcctccctgttgacactggtgctgggggatattcgggcaattcagggtcaccaaagaatggaaaattgatcattccaccagtggattacttgccagataacagaacatggtcagaagttagttatacatacagacctgagacgcagggacaatcatggacccgagatgctagccgtggcaatttaccaaaatactcagcctttcaactcgcaccctttcaggaccatggcctccctgcagtttctgtagatagtcccgtgagatataaagcttcaccggccgcagaagatgccagtccatctggatatccatattcagggcccccgcctccagcctaccactacaggaatcgggacgggctttccatccaagagtcagtgttgctgtgagatttgacgtgtacttgctaaagacgagagagaaaccacgtgaaacctacattgctatgttcataattgccaaagcagtatttatactattgtaaacaactcgcacatctctcctgtctgttagtagtaagaatacagggaaatgtcttcagccccacgtagatgctgcttaagatgagcgtttcaattgcatcatcactgacctgttagaatttaacccggaaacatcgcaatagcatttagggatgcacgcacagtggtaatttattactcagttccggttatgtttttctccaaaacctgaacatttttactctgttggctcattctattttgactaatgttacaaagtactgaaaaaactgtagaatagatatttttaaggctatatgtagtgtatgtgtcttttaatagatataggcatctgttcatccacatttgaacacagagctaaagaaacgttttttaaaaaactacttttaatccagatccatggaataatatgtaattcttgttttccttgtcttttagtccagtttttctttttccctctcatatatttgtaacctgggtcctaaactgactgaagagtttgtcctgactttattaattgcagtctcacagaatgctcatcattctccttcagctgttgccattttctttcaatctgaaaattaaagacattggagagaaaggctaaccacttaatggtgcttaaaaatcggggcacttaaaataagtttacggccaaaggtgcagcagtgcttatcacatccacatactaagagattggtcttagtgcgtttgtgccctttgttctggtctgactcttgcgaatctcagagcaggagaagttgcagcttactgatccctcagtgctcacagtactcatgtggggcagccacactaactgcattagcagtgtggttacttctttcttctgcctcgactcacatggcttctccccacgaaggtcccagggtggccatttatacaatccatttctgtcctctttatggaatgtagtcgacggatattgctgcacctcatcaggccattacattgtccatgttaaaattataaaaatgatcctagtttttcataggagtctaggattttgatcttttaaaaaatacagtgtgatttcatgcttttgaacatctttttttcattgaaacaaattcaagttcttggcttaaaaaaaaattagtgatgtctttaaaaaatattctgttacactacagataccaaaacactgacaaagatttaggcactccaagagagtatgacttcgtgtttaattggggagcttgttttcaacattgcttatatttgaatagtagaaaacccgacattgatgtttcttcctgttgcaaggtggggctttaaactttcaaggtacaaaagtatgtcttttaaaatggaagtaacgtttgtttagctagtgaatgtgacaatatattttatgtatataatgagtctaatgtaattttgatcaacttggtaatgatgttattaaatagcaaaacaagtgcagtgtattaaagctaaacactacattgaaacgcaaacaaaattctggtgaaataactgggctgttgatgcaggtcaggtggaagctgagaaataaatgtatataaatatgtagctgaggatattaattcccattatataaccataattctgtgacttgtaataaaccaagctgtacaatttagtttataatagcagtatctgagctgctccaaaatatatatatcaacagtggtaaatactgtagatttttatatatatatatatatatatatatatatatgcaaaaaatatatatatacacacaagcactattttcttatgtcatttatgacattttttatctgtatacttttttgatgtgattgttttttaacatgctaaaagtaataagtata

SEQ ID NO: 198480 - DNA, 4546 bp, Homo sapiens
  Payload ID: 19171
  Gene Name: USP6 N-terminal like
  ENST ID: ENST00000379237
  CDS Start-End: 60-2615
gatgaaacctgttggatttctagaggaagcagctggagtctttggcttgttaactagcaatgattcaagtcttgcagattgtaaaggagctggtgacaccatcaaggcaaaaagcagccacagtgaaggaagattcagaccaggatgtagcactcaaacttgcccaggagcgagctgaaatagttgctaaatatgacagaggacgagaaggtgcagagattgaaccttgggaagatgctgattaccttgtttacaaagtcacagatagatttggctttttacatgaggaggagctcccagatcataatgtggctgtggaacggcaaaagcacctggaaattgaaagaactaccaaatggctgaaaatgctgaaaggatgggaaaaatacaagaacactgaaaagtttcataggcgaatttacaaaggaataccactccagctcagaggtgaagtctgggccctccttcttgagatccctaaaatgaaagaagaaacaagggacctgtatagtaaattaaaacacagagcacggggctgttcacctgacatcagacaaatagacctggatgtcaaccgcacatttcgggaccacattatgtttagagacagatatggtgttaagcaacaatccttattccatgtgcttgctgcctattctatttataacacggaagtcgggtattgtcaggggatgagccagatcacagctttactcctcatgtatatgaacgaggaagatgccttctgggccctggtcaaactcttctcaggccctaaacatgccatgcatggcttttttgtccaaggttttcctaaactcttgaggtttcaagaacatcatgaaaaaatactgaacaaatttctgtccaagcttaagcaacacttggattctcaagaaatctacacaagtttttacacaatgaaatggttttttcagtgtttccttgatcgtactccctttacactaaacctcagaatatgggatatctacatctttgaaggagaacgagttcttactgctatgtcttacaccatcttaaaattacacaaaaaacatctaatgaaattgtccatggaagaacttgtagaattttttcaggagaccctggcaaaggattttttctttgaagatgattttgtgatagagcaacttcagatttctatgacagaactaaagcgggcaaagttagaccttccagaacctggtaaagaggatgaatatccaaagaagcccttggggcagcttccacctgaacttcagtcttggggcgtccatcacttgagcaacggacagaggagcgtgggccggccgagcccgctggccagcggcaggagggagagcggggcgccccacaggaggcacgagcactccccgcacccccagagcaggaccgggacgcccgagagagcacagccgccaagacggaaatcggtggaggaggagagcaaaaagcttaaagatgaggcagattttcaaagaaaactcccatcgggtccacaggacagttccaggcaatataatcacgcagctgccaaccaaaatagcaacgccacttcaaatatcaggaaggagtttgtgcccaaatggaataaaccgtcagacgtctcagctacagagagaactgccaaatacaccatggaaggcaaaggtcgagcagcgcaccccgcgctcgcagttaccgtcccaggtcctgccgaggtgcgggtgtcaaacgtgcggccaaagatgaaggccctggatgctgaggacgggaagcggggctccactgcatcgcagtacgacaacgtgccaggcccggagctggacagcggcgcttccgtggaggaggcgctggaaagggcttactcccagagcccccggcatgccctttaccctcctagcccgagaaagcacgctgagccaagttctagtccatcaaaagtatccaacaagtttacttttaaagtacagcctccaagtcatgcacgatatccgtcccagctagatggggaagcccgagggctagctcatcccccctcctacagcaatccccccgtttaccacggaaactctcccaaacacttccctactgccaacagcagctttgcttctccacagtttagccctgggactcaactgaatccttccaggagacctcatggttctactctttccgtcagtgcttctccggagaaatcttacagccgcccaagcccccttgtactgccgtctagtcgaatagaagtcctccctgttgacactggtgctgggggatattcgggcaattcagggtcaccaaagaatggaaaattgatcattccaccagtggattacttgccagataacagaacatggtcagaagttagttatacatacagacctgagacgcagggacaatcatggacccgagatgctagccgtggcaatttaccaaaatactcagcctttcaactcgcaccctttcaggaccatggcctccctgcagtttctgtagatagtcccgtgagatataaagcttcaccggccgcagaagatgccagtccatctggatatccatattcagggcccccgcctccagcctaccactacaggaatcgggacgggctttccatccaagagtcagtgttgctgtgagatttgacgtgtacttgctaaagacgagagagaaaccacgtgaaacctacattgctatgttcataattgccaaagcagtatttatactattgtaaacaactcgcacatctctcctgtctgttagtagtaagaatacagggaaatgtcttcagccccacgtagatgctgcttaagatgagcgtttcaattgcatcatcactgacctgttagaatttaacccggaaacatcgcaatagcatttagggatgcacgcacagtggtaatttattactcagttccggttatgtttttctccaaaacctgaacatttttactctgttggctcattctattttgactaatgttacaaagtactgaaaaaactgtagaatagatatttttaaggctatatgtagtgtatgtgtcttttaatagatataggcatctgttcatccacatttgaacacagagctaaagaaacgttttttaaaaaactacttttaatccagatccatggaataatatgtaattcttgttttccttgtcttttagtccagtttttctttttccctctcatatatttgtaacctgggtcctaaactgactgaagagtttgtcctgactttattaattgcagtctcacagaatgctcatcattctccttcagctgttgccattttctttcaatctgaaaattaaagacattggagagaaaggctaaccacttaatggtgcttaaaaatcggggcacttaaaataagtttacggccaaaggtgcagcagtgcttatcacatccacatactaagagattggtcttagtgcgtttgtgccctttgttctggtctgactcttgcgaatctcagagcaggagaagttgcagcttactgatccctcagtgctcacagtactcatgtggggcagccacactaactgcattagcagtgtggttacttctttcttctgcctcgactcacatggcttctccccacgaaggtcccagggtggccatttatacaatccatttctgtcctctttatggaatgtagtcgacggatattgctgcacctcatcaggccattacattgtccatgttaaaattataaaaatgatcctagtttttcataggagtctaggattttgatcttttaaaaaatacagtgtgatttcatgcttttgaacatctttttttcattgaaacaaattcaagttcttggcttaaaaaaaaattagtgatgtctttaaaaaatattctgttacactacagataccaaaacactgacaaagatttaggcactccaagagagtatgacttcgtgtttaattggggagcttgttttcaacattgcttatatttgaatagtagaaaacccgacattgatgtttcttcctgttgcaaggtggggctttaaactttcaaggtacaaaagtatgtcttttaaaatggaagtaacgtttgtttagctagtgaatgtgacaatatattttatgtatataatgagtctaatgtaattttgatcaacttggtaatgatgttattaaatagcaaaacaagtgcagtgtattaaagctaaacactacattgaaacgcaaacaaaattctggtgaaataactgggctgttgatgcaggtcaggtggaagctgagaaataaatgtatataaatatgtagctgaggatattaattcccattatataaccataattctgtgacttgtaataaaccaagctgtacaatttagtttataatagcagtatctgagctgctccaaaatatatatatcaacagtggtaaatactgtagatttttatatatatatatatatatatatatatatatgcaaaaaatatatatatacacacaagcactattttcttatgtcatttatgacattttttatctgtatacttttttgatgtgattgttttttaacatgctaaaagtaataagtata

SEQ ID NO: 198481 - DNA, 11377 bp, Homo sapiens
  Payload ID: 19171
  Gene Name: USP6 N-terminal like
  Uniprot ID: Q92738
  ENST ID: ENST00000609104
  CDS Start-End: 396-2882
cggccgctgcggtgacggttggcggcggccggtgaggcgggcggggccggaggcgcggaggcggggtcccgggcgagccgccctgggaggcgggggccgtttccatagcggcggcaggaggtgtcgcgccggggaacttcctggttcccgggctcggcttcgccgggatcctcttggaagggaaacaatggggcggagggcactgcggtagccgccgccgccgccgcgccgcgccgcgccggatctgctcggccgcccgggaccgccagctctgtccgctgcccacagcctagcagtcgggaccgtactgaggacatgtattcctctgagaaaccttggacagcagattttggtttaatatctgattgggacaacattcagacccatttccagtcatgaattcagaccaggatgtagcactcaaacttgcccaggagcgagctgaaatagttgctaaatatgacagaggacgagaaggtgcagagattgaaccttgggaagatgctgattaccttgtttacaaagtcacagatagatttggctttttacatgaggaggagctcccagatcataatgtggctgtggaacggcaaaagcacctggaaattgaaagaactaccaaatggctgaaaatgctgaaaggatgggaaaaatacaagaacactgaaaagtttcataggcgaatttacaaaggaataccactccagctcagaggtgaagtctgggccctccttcttgagatccctaaaatgaaagaagaaacaagggacctgtatagtaaattaaaacacagagcacggggctgttcacctgacatcagacaaatagacctggatgtcaaccgcacatttcgggaccacattatgtttagagacagatatggtgttaagcaacaatccttattccatgtgcttgctgcctattctatttataacacggaagtcgggtattgtcaggggatgagccagatcacagctttactcctcatgtatatgaacgaggaagatgccttctgggccctggtcaaactcttctcaggccctaaacatgccatgcatggcttttttgtccaaggttttcctaaactcttgaggtttcaagaacatcatgaaaaaatactgaacaaatttctgtccaagcttaagcaacacttggattctcaagaaatctacacaagtttttacacaatgaaatggttttttcagtgtttccttgatcgtactccctttacactaaacctcagaatatgggatatctacatctttgaaggagaacgagttcttactgctatgtcttacaccatcttaaaattacacaaaaaacatctaatgaaattgtccatggaagaacttgtagaattttttcaggagaccctggcaaaggattttttctttgaagatgattttgtgatagagcaacttcagatttctatgacagaactaaagcgggcaaagttagaccttccagaacctggtaaagaggatgaatatccaaagaagcccttggggcagcttccacctgaacttcagtcttggggcgtccatcacttgagcaacggacagaggagcgtgggccggccgagcccgctggccagcggcaggagggagagcggggcgccccacaggaggcacgagcactccccgcacccccagagcaggaccgggacgcccgagagagcacagccgccaagacggaaatcggtggaggaggagagcaaaaagcttaaagatgaggcagattttcaaagaaaactcccatcgggtccacaggacagttccaggcaatataatcacgcagctgccaaccaaaatagcaacgccacttcaaatatcaggaaggagtttgtgcccaaatggaataaaccgtcagacgtctcagctacagagagaactgccaaatacaccatggaaggcaaaggtcgagcagcgcaccccgcgctcgcagttaccgtcccaggtcctgccgaggtgcgggtgtcaaacgtgcggccaaagatgaaggccctggatgctgaggacgggaagcggggctccactgcatcgcagtacgacaacgtgccaggcccggagctggacagcggcgcttccgtggaggaggcgctggaaagggcttactcccagagcccccggcatgccctttaccctcctagcccgagaaagcacgctgagccaagttctagtccatcaaaagtatccaacaagtttacttttaaagtacagcctccaagtcatgcacgatatccgtcccagctagatggggaagcccgagggctagctcatcccccctcctacagcaatccccccgtttaccacggaaactctcccaaacacttccctactgccaacagcagctttgcttctccacagtttagccctgggactcaactgaatccttccaggagacctcatggttctactctttccgtcagtgcttctccggagaaatcttacagccgcccaagcccccttgtactgccgtctagtcgaatagaagtcctccctgttgacactggtgctgggggatattcgggcaattcagggtcaccaaagaatggaaaattgatcattccaccagtggattacttgccagataacagaacatggtcagaagttagttatacatacagacctgagacgcagggacaatcatggacccgagatgctagccgtggcaatttaccaaaatactcagcctttcaactcgcaccctttcaggaccatggcctccctgcagtttctgtagatagtcccgtgagatataaagcttcaccggccgcagaagatgccagtccatctggatatccatattcagggcccccgcctccagcctaccactacaggaatcgggacgggctttccatccaagagtcagtgttgctgtgagatttgacgtgtacttgctaaagacgagagagaaaccacgtgaaacctacattgctatgttcataattgccaaagcagtatttatactattgtaaacaactcgcacatctctcctgtctgttagtagtaagaatacagggaaatgtcttcagccccacgtagatgctgcttaagatgagcgtttcaattgcatcatcactgacctgttagaatttaacccggaaacatcgcaatagcatttagggatgcacgcacagtggtaatttattactcagttccggttatgtttttctccaaaacctgaacatttttactctgttggctcattctattttgactaatgttacaaagtactgaaaaaactgtagaatagatatttttaaggctatatgtagtgtatgtgtcttttaatagatataggcatctgttcatccacatttgaacacagagctaaagaaacgttttttaaaaaactacttttaatccagatccatggaataatatgtaattcttgttttccttgtcttttagtccagtttttctttttccctctcatatatttgtaacctgggtcctaaactgactgaagagtttgtcctgactttattaattgcagtctcacagaatgctcatcattctccttcagctgttgccattttctttcaatctgaaaattaaagacattggagagaaaggctaaccacttaatggtgcttaaaaatcggggcacttaaaataagtttacggccaaaggtgcagcagtgcttatcacatccacatactaagagattggtcttagtgcgtttgtgccctttgttctggtctgactcttgcgaatctcagagcaggagaagttgcagcttactgatccctcagtgctcacagtactcatgtggggcagccacactaactgcattagcagtgtggttacttctttcttctgcctcgactcacatggcttctccccacgaaggtcccagggtggccatttatacaatccatttctgtcctctttatggaatgtagtcgacggatattgctgcacctcatcaggccattacattgtccatgttaaaattataaaaatgatcctagtttttcataggagtctaggattttgatcttttaaaaaatacagtgtgatttcatgcttttgaacatctttttttcattgaaacaaattcaagttcttggcttaaaaaaaaattagtgatgtctttaaaaaatattctgttacactacagataccaaaacactgacaaagatttaggcactccaagagagtatgacttcgtgtttaattggggagcttgttttcaacattgcttatatttgaatagtagaaaacccgacattgatgtttcttcctgttgcaaggtggggctttaaactttcaaggtacaaaagtatgtcttttaaaatggaagtaacgtttgtttagctagtgaatgtgacaatatattttatgtatataatgagtctaatgtaattttgatcaacttggtaatgatgttattaaatagcaaaacaagtgcagtgtattaaagctaaacactacattgaaacgcaaacaaaattctggtgaaataactgggctgttgatgcaggtcaggtggaagctgagaaataaatgtatataaatatgtagctgaggatattaattcccattatataaccataattctgtgacttgtaataaaccaagctgtacaatttagtttataatagcagtatctgagctgctccaaaatatatatatcaacagtggtaaatactgtagatttttatatatatatatatatatatatatatatatgcaaaaaatatatatatacacacaagcactattttcttatgtcatttatgacattttttatctgtatacttttttgatgtgattgttttttaacatgctaaaagtaataagtatattttgtgtcttttatgtgcatttttttcatacggcaaaaatggtgcaccccctgatgctttgaaggctaattctcttctaatggagtagctgttgcctagtattcacctgtgttactttgtatatgtcacagttctatgtttaatgctttactaatttccagtaagactatatttaaaactacatagtctttccttattttatttagtatgacattgtcaatagtaataaggtagcatttctagtcttcctcattacaaaatgtagctgttttctaagtaggaaaatgtaatttgaaattatcttgccaccatacagttttactttttcaaatttattttttaataagagataatgaaataatgatataaaaagattggtaaagtatatttatgaaaaacccatttagtacagattttcatagtgtagagactgattttgccctgtaactgcatgtacatggtgtattttgccattaagtcttttatttgtggcaattttgccttagtaggcgcttggcgtagtttctattttatagaatatttagtctgagaagttaaagaaactagacctaggatctcaaaagttttaaaactttgacgttttcatatgtttgtttattaataggattttaaaaaaaatgaacatctttttaaagctgggaaatgtatataaattcaggtatcagtatcaataatagactgtttcattgaaagaatgaaaagaggccaggtgaagtagtaatttataaatttagtatttgcagtggttcacgcctgtaatcccaccactttgggaggccgaggtgggcggatcacgaggtcaggaaatcgagaccatcctggccaacatggtgaaaccccatctctactaaaaatacaaaaattagctaggcgtagtggcatgtgcctgtaatcccagctactcgggaggctgaggcaggagaatcgcttgaaccagggagtcagaggttgcggtgagccgacatcacgccactgcactccagcctggcaacagagcaagactccgtctcaaaaaagtgaaaagagattcaaccaagaggacagctctggagcagaaaaatacatgtttataggatgcgattgtttcaactttctttttccattttaagaagattccatttcggaagaagatgccgaaatttacaaatttcgccatactcagtgggactctcaagtagactttcatagttgcagtcacttcaggtctctccctcgggttcccttaggatgcaagcacaagaacagacacctggtcagcatggtgctgaaacccctttctcttcactgtcatggtgcgagaaaagcatgccatgtctacgagtaggatctcttcacggaggacctgcagcttcatcttctggattggagattattcttggttatgttttggaatcagtcctttatcttagtgtgcacttgattgtgagttttaagattatggttttaggatttcttttattttttgtcttttaaattgttctttaatggattttaaatgtctgtatctaatgtgggtattaatgctttttggccaagtggattttaagaagtgaaactttttttttttttttttttttttgagatggggtttcactctctcacccagactggagtacagtggggagatctcagctcactgcagcctctgcctcccaagttcaagcgattctcctgtctcagcctcccaggtagctgggattaaaggtgcccaccaccacacctggctttttttttttttttttttttttttgtatttttagtagagacagggtttcaccatgttggccaggctggtctcaaactcctgacctcaagtgatccacctgcctcggcctcccaaagtgctgggattacaggtgtgagccactgtgcccagcccaaacttttaagatgacccaaagtcgtgagaataggaaaaaggaatctgattaacatttatgcattttattttcagaaggactttcagttatccataaatctaagcataactgctaccatttatacatgagaaaatgacagaggaactaatataagagcagatcttgacccttgctgggtcactataattctttagaattactgagtgaactttaaaaaaattttctgcataggttatatcccagaccacttaaatcagaatatcttggatggaacccagacatcagattattgtattttcccccataatttaaagttcagtcattaagctgttacatccctctgaagttgattgtcttatattcccgctatgagatatctcaaagattcttaatcaagagtttcagagtttagaaactcggatgttgggcaagttaggaaatattccaccagcaaaattaacattaccagccatctctgcaaatgctcctgaactgctgacagttacggcatcaaacggaagacggcaggccctgtccttccactcaggtgctgcttgcagtgctcctcaacagagggagagtctccctaagatttccatgttcctagacaaagtcctaagctgtttggaagtctgtgagcattttcagtatatgaggagctgagaaagcgctgcctgtctggtccttcatttggccagctaacattctgtcgagcacctgcattgtgctggattcatgcttccagatgtgagatgtgtgttctaatctgacagtgtgttttgtaatctgtcaatcagtgttggagatatgcccaggctattacaggcatattatggacaaatataaaggccaactagtgatcccagcccaagaggttcagggaagtcttatgaaggatttgtctcagctgagcctgacaggacaagcatatagaaagacaagagggggagagagcagggcattctgcagaggggaccgatggcaagagcagctgcatgggatgtgtgaggaaatttgccactgtgatgtgtatgtggggtaggcatgggggtggacaggggtgacgggctccacagagacaggatggtggagggagttgtgtgcagttgaacttgatcctgtagttggttttgacctggtgtggtccctccatgctgtggaagtgaaatgtgagggaacaggcctgggggcagtgagggagacaggacaagcctttcatctaaaaggtggcacagagcttaaggccagggaagaaggtatgaagaaaaggtgattgagaactaattaccaagggaaactggcaagacaactggatgcgtgtaatccgaatggtcataatgagacaacagctaacactgaatgcttgctgtgtgtttggcactctgctagacgttttactggtattaaccgatttaatcctcacaataacgaagtatgtactactataattgccagtttacagacgagaaaactaaggcacaaagtttaacttgccccaagcgacagagtggataagtaaaagggcgaggactgggaccctggtactctgaatgaagagcctgtgcctccctctctcccctaacagttttaaggagatacaatttacctgccacaaaatttacccattttaggtttatacttagatggttgttcagtaagtttatagagttgtgcaactatcacaaccaatgttagaacaactcaaaaaaaaaaaaaatcttattccagtttgcaattaagccccatttccatttccacacagcaactgatcggctttctgtccttcaggtttgccatttctgaacatttcctataaatggaatcagacatggtcttttgtgtctggcttctttcactcagtaatgtttctgaagttcctccctgtagtggcatctatcagtaattgctttcctttttattgctgggctgaatgctgttccattgtatggctgtgtcagattttgtttgttcattcaccagttgatagacatgtagattgttttcatgctgctgtgaccatttgtgtacaagtgtttgtgcagacatatgtttaactttttaggaaattgccagactgttttccaaagaagctgcaccattttacatttgcaccagcaatgtaggagggttctgatatctccacgtcctcaccaacacttgtgattatgtgtcttttaaaattatagccatccttgtggatgtgaagtggtaactcattgtggctttgatttacatttccttgatagctaatgatgagcatttttcatgtgcttatgggccgtttatatacctttggtgaaatgtctatttaaatcttttgctcacttttcagttgggttttttttcttattaaatagtaagagttcttaatatattctggatacaagtccttttaagacatgatttgcaaatattttctcccagtctgtggcttatcttttcctaatggtgtcttttgaaatgcacttgtttttaattttaatgaagcctaatgtattagtttccttatacgagttatgcttttagtactgtatctctctctgcttaactaaaggtcacaaagattttctcctatgttttgttctggaagttttatagttttagctcttaaatttgggcctgtgagctgttttaaattaatttttatatatggtatgaggtaaagatctaaattcctatggatattcagtggtcttagcaccatgtgttaaaaggactgcttttccccactgtgtccctgtcaaaaatcaactgaacatatatgtaagagttatttaaattttgaaattgggacgtatacattctccattctttttgacattattttggctaatctgggtcctctgcatttctgtataacttacaaggtctggttgtcagtttttgcaaaaaggcctgctggggtttccatagggaatgttttgaatctatagatgagtcaaggaagaactgccatcttaacagtattgggtcttccgatttataaacatggaatgcctctccatttattttgatctttaatttctctcagcaatgttgtataatatcagaatatgtcttgtacttctatggttaaaattagtactgctttctctcgtgaatggagctgttttcttcagagcctttgctctgaaacatcacgctcccctgtatggggagaagaagggtcaagatggatttctgcagttcctgcgttgggcagtagggtgaagagtggggccatcatctcataaaaggaattcagaaggtgctggtttaggtttagtgggaaaacgacttctgttttgacatgtagagtttgaagattaggagattgacagatgatgttgtctgacaggtggttggctgtcccagagagagatagagactccccagcatgtagggggcagagtcacaagagtgctggcctgggagatatgccagccaaggtggggcacctgggacaacagcacagctgagccgcagacacgaagacatttgttaagttatcagccacgtctgcatcacagactacaggtactaccatttagcggagttatctttgaaaagacatcaacatccctgtgcatttgtcagtctggtagagtggactggaggttgtcaagtctgcattgtagtctgagtgtgccacatgttagcaatgtgaccttgggccacacacctcttctgggccttactttgctctgctgtaaggtgtgggcatttaagaggtaccagagggaaaggagcctccgaaggactcgcaggggcagtcgcagctgatgtttgagtgccctgggatgggagtcagactggctgaggtttcaattttgcattcatggccagccaccgttccaggtcctgttgagatcatcatgtaacaggacaacaaagtccctgtcctcatggggcttatattctgatccatttcctcatctatgaaatgaagattgtagtttttatttcatagagtcatgaagattgagttaatctctgaaatatccacacagtgttgtcactcaggaatgatttggaatgttagggatagtcacccaccaccacagtgctaggtttcagtgaccaggagcgatgtggagctgagtctagtgggagtccagaggtaaagacacagtaaggtcacatgtgacccaggagggaggaggcacaggcagggcaatctgaggagactgtgccatggctggaggagcaggggctccaggaaggaggcagcatctgcactggaaatgcagcaggagggcccagtgagggaggcctggaaagtccacttggacttgacaatgaggagctctctgctgtcacctgctgtgattcctagagtcagaatcagactgcagtggccacaggcacaagtgggaagtgatgcagctcaaaggtttggatgagatgggatgtgcagcgattgagtcgtagctggagcgaaggatgtgctaagttagggattggaggggcgtgcatttacatgggaaagtaatgctaattagaaatcagttggacttcaacattctcaagtacttccacaaagcatcccttggttttattccagtttgttgctttacgtatttgtaagtattaaacaccaattactaaattatctgtaattcagatttgtcatttggaggaaaatcaacataatctgaatataaagcaggcagcattgagaaa

SEQ ID NO: 198482 - DNA, 1748 bp, Homo sapiens
  Payload ID: 19171
  Gene Name: USP6 N-terminal like
  ENST ID: ENST00000609853
  CDS Start-End: 164-310
aactgcttcagagccttcatggatagctaggcaaagcattcatttctctgaagttgaactgtgttcgtgcttgagctttctgaaagcagaaatgagcttctggtgatgaaacctgttggatttctagaggaagcagctggagtctttggcttgttaactagcaatgattcaagtcttgcagattgtaaaggagctggtgacaccatcaaggcaaaaagcagccacagtgaaggaagacggagtcttgccctgtcacccaggctggagtgcagtggcgcaatctcggctcactgcaagctccgcctcctaggttgacaccattctcctgcctcagcctcccaagtagctgggactacaggaacccgccaccacgcccagctaatctttttgtatttttagtagagacatggtttcaccatgttagccaggatggtctcgatctcctgacctcgtgatccacccgcctcggcctcccaaagtgctgggattataggtgtgagccactacgcccggcctggatgctacattcttaaaggatgctgattttatcttggtttcttgcttttttaagttatctctcatgttctttgatttgctctatgttgcttctttctgtggtcttcttgggtatactcaagtgtgtatcgcatatgtttaacaaaggaaaaatagtgttaaaagaaaaagtatcacttaatataagaagcaaaacttagtttttgtttctatgatagtgacatccaggtatgatttaggttatttttcactttaaacgggctattaacttcacgtgagaaaaaaactgtagaaacgttaactcctgtagaatgatgactatctgtggtgtagtaagatcatacaacttctctacttgttactgtgagttgcttaataaatggcagtacaagtgtcaaatccataattagtcaatatcaagagctgcattttggattgcatgtactgtcccaaatatatgttgtgcaagttactttgtatcatgttaatggagaaaagagtggatattatgaaatcagcaatataaatcaaatgtatatgtggtcctgcaatgtaattgaaggtactcagtgttctcagacactcatgcaatatcttgtgttgctttctcagattttttaggtgtatcataggggatagctgggaactggtagagcagaggtactaagttccacctggaaatgctttagagtagctctttgaatatgtctttacttattatcttacagcgtatgtgtatatgattattttctagagggtcgtaccctttattaagctgtgagcttcttgagggcaaggactgcaattcattaatcattttggagaaaagtgaataattctgaagaattcggtggttcatgagcttgcctggtatttgtttctctatggcttatcatctaagtgagataacagatagtagataattgataaatttaatctgttacctaattactgagaggattcgattcttgctttatgttattactgaaacagactgcccagtaatcttctctagagagcaattaggtttgcaatgagttattttattgagaatgctacttgaaattaaatgtttatagcactatcttgatataatttaaatataatttaaatgtgctgaagtatcttcattcagataacttgttaccccttaacaaaaggctgcttgagtattgtttctctcccatttggcaaacaccagatgcagtgattaataaaggtcattatgctac

SEQ ID NO: 198483 - DNA, 2019 bp, Homo sapiens
  Payload ID: 19172
  Gene Name: UTP11-like, U3 small nucleolar ribonucleoprotein (yeast)
  Uniprot ID: Q9Y3A2
  ENST ID: ENST00000373014
  CDS Start-End: 62-823
tggcggcagaggcagtgcggatccggcgttctccactgatcttttccaaggctgtacagacatggcggcggcttttcggaaggcggctaagtcccggcagcgggaacacagagagcgaagccagcctggctttcgaaaacatctgggcctgctggagaaaaagaaagattacaaacttcgtgcagatgactaccgtaaaaaacaagaatacctcaaagctcttcggaagaaggctcttgaaaaaaatccagatgaattctactacaaaatgactcgggttaaactccaggatggagtacatattattaaggagactaaggaagaagtaaccccagaacaactaaagctgatgagaactcaggacgtcaaatatatagaaatgaagagggttgcagaagctaagaaaatcgaaagactaaaatcagagctccatctgctggatttccaggggaagcaacagaacaagcatgtgttcttttttgacaccaaaaaggaagttgaacagtttgatgtcgcaactcacctgcaaacagccccggagctagtcgacagagtctttaataggcccaggatagagaccttgcagaaagaaaaagtgaaaggagttaccaatcagactggacttaagcgaatagctaaagaaaggcaaaagcagtataactgcctgacacagcggattgaacgagagaagaaattgttcgttattgctcagaaaattcaaacacgcaaagatcttatggataaaactcagaaagtgaaggtgaagaaagaaacggtgaactccccagctatttataaatttcagagtcgtcgaaaacgttgacgtgttatagataagccttgtcattctgtatcaaaaatctgttgtcgttttctagtaacttcaaattccattactccaaatggcatggttttccggtttgtaaccataactaaattgtcagtctgacatttaatgtctttctatggacaacattaaatctccctcccttctgtaattgtttttggattgtgaaattagtcttatttttatatacttaattttttttttctttgagatagggtctttgttgccaggctggaagtgcagtgtgtgattatggctcactgcaactttgaactcctgggctcaagtgatcttcctgcatcagcctcttgagtagctgggaccacagacatgtgccaccatgtctgagtaatgtttaaattttctgtagagaccaggttttgccatgttggccaggctggttttgaactcgtggcctcaagcgatcctcccaccttggcctcccaaagggctgggattacagggatgagccactatgcccagcccataattttttttgttatgaaacataggatctcattacagcagatttggaaagtagattaattcattcctaatcccagtgcttattcaataataacaaatatttattgcatgcttaactgtgctaggagctagagctgtggaggtggacaattactgtgagtagtctagttgatttcctccattttgtaaaacgaggcatcactttttgtccatgtttttgtgttttatagttacagtaaacaatttgatgtcctactttttttttttttttttttgagacggagtctcgctctgtcgcccaggccggactgcggactgcagtggcgcaatctcggctcactgcaagctccgcttcccgggttcacgccattctcctgcctcagcctcccgagtagctgggactacaggcgcccgccaccgcgcctggctaatttttttttgtatttttttagtagagacggggtttcaccttgttagccaggatggtctcgatctcctgacctcatgatccacccgcctcggcctcccaaagtgctgggattacaggcgtgagccaccgcgcccggccgatgtcctactttttaattaaatcattagctctttcccagtttgttacatcacaaaagttttttacagtaatatatgctagagtaaacgttaaaataaatattatttttaatgattgc

SEQ ID NO: 198484 - DNA, 5529 bp, Homo sapiens
  Payload ID: 19173
  Gene Name: UTP14, U3 small nucleolar ribonucleoprotein, homolog C (yeast)
  Uniprot ID: Q5TAP6
  ENST ID: ENST00000521776
  CDS Start-End: 734-3034
gcctttgctaaattgctgaataagaagatggttgagtcacctccttcgcttaaacttgtcctcattggaggttgtcgtaacaaagatgatgaacttagggtaaaccaactgagaaggctgtctgaggatttaggagttcaagaatatgtggaatttaaaataaacattccatttgatgaattaaagaattatttgtctgaagcaacaattggtctgcataccatgtggaacgagcattttgggattggagttgtggagtgtatggcagctggcacaattatccttgcacacaattcggggggcccaaagcttgacattgtggttcctcacgaaggagatataactggctttctggctgagagtgaagaagactatgctgaaactatcgctcacattctttccatgtctgcagaaaagagactccaaatcagaaaaagtgctcgtgcatctgtaagcagattctctgatcaggaatttgaagtgacattcctatcatctgtggaaaagttatttaagtaatgccatatctgtaaaattaaagatattttatataaactggttaaacaccttcatatgtaaatatttttctaaattcaatctcatttgtcaaatcattttactttagaaaacagacaaaatttccttttagaataaaaggaagtgttgaaaagaaaatggatgactagccttcggcttccattcttggtatacatgagagaggctggctgctgagatgaatgtgaaccaggttgcagagaatctggctttgagccaccaggaagaactagtggatttgccaaaaaactaccccttgagtgaaaatgaagatgagggggacagtgatggagagagaaagcatcaaaagcttctggaagcaatcatttcccttgatggaaagaataggcggaaattggctgagaggtctgaggctagtctgaaagtgtcagagttcagtgtcagttctgaaggatcaggagaaaagctgggccttgcagatctgcttgagcccgttaaaacttcatcttctttggccactgtaaaaaagcaactgaatagagtcaaatcaaagaaggtggtggagttacctcttaacaaagaaaaaattgaacagatccacagagaagtagcattcagtaaaacctcacaggtcctctccaaatgggaccctatcatcctgaagaaccagcaggcagagcagctggtttttcccctggggaaggagcagccagccattgctcccattgaacatgcgctcagtggctggaaggcaagaactcccctggagcaggaaatttttaacctcctccataagaacaagcagccagtgacagatcctttactgactcccatggaaaaggcctctctccaagccatgagcctggaagaggcaaagatgcaccgagcagagcttcagagggctcgggctctgcagtcctactatgaggccaaggctcgaaaagagaagaaaatcaaaagtaaaaagtatcacaaagtcgtgaagaaaggaaaggccaagaaagccttaaaagagtttgagcagctacagaaggttaatccaactgtggcactggaagaaatggaaaaaattgaaaatgccagaatgatggaaagaatgagccttaagcaccaaaacagtgggaaatgggccaagtcaaaggcaattatggccaaatatgacctggaggctcgccaagctatgcaggaacagttggccaagaacaaagaactgacacagaaactccaggtagcctctgagagtgaggaagaggagggaggcacagaagtggaagaactccttgtccctcatgtagcgaatgaagtgcagatgaatgtggacggaccgaatccctggatgttcaggagctgcaccagtgacaccaaagaggctgcaacacaggaggaccctgagcaagtgccagagcttgcagctcatgaggtttctgcaagtgaggcagaagaaagaccagtggcagaggaagaaattttgttgagagaatttgaggaaaggcaatcccttagaaaaagatctgagctcaaccaggatgctgagccagcaagcagtcaagaaacaaaagattctagcagccaggaggtgctgtccgaattgagggcactatctcagaaattgaaggaaaaacatcagtccaggaagcaaaaagcaagttcagaggggactgttccccaggtccagagagaggaacctgccccagaagaagcggaacccctattgctacagaggtcagagagagtacaaactctggaagagctagaagagctgggaaaagaagattgttttcaaaataaggagcttcccagacctgtgttagaaggacagcagtcagagaggaccccaaataatcggcctgatgcccctaaggagaagaaagagaaggagcaactgatcaacctacagaacttcctgaccacacagtctccttccgtgaggtctttggcagttcccacaataatagaggagctggaagatgaagaggagagagaccaaaggcagatgataaaggaagcttttgctggggatgatgtcatcagagatttcttgaaagagaagagggaagctgtggaggcgagtaagccaaaggacgtggacctgacactacctggctggggcgagtggggtggtgtgggcctaaagcccagtgccaagaaaagacgccagtttctcattaaagcccctgagggtcctccaagaaaagataagaatttgccaaatgtgattatcagtgagaagcgcaacatccacgcagcagctcatcaggtacaagtgcttccatatccatttacccaccatcggcaatttgaaaggaccatccagacccctataggatccacatggaacacccagagggctttccaaaagctgactactcccaaggtcgtcaccaagccaggccatatcattaagcccataaaagcagaggatgtgggctaccagtcttcctcaaggtcagacctgcctgtcatacagaggaatccaaaacgaatcaccacacgtcacaataaagaagaaaaactgtaggttgtgtagctggagaagtgacagtcaggggccctgattccacttcctttggtccagttttactctgctacagggtggattccaaaactggctcagcacattgcatgtagttgagccacattttttaaaaaaagaaaatggatgaccattaattgactagcattttagaattgatcagacattagaacacagaaaaattctagtacatttaaattctaaacaatacagtggatgacccttttgaatatacctaatgatttccttaaaaaagaaattttaaacagacttgtttaatcgtgttctcaaagcatacagtcaagaggtgggactgactgatgctttataggtgtgtgtagggtggtagaggccaaggtgctgccagcaatcctttccatactaggtactggtgaaaattgtttttgtttatgctgtcagcacatttgtgtgggtctctcattgtcccttaacagtgccgcatctcagcctggaagtcagctttaagtcattcaagagaacctcaggctgtttttctgacagtgatgatatgatatacagatacatccacagggtatctattaccagcataatgcattgtaagatggcaaggtggcattttgaaagagcgctgggcaagcagttagcacatctgggcctaccttcagcttcttcatttacaaacttctgaccttttgacactaaagctgctcctttatctttctgagtctcagattcttcatctgtaatctggagttgttaattccagtccttactaccttttagagttggaatgagatggaaagtagatgaaactactttgaaaattacgacagttaagggctgggtgcggtgtctcacacctgtaatcccagcactttgggaggccgagatgggtggatcatgaggtcagcagttgagaccagcctgaacaacatggtgaaaccctgtctgtactaaaaatacaaaaaaattagctgggcctggtggcaggcacctgtaatcccagctacttgggagactgaggcaggagaattgcttgaaactggaaggcagaggttgcagtgagccaagattgtgccactgcactctagcctgggcaataagcaaaactccatctcaaaaaagaaaaaaaggaaaaagaaaattatgagagttacttaaaggtaacatcacatactaaatgtcttctataatcctatatttattaatgcattacaactctgtagattgttagttactaggccagtagctaggaattggtataaatttaatgcaccttctatcctgaataactagcatggaaaagtgaatatatgtgtgagcagatatggctataaagacctatagcttttgcactttatgcatatataatcaatcctttctagttcagtgaattgaccccatccacaggctgattcatctttgtgttaaggggcaaatgaaacggtatattatttctttgcagtctcctctcagtcattcatcaatgtggccagcttatctactcccaattatgttgttgatacatctccaagccatctgtcatcagatcaaaaagcagcaaacagagggtcagtcacaggatgttctgacacaccattgtaactttttgttagagatgatcccatttagaaaaagactggtagaaattggagtgaaaggaaccctacagattagcccagttctctcttattttcagctttacagacaagaacaatttaaatctaaagaatttagtagattccttcagtgtcacaaagctgtttcatgaaagaatcaagattataacctggatattctgactcctggcccagtgctttttcttactttgtagctacactttgaagtaagattcaaactgttatccactcaattgccttattcctgaggatgtagtgaaggaagaaaaagttttctggaattccgtaaattatattttaagcttatttcttcaaaattattttcatatatcacagatatatcattggaagatataatttgcatatatgttcattatcagtgttcctaatttggtattacatgtattctatttttttctgaatgatagcatgaaaagtgtcaaagtggtttgtccgctagcgtctgtctgcagaactttcaggatgactattaattcctctcagatgtcatttttgagtggtccaagcctgctgttttgaacccacagcagtggagatttgtattcttatttacagttgtgtactataaagtgtgtgttacataggttttgtgtaataattatttgtaaatattatttagatttgtatttagacatgatttatatctaatatagatacaaagtctgtgtctaaatattatttaaagaagtgatttttcattctcttggattctttccagtgtggtgccttttatatgcctcacatagtctccttgttctcctactaatattcccaagctccatatgccaattaaagaagaaacaaaaataaaagtttgtcttgcttgtgaaacattaa

SEQ ID NO: 198485 - DNA, 2488 bp, Homo sapiens
  Payload ID: 19174
  Gene Name: UTP14A small subunit (SSU) processome component
  Uniprot ID: Q9BVJ6
  ENST ID: ENST00000394422
  CDS Start-End: 29-2344
gtccatgtgagagaagctggctgctgaaatgactgcgaaccggcttgcagagagccttctggctttgagccaacaggaagaactagcggatttgccaaaagactacctcttgagtgagagtgaagatgagggggacaatgatggagagagaaagcatcaaaagcttctggaagcaatcagttcccttgatggaaagaataggcggaaattggctgagaggtctgaggctagtctgaaggtgtcagagttcaatgtcagttctgaaggatcaggagaaaagctggtccttgcagatctgcttgagcctgttaaaacttcatcttctttggccactgtgaaaaagcaactgagtagagtcaaatcaaagaagacagtggagttacctctgaacaaagaagagattgaacggatccacagagaagtagcattcaataaaaccgcacaagtcctctccaaatgggaccctgtcgtcctgaagaaccggcaggcagagcagctggtttttcccctggagaaagaggagccagccattgctcccattgaacatgtgctcagtggctggaaggcaagaactcccctggagcaggaaattttcaacctcctccataagaacaagcagccagtgacagaccctttactgacccctgtggaaaaggcctctctccgagccatgagcctagaagaggcaaagatgcgacgagcagagcttcagagggctcgggctctgcagtcctactatgaggccaaggctcgaagagagaagaaaatcaaaagtaaaaagtatcacaaagtcgtgaagaaaggaaaggccaagaaagccctaaaagagtttgagcagctgcggaaggttaatccagctgcagcactagaagaactggaaaaaattgaaaaggccagaatgatggaaagaatgagccttaagcaccaaaacagtgggaaatgggccaagtcaaaggcaattatggccaaatatgacctggaggctcgccaagctatgcaggaacagttgtctaagaacaaagaactgacacagaaactccaggtagcctctgagagtgaggaagaggagggaggcacagaagatgtggaagaactccttgtccctgatgtagtgaatgaagtgcagatgaatgcagatgggccgaatccctggatgctcaggagctgcaccagtgacaccaaagaggctgcaacccaggaggaccctgagcaactgccagagcttgaggcccatggagtttctgaaagtgagggagaagaaagaccagtggcagaagaagaaattttgttgagagaatttgaggaaaggcgatcccttagaaaaagatctgagctcagccaagatgctgagccagcaggcagtcaagaaacaaaagattctggcagccaggaggtgctgtctgaattgagagtactatctcagaaattgaaggaaaaccatcagtccaggaagcaaaaagcaagttcagaggggactattccccaggtccagagagaggaacctgccccagaagaagaggagcccctgttgctacagagaccagagagagtacagacgctggaagagctagaagagctgggaaaagaagaatgttttcaaaataaggagcttcccagacctgtgttagaagggcagcagtcagagaggaccccaaataatcgccctgatgcccctaaggagaagaaaaagaaggagcaaatgatcgacctacagaacctcctaaccacacaatctccctccgtgaagtctttggcagttcccacaatagaggagctggaagatgaagaggagagaaaccataggcagatgataaaggaagcttttgctggggatgatgtcatcagagatttcttgaaagagaagagggaagctgtggaggcgagtaagccaaaggacgtggacctgacactacctggctggggcgagtggggtggtgtgggcctaaagcccagtgccaagaaaagacgccggtttctcattaaagcccctgagggtcctccaagaaaagataagaatttgccaaatgtgattatcaatgagaagcgcaacatccacgcagctgctcatcaggtacgagtgcttccatatccatttacccaccattggcaatttgaaaggaccatccagacccccataggatccacatggaacacccagagggctttccaaaagctgactactcccaaggtcgtcaccaagccaggccatatcattaaccccataaaagcagaagacgtgggctaccggtcttcctcaaggtcggacctgtctgtcatacagaggaatccaaaacgaatcaccacacgtcacaaaaaacagctgaagaaatgctctgtagattgagttgctggaggagtgacagccaggagccctgacttcacttcctttggtccagttttactctgatacagggtggattccaaaactggctcagtacattgcatgtagttaagccacattttaaaaataaaggcattttttaatcta

SEQ ID NO: 198486 - DNA, 2403 bp, Homo sapiens
  Payload ID: 19174
  Gene Name: UTP14A small subunit (SSU) processome component
  Uniprot ID: Q9BVJ6
  ENST ID: ENST00000425117
  CDS Start-End: 91-2250
acggaaacagaaattgctttgcggcccgcacggaaattgctttccttcggcttccgttcttggtccatgtgagagaagctggctgctgaaatgactgcgaaccggcttgcagagagccttctggctttgagccaacaggaagaactagcggatttgccaaaagactacctcttgagtgagagtgaagatgagggggacaatgatggagagagaaagcatcaaaagcttctggaagcaatcagttcccttgatggaaagaataggcggaaattggctgagaggtctgaggctagtctgaaggtgtcagagttcaatgtcagttctgaaggatcaggagaaaagctggtccttgcagatctgcttgagcctgttaaaacttcatcttctttggccactgtgaaaaagcaactgagtagagtcaaatcaaagaagacagtggagttacctctgaacaaagaagagattgaacgggcaagaactcccctggagcaggaaattttcaacctcctccataagaacaagcagccagtgacagaccctttactgacccctgtggaaaaggcctctctccgagccatgagcctagaagaggcaaagatgcgacgagcagagcttcagagggctcgggctctgcagtcctactatgaggccaaggctcgaagagagaagaaaatcaaaagtaaaaagtatcacaaagtcgtgaagaaaggaaaggccaagaaagccctaaaagagtttgagcagctgcggaaggttaatccagctgcagcactagaagaactggaaaaaattgaaaaggccagaatgatggaaagaatgagccttaagcaccaaaacagtgggaaatgggccaagtcaaaggcaattatggccaaatatgacctggaggctcgccaagctatgcaggaacagttgtctaagaacaaagaactgacacagaaactccaggtagcctctgagagtgaggaagaggagggaggcacagaagatgtggaagaactccttgtccctgatgtagtgaatgaagtgcagatgaatgcagatgggccgaatccctggatgctcaggagctgcaccagtgacaccaaagaggctgcaacccaggaggaccctgagcaactgccagagcttgaggcccatggagtttctgaaagtgagggagaagaaagaccagtggcagaagaagaaattttgttgagagaatttgaggaaaggcgatcccttagaaaaagatctgagctcagccaagatgctgagccagcaggcagtcaagaaacaaaagattctggcagccaggaggtgctgtctgaattgagagtactatctcagaaattgaaggaaaaccatcagtccaggaagcaaaaagcaagttcagaggggactattccccaggtccagagagaggaacctgccccagaagaagaggagcccctgttgctacagagaccagagagagtacagacgctggaagagctagaagagctgggaaaagaagaatgttttcaaaataaggagcttcccagacctgtgttagaagggcagcagtcagagaggaccccaaataatcgccctgatgcccctaaggagaagaaaaagaaggagcaaatgatcgacctacagaacctcctaaccacacaatctccctccgtgaagtctttggcagttcccacaatagaggagctggaagatgaagaggagagaaaccataggcagatgataaaggaagcttttgctggggatgatgtcatcagagatttcttgaaagagaagagggaagctgtggaggcgagtaagccaaaggacgtggacctgacactacctggctggggcgagtggggtggtgtgggcctaaagcccagtgccaagaaaagacgccggtttctcattaaagcccctgagggtcctccaagaaaagataagaatttgccaaatgtgattatcaatgagaagcgcaacatccacgcagctgctcatcaggtacgagtgcttccatatccatttacccaccattggcaatttgaaaggaccatccagacccccataggatccacatggaacacccagagggctttccaaaagctgactactcccaaggtcgtcaccaagccaggccatatcattaaccccataaaagcagaagacgtgggctaccggtcttcctcaaggtcggacctgtctgtcatacagaggaatccaaaacgaatcaccacacgtcacaaaaaacagctgaagaaatgctctgtagattgagttgctggaggagtgacagccaggagccctgacttcacttcctttggtccagttttactctgatacagggtggattccaaaactggctcagtacattgcatgtagttaagccacattttaaaaataaaggcattttttaatctatttacctgg

SEQ ID NO: 198487 - DNA, 979 bp, Homo sapiens
  Payload ID: 19174
  Gene Name: UTP14A small subunit (SSU) processome component
  ENST ID: ENST00000427972
  CDS Start-End: 20-979
tttaaagtgtggctgcaggatgaagggagactttagaaaaaaaaaatcagaggcaagaactcccctggagcaggaaattttcaacctcctccataagaacaagcagccagtgacagaccctttactgacccctgtggaaaaggcctctctccgagccatgagcctagaagaggcaaagatgcgacgagcagagcttcagagggctcgggctctgcagtcctactatgaggccaaggctcgaagagagaagaaaatcaaaagtaaaaagtatcacaaagtcgtgaagaaaggaaaggccaagaaagccctaaaagagtttgagcagctgcggaaggttaatccagctgcagcactagaagaactggaaaaaattgaaaaggccagaatgatggaaagaatgagccttaagcaccaaaacagtgggaaatgggccaagtcaaaggcaattatggccaaatatgacctggaggctcgccaagctatgcaggaacagttgtctaagaacaaagaactgacacagaaactccaggtagcctctgagagtgaggaagaggagggaggcacagaagatgtggaagaactccttgtccctgatgtagtgaatgaagtgcagatgaatgcagatgggccgaatccctggatgctcaggagctgcaccagtgacaccaaagaggctgcaacccaggaggaccctgagcaactgccagagcttgaggcccatggagtttctgaaagtgagggagaagaaagaccagtggcagaagaagaaattttgttgagagaatttgaggaaaggcgatcccttagaaaaagatctgagctcagccaagatgctgagccagcaggcagtcaagaaacaaaagattctggcagccaggaggtgctgtctgaattgagagtactatctcagaaattgaaggaaaaccatcagtccaggaagcaaaaagcaagttcagaggggactattccccaggtccag

SEQ ID NO: 198488 - DNA, 3687 bp, Homo sapiens
  Payload ID: 19175
  Gene Name: UTP15, U3 small nucleolar ribonucleoprotein, homolog (S. cerevisiae)
  Uniprot ID: Q8TED0
  ENST ID: ENST00000296792
  CDS Start-End: 256-1812
gtacgtcatcttcgcgcgacgttcggttcgctgtgtgtgtcgccggctccttgagggtccatgtgatttttacgccagtgctgctgaactgtgcagggtagggagctggcacagtccgattaattgtccttgggtcgaggtgtctcgtcggaccctttggggctcagtggagaattaaggcagagtcactgtaattatttctaataccaattccaaaatagtgactcttggacaatagtgcaattatatggaattatggctggttataagcctgtagctattcagacatatcctatacttggtgaaaaaatcacccaagatacactgtactggaacaactataagacccctgttcagattaaggaatttggtgcagtttcaaaagtagacttttctcctcagcctccatataattatgctgtcacagcttcctcaagaattcacatttatggccgatactcccaagaacctataaaaaccttttctcgatttaaagacacagcatactgtgctacttttcgacaagatggtagattgcttgtggctggcagtgaagatggtggagttcaactttttgatataagtgggagggctcccctcaggcagtttgaaggccatacaaaagcagttcatacagtagattttacagctgacaaatatcacgtggtctctggggctgatgattatacagttaaattatgggatattccaaactccaaagaaattttgacatttaaagaacactctgattatgtgaggtgtggatgtgctagcaaacttaatccggatctctttataacaggatcatatgatcatactgtgaagatgtttgatgcacgaacgagtgagagtgttctctccgttgagcatgggcagccagtggagagtgtcctacttttcccctctggaggtcttctggtgtcagcaggaggtcgttatgttaaagtctgggacatgttaaaaggaggacaattgctagtatctttgaaaaatcatcacaaaaccgtgacatgtttatgtctaagcagctctggacagaggttactctctggctcactggataggaaggtgaaagtatacagcacaacttcctacaaagtagtccacagttttgattatgcagcttcaattttgagtcttgcccttgcacatgaagatgagacaatagttgtaggaatgaccaatggaatactgagtgttaaacatcggaaatctgaagcaaagaaggaatcacttcccagaagaagaaggcctgcatatcgaacctttattaaaggaaaaaattacatgaagcaacgggatgacattttgattaacaggccagcaaagaagcacctagaattgtatgacagggatctgaaacattttcggatctctaaggcactcgatagagttcttgatcccacttgtacaataaagacacccgagattacggtgtccatcataaaggagttaaatcgaagaggagtccttgcaaatgcgcttgcaggtcgggatgagaaggaaatcagtcatgttcttaattttttgataaggaatctttctcagccaagatttgcccctgttttaatcaatgctgctgaaataattattgatatatatctgcctgtaattggtcagtcccctgtagttgataaaaagtttttactacttcaaggacttgtagaaaaagagattgattaccaaagagaattgttagaaaccttggggatgatggatatgctttttgccaccatgagaaggaaggaaggcacttctgtgttggaacacacatctgatggatttccagagaataagaagatagaatcatagtgtctgctaaataagacatataagaactctgaagttggaatagatttgactgtattaaatgttggcgagagactctctttgatacattaaaaaaactgtttgcagaagcagttctgtggaagagactggaataattatggccggaaaacaagtacccgttttaagtaagacatggttttccatgtaatattttgaattatagcatcttcacctagaagatctcaattgtcttagtcacagagtaggtttatctgggatggatattaattttaatacaggagtgttctgtatcaacatttgggttggtattcagatgggaattcaaatatgaatcctctctggagagggtccaactgggaatcctgctaaaggagcaaagccttgtattacctctggaagacaacaaaaacaattggcaacaacaaaaagcctctttcttgactttaatcagtgcctttgggatttctaggcccttgcttagcttgcttcctgtctccttgatatctacacttgtcttagatcacatgccctgcttcagctggtaatgggactgcatcggttccaagtgtggcaagtaagttttcggctctgaagaactgacactagctagatttgtattcagagtgtgagagcaagctctacagatagaccttattggactacttttttttttttcttcatgcagcctttctaccaagttttcaccttgtttcaggtcagaggaatgatagaatttgtcatttttcttacaacagcctttcagactattcttcatatgtttcaagctaatcttgtagctaagctacctaatcctctgaaaactgttttctctgatttgtatttagattcctccccccattattcacaatcatattgtatttcggaaccccaatgcagagcagtttgctttgaaaaatagttgtttttaaaagtttaatgtaaataattattttttagaagttttttttttttttttaaagacagggtctcgctttatcgcccaggctggagtacagtgatgcaatctcagtccactgcaacctctgccctcccgggtttaagcagttctcctgcctcagcctcctgagtagctgggattacaggtgtgccccaccacgcctggctaatttttgtagttttagtagagacggggtttcaccttaccgggctggtctaaaactcctgacctcaagtgatctacctgcctctgcctcccgaagtgcttggattacaggtgtgagccactgtgtccagcctgtaactattatttttttataaagagagattcttattttcttggctttttgatgtatctgttcctgatagataatcattggctagtaactcctagtacactggtttcacagttgctacctctcctgcttttctctaattattacgccaactcaagtagttaaaaatcagtaagaaaaatgtcttgagctagaagaacccatagaggaagattttgtaatgcgaatctcctctcataattttagttctgtaaattcagggtttttttttgtttttttgttttttttaagccgaaaaaatgcttaatatgttccagtaagggtattaagtaaaaattaaataaacgtattaagtttaacatattaaattaatttaacatttagactaacattaacatttaaattaatatgttaagtgaatatacttaatatattctagtacaggtatgcttggaaatagggcgtttccttttcatgaattgatttcgtacagcacagtggcttataaggaaccagcagtgtttttccctgagtaattatgaacttagtcaagatcagaagctgggttttggggttgagaagagttcatttatttaaataaagtttctatttaaaaaccttt

SEQ ID NO: 198489 - DNA, 2057 bp, Homo sapiens
  Payload ID: 19175
  Gene Name: UTP15, U3 small nucleolar ribonucleoprotein, homolog (S. cerevisiae)
  ENST ID: ENST00000509005
  CDS Start-End: 1-1637
acgtcatcttcgcgcgacgttcggttcgctgtgtgtgtcgccggctccttgagggtccatgtgatttttacgccagtgctgctgaactgtgcagggtagggagctggcacagtccgattaattgtccttgggtcgaggtgtctcgtcggaccctttggggctcagtggagacccctgttcagattaaggaatttggtgcagtttcaaaagtagacttttctcctcagcctccatataattatgctgtcacagcttcctcaagaattcacatttatggccgatactcccaagaacctataaaaaccttttctcgatttaaagacacagcatactgtgctacttttcgacaagatggtagattgcttgtggctggcagtgaagatggtggagttcaactttttgatataagtgggagggctcccctcaggcagtttgaaggccatacaaaagcagttcatacagtagattttacagctgacaaatatcacgtggtctctggggctgatgattatacagttaaattatgggatattccaaactccaaagaaattttgacatttaaagaacactctgattatgtgaggtgtggatgtgctagcaaacttaatccggatctctttataacaggatcatatgatcatactgtgaagatgtttgatgcacgaacgagtgagagtgttctctccgttgagcatgggcagccagtggagagtgtcctacttttcccctctggaggtcttctggtgtcagcaggaggtcgttatgttaaagtctgggacatgttaaaaggaggacaattgctagtatctttgaaaaatcatcacaaaaccgtgacatgtttatgtctaagcagctctggacagaggttactctctggctcactggataggaaggtgaaagtatacagcacaacttcctacaaagtagtccacagttttgattatgcagcttcaattttgagtcttgcccttgcacatgaagatgagacaatagttgtaggaatgaccaatggaatactgagtgttaaacatcggaaatctgaagcaaagaaggaatcacttcccagaagaagaaggcctgcatatcgaacctttattaaaggaaaaaattacatgaagcaacgggatgacattttgattaacaggccagcaaagaagcacctagaattgtatgacagggatctgaaacattttcggatctctaaggcactcgatagagttcttgatcccacttgtacaataaagacacccgagattacggtgtccatcataaaggagttaaatcgaagaggagtccttgcaaatgcgcttgcaggtcgggatgagaaggaaatcagtcatgttcttaattttttgataaggaatctttctcagccaagatttgcccctgttttaatcaatgctgctgaaataattattgatatatatctgcctgtaattggtcagtcccctgtagttgataaaaagtttttactacttcaaggacttgtagaaaaagagattgattaccaaagagaattgttagaaaccttggggatgatggatatgctttttgccaccatgagaaggaaggaaggcacttctgtgttggaacacacatctgatggatttccagagaataagaagatagaatcatagtgtctgctaaataagacatataagaactctgaagttggaatagatttgactgtattaaatgttggcgagagactctctttgatacattaaaaaaactgtttgcagaagcagttctgtggaagagactggaataattatggccggaaaacaagtacccgttttaagtaagacatggttttccatgtaatattttgaattatagcatcttcacctagaagatctcaattgtcttagtcacagagtaggtttatctgggatggatattaattttaatacaggagtgttctgtatcaacatttgggttggtattcagatgggaattcaaatatgaatcctctctggagagggtccaactgggaatcctgctaaaggagcaaagccttgtattacctctggaagacaacaaaaacaattggcaac

SEQ ID NO: 198490 - DNA, 538 bp, Homo sapiens
  Payload ID: 19175
  Gene Name: UTP15, U3 small nucleolar ribonucleoprotein, homolog (S. cerevisiae)
  ENST ID: ENST00000508686
  CDS Start-End: 517-538
gcgcgacgttcggttcgctgtgtgtgtcgccggctccttgagggtccatgtgatttttacgccagtgctgctgaactgtgcagggtagggagctggcacagtccgattaattgtccttgggtcgaggtgtctcgtcggaccctttggggctcagtggaggtaggtgaaggcggctcccattgagggaagcccacactcacacccggccttcctgtgttaatctggcatgctcttctggggcttcccaggctatataggagagtggccaaattctttaaccggctcaagttcccctcaattaagcttcgacctaggttcttctctgcgattacaccctttcctgtccaccgttgttagttcccggagtaatcagcaactctccaaggcaatggacacatttccatctttgcctttgcttacgaggctccctcagaattaaggcagagtcactgtaattatttctaataccaattccaaaatagtgactcttggacaatagtgcaattatatggaattatggctggttataagcctgtag

SEQ ID NO: 198491 - DNA, 1828 bp, Homo sapiens
  Payload ID: 19175
  Gene Name: UTP15, U3 small nucleolar ribonucleoprotein, homolog (S. cerevisiae)
  Uniprot ID: Q8TED0
  ENST ID: ENST00000508491
  CDS Start-End: 224-1723
gtgtgtgtcgccggctccttgagggtccatgtgatttttacgccagtgctgctgaactgtgcagggtagggagctggcacagtccgattaattgtccttgggtcgaggtgtctcgtcggaccctttggggctcagtggagaattaaggcagagtcactgtaattatttctaataccaattccaaaatagtgactcttggacaatagtgcaattatatggaattatggctggttataagcctgtagctattcagacatatcctatacttggtgaaaaaatcacccaagatacactgtactggaacaactataagcctccatataattatgctgtcacagcttcctcaagaattcacatttatggccgatactcccaagaacctataaaaaccttttctcgatttaaagacacagcatactgtgctacttttcgacaagatggtagattgcttgtggctggcagtgaagatggtggagttcaactttttgatataagtgggagggctcccctcaggcagtttgaaggccatacaaaagcagttcatacagtagattttacagctgacaaatatcacgtggtctctggggctgatgattatacagttaaattatgggatattccaaactccaaagaaattttgacatttaaagaacactctgattatgtgaggtgtggatgtgctagcaaacttaatccggatctctttataacaggatcatatgatcatactgtgaagatgtttgatgcacgaacgagtgagagtgttctctccgttgagcatgggcagccagtggagagtgtcctacttttcccctctggaggtcttctggtgtcagcaggaggtcgttatgttaaagtctgggacatgttaaaaggaggacaattgctagtatctttgaaaaatcatcacaaaaccgtgacatgtttatgtctaagcagctctggacagaggttactctctggctcactggataggaaggtgaaagtatacagcacaacttcctacaaagtagtccacagttttgattatgcagcttcaattttgagtcttgcccttgcacatgaagatgagacaatagttgtaggaatgaccaatggaatactgagtgttaaacatcggaaatctgaagcaaagaaggaatcacttcccagaagaagaaggcctgcatatcgaacctttattaaaggaaaaaattacatgaagcaacgggatgacattttgattaacaggccagcaaagaagcacctagaattgtatgacagggatctgaaacattttcggatctctaaggcactcgatagagttcttgatcccacttgtacaataaagacacccgagattacggtgtccatcataaaggagttaaatcgaagaggagtccttgcaaatgcgcttgcaggtcgggatgagaaggaaatcagtcatgttcttaattttttgataaggaatctttctcagccaagatttgcccctgttttaatcaatgctgctgaaataattattgatatatatctgcctgtaattggtcagtcccctgtagttgataaaaagtttttactacttcaaggacttgtagaaaaagagattgattaccaaagagaattgttagaaaccttggggatgatggatatgctttttgccaccatgagaaggaaggaaggcacttctgtgttggaacacacatctgatggatttccagagaataagaagatagaatcatagtgtctgctaaataagacatataagaactctgaagttggaatagatttgactgtattaaatgttggcgagagactctctttgatacattaaaaaaactgtttgcag

SEQ ID NO: 198492 - DNA, 577 bp, Homo sapiens
  Payload ID: 19175
  Gene Name: UTP15, U3 small nucleolar ribonucleoprotein, homolog (S. cerevisiae)
  ENST ID: ENST00000513824
  CDS Start-End: 382-577
ttctttcgccttctggctaaaaaacgttccgcagcaatgcagctgaaactttcgggttttcttttttttgtccctctctccttttttttaatatttttgtttttgccgcctttacgctccgaggcccatcctgccggagtactacacagacagggtcatttcagttgacggttctgggtcaccagagcagaggaagccccaatttcgccctccggtcacacctcctactccagatcgccccgcccacctgacccgcctctgcgccgccgggctgcgtgagtctcatgagcgtgctctgaattaaggcagagtcactgtaattatttctaataccaattccaaaatagtgactcttggacaatagtgcaattatatggaattatggctggttataagcctgtagctattcagacatatcctatacttggtgaaaaaatcacccaagatacactgtactggaacaactataagacccctgttcagattaaggaatttggtgcagtttcaaaagtagacttttctcctcagcctccatataattatgctgtcacagcttcctcaagaattcacatttatg

SEQ ID NO: 198493 - DNA, 4922 bp, Homo sapiens
  Payload ID: 19175
  Gene Name: UTP15, U3 small nucleolar ribonucleoprotein, homolog (S. cerevisiae)
  Uniprot ID: Q8TED0
  ENST ID: ENST00000543251
  CDS Start-End: 653-1639
gtacgtcatcttcgcgcgacgttcggttcgctgtgtgtgtcgccggctccttgagggtccatgtgatttttacgccagtgctgctgaactgtgcagggtagggagctggcacagtccgattaattgtccttgggtcgaggtgtctcgtcggaccctttggggctcagtggagacccctgttcagattaaggaatttggtgcagtttcaaaagtagacttttctcctcagcctccatataattatgctgtcacagcttcctcaagaattcacatttatggccgatactcccaagaacctataaaaaccttttctcgatttaaagacacagcatactgtgctacttttcgacaagatggtagattgcttgtggctggcagtgaagatggtggagttcaactttttgatataagtgggagggctcccctcaggcagtttgaaggccatacaaaagcagttcatacagtagattttacagctgacaaatatcacgtggtctctggggctgatgattatacagttaaattatgggatattccaaactccaaagaaattttgacatttaaagaacactctgattatgtgaggtgtggatgtgctagcaaacttaatccggatctctttataacaggatcatatgatcatactgtgaagatgtttgatgcacgaacgagtgagagtgttctctccgttgagcatgggcagccagtggagagtgtcctacttttcccctctggaggtcttctggtgtcagcaggaggtcgttatgttaaagtctgggacatgttaaaaggaggacaattgctagtatctttgaaaaatcatcacaaaaccgtgacatgtttatgtctaagcagctctggacagaggttactctctggctcactggataggaaggtgaaagtatacagcacaacttcctacaaagtagtccacagttttgattatgcagcttcaattttgagtcttgcccttgcacatgaagatgagacaatagttgtaggaatgaccaatggaatactgagtgttaaacatcggaaatctgaagcaaagaaggaatcacttcccagaagaagaaggcctgcatatcgaacctttattaaaggaaaaaattacatgaagcaacgggatgacattttgattaacaggccagcaaagaagcacctagaattgtatgacagggatctgaaacattttcggatctctaaggcactcgatagagttcttgatcccacttgtacaataaagacacccgagattacggtgtccatcataaaggagttaaatcgaagaggagtccttgcaaatgcgcttgcaggtcgggatgagaaggaaatcagtcatgttcttaattttttgataaggaatctttctcagccaagatttgcccctgttttaatcaatgctgctgaaataattattgatatatatctgcctgtaattggtcagtcccctgtagttgataaaaagtttttactacttcaaggacttgtagaaaaagagattgattaccaaagagaattgttagaaaccttggggatgatggatatgctttttgccaccatgagaaggaaggaaggcacttctgtgttggaacacacatctgatggatttccagagaataagaagatagaatcatagtgtctgctaaataagacatataagaactctgaagttggaatagatttgactgtattaaatgttggcgagagactctctttgatacattaaaaaaactgtttgcagaagcagttctgtggaagagactggaataattatggccggaaaacaagtacccgttttaagtaagacatggttttccatgtaatattttgaattatagcatcttcacctagaagatctcaattgtcttagtcacagagtaggtttatctgggatggatattaattttaatacaggagtgttctgtatcaacatttgggttggtattcagatgggaattcaaatatgaatcctctctggagagggtccaactgggaatcctgctaaaggagcaaagccttgtattacctctggaagacaacaaaaacaattggcaacaacaaaaagcctctttcttgactttaatcagtgcctttgggatttctaggcccttgcttagcttgcttcctgtctccttgatatctacacttgtcttagatcacatgccctgcttcagctggtaatgggactgcatcggttccaagtgtggcaagtaagttttcggctctgaagaactgacactagctagatttgtattcagagtgtgagagcaagctctacagatagaccttattggactacttttttttttttcttcatgcagcctttctaccaagttttcaccttgtttcaggtcagaggaatgatagaatttgtcatttttcttacaacagcctttcagactattcttcatatgtttcaagctaatcttgtagctaagctacctaatcctctgaaaactgttttctctgatttgtatttagattcctccccccattattcacaatcatattgtatttcggaaccccaatgcagagcagtttgctttgaaaaatagttgtttttaaaagtttaatgtaaataattattttttagaagttttttttttttttttaaagacagggtctcgctttatcgcccaggctggagtacagtgatgcaatctcagtccactgcaacctctgccctcccgggtttaagcagttctcctgcctcagcctcctgagtagctgggattacaggtgtgccccaccacgcctggctaatttttgtagttttagtagagacggggtttcaccttaccgggctggtctaaaactcctgacctcaagtgatctacctgcctctgcctcccgaagtgcttggattacaggtgtgagccactgtgtccagcctgtaactattatttttttataaagagagattcttattttcttggctttttgatgtatctgttcctgatagataatcattggctagtaactcctagtacactggtttcacagttgctacctctcctgcttttctctaattattacgccaactcaagtagttaaaaatcagtaagaaaaatgtcttgagctagaagaacccatagaggaagattttgtaatgcgaatctcctctcataattttagttctgtaaattcagggtttttttttgtttttttgttttttttaagccgaaaaaatgcttaatatgttccagtaagggtattaagtaaaaattaaataaacgtattaagtttaacatattaaattaatttaacatttagactaacattaacatttaaattaatatgttaagtgaatatacttaatatattctagtacaggtatgcttggaaatagggcgtttccttttcatgaattgatttcgtacagcacagtggcttataaggaaccagcagtgtttttccctgagtaattatgaacttagtcaagatcagaagctgggttttggggttgagaagagttcatttatttaaataaagtttctatttaaaaacctttttaaaaagttaacatcataaatattctgataatttgcatagtagtaaaaattagaagttgaaattctacctaaagctgtagttgccgtcaattgtgtaacatgtgacaaaggttttcccatatgtcatttcatttgattctcaccacaaccatccaaggttgatgttattctcatttaacattgagttaacgaaagtagttgattcactctcgaagtccctgagtgtgagctcttcatcctagcactgtgaagtggtttgcctgctggggcctaaactcctcattccctttaacaaagcttcactgagtgctgcagttctcaaaatatgtaacagttaacacatttttcaaacaggttaggaagcaattcccatagccatcaatacttaaattcaggagtacttttttgtttgtttgttttgttttgtttttagagacaaggtctctttctgttgtccaggctggagtgtagtggtgtgatcatagctcactgcagcttctgtctcctaggctgaagctatcctcccacctcagcctcctgagaagctggggctacagggatgagccaccatgcccagctaattttttattttgattttttgagataagaggtctcaccatgttgcccaggcctgaggcaatctcctggtttcaagcaatcttcccacctcagcctccttaatgactgggattaaaggcatgagccactgcgcccagcaggaatggttattatattcattgagataaactgtagtatttgctgtttgaagtatttaaacataattggcatattacaatatgtgacactggccttaagattctaatttaaaatgcttaacagacttttagacttatgagtttcagttgaaaggtattttaaaatgttactaagtctgcaaaagtactgaaatgtttcagagaacttggaaagtcaccgtatgtttaatttattatgtttatgagatttaagcacttgggaaggtttatgctaatggggtcaagcatttgcaatgctgcttaaaagaatcatttttttaaatgtataaatgctattaagttgtttaaaggaatttgaattgtaaatgggattgttaaaacaaatttagtctgttcaactcaatgagggcatttcattttctaggaacaaaataccctcttagacattaaaaagccgcatgcctgttccctcagctatagttaactggaccatggtggtacaactgactcaacccttctctaagcagggatttgtaattgggatttataatgaaattcctgatctgggaaaatgggaggctgggaatgctatgtctaggtcatcagcggagaaagttggtttgtagagaatgaacaagaatgaaacctaagtgcaaagaaaataaagattatcctgctttaatagttcaga

SEQ ID NO: 198494 - DNA, 1894 bp, Homo sapiens
  Payload ID: 19176
  Gene Name: UTP18 small subunit (SSU) processome component
  Uniprot ID: Q9Y5J1
  ENST ID: ENST00000225298
  CDS Start-End: 58-1728
gggcgcatgcgcagcgaggttccacgtgagcgcctgcgtttctcctcaaacctaacgatgccgccggagcggaggagacgaatgaaactggaccggagaaccggagcgaagccgaagcggaagcccggaatgaggccggactggaaagccggagcggggccaggcgggcctccccaaaagcctgccccttcatcccagcggaaaccgccggcccggccgagcgcggcggccgctgcgattgcagtcgcggcggcggaggaagagagacggctccggcagcggaaccgcctgaggctggaggaggacaaaccggccgtggagcggtgcttggaggagctggtcttcggcgacgtcgagaacgacgaggacgcgttgctgcggcgtctgcgaggcccgagggttcaagaacatgaagactcgggtgactcagaagtggagaatgaagcaaaaggtaattttccacctcaaaagaagccagtttgggtggatgaagaagatgaagatgaggaaatggttgacatgatgaacaatcggtttcggaaggatatgatgaaaaatgctagtgaaagtaaactttcgaaagacaaccttaaaaagagacttaaagaagaattccaacatgccatgggaggagtacctgcctgggcagagactactaagcggaaaacatcttcagatgatgaaagtgaagaggatgaagatgatttgttgcaaaggactgggaatttcatatccacatcaacttctcttccaagaggaatcttgaagatgaagaactgccagcatgcgaatgctgaacgtcctactgttgctcggatctcatctgtgcagttccatcccggtgcacagattgtgatggttgctggattagataatgctgtatcactatttcaggttgatgggaaaacaaatcctaaaattcagagcatctatttggaaaggtttccaatctttaaggcttgttttagtgctaatggggaagaagttttagccacgagtacccacagcaaggttctttatgtctatgacatgctggctggaaagttaattcctgtgcatcaagtgagaggtttgaaagagaagatagtgaggagctttgaagtctccccagatgggtccttcttgctcataaatggcattgctggatatttgcatttgctagcaatgaagaccaaagaactgattggaagcatgaaaattaatggaagggttgcagcatccacattctcttcagatagtaagaaagtatacgcctcttcgggggatggagaagtttatgtttgggatgtgaactcaaggaagtgccttaacagatttgttgatgaaggcagtttatatggattaagcattgccacatctaggaatggacagtatgttgcttgtggttctaattgtggagtggtaaatatatacaatcaagattcttgtctccaagaaacaaacccaaagccaataaaagctataatgaacttggttacaggtgttacttctctgaccttcaatcctactacagaaatcttggcaattgcttcagaaaaaatgaaagaagcagtcagattggttcatcttccttcctgtacagtattttcaaacttcccagtcattaaaaataagaatatttctcatgttcataccatggatttttctccgagaagtggatactttgccttggggaatgaaaagggcaaggccctgatgtataggttgcaccattactcagacttctaaagagactatttgaagtccagttgagtcacaagagaagcctgtcttgatatatcatctcagaaactttcctgaatatgtgataatatatggaaaatgatttatagatccagctgtgcttaagagccagtaatgtcttaataaacatgtggcagcttttgtttgaaaa

SEQ ID NO: 198495 - DNA, 592 bp, Homo sapiens
  Payload ID: 19176
  Gene Name: UTP18 small subunit (SSU) processome component
  ENST ID: ENST00000508506
  CDS Start-End: 1-130
gaagaactgccagcatgcgaatgctgaacgtcctactgttgctcggatctcatctgtgcagttccatcccggtgcacagattgtgatggttgctggattagataatgctgtatcactatttcaggtttgaaagagaagatagtgaggagctttgaagtctccccagatgggtccttcttgctcataaatggcattgctggatatttgcatttgctagcaatgaagaccaaagaactgattggaagcatgaaaattaatggaagggttgcagcatccacattctcttcagatagtaagaaagtatacgcctcttcgggggatggagaagtttatgtttgggatgtgaactcaaggaagtgccttaacagatttgttgatgaaggcagtttatatggattaagcattgccacatctaggaatggacagtatgttgcttgtggttctaattgtggagtggtaaatatatacaatcaagattcttgtctccaagaaacaaacccaaagccaataaaagctataatgaacttggttacaggtgttacttctctgaccttcaatcctactacagaaatcttggcaattgcttcagaaa

SEQ ID NO: 198496 - DNA, 577 bp, Homo sapiens
  Payload ID: 19176
  Gene Name: UTP18 small subunit (SSU) processome component
  ENST ID: ENST00000583725
  CDS Start-End: 1-534
atctatttggaaaggtttccaatctttaaggcttgttttagtgctaatggggaagaagttttagccacgagtacccacagcaaggttctttatgtctatgacatgctggctggaaagttaattcctgtgcatcaagtgagaggtttgaaagagaagatagtgaggagctttgaagtctccccagatgggtccttcttgctcataaatggcattgctggatatttgcatttgctagcaatgaagaccaaagaactgattggaagcatgaaaattaatggaagggttgcagcatccacattctcttcagatagtaagaaagtatacgcctcttcgggggatggagaagtttatgtttgggatgtgaactcaaggaagtgccttaacagatttgttgatgaaggcagtttatatggattaagcattgccacatctaggaatggacagtatgttgcttgtgggttaaaactggggaaactgcttgtatatatatccctaccaccgtttgcaaattggagtttgggaggaaagttctaattgtggagtggtaaatatatacaatcaagattcttgtctccaa

SEQ ID NO: 198497 - DNA, 464 bp, Homo sapiens
  Payload ID: 19176
  Gene Name: UTP18 small subunit (SSU) processome component
  ENST ID: ENST00000582832
  CDS Start-End: 1-348
gatgtgaactcaaggaagtgccttaacagatttgttgatgaaggcagtttatatggattaagcattgccacatctaggaatggacagtatgttgcttgtggttctaattgtggagtggtaaatatatacaatcaagattcttgtctccaagaaacaaacccaaagccaataaaagctataatgaacttggttacaggtgttacttctctgaccttcaatcctactacagaaatcttggcaattgcttcagaaaaaatgaaagaagcagtcagattggttgcaccattactcagacttctaaagagactatttgaagtccagttgagtcacaagagaagcctgtcttgatatatcatctcagaaactttcctgaatatgtgataatatatggaaaatgatttatagatccagctgtgcttaagagccagtaatgtcttaataaacatgtggcagcttttgtttga

SEQ ID NO: 198498 - DNA, 664 bp, Homo sapiens
  Payload ID: 19176
  Gene Name: UTP18 small subunit (SSU) processome component
  ENST ID: ENST00000583205
  CDS Start-End: 1-432
aagatagtgaggagctttgaagtctccccagatgggtccttcttgctcataaatggcattgctggatatttgcatttgctagcaatgaagaccaaagaactgattggaagcatgaaaattaatggaagggttgcagcatccacattctcttcagatagtaagaaagtatacgcctcttcgggggatggagaagtttatgtttgggatgtgaactcaaggaagtgccttaacagatttgttgatgaaggcagtttatatggattaagcattgccacatctaggaatggacagtatgttgcttgtgggtgttacttctctgaccttcaatcctactacagaaatcttggcaattgcttcagaaaaaatgaaagaagcagtcagattggttcatcttccttcctgtacagtattttcaaacttcccagtcattaaaaataagaatatttctcatgttcataccatggatttttctccgagaagtggatactttgccttggggaatgaaaagggcaaggccctgatgtataggttgcaccattactcagacttctaaagagactatttgaagtccagttgagtcacaagagaagcctgtcttgatatatcatctcagaaactttcctgaatatgtgataatatatggaaaatgatttatagatccagc

SEQ ID NO: 198499 - DNA, 567 bp, Homo sapiens
  Payload ID: 19176
  Gene Name: UTP18 small subunit (SSU) processome component
  ENST ID: ENST00000579261
  CDS Start-End: 1-371
cagatagtaagaaagtatacgcctcttcgggggatggagaagtttatgtttgggatgtgaactcaaggaagtgccttaacagatttgttgatgaaggcagtttatatggattaagcattgccacatctaggaatggacagtatgttgcttgtggttctaattgtggagtggtaaatatatacaatcaagattcttgtctccaagaaacaaacccaaagccaataaaagctataatgaacttggttacaggtgttacttctctgaccttcaatcctactacagaaatcttggcaattgcttcagaaaaaatgaaagaagcagtcagattggcctgttgtcttaacagaacggaggcaattctcgggttttgaaagttgcaccattactcagacttctaaagagactatttgaagtccagttgagtcacaagagaagcctgtcttgatatatcatctcagaaactttcctgaatatgtgataatatatggaaaatgatttatagatccagctgtgcttaagagccagtaatgtcttaataaacatgtggcagcttttgtttgaaaataa

SEQ ID NO: 198500 - DNA, 9025 bp, Homo sapiens
  Payload ID: 19177
  Gene Name: UTP20 small subunit (SSU) processome component
  Uniprot ID: O75691
  ENST ID: ENST00000261637
  CDS Start-End: 175-8532
aggctcctccttgtctccaacatggcggcgcccaggggctcaagccgcacgtgagaaagtctgggcatctgggaatcggagagtatagcctgtgagccgctttcccctccttactgtcggttgcatcccttcgacactcccgaggccgtcgcgggccactggccctctgcagccatgaagacaaagcccgtttcccacaagaccgagaacacctaccggtttcttacatttgctgaacgactggggaatgttaatattgatattattcaccggattgatagaactgcaagctatgaggaggaggttgaaacctacttttttgagggtctgctgaaatggagagaattaaacctcacagaacacttcggaaaattttacaaagaagttattgacaaatgccaatcattcaatcagttggtgtatcaccaaaacgagatagttcagagtttgaagactcacctgcaagttaagaacagttttgcctatcaaccccttttggatttggttgtacagttggcacgagatctgcagatggatttctacccacactttccagagttttttttgactatcacctcgatcctggagactcaggacacagagttgttagaatgggctttcacctcgttatcatatctttataagtacctgtggagactgatggtgaaggacatgtccagtatatacagcatgtacagcacactcctggctcataaaaaactacatataagaaattttgctgctgaaagttttacttttttgatgagaaaggtctctgataaaaacgcacttttcaatttaatgtttcttgatcttgataaacatccagaaaaagttgaaggtgttggacagttgctctttgaaatgtgcaaaggagttagaaatatgtttcactcctgtacaggccaggcagtgaagctaattttgcgaaagctaggaccagtcactgaaacagaaactcaactaccatggatgttaattggagaaacactcaaaaacatggtcaaatccactgtatcctacatctccaaggaacattttggtacattttttgaatgtttgcaagaatcgctcttggatctacacacaaaagtaacaaaaactaactgttgtgaaagttctgaacagattaaaaggttgttggaaacataccttatacttgtaaaacatggaagtgggacaaagatacccacgcctgctgatgtctgtaaggtgttatctcaaacactgcaagtagccagtctctccacatcttgctgggagaccctcttggatgtaatttctgctttgatcctgggtgaaaatgtttccttgccggagaccctcatcaaagaaaccatagaaaaaatatttgagagcagatttgaaaaacgtttaattttcagtttttctgaagtcatgtttgccatgaagcagtttgagcagctttttctaccaagctttctgtcatatattgtgaattgcttcttaattgatgatgctgtagtcaaagatgaagctctggccattctggccaagctcattctgaacaaagcagcacctcccactgctggctcgatggcaattgaaaagtaccctctggttttctcaccgcagatggtgggattctatataaagcagaagaagactagatccaagggaagaaacgaacagtttccagtattggaccatcttttatctataattaagttacccccaaataaagatactacttacctttcacaatcttgggcagccctcgtggtgttacctcatattagacctcttgagaaagagaaggtgataccactcgtcaccggcttcatagaggcactcttcatgactgttgacaaaggaagctttgggaaaggaaacttatttgttctttgtcaagctgtaaatactctactaagtttggaagaatcttctgaacttcttcatttggttcctgtggaacgtgtgaagaatttagtattaacctttcccctggagccatctgtgttgctgttgactgatctctattatcagagattagccttgtgtggctgcaaagggccactttcccaggaggctttaatggaattatttcccaagttacaagcaaacatttcaactggtgtatccaagattcggcttttgacaataaggatcctaaaccattttgatgtccagcttccagaatcaatggaggatgatgggctctcagagcggcagtctgtctttgctatattacgccaggcagaacttgttccagcaactgtgaatgattatagagagaagcttcttcatttgagaaaactaagacatgatgtggtacagactgctgtccctgatgggccgttacaggaggtgccgcttcgttatttgttaggcatgctatatattaatttcagtgcactctgggatcctgttattgaactcataagttctcatgcacacgaaatggaaaataagcaattttggaaagtctactatgagcatctagaaaaagcagctacgcatgctgagaaggaactacagaatgatatgacagatgagaagtccgttggagatgaaagttgggagcagacccaggaaggagatgttggagctctttatcatgagcagttagcattgaaaactgactgtcaggaaagacttgaccacaccaacttcagattcctgctctggagagctctgaccaaattcccagaaagagtagagccacggtccagggagctttccccgcttttcttgagatttatcaacaatgagtattacccagcagatctgcaagttgctccaacccaggatctacggagaaaaggcaaagggatggtggcagaggaaatcgaagaggaacctgccgcaggagatgatgaagagttggaggaagaggcagtgccccaagatgaatcctcacagaagaaaaagacgaggagagctgcagcaaagcaattaattgctcatttgcaagttttctctaaattttcaaatccacgggccttatatctggaatccaaactatatgagttatatcttcagttgttgctacaccaagatcaaatggtgcaaaaaataaccttggattgcataatgacatataaacatcctcatgtcctcccttacagggaaaacttacaaaggttgcttgaagacagaagctttaaggaagagatagtgcattttagcatttcagaagataatgctgtagtgaaaacagcccaccgagcagatctatttcctattctgatgagaattttgtatgggcgaatgaagaataagactgggagtaaaactcaggggaaatctgcttcaggcacccgcatggccattgtcctgcggttcctggccgggacccaacctgaggagatccagatattcttagacctgctgtttgaacctgtgaggcatttcaagaatggagagtgccattctgcagtcattcaagcagtagaagacttggatttgtctaaagttcttcctttaggtcgtcagcacggtatcttaaacagccttgagatagtattgaaaaacattagtcatctgatcagcgcatacctgccgaagattttgcagatactgctctgtatgacagcaaccgtatcacacatccttgaccaacgagaaaagatacagctgagatttattaatccattgaaaaatttaagacgtcttggaatcaaaatggtaactgatatctttttggactgggaatcatatcagtttagaacagaagaaattgatgctgtgtttcatggtgcagtttggccccagatcagcaggcttggatctgagagtcaatattctcctactcctctgctgaaactgatcagtatctggagcagaaacgcaagatatttccctttgctggctaaacagaagcctgggcacccagaatgtgatatcctgaccaatgtttttgcaattctctcagcgaagaatctttctgatgccacagccagtattgtaatggacatagttgatgaccttcttaaccttccagatttcgagcctacagaaacagttttgaacttgctggtaactggatgtgtataccctggcatagcagaaaacatcggtgagtctatcacaataggaggaagattaattctacctcatgtacctgcaattcttcagtatctcagcaaaaccacaataagcgcagaaaaggtgaaaaagaaaaagaatagagcacaagtcagtaaagagcttggcattctttcaaagatcagcaagtttatgaaagacaaagaacaaagttctgtactcattacgcttctccttccattcctccaccgtggcaatattgctgaggatacagaggttgatattctggtgacagtacaaaacttgttaaagcattgtgtggaccctacaagcttcctcaagcctatagcaaaacttttctcagttattaagaacaaattgtcaagaaaattgctttgtacggtttttgagactctttctgattttgagagtgggttaaaatatattactgatgttgtcaagcttaacgccttcgatcaaagacatcttgatgatatcaacttcgacgttcgctttgagactttccagaccatcacctcttacattaaagaaatgcaaattgtggatgttaactacctaattccagttatgcataattgtttctataatctagagttaggagatatgagtttaagtgataatgccagcatgtgcctgatgagtatcatcaaaaagctagctgccttgaatgtcacagagaaagactatagagaaatcatccaccgttcactcctggagaaattgagaaaaggtctgaagagccagacagagagtattcagcaggattataccacaatactttcctgtttaattcaaacctttccaaaccaactggaattcaaagacttggtacaacttactcattaccatgacccagaaatggacttctttgagaacatgaagcacattcagatccacagaagagcaagagccttgaagaaacttgcaaaacaactaatggaaggcaaagttgttctgtcttctaaatctcttcagaattacatcatgccttatgccatgactccaatttttgatgagaaaatgctcaagcatgaaaatataaccactgctgccacagagattattggagccatttgcaaacatctctcttggtcagcgtatatgtattacttgaaacatttcattcatgtcttacaaacgggacagatcaatcaaaaactgggtgtcagtttgctagtaatagtgttagaagcattccactttgaccacaaaactcttgaagaacaaatgggaaaaattgagaatgaagaaaacgcaattgaagcaattgagttaccagagcctgaggccatggaattagagcgtgtggatgaggaagagaaggaatatacatgcaagagtttgtcagacaacggacaaccgggaacccctgatccagctgactctggaggaacatcagctaaagaatccgagtgtatcacaaagcctgtctctttccttcctcaaaacaaggaagaaatagagagaacaattaaaaatatccaaggaaccataaccggggatattctccccaggctacataaatgccttgcatctacgactaaaagggaagaagaacacaagcttgtcaagtcaaaggttgtgaatgatgaggaagtcgttcgagttccattagcttttgccatggttaaactaatgcagtcccttccacaagaagttatggaagctaatctgccaagtattttgctgaaagtgtgtgccctactcaagaacagagcccaagaaatcagagacattgcacgcagcactcttgcgaaaataatagaggatcttggtgtgcacttcctcctatatgttttaaaagaattacagactactcttgtccgtggataccaggtccatgtgctgactttcaccgttcacatgctgctgcaaggcctcaccaataagctgcaggtcggagatttggactcttgtttagatataatgattgagatttttaaccatgagttgtttggtgctgttgctgaagagaaggaagtaaagcagatcctctccaaagtcatggaagcacgaagaagcaaaagttacgactcttatgaaatcctcggcaagtttgtaggaaaagatcaggttacaaaactcatccttccattaaaagagatcttacaaaataccacgagtttgaaactggcccggaaagttcatgaaactttacgccgaatcacagtgggattaattgtaaatcaggaaatgacagctgaatccattctattactcagttatggtttgatcagtgaaaatcttcccctgttaacagagaaagaaaaaaatccagtagccccagcaccagatccacgtctaccaccccagagctgccttctgcttcccccaactccagttcgaggtggacagaaagctgttgtgagcaggaaaaccaacatgcacatatttattgagtccgggcttcggctgctgcatctgagtctgaagacttccaagatcaagtcttcaggtgaatgtgtcctggaaatgctggatccttttgtgtctctcctcatagactgcctgggctccatggatgtgaaggtgatcacaggtgctttacagtgcctcatctgggtcttgaggttcccgctaccttccatagaaacaaaagcagagcagctgacaaaacacctcttccttctgctgaaggactatgcaaagctcggggccgccaggggccagaacttccaccttgtggtcaattgtttcaagtgtgtgaccatacttgtcaagaaagtcaagtcttaccagataactgaaaaacagctccaagttctactggcctatgctgaggaggacatttatgatacttcaagacaagccactgcctttggtcttctgaaggcaattttatcaagaaagctgttggtcccagaaatcgatgaggtcatgcggaaagtatccaagttggcagtctctgcacaaagcgaacctgccagggtccagtgtagacaggtttttctgaaatatattcttgactatcccctgggtgacaaattgagaccaaacttggaattcatgctcgctcaactgaattacgaacatgagaccgggagagagtccaccttggaaatgatcgcctatctctttgacacgttccctcaggggctgctccatgagaactgcggaatgttctttatccctctttgtctaatgacgatcaatgatgactctgccacgtgcaaaaagatggcatccatgacaatcaagtccctacttggtaaaatcagcctcgagaaaaaagattggctgtttgatatggttaccacttggtttggagcaaaaaagcgcttaaatagacaacttgctgccctgatctgtggcttgtttgtggaaagtgaaggagttgattttgagaaaagacttggaactgtccttcctgtgattgaaaaggaaattgatcctgaaaactttaaagatatcatggaagaaactgaagaaaaagctgcagatcgccttctgtttagttttcttacactgataactaaacttatcaaggaatgtaatattattcagtttaccaaacccgctgagactttgagtaaaatctggagtcatgtgcattctcacctgagacatccacacaactgggtgtggctcacagcagcccagatttttggattactctttgcctcttgccagccagaggagcttattcaaaaatggaataccaaaaagaccaaaaaacacctcccagaacctgtagcaatcaagttcctagccagtgaccttgaccaaaagatgaaaagtatctctctcgcctcttgccatcaattgcattccaaattcttggatcagtctctaggagaacaggttgttaagaatttgttgttcgcagccaaagtcttgtatttactggaactttattgtgaggataagcaaagtaagataaaagaagacctggaagaacaagaagctttagaagatggtgtggcctgtgcagatgagaaggcggagtctgacggagaagagaaggaagaggtgaaggaagagctcggcaggccggccacgctgctgtggttgatccagaagctgtcccggattgcaaaactggaagctgcttattcgccgagaaaccccttaaagagaacatgcatctttaagttcctcggcgccgtagcaatggatcttgggatagacaaggtaaagccgtatctcccaatgatcatagctcctttgtttcgggaactcaacagcacctattcagagcaagatcctttgctgaagaatctatcccaggaaatcatagaattactcaaaaagctggttgggcttgagagcttctcattagcctttgcctctgtacagaaacaggctaatgagaaaagggcactccggaaaaagaggaaggccctggagtttgtaactaatcctgatattgctgccaagaaaaaaatgaagaaacacaaaaataaaagtgaagcaaagaagagaaagatagagttcctgcgtccaggatataaggccaagagacaaaaaagccatagcctgaaagatttagcaatggtggagtaatgtctccctgtgctgatacaagcatgaactttctggaatattctgctagtctgaaattacagtaggttgtctggggtaggggggaggcgtttttttttttttttgagacaaggtctcactctgtcacccaaggtggagtgcagtgacgacatcacagctcactgcagcctcaacctgggttcaagtgatcctctcacctcagcctcccaagtagttgtgcctcctaggcacacaacactatgcccggcaaattttttgtattttgtattttttgtagaaacaggatttcgccatgttggccaggctggtctcgaacacctgggctcaactgatccgcctgcctcggcctcccaaagtgctgggattacaggtgtgagccaccctgctcaaccaggttttattatttaagttagttaaactttggatagattgtataatatatagtttaatgtaatcatgctcatattttttaaataaataaaacactatacta

SEQ ID NO: 198501 - DNA, 3699 bp, Homo sapiens
  Payload ID: 19178
  Gene Name: UTP23, small subunit (SSU) processome component, homolog (yeast)
  Uniprot ID: Q9BRU9
  ENST ID: ENST00000309822
  CDS Start-End: 102-851
gcttcatttccgggtgaaactggcattgagggtactggggcgtgcgtgaggcgtttactgatgcttcctggtccggtggcctcggtcccggtaagccaggcatgaagatcacaaggcagaaacatgccaagaagcatcttggcttcttccgcaacaacttcggagtccgcgagccgtaccagatcctgctggacggcaccttctgtcaggcggcgctgcggggccgcatccagctgcgggagcagctgccccgctacctcatgggggagacgcagctgtgcaccacaagatgtgtgttaaaagagctagaaacattgggaaaggacttatatggggcaaaactgattgcacaaaaatgccaagttcgaaattgtcctcatttcaagaatgcagtgagtggatcagaatgtctgctttccatggttgaagagggaaatcctcatcattattttgtggcaacacaggatcagaatttgtctgtgaaagtaaaaaagaagcctggagttcctctcatgtttattattcagaacactatggttttggacaaaccttctcccaaaacaattgcctttgtaaaagcagtggagtcaggtcagcttgtctcagtgcatgagaaagaaagtatcaaacatctcaaagaggaacagggtttagtgaaaaacactgaacagagtagaagaaaaaagcgcaagaaaataagtggtcccaatcctcttagttgtttgaagaaaaagaaaaaggcaccggacacacaatcatctgcttctgaaaagaaaagaaaaagaaaaagaattcggaacagatctaacccaaaagtactttctgagaagcagaatgcagaaggagaatgaatcctttggatactttcaaggacattcaaatgtgaaaatgaattttttacaactagaagtatttataataaaagaccaaacttatttttgtaaatgaacccatatgctttagctaaaattaattataaaataaaaacagtgaccagtctagccagcatggcaaaaccccatctctactaaaatacaaaaattagctgggcatgatggtgcacagttgtaattccagctactcaggaggctgaggcatgagaatcgcttgaacctgggaggcagagattgcagtgagcccagttcgtgtcacttcactccagcctgggcaacagagtgagaacatgtctcaaaaaaaaaataaaaacagtgaatgggtgtaggtgtgatggaattcactttacttactaaatggtttcgggaggttgtttctccaggtaaaattgtcgcctctctggtcccattcccaccttcaaacattatatgcaaacagttttaaaaaatcttacagttctaaaaggcttgtgacaaaaaaagaggcagtccctctttcacattgacagaagaaacttcctctttcaattctagtagttgaagaatttatatttccaaattgtatgattataccgctactttttgatacatcaattatttattgacttcctactagaaagagtgaaattttgcccatttatactgcaccatttttccagtatatgaatattttactctttgtacatcagaaactcagtattttcattattatgactagagtttttttgtttgtttgtttgagttctacttgtccaataaggatgatgattttcttttagatgtaaatgttaacttcaatagcaagaattcaaaaataatattctctttgagattgactgtgaatgttattgaaaagtgtctaaattagtctgaggatcaatgagggtcaattcagttaggaattgaataatgaaacgtgtctctctgaattcccccggcaattgttttagtcatttatcaggccaaaattaaaatgtttttgtactacaagatggaagtataaaattattggacaagtgaaatcgtatcagtagttcctgactgacagcttctggagccacactagagcagtgattctcagtctaacattaggttatcatgatgacgtatgagtaaattcttaatggttaaatgtgagacagttcacatttattcccatagaaatgtcattctcatttgaattcagagatacttctttgctggaagttggaattatagctttacaccaaggagtgacacgtagactaatctggcaagccaaggtagtgtttggattgcaatgtcatgattctattttaaattcttgatggtagaaacatttttaataaggaaggtaaaaatactggaaaaaagtgaatagtgtaggttttgtgaggaaagttaacatttgtcaatgacaagcattaaggccacctaataaagtgtagacaaagtgataaatgaaatatacactgatgatactcatttcaatatgctaaaatacattaaatttaggtattactcttaatctatttctacttagtcagtgctatctgattacctgttaatagcatctgaactggagagctggaaaaatccacttttttatgaagcagtaattatagaagtactaaaaattacaatgtattagtaagtttaatattttgacagggcatggtggctcacacctgtaatcccagcactttgggaggccgaggctggcagatcacaaaattaagagatcaagaccatcctggccaacatggtgaaaccctgtctgtactaaaaatacaaaaattagctgggtgtggtggtgtgcgcctgtagtcccagctactcgggaggctgaggcaggagaatcgcttgaacccaggaggcggaggttgcagtgagccaagatcatgccactgcactccagcctggtgagagagtgaaaccccgtctcaaaaataaataaataaataagtttactattttaaaactggttaatcatttatgtattttgccagtaaaattactttaaaagatattttaacaaaagtctcatatccttgtacttcagtttttttgtgtgtgaatactatccctataccactacccctaaaacctcagaattatttgctttattttttcatacaacttggggaagggaaccatgggagtatgcacatgggatcataatccattctgtggtttggaaaaagaaaatgttaacctctgctttagagggtagctactagctttgttggggataaaagtgtaatacatgcacttttgaactctgaaagtttgccaatctgaaaaggggtgtttctgaagaccactatcttttacgaacacttaaaaataagtgtttgcagttgtgtatgggcacgatactgtattctttacatttttatggccctacagctacttcttatccctgcaagtatataaattaaaaccaagtcactttagaacagctttgaaactagagtttcaaaggtaaaaggatctcatgtttctgaatctgcgtaaagcaagatggctgtgatttgacaggtttaattgctagttttttataggtggatagaaatgaatagtttggagtctttaaaatgttttaaaaaatgtttgcttactatctatatatatgacattattcccaattagttttatatctccaagatatatatatgtatataggtatatacacatatgtatatatacatagtctatatattctatataagaatatattccaataagaatatattccatacgggaatatattagtcattgatgtattttgccggtaaaattaaaagatattttaacaaaagtctca

SEQ ID NO: 198502 - DNA, 796 bp, Homo sapiens
  Payload ID: 19178
  Gene Name: UTP23, small subunit (SSU) processome component, homolog (yeast)
  ENST ID: ENST00000517820
  CDS Start-End: 33-350
ggtccggtggcctcggtcccggtaagccaggcatgaagatcacaaggcagaaacatgccaagaagcatcttggcttcttccgcaacaacttcggagtccgcgagccgtaccagatcctgctggacggcaccttctgtcaggcggcgctgcggggccgcatccagctgcgggagcagctgccccgctacctcatgggggagacgcagctgtgcaccacaagggaacaatggcaaaagcctttgatgaagcattttcctctgagacaacagcggcaatacctgaagaccatgaagcatctgctgagtccttttgttccatcttctttcttcctgatcttgatcgccccctgatgcatcttcatcctgaataaaaatgacccccaaaaagctgacaaaacaagtccaatgaaaaatgaagtatttctacatctcctaaaagctcctaaattaccttgagattgtgtattttgaactaatagaaaactgtacttaatgctgctgagcaatcacttagcatttagagtacaaactgaagagtctgtttttcttaaattacaaggcaaagtcctctatgtgcaagcaaacatttggctgaaagtatgcttctatattgcgctataaggatgctatctacacacactatgtggtctgtggactgctgctgatcatggaggttttggttactggcccctcttaaagaacttcaggatataaatcaactgtaccactaaatatactgtttatttcaactaaatatacatacataaatattgcaacatgattttctagatgactaa

SEQ ID NO: 198503 - DNA, 833 bp, Homo sapiens
  Payload ID: 19178
  Gene Name: UTP23, small subunit (SSU) processome component, homolog (yeast)
  ENST ID: ENST00000521703
  CDS Start-End: 100-342
ttcatttccgggtgaaactggcattgagggtactggggcgtgcgtgaggcgtttactgatgcttcctggtccggtggcctcggtcccggtaagccaggcatgaagatcacaaggcagaaacatgccaagaagcatcttggcttcttccgcaacaacttcggagtccgcgagccgtaccagatcctgctggacggcaccttctgtcaggcggcgctgcggggccgcatccagctgcgggagcagctgccccgctacctcatgggggagacgcagctgtgcaccacaagtatatcccaagaatgtacacattctgcaccaattatggaggacaacagtatgtgattgatgctctgattggctagctctggaccacatgaccaactctgctctggtggtagagctaattccacttaaaccacatcaacagagaatggggaacaatggcaaaagcctttgatgaagcattttcctctgagacaacagcggcaatacctgaagaccatgaagcatctgctgagtccttttgttccatcttctttcttcctgatcttgatcgccccctgatgcatcttcatcctgaataaaaatgacccccaaaaagctgacaaaacaagtccaatgaaaaatgaagtatttctacatctcctaaaagctcctaaattaccttgagattgtgtattttgaactaatagaaaactgtacttaatgctgctgagcaatcacttagcatttagagtacaaactgaagagtctgtttttcttaaattacaaggcaaagtcctctatgtgcaagcaaacatttggctgaaagtatgcttctatattgcgctata

SEQ ID NO: 198504 - DNA, 369 bp, Homo sapiens
  Payload ID: 19178
  Gene Name: UTP23, small subunit (SSU) processome component, homolog (yeast)
  ENST ID: ENST00000520733
  CDS Start-End: 133-327
agatgtgtgttaaaagagctagaaacattgggaaaggacttatatggggcaaaactgattgcacaaaaatgccaagttcgaaattgtcctcatttcaagaatgcagtgagtggatcagaatgtctgctttccatggttgaagagggaaatcctcatcattattttgtggcaacacagggaacaatggcaaaagcctttgatgaagcattttcctctgagacaacagcggcaatacctgaagaccatgaagcatctgctgagtccttttgttccatcttctttcttcctgatcttgatcgccccctgatgcatcttcatcctgaataaaaatgacccccaaaaagctgacaaaacaagtccaatgaaaaa

SEQ ID NO: 198505 - DNA, 563 bp, Homo sapiens
  Payload ID: 19178
  Gene Name: UTP23, small subunit (SSU) processome component, homolog (yeast)
  ENST ID: ENST00000517814
  CDS Start-End: 97-563
atttccgggtgaaactggcattgagggtactggggcgtgcgtgaggcgtttactgatgcttcctggtccggtggcctcggtcccggtaagccaggcatgaagatcacaaggcagaaacatgccaagaagcatcttggcttcttccgcaacaacttcggagtccgcgagccgtaccagatcctgctggacggcaccttctgtcaggcggcgctgcggggccgcatccagctgcgggagcagctgccccgctacctcatgggggagacgcagctgtgcaccacaagatgtgtgttaaaagagctagaaacattgggaaaggacttatatggggcaaaactgattgcacaaaaatgccaagttcgaaattgtcctcatttcaagaatgcagtgagtggatcagaatgtctgctttccatggttgaagagggaaatcctcatcattattttgtggcaacacagtggatctctgctagcttactaatgctcactgtccaccacctcatgcagtcagaaagatgccatctgttctcttcagctgccaaagtgtcacaggttacccacag

SEQ ID NO: 198506 - DNA, 683 bp, Homo sapiens
  Payload ID: 19178
  Gene Name: UTP23, small subunit (SSU) processome component, homolog (yeast)
  ENST ID: ENST00000521071
  CDS Start-End: 96-305
tttccgggtgaaactggcattgagggtactggggcgtgcgtgaggcgtttactgatgcttcctggtccggtggcctcggtcccggtaagccaggcatgaagatcacaaggcagaaacatgccaagaagcatcttggcttcttccgcaacaacttcggagtccgcgagccgtaccagatcctgctggacggcaccttctgtcaggcggcgctgcggggccgcatccagctgcgggagcagctgccccgctacctcatgggggagacgcagctgtgcaccacaagtggatctctgctagcttactaatgctcactgtccaccacctcatgcagtcagaaagatgccatctgttctcttcagctgccaaagtgtcacaggttacccacagtatatcccaagaatgtacacattctgcaccaattatggaggacaacagtatgtgattgatgctctgattggctagctctggaccacatgaccaactctgctctggtggtagagctaattccacttaaaccacatcaacagagaatgggtaagatgtgtttcctcaagggagactgtaacactattagaaggaggagtgaaagttggcgtgtaagaagcaaatgatcactactgatatgtgggcatttgaggtgaattaaatttttacttgaattattttatgttttcatactcatc

SEQ ID NO: 198507 - DNA, 620 bp, Homo sapiens
  Payload ID: 19178
  Gene Name: UTP23, small subunit (SSU) processome component, homolog (yeast)
  ENST ID: ENST00000524128
  CDS Start-End: 133-336
agatgtgtgttaaaagagctagaaacattgggaaaggacttatatggggcaaaactgattgcacaaaaatgccaagttcgaaattgtcctcatttcaagaatgcagtgagtggatcagaatgtctgctttccatggttgaagagggaaatcctcatcattattttgtggcaacacagtggatctctgctagcttactaatgctcactgtccaccacctcatgcagtcagaaagatgccatctgttctcttcagctgccaaagtgtcacaggttacccacagtatatcccaagaatgtacacattctgcaccaattatggaggacaacagtatgtgattgatgctctgattggctagctctggaccacatgaccaactctgctctggtggtagagctaattccacttaaaccacatcaacagagaatggggaacaatggcaaaagcctttgatgaagcattttcctctgagacaacagcggcaatacctgaagaccatgaagcatctgctgagtccttttgttccatcttctttcttcctgatcttgatcgccccctgatgcatcttcatcctgaataaaaatgacccccaaaaagctgacaaaacaagtccaatgaaaaa

SEQ ID NO: 198508 - DNA, 2073 bp, Homo sapiens
  Payload ID: 19179
  Gene Name: UTP3, small subunit (SSU) processome component, homolog (S. cerevisiae)
  Uniprot ID: Q9NQZ2
  ENST ID: ENST00000254803
  CDS Start-End: 200-1639
aatcgtacgccacgcggagagcatgctgggggccggaaggaagaggaaattccagtagccgatcaggagtctgcaaactccggtggtaggggagcgcgctgctgtttagagccacgagttaccggagcgcctgattcctgcgccgaagtcagtggtggccgaaagtccggagtcgctgtaaaacctgagattgtgagccatggtggggagatcccggcggcgcggagcagctaagtgggcagctgtgcgagccaaggcaggtcccacgctcaccgacgaaaatggagatgatttaggattgccaccctcaccaggggacaccagctactaccaagatcaggtagatgactttcatgaggcacgatcccgggccgccttagctaagggctggaatgaagtacagagtggagacgaggaggatggcgaggaggaggaggaggaggtgctagccctagatatggacgatgaggacgacgaagatggagggaatgcgggggaggaggaggaggaggagaatgccgatgatgatggtgggagctccgtgcaaagtgaagctgaggcctctgtggatcccagtttgtcgtggggtcagaggaaaaaactttactatgacacggactatggttccaagtcccgaggccggcagagtcaacaggaggcagaggaggaggaaagagaggaggaggaggaggcacagatcattcagcggcgcctagcccaagcgctgcaagaggatgattttggtgtcgcctgggttgaggcctttgcaaaaccagtgcctcaggtagatgaggctgagacacgggtcgtgaaggatttggctaaagtttcagtgaaagagaagctgaaaatgttgcgaaaggaatcaccagaactcttggagctgatagaagacctgaaagtcaagttgacagaggttaaggatgagctggagccattgttagagttggtggaacaagggatcattccacccggaaaaggaagccaatacttgaggaccaagtacaacctctacttgaattattgctcgaacatcagtttttatttgatcctgaaagctaggagagtcccagcacatggacatcctgtcatagaaaggcttgttacctaccgaaatttgatcaacaagctgtccgttgtggatcagaagctgtcctcagaaattcgtcatctgttgacacttaaggatgatgctgtaaagaaagaactgattccaaaagcaaaatccaccaagcccaaaccaaagtctgtttcaaagacttctgctgctgcctgtgctgttacagatctttctgatgattctgattttgatgaaaaagcaaaactgaagtactataaagaaatagaagacaggcaaaagctaaagagaaagaaagaagaaaatagcactgaagaacaggctcttgaagatcaaaatgcaaagagagctattacctatcaaattgctaaaaataggggacttactcctaggagaaagaagattgatcgcaatcccagagtgaaacacagagagaagttcagaagagccaaaattagaagaagaggccaggttcgtgaagttcgtaaagaagagcaacgttatagtggtgaattatctggcattcgtgcaggagttaaaaagagcattaagcttaaatgaagtttttgcttagcataaggtttttggcagttttggatcaataaatttttacttttaactaaagtcattgtattaatatataatactttaaattttaaaaattcttgtccacaaggaaatttgtctgggttattggacaatttataagaactatgggagcaatatgaaggtgcttgagaaaagagatgatgttgaagttttccaatattctgttgaagttttccaatattaagtattagcttagggaaatttcacagttcattgtggagtgttaaacttagaacatgtgtaacttttcacataaagagaatgcatctttgacagttatcttatttgtaaggcagcctataaaatagttctgaagtattttatttacctaactataattattgggccagatacttgttaataaatgggcttaatgttaacatgga

SEQ ID NO: 198509 - DNA, 4392 bp, Homo sapiens
  Payload ID: 19180
  Gene Name: UTP6, small subunit (SSU) processome component, homolog (yeast)
  Uniprot ID: Q9NYH9
  ENST ID: ENST00000261708
  CDS Start-End: 139-1932
ggaaaaggcgggacctagggagcacgttacgtccggacgcgtcggtggtagggctgggtctccgaacctgaaaccgggagcttcctgctcgtgttcgctgttgagaagctacccgcggggttgtagacctcggacctcatggcagagataattcaggaacgcatagaagatcggctcccggaattggaacagctggagcgcattggactgttcagtcatgcggagattaaggctatcattaagaaggcttccgatctagagtacaaaatccagagaagaacccttttcaaggaagactttatcaattatgttcaatatgaaattaatcttttggagctgatccagagaagaagaacacgcattggatattcatttaagaaggatgagattgagaattctattgtacaccgggtacaaggtgttttccagcgtgcctcagcaaaatggaaagacgatgttcaactttggctctcctatgtggctttttgtaagaagtgggctactaaaactcgacttagcaaggtattctctgccatgttggcgattcattccaacaaaccagctttgtggattatggcagccaaatgggaaatggaagatcgattgtcttcagaaagcgcaaggcaactatttcttcgcgcactgcgctttcatccagagtgcccaaaactttataaagaatactttaggatggagctgatgcatgctgaaaaactgaggaaggagaaggaagaatttgaaaaagccagtatggatgtggagaatcctgattattctgaagaaatccttaagggcgagttggcatggatcatctacaaaaattctgtaagcataattaaaggtgcagaatttcacgtgtcactgctttcgattgcacagctatttgactttgccaaagatctacaaaaagagatttatgatgaccttcaggctctacacacagatgatcctctcacttgggattatgtggcaaggcgagaattagagattgagtcacagacagaagagcagcctacaacgaaacaagccaaagcagtggaggtcggccggaaggaggagaggtgctgtgctgtgtatgaagaggcagtgaagactctgccaacagaggccatgtggaagtgttacatcaccttttgcttggaaagatttactaagaagtcaaatagtgggttccttagagggaagaggttggaaagaaccatgactgtattcaggaaggcacatgaactgaagcttctgtcagaatgccaatacaagcagttgagtgtttcgttgctgtgttataacttcctgagggaagctctggaagtggcagtagctggaactgaattgtttagagactctgggacaatgtggcagctgaagctgcaggtgctgatcgagtcaaagagccctgacatagccatgctttttgaagaagcctttgtgcacctgaaaccccaggtttgtctgccattgtggatttcctgggcagagtggagtgaaggtgccaaaagccaagaagacactgaggcagtctttaagaaagctctcttagctgtcataggtgccgactcagtaaccctgaagaataagtacctggattgggcttatcgaagtggtggctacaaaaaggccagagctgtgtttaaaagtttacaggagagccgaccattttcagttgactttttcaggaaaatgattcagtttgaaaaggagcaagaatcctgcaatatggcgaacataagagaatattatgagagagctttgagagagtttggatccgcagattctgatctttggatggattatatgaaagaagaattgaaccacccccttggtagacctgagaactgtggacagatctactggcgagcgatgaaaatgttgcagggagagtcagcagaggcatttgtagctaaacatgctatgcatcagactggccatttatgaagatgaagaatacagtcagctttgtgaaatagtattgcaagcaagccccgtgggcaaatttgtattgagtccatctgtaatttgctcagtgatggcagacaagatggctgtctggttttgagacacactttaattttatgttaacttgttaaatctttttaaaaattaaaaaatttttatgattgagactgggtcttgctctgttgccctggctggtcttgaactcctggactcaagtgaccttctcacctcagactcctgagtagctgggattataggtgcatgacactgctcagtttgatgtgctaatctgattccagtaaagagaattgctgatttaatgttgaggcccgatcttccacaggtcctaaatgtttcccaaaatacatggatagcatacgactgggtttttttaaaattatcccaggtcaagcatgagtatctctaatctcgacctaagagccagttaaaatgaaggagaaagtggccaggcatggtgactcaacgcctgtaatcccagcactttgggaaggctgaggcaggcggatcacctgaggtcaggagtttgagactagcctggccaacatggtgaaaccccgtctctactaaaaatacaaaaattagccaggtgtggtggtgggtgcctgtaatcccagctgcttgggaggctgaggcaggagaattgcttgaacctgggagacggaggttgcagtgagccgagatcatgccattgctactccatcctgggtaagaagagcgaaactccttctcaaggaaaaaaaaaaaggagaaagtacagttttgttggtttattctcattataaaagatacgtggtatgcatttgttctggaaaatatggaggaaatagaatagtgtggtaaaaaaaagcatcctgtcactgggagaagctttcagtgtagcttattgttacgtttcacttagtattgtttttctgtgtcattaaatagccttaaaaacatttaatgaattcgtaacattacattgtaaaaatgagccataatatattttactaatcctctggttagactgtctttttttttttgagatggagccttgctctgtcatccaggctggagtgcagtggctccatctcggctcactgcaacctccacctcccgggttcaagtggttctggctcagcctcccgagcagctgggtgggattacaggcacccgccaccgcgcccagccaatttttgtatttttagtagtgcgggggtttcatcatattggccaggctggttgcgaactcctgacctcatgatccacccgccttggcctcccaaagtgttgggattacaggcgtgaaccactaagcctggcctggactgtcatttctaatttttttaaaaattagataaatgctgttgatgaagattcttgtcaatctttgttcacatccctggccatttccttaggagattgacatccgacagtggaattactggatcaaaggatactgcttttagagaatactgatatgtattgctggtttgctccttctttcaagcaatacatgaaagtgtcagtacccttacctgtactggtgtaattatatcttttatttttaccattttataggtgaaatgtgatatgtcattgttttaccatactttgatattagtgaagttagtgtattttatgtttctcatctttttacatccttagactatttaaaaattttttttcttactaatttatgagttaatttttttttttaaattggacaagttcttgctttgtcacctaggctagagtgcagtggtgtgatcatggctcactacagccttaacttctgggctcaagagatcctcccacctcagcctcttgagtagctgggactgcaggtgcacaccaccatgcctggttaatttaaatttttttttgtagagactggtcttgctatgttgccagggctggtctcttaaacagttgggctcaaacaatcctcctacctcaacctcccaaagtgctggtattataggcatgagccattgtgcctggccagagtttttaaaaacatattcagaatattaatatcttgtttctcatttgttgcaaataattttacccccagccttgtttgtggtgattttttttttttgagacagagtcttgctctgtggtccaggctggagtgcagtggtgtggtcttactgcaacctctgcctcctaggttcaaacagttctccctgccaaagcctcccaagtagctgggattataggcaccttttgtggcgatttttgatgcccagaggtattttgtgtgtgtatgtgtgatgtctgtttttaaaatgctttggaagctcttcctggtgctgagaacaactctttttccccaagcagttaattttgccaacactatttgggcagttatgtttctctctgctgatttgtgatgttacctttattatatattaaatttctatgagtattaga

SEQ ID NO: 198510 - DNA, 563 bp, Homo sapiens
  Payload ID: 19180
  Gene Name: UTP6, small subunit (SSU) processome component, homolog (yeast)
  ENST ID: ENST00000581012
  CDS Start-End: 1-184
cagagctgtgtttaaaagtttacaggagagccgaccattttcagttgactttttcaggaaaatgattcagtttgaaaaggagcaaacggagtctctctctgtcgcccaggctggactcttggctcactgcaacctctgcttcccaggaatcctgcaatatggcgaacataagagaatattatgagagagctttgagagagtttggatccgcagattctgatctttggatggattatatgaaagaagaattgaaccacccccttggtagacctgagaactgtggacagatctactggcgagcgatgaaaatgttgcagggagagtcagcagaggcatttgtagctaaacatgctatgcatcagactggccatttatgaagatgaagaatacagtcagctttgtgaaatagtattgcaagcaagccccgtgggcaaatttgtattgagtccatctgtaatttgctcagtgatggcagacaagatggctgtctggttttgagacacactttaattttatgttaacttgttaaatctttttaaaaattaaaaaatttttatgattga

SEQ ID NO: 198511 - DNA, 410 bp, Homo sapiens
  Payload ID: 19180
  Gene Name: UTP6, small subunit (SSU) processome component, homolog (yeast)
  ENST ID: ENST00000579459
  CDS Start-End: 1-88
tttacaggagagccgaccattttcagttgactttttcaggaaaatgattcagtttgaaaaggagcaaatctttggatggattatatgaaagaagaattgaaccacccccttggtagacctgagaactgtggacagatctactggcgagcgatgaaaatgttgcagggagagtcagcagaggcatttgtagctaaacatgctatgcatcagactggccatttatgaagatgaagaatacagtcagctttgtgaaatagtattgcaagcaagccccgtgggcaaatttgtattgagtccatctgtaatttgctcagtgatggcagacaagatggctgtctggttttgagacacactttaattttatgttaacttgttaaatctttttaaaaattaaaaaatttttatgattg

SEQ ID NO: 198512 - DNA, 753 bp, Homo sapiens
  Payload ID: 19181
  Gene Name: utrophin
  ENST ID: ENST00000367524
  CDS Start-End: 1-753
agattggattaatgtctctctccaaaggtctcttggaagaaaaatacagatatctctttaaggaagttgcagggccaacagaaatgtgtgaccagaggcagctgggcctgttacttcatgatgccatccagatcccccggcagctaggtgaagtagcagcttttggaggcagtaatattgagcctagtgttcgcagctgcttccaacagaataacaataaaccagaaataagtgtgaaagagtttatagattggatgcatttggaaccacagtccatggtttggctcccagttttacatcgagtggcagcagcggagactgcaaaacatcaggccaaatgcaacatctgtaaagaatgtccaattgtcgggttcaggtatagaagccttaagcattttaactatgatgtctgccagagttgtttcttttcgggtcgaacagcaaaaggtcacaaattacattacccaatggtggaatattgtatacctacaacatctggggaagatgtacgagacttcacaaaggtacttaagaacaagttcaggtcgaagaagtactttgccaaacaccctcgacttggttacctgcctgtccagacagttcttgaaggtgacaacttagagaccccctcacaatctcctcaactgtttcatgatgacacccattcaagaatagaacaatatgccacacgactggcccagatggaaaggactaatgggtcttttctcactgatagcagctccaccacaggaa

SEQ ID NO: 198513 - DNA, 579 bp, Homo sapiens
  Payload ID: 19181
  Gene Name: utrophin
  ENST ID: ENST00000367525
  CDS Start-End: 382-579
aactctaagcttggggccctggagagaacagttgtggcctgcaggtcattagtgaggtgagcagaagggaatcctggacttcccagagaaagaggagaccatgccagcctcgtggaacacagctaccaggaaatacagaagcaggtctattccttgcgaactccgaagtccatgaaaaaacggacccacagtggggtggctaaaatgtcccagcgcaagctgccgctgctgctgatggaccatagctcaagggcaaggcttgtaaaggattttacaaaggattttaaagtatagccagaaaagatacggtgtttagaagttaaacgctgttgtctgaaggaagtttgccggaaagatgtaggcttcaagggctactggacaatgattggtctgaacttcaacttacgggaactgctgacaaaatttgaaaaggacatccaggcagaaattgatgcccacaatgacatatttaaaagcattgacggaaacaggcagaagatggtaaaagctttgggaaattctgaagaggctactatgcttcaacatcgactggatgatatgaaccaaagatggaatgac

SEQ ID NO: 198514 - DNA, 3220 bp, Homo sapiens
  Payload ID: 19181
  Gene Name: utrophin
  ENST ID: ENST00000367526
  CDS Start-End: 248-3214
caacttccttcatttctggccatgccgggctgagcaagtgctgcctgtgagcatctgctggggggctttctctgtggcgtttgtctgtgttttttaaattgagaagttgaaggaataccagcctcctttttcctagaacctaaccccctgtatctttcaaatgctttcctggaaacgagcatgctcagagaactgacaaatcattgtccagtgaccgggaggaaatgatcgttgctcttcatttataatgcaaattctgaggtgtctccagaagtgtggtaaacttaaaatgatggctgtggtgagaacgtctctgcagaaagttgtggttttgttgcatcgcttacaaaggatggcagtttcttctcctcggtatcagaagctctgtaaggacatccaggcagaaattgatgcccacaatgacatatttaaaagcattgacggaaacaggcagaagatggtaaaagctttgggaaattctgaagaggctactatgcttcaacatcgactggatgatatgaaccaaagatggaatgacttaaaagcaaaatctgctagcatcagggcccatttggaggccagcgctgagaagtggaacaggttgctgatgtccttagaagaactgatcaaatggctgaatatgaaagatgaagagcttaagaaacaaatgcctattggaggagatgttccagccttacagctccagtatgaccattgtaaggccctgagacgggagttaaaggagaaagaatattctgtcctgaatgctgtcgaccaggcccgagttttcttggctgatcagccaattgaggcccctgaagagccaagaagaaacctacaatcaaaaacagaattaactcctgaggagagagcccaaaagattgccaaagccatgcgcaaacagtcttctgaagtcaaagaaaaatgggaaagtctaaatgctgtaactagcaattggcaaaagcaagtggacaaggcattggagaaactcagagacctgcagggagctatggatgacctggacgctgacatgaaggaggcagagtccgtgcggaatggctggaagcccgtgggagacttactcattgactcgctgcaggatcacattgaaaaaatcatggcatttagagaagaaattgcaccaatcaactttaaagttaaaacggtgaatgatttatccagtcagctgtctccacttgacctgcatccctctctaaagatgtctcgccagctagatgaccttaatatgcgatggaaacttttacaggtttctgtggatgatcgccttaaacagcttcaggaagcccacagagattttggaccatcctctcagcattttctctctacgtcagtccagctgccgtggcaaagatccatttcacataataaagtgccctattacatcaaccatcaaacacagaccacctgttgggaccatcctaaaatgaccgaactctttcaatcccttgctgacctgaataatgtacgtttttctgcctaccgtacagcaatcaaaatccgaagactacaaaaagcactatgtttggatctcttagagttgagtacaacaaatgaaattttcaaacagcacaagttgaaccaaaatgaccagctcctcagtgttccagatgtcatcaactgtctgacaacaacttatgatggacttgagcaaatgcataaggacctggtcaacgttccactctgtgttgatatgtgtctcaattggttgctcaatgtctatgacacgggtcgaactggaaaaattagagtgcagagtctgaagattggattaatgtctctctccaaaggtctcttggaagaaaaatacagatatctctttaaggaagttgcagggccaacagaaatgtgtgaccagaggcagctgggcctgttacttcatgatgccatccagatcccccggcagctaggtgaagtagcagcttttggaggcagtaatattgagcctagtgttcgcagctgcttccaacagaataacaataaaccagaaataagtgtgaaagagtttatagattggatgcatttggaaccacagtccatggtttggctcccagttttacatcgagtggcagcagcggagactgcaaaacatcaggccaaatgcaacatctgtaaagaatgtccaattgtcgggttcaggtatagaagccttaagcattttaactatgatgtctgccagagttgtttcttttcgggtcgaacagcaaaaggtcacaaattacattacccaatggtggaatattgtatacctacaacatctggggaagatgtacgagacttcacaaaggtacttaagaacaagttcaggtcgaagaagtactttgccaaacaccctcgacttggttacctgcctgtccagacagttcttgaaggtgacaacttagagactcctatcacactcatcagtatgtggccagagcactatgacccctcacaatctcctcaactgtttcatgatgacacccattcaagaatagaacaatatgccacacgactggcccagatggaaaggactaatgggtcttttctcactgatagcagctccaccacaggaagtgtggaagacgagcacgccctcatccagcagtattgccaaacactcggaggagagtccccagtgagccagccgcagagcccagctcagatcctgaagtcagtagagagggaagaacgtggagaactggagaggatcattgctgacctggaggaagaacaaagaaatctacaggtggagtatgagcagctgaaggaccagcacctccgaagggggctccctgtcggttcaccgccagagtcgattatatctccccatcacacgtctgaggattcagaacttatagcagaagcaaaactcctcaggcagcacaaaggtcggctggaggctaggatgcagattttagaagatcacaataaacagctggagtctcagctccaccgcctccgacagctgctggagcagcctgaatctgattcccgaatcaatggtgtttccccatgggcttctcctcagcattctgcactgagctactcgcttgatccagatgcctccggcccacagttccaccaggcagcgggagaggacctgctggccccaccgcacgacaccagcacggatctcacggaggtcatggagcagattcacagcacgtttccatcttgctgcccaaatgttcccagcaggccacaggcaatgtgaagtatt

SEQ ID NO: 198515 - DNA, 12339 bp, Homo sapiens
  Payload ID: 19181
  Gene Name: utrophin
  Uniprot ID: P46939
  ENST ID: ENST00000367545
  CDS Start-End: 1-10302
atggccaagtatggagaacatgaagccagtcctgacaatgggcagaacgaattcagtgatatcattaagtccagatctgatgaacacaatgacgtacagaagaaaacctttaccaaatggataaatgctcgattttcaaagagtgggaaaccacccatcaatgatatgttcacagacctcaaagatggaaggaagctattggatcttctagaaggcctcacaggaacatcactgccaaaggaacgtggttccacaagggtacatgccttaaataacgtcaacagagtgctgcaggttttacatcagaacaatgtggaattagtgaatatagggggaactgacattgtggatggaaatcacaaactgactttggggttactttggagcatcattttgcactggcaggtgaaagatgtcatgaaggatgtcatgtcggacctgcagcagacgaacagtgagaagatcctgctcagctgggtgcgtcagaccaccaggccctacagccaagtcaacgtcctcaacttcaccaccagctggacagatggactcgcctttaatgctgtcctccaccgacataaacctgatctcttcagctgggataaagttgtcaaaatgtcaccaattgagagacttgaacatgccttcagcaaggctcaaacttatttgggaattgaaaagctgttagatcctgaagatgttgccgttcagcttcctgacaagaaatccataattatgtatttaacatctttgtttgaggtgctacctcagcaagtcaccatagacgccatccgtgaggtagagacactcccaaggaaatataaaaaagaatgtgaagaagaggcaattaatatacagagtacagcgcctgaggaggagcatgagagtccccgagctgaaactcccagcactgtcactgaggttgacatggatctggacagctatcagattgcgttggaggaagtgctgacctggttgctttctgctgaggacactttccaggagcaggatgatatttctgatgatgttgaagaagtcaaagaccagtttgcaacccatgaagcttttatgatggaactgactgcacaccagagcagtgtgggcagcgtcctgcaggcaggcaaccaactgataacacaaggaactctgtcagacgaagaagaatttgagattcaggaacagatgaccctgctgaatgctagatgggaggctcttagggtggagagtatggacagacagtcccggctgcacgatgtgctgatggaactgcagaagaagcaactgcagcagctctccgcctggttaacactcacagaggagcgcattcagaagatggaaacttgccccctggatgatgatgtaaaatctctacaaaagctgctagaagaacataaaagtttgcaaagtgatcttgaggctgaacaggtgaaagtaaattcactaactcacatggtggtcattgttgatgaaaacagtggtgagagtgctacagctatcctagaagaccagttacagaaacttggtgagcgctggacagcagtatgccgttggactgaagaacgctggaataggttacaagaaatcaatatattgtggcaggaattattggaagaacagtgcttgttgaaagcttggttaaccgaaaaagaagaggctttaaataaagtccagacaagcaacttcaaagaccaaaaggaactaagtgtcagtgttcgacgtctggctattttgaaggaagacatggaaatgaagcgtcaaacattggatcagctgagtgagattggccaggatgtgggacaattacttgataattccaaggcatctaagaagatcaacagtgactcagaggaactgactcaaagatgggattctttggttcagagactagaagattcctccaaccaggtgactcaggctgtagcaaagctggggatgtctcagattcctcagaaggaccttttggagactgttcgtgtaagagaacaagcaattacaaaaaaatctaagcaggaactgcctcctcctcctcccccaaagaagagacagatccatgtggatattgaagctaagaaaaagtttgatgctataagtgcagagctgttgaactggattttgaaatggaaaactgccattcagaccacagagataaaagagtatatgaagatgcaagacacttccgaaatgaaaaagaagttgaaggcattagaaaaagaacagagagaaagaatccccagagcagatgaattaaaccaaactggacaaatccttgtggagcaaatgggaaaagaaggccttcctactgaagaaataaaaaatgttctggagaaggtttcatcagaatggaagaatgtatctcaacatttggaagatctagaaagaaagattcagctacaggaagatataaatgcttatttcaagcagcttgatgagcttgaaaaggtcatcaagacaaaggaggagtgggtaaaacacacttccatttctgaatcttcccggcagtccttgccaagcttgaaggattcctgtcagcgggaattgacaaatcttcttggccttcaccccaaaattgaaatggctcgtgcaagctgctcggccctgatgtctcagccttctgccccagattttgtccagcggggcttcgatagctttctgggccgctaccaagctgtacaagaggctgtagaggatcgtcaacaacatctagagaatgaactgaagggccaacctggacatgcatatctggaaacattgaaaacactgaaagatgtgctaaatgattcagaaaataaggcccaggtgtctctgaatgtccttaatgatcttgccaaggtggagaaggccctgcaagaaaaaaagacccttgatgaaatccttgagaatcagaaacctgcattacataaacttgcagaagaaacaaaggctctggagaaaaatgttcatcctgatgtagaaaaattatataagcaagaatttgatgatgtgcaaggaaagtggaacaagctaaaggtcttggtttccaaagatctacatttgcttgaggaaattgctctcacactcagagcttttgaggccgattcaacagtcattgagaagtggatggatggcgtgaaagacttcttaatgaaacagcaggctgcccaaggagacgacgcaggtctacagaggcagttagaccagtgctctgcatttgttaatgaaatagaaacaattgaatcatctctgaaaaacatgaaggaaatagagactaatcttcgaagtggtccagttgctggaataaaaacttgggtgcagacaagactaggtgactaccaaactcaactggagaaacttagcaaggagatcgctactcaaaaaagtaggttgtctgaaagtcaagaaaaagctgcgaacctgaagaaagacttggcagagatgcaggaatggatgacccaggccgaggaagaatatttggagcgggattttgagtacaagtcaccagaagagcttgagagtgctgtggaagagatgaagagggcaaaagaggatgtgttgcagaaggaggtgagagtgaagattctcaaggacaacatcaagttattagctgccaaggtgccctctggtggccaggagttgacgtctgagctgaatgttgtgctggagaattaccaacttctttgtaatagaattcgaggaaagtgccacacgctagaggaggtctggtcttgttggattgaactgcttcactatttggatcttgaaactacctggttaaacactttggaagagcggatgaagagcacagaggtcctgcctgagaagacggatgctgtcaacgaagccctggagtctctggaatctgttctgcgccacccggcagataatcgcacccagattcgagagcttggccagactctgattgatggggggatcctggatgatataatcagtgagaaactggaggctttcaacagccgatatgaagatctaagtcacctggcagagagcaagcagatttctttggaaaagcaactccaggtgctgcgggaaactgaccagatgcttcaagtcttgcaagagagcttgggggagctggacaaacagctcaccacatacctgactgacaggatagatgctttccaagttccacaggaagctcagaaaatccaagcagagatctcagcccatgagctaaccctagaggagttgagaagaaatatgcgttctcagcccctgacctccccagagagtaggactgccagaggaggaagtcagatggatgtgctacagaggaaactccgagaggtgtccacaaagttccagcttttccagaagccagctaacttcgagcagcgcatgctggactgcaagcgtgtgctggatggcgtgaaagcagaacttcacgttctggatgtgaaggacgtagaccctgacgtcatacagacgcacctggacaagtgtatgaaactgtataaaactttgagtgaagtcaaacttgaagtggaaactgtgattaaaacaggaagacatattgtccagaaacagcaaacggacaacccaaaagggatggatgagcagctgacttccctgaaggttctttacaatgacctgggcgcacaggtgacagaaggaaaacaggatctggaaagagcatcacagttggcccggaaaatgaagaaagaggctgcttctctctctgaatggctttctgctactgaaactgaattggtacagaagtccacttcagaaggtctgcttggtgacttggatacagaaatttcctgggctaaaaatgttctgaaggatctggaaaagagaaaagctgatttaaataccatcacagagagtagtgctgccctgcaaaacttgattgagggcagtgagcctattttagaagagaggctctgcgtccttaacgctgggtggagccgagttcgtacctggactgaagattggtgcaataccttgatgaaccatcagaaccagctagaaatatttgatgggaacgtggctcacataagtacctggctttatcaagctgaagctctattggatgaaattgaaaagaaaccaacaagtaaacaggaagaaattgtgaagcgtttagtatctgagctggatgatgccaacctccaggttgaaaatgtccgcgatcaagcccttattttgatgaatgcccgtggaagctcaagcagggagcttgtagaaccaaagttagctgagctgaataggaactttgaaaaggtgtctcaacatatcaaaagtgccaaattgctaattgctcaggaaccattataccaatgtttggtcaccactgaaacatttgaaactggtgtgcctttctctgacttggaaaaattagaaaatgacatagaaaatatgttaaaatttgtggaaaaacacttggaatccagtgatgaagatgaaaagatggatgaggagagtgcccagattgaggaagttctacaaagaggagaagaaatgttacatcaacctatggaagataataaaaaagaaaagatccgtttgcaattattacttttgcatactagatacaacaaaattaaggcaatccctattcaacagaggaaaatgggtcaacttgcttctggaattagatcatcacttcttcctacagattatctggttgaaattaacaaaattttactttgcatggatgatgttgaattatcgcttaatgttccagagctcaacactgctatttacgaagacttctcttttcaggaagactctctgaagaatatcaaagaccaactggacaaacttggagagcagattgcagtcattcatgaaaaacagccagatgtcatccttgaagcctctggacctgaagccattcagatcagagatacacttactcagctgaatgcaaaatgggacagaattaatagaatgtacagtgatcggaaaggttgttttgacagggcaatggaagaatggagacagttccattgtgaccttaatgacctcacacagtggataacagaggctgaagaattactggttgatacctgtgctccaggtggcagcctggacttagagaaagccaggatacatcagcaggaacttgaggtgggcatcagcagccaccagcccagttttgcagcactaaaccgaactggggatgggattgtgcagaaactctcccaggcagatggaagcttcttgaaagaaaaactggcaggtttaaaccaacgctgggatgcaattgttgcagaagtgaaggataggcagccaaggctaaaaggagaaagtaagcaggtgatgaagtacaggcatcagctagatgagattatctgttggttaacaaaggctgagcatgctatgcaaaagagatcaaccaccgaattgggagaaaacctgcaagaattaagagacttaactcaagaaatggaagtacatgctgaaaaactcaaatggctgaatagaactgaattggagatgctttcagataaaagtctgagtttacctgaaagggataaaatttcagaaagcttaaggactgtaaatatgacatggaataagatttgcagagaggtgcctaccaccctgaaggaatgcatccaggagcccagttctgtttcacagacaaggattgctgctcatcctaatgtccaaaaggtggtgctagtatcatctgcgtcagatattcctgttcagtctcatcgtacttcggaaatttcaattcctgctgatcttgataaaactataacagaactagccgactggctggtattaatcgaccagatgctgaagtccaacattgtcactgttggggatgtagaagagatcaataagaccgtttcccgaatgaaaattacaaaggctgacttagaacagcgccatcctcagctggattatgtttttacattggcacagaatttgaaaaataaagcttccagttcagatatgagaacagcaattacagaaaaattggaaagggtcaagaaccagtgggatggcacccagcatggcgttgagctaagacagcagcagcttgaggacatgattattgacagtcttcagtgggatgaccatagggaggagactgaagaactgatgagaaaatatgaggctcgactctatattcttcagcaagcccgacgggatccactcaccaaacaaatttctgataaccaaatactgcttcaagaactgggtcctggagatggtatcgtcatggcgttcgataacgtcctgcagaaactcctggaggaatatgggagtgatgacacaaggaatgtgaaagaaaccacagagtacttaaaaacatcatggatcaatctcaaacaaagtattgctgacagacagaacgccttggaggctgagtggaggacggtgcaggcctctcgcagagatctggaaaacttcctgaagtggatccaagaagcagagaccacagtgaatgtgcttgtggatgcctctcatcgggagaatgctcttcaggatagtatcttggccagggaactcaaacagcagatgcaggacatccaggcagaaattgatgcccacaatgacatatttaaaagcattgacggaaacaggcagaagatggtaaaagctttgggaaattctgaagaggctactatgcttcaacatcgactggatgatatgaaccaaagatggaatgacttaaaagcaaaatctgctagcatcagggcccatttggaggccagcgctgagaagtggaacaggttgctgatgtccttagaagaactgatcaaatggctgaatatgaaagatgaagagcttaagaaacaaatgcctattggaggagatgttccagccttacagctccagtatgaccattgtaaggccctgagacgggagttaaaggagaaagaatattctgtcctgaatgctgtcgaccaggcccgagttttcttggctgatcagccaattgaggcccctgaagagccaagaagaaacctacaatcaaaaacagaattaactcctgaggagagagcccaaaagattgccaaagccatgcgcaaacagtcttctgaagtcaaagaaaaatgggaaagtctaaatgctgtaactagcaattggcaaaagcaagtggacaaggcattggagaaactcagagacctgcagggagctatggatgacctggacgctgacatgaaggaggcagagtccgtgcggaatggctggaagcccgtgggagacttactcattgactcgctgcaggatcacattgaaaaaatcatggcatttagagaagaaattgcaccaatcaactttaaagttaaaacggtgaatgatttatccagtcagctgtctccacttgacctgcatccctctctaaagatgtctcgccagctagatgaccttaatatgcgatggaaacttttacaggtttctgtggatgatcgccttaaacagcttcaggaagcccacagagattttggaccatcctctcagcattttctctctacgtcagtccagctgccgtggcaaagatccatttcacataataaagtgccctattacatcaaccatcaaacacagaccacctgttgggaccatcctaaaatgaccgaactctttcaatcccttgctgacctgaataatgtacgtttttctgcctaccgtacagcaatcaaaatccgaagactacaaaaagcactatgtttggatctcttagagttgagtacaacaaatgaaattttcaaacagcacaagttgaaccaaaatgaccagctcctcagtgttccagatgtcatcaactgtctgacaacaacttatgatggacttgagcaaatgcataaggacctggtcaacgttccactctgtgttgatatgtgtctcaattggttgctcaatgtctatgacacgggtcgaactggaaaaattagagtgcagagtctgaagattggattaatgtctctctccaaaggtctcttggaagaaaaatacagatatctctttaaggaagttgcagggccaacagaaatgtgtgaccagaggcagctgggcctgttacttcatgatgccatccagatcccccggcagctaggtgaagtagcagcttttggaggcagtaatattgagcctagtgttcgcagctgcttccaacagaataacaataaaccagaaataagtgtgaaagagtttatagattggatgcatttggaaccacagtccatggtttggctcccagttttacatcgagtggcagcagcggagactgcaaaacatcaggccaaatgcaacatctgtaaagaatgtccaattgtcgggttcaggtatagaagccttaagcattttaactatgatgtctgccagagttgtttcttttcgggtcgaacagcaaaaggtcacaaattacattacccaatggtggaatattgtatacctacaacatctggggaagatgtacgagacttcacaaaggtacttaagaacaagttcaggtcgaagaagtactttgccaaacaccctcgacttggttacctgcctgtccagacagttcttgaaggtgacaacttagagactcctatcacactcatcagtatgtggccagagcactatgacccctcacaatctcctcaactgtttcatgatgacacccattcaagaatagaacaatatgccacacgactggcccagatggaaaggactaatgggtcttttctcactgatagcagctccaccacaggaagtgtggaagacgagcacgccctcatccagcagtattgccaaacactcggaggagagtccccagtgagccagccgcagagcccagctcagatcctgaagtcagtagagagggaagaacgtggagaactggagaggatcattgctgacctggaggaagaacaaagaaatctacaggtggagtatgagcagctgaaggaccagcacctccgaagggggctccctgtcggttcaccgccagagtcgattatatctccccatcacacgtctgaggattcagaacttatagcagaagcaaaactcctcaggcagcacaaaggtcggctggaggctaggatgcagattttagaagatcacaataaacagctggagtctcagctccaccgcctccgacagctgctggagcagcctgaatctgattcccgaatcaatggtgtttccccatgggcttctcctcagcattctgcactgagctactcgcttgatccagatgcctccggcccacagttccaccaggcagcgggagaggacctgctggccccaccgcacgacaccagcacggatctcacggaggtcatggagcagattcacagcacgtttccatcttgctgcccaaatgttcccagcaggccacaggcaatgtgaagtattcatccggccaaccaatgtttcctgacgtacagtgttgcccttttcagcaaatgccaattccaagttccattaaatcagaagctccatggctccttggcccacgatgttgagtgctgactgtgtgttctactgaaagagtaaaacactgactatccaaagagaaatggatattttgtttttataataaccatatattattgttttcttcttccctttctatgcaagtgtaaattaatgaacagagaggtatttggaaatggtaatacatttgtcacggatttgtataatgtatacagcattgggaaagtgggtgggggctttctaatatgataccgtctttttaataactatgacaaagcttacataagaattagaagaccactttacatttttacattccttctgctgttcatattaaccttgcacaattacttcattttttctttgactcttttaccacaatgttttggttatttataatttatcagccatatgtttatcagccatataaccaactagatcccaaatagatccatgtatttgtttccgtgatttggccacattaataaattcataaatttcaatcaaatatcttatatatacacacatatggtttaagctacagccctgtgtatgccgtttaactttatttgacgttgcccacttacttctttgctgaccacttggataaccgtaataaaaatcctataagcctaaatggcatttcttttgggatatttttcctgcattttattccctttttatataagtaggaattaattatttattttatgtcttaatctatttgataaagaagactacattataataatctcaaagatcatattaccaaaggttgcccacttgagcatattttcattttgacacagaaacaaaatttagtacaacctttcctagttcccatgtcttgattttcatcattacatgcacagcagacctttacctattgtgataccagaacacatcattgtctttggttcccttcaaagagaattttattgttgttttgtattttcaagtccttaatagttcttgaaactcctagttgttttcttgttgaaagcagacacacatttagtgcacggcttattttacctttcgggtgaaagatcagatgtttttatacccttcacttgatcaatatatttggaaagaatgtttatcaaaagtctatgtcactgcttctacagaagaatgaaattaatgcttaggtgatggtacctccacctacatctttttgagtgcattcaattatgtattttggtttagcttctgatttaacatttaattgattcagtttaaacatgttacttaattagcaaatgtagaggaaccaaaaaaaggtgaaaataatatgttttgattcaaacctaaagacataaaaacataaagacattttaactttgggttctctttagctgggatctggccagaaggaggcttaaagttagaaattgctattattttagaataggttgggtgggttggggggcaagggtgtctatttgcagcagagatattttgaaaagaagaaaattgttttatataaaaaggaaagccatgaccacctttctacctcagatccatcttcatccattgcattggaaactgctttatgctgctgcagtctgcaaagtctagagcttttatcaggccatgtcatacccaagaaagcacctatttaaagaaaaaacaattccctgagctctcaactccaagttgtagatttggtgtcttccttgttcttactttaaaaagtcatgtgttaattttttttctgcctgtatttgtatgcaaaatgtcctctatctgctattaaagaaaagctacgtaaaacactacattgtaaccttctaagtaataataaataaaaagaaatatattgcagtaacaatgggaagtaagtatgtagttcttttgaaatatgtggtaaagaactaatcacagactatcatctaatctggttacatattgtatttttcatcctgaataaaagtaattttaacacaa

SEQ ID NO: 198516 - DNA, 633 bp, Homo sapiens
  Payload ID: 19181
  Gene Name: utrophin
  ENST ID: ENST00000455022
  CDS Start-End: 74-633
gtgaagtagagtgagcattagcctggcagacagctagggtaatagatgacttccagtggaagtcaaagcacaaatgttggaagaagaagaatggtatagaagccttaagcattttaactatgatgtctgccagagttgtttcttttcgggtcgaacagcaaaaggtcacaaattacattacccaatggtggaatattgtatacctacaacatctggggaagatgtacgagacttcacaaaggtacttaagaacaagttcaggtcgaagaagtactttgccaaacaccctcgacttggttacctgcctgtccagacagttcttgaaggtgacaacttagagaccccctcacaatctcctcaactgtttcatgatgacacccattcaagaatagaacaatatgccacacgactggcccagatggaaaggactaatgggtcttttctcactgatagcagctccaccacaggaagtgtggaagacgagcacgccctcatccagcagtattgccaaacactcggaggagagtccccagtgagccagccgcagagcccagctcagatcctgaagtcagtagagagggaagaacgtggagaactggagaggatcattgctgacctggaggaagaacaaag

SEQ ID NO: 198517 - DNA, 354 bp, Homo sapiens
  Payload ID: 19181
  Gene Name: utrophin
  ENST ID: ENST00000433557
  CDS Start-End: 214-354
caccaaactaacactcgcacacacccccgcggttactccgtgtcaaactcctagaggagcccttggccagctcggggtgcggcggtggcgaccggcaggcgaggaggcccgcgggcagcaggtattgatgtcaagctgaaccatcgtaggaagttgaaagccttagaaagaggacttggtaaagtttttggattatcttgaaactctggcaagatggccaagtatggagaacatgaagccagtcctgacaatgggcagaacgaattcagtgatatcattaagtccagatctgatgaacacaatgacgtacagaagaaaacctttaccaaatggataaatgctcgattttcaaag

SEQ ID NO: 198518 - DNA, 572 bp, Homo sapiens
  Payload ID: 19181
  Gene Name: utrophin
  ENST ID: ENST00000421035
  CDS Start-End: 111-572
aaaaaaaaaacccaaaataacacaggacatcccagtgtgcagttcgaaggctgcttttgttgtccacttcctccacatctttttcctcatcatctaagcagatgtaggtgatgagcggcctggcagccaccacgtttcattggaaaaagtgcagattggatttgccagggcatgtagctctccaggcttgcaagcgattaccagatgaacacaatgacgtacagaagaaaacctttaccaaatggataaatgctcgattttcaaagagtgggaaaccacccatcaatgatatgttcacagacctcaaagatggaaggaagctattggatcttctagaaggcctcacaggaacatcactgccaaaggaacgtggttccacaagggtacatgccttaaataacgtcaacagagtgctgcaggttttacatcagaacaatgtggaattagtgaatatagggggaactgacattgtggatggaaatcacaaactgactttggggttactttggagcatcattttgcactggcaggtgaaagatgtcatgaaggatgtcatgtcggacctgcagcag

SEQ ID NO: 198519 - DNA, 666 bp, Homo sapiens
  Payload ID: 19181
  Gene Name: utrophin
  ENST ID: ENST00000432686
  CDS Start-End: 125-666
aagattatgaagcaacaacactagctacagtttaaatgaaggcatttcttcacttttaatatatttcttttttcaccagaataacaataaaccagaaataagtgtgaaagagtttatagattggatgcatttggaaccacagtccatggtttggctcccagttttacatcgagtggcagcagcggagactgcaaaacatcaggccaaatgcaacatctgtaaagaatgtccaattgtcgggttcaggtatagaagccttaagcattttaactatgatgtctgccagagttgtttcttttcgggtcgaacagcaaaaggtcacaaattacattacccaatggtggaatattgtatacctacaacatctggggaagatgtacgagacttcacaaaggtacttaagaacaagttcaggtcgaagaagtactttgccaaacaccctcgacttggttacctgcctgtccagacagttcttgaaggtgacaacttagagactcctatcacactcatcagtatgtggccagagcactatgacccctcacaatctcctcaactgtttcatgatgacacccattcaagaatagaacaatatgccacacgactggcccagatggaaaggactaatgggtcttttctcactgatagcagctccaccacaggaagtgt

SEQ ID NO: 198520 - DNA, 678 bp, Homo sapiens
  Payload ID: 19181
  Gene Name: utrophin
  ENST ID: ENST00000417142
  CDS Start-End: 125-678
aagattatgaagcaacaacactagctacagtttaaatgaaggcatttcttcacttttaatatatttcttttttcaccagaataacaataaaccagaaataagtgtgaaagagtttatagattggatgcatttggaaccacagtccatggtttggctcccagttttacatcgagtggcagcagcggagactgcaaaacatcaggccaaatgcaacatctgtaaagaatgtccaattgtcgggttcaggtatagaagccttaagcattttaactatgatgtctgccagagttgtttcttttcgggtcgaacagcaaaaggtcacaaattacattacccaatggtggaatattgtatacctacaacatctggggaagatgtacgagacttcacaaaggtacttaagaacaagttcaggtcgaagaagtactttgccaaacaccctcgacttggttacctgcctgtccagacagttcttgaaggtgacaacttagagaccccctcacaatctcctcaactgtttcatgatgacacccattcaagaatagaacaatatgccacacgactggcccagatggaaaggactaatgggtcttttctcactgatagcagctccaccacaggaagtgtggaagacgagcacgccctcatccagcagtattgccaaacactcggaggaga

SEQ ID NO: 198521 - DNA, 597 bp, Homo sapiens
  Payload ID: 19181
  Gene Name: utrophin
  ENST ID: ENST00000628146
  CDS Start-End: 148-597
atactgtttggccctgtttttcaatttgactccatcaaagcacattctccagccgaggggtacacatccctttgtgacttcagaaatcatgcactgttggtttgggagtcttaactacatttggaggacacgctgagccgacgagaaatggaagtgagatctgaatccacaaacggagacggcagacagtcacaggcagatgaacacaatgacgtacagaagaaaacctttaccaaatggataaatgctcgattttcaaagagtgggaaaccacccatcaatgatatgttcacagacctcaaagatggaaggaagctattggatcttctagaaggcctcacaggaacatcactgccaaaggaacgtggttccacaagggtacatgccttaaataacgtcaacagagtgctgcaggttttacatcagaacaatgtggaattagtgaatatagggggaactgacattgtggatggaaatcacaaactgactttggggttactttggagcatcattttgcactggcaggtgaaagatgtcatgaaggatgtcatgtcggacctgcagcagacgaacagtgagaagatcctgctcagctgg

SEQ ID NO: 198522 - DNA, 4123 bp, Homo sapiens
  Payload ID: 19182
  Gene Name: UV radiation resistance associated
  Uniprot ID: Q9P2Y5
  ENST ID: ENST00000356136
  CDS Start-End: 242-2341
aatgagcgctccgggtctcagcggggtggaggggttgcactgcggtaatatggctcttccttagccagcggcggcaacggcggcagcggcggcagcggcggcggctactgtctgggctgagcagtagtgcctctcgggtggcgggtttctaggctgcaggggcttggtaggtggtggcaagggggcggcggcggatgccggaagagtgcccgccccgccgcttggcggcccctggatcgagatgagcgcctccgcgtcggtcgggggccccgtcccccagccacccccgggcccggccgctgctctgcctcccggttctgccgcgcgggccctgcatgtggagctgccgtctcagcagcggcgtcttcgacatcttcggaacattgctgcccggaacattgttaatagaaatggccatcagctccttgatacctactttacacttcacttgtgtagtactgaaaagatatataaagaattttatagaagtgaagtgattaagaattccttgaatcccacgtggcgaagtctcgattttggaattatgccagaccgtcttgatacatctgtgtcttgtttcgtggtgaagatatggggtggaaaggagaacatctaccagctgttgattgaatggaaagtctgtttggatgggctgaaatacttgggtcagcagattcatgcccgaaaccaaaatgaaataatttttgggctgaatgatggatactatggtgctccatttgaacataagggttattcaaatgctcagaagactattcttctgcaggtggatcagaactgtgttcgcaattcttacgatgtcttctctttgctacggcttcatagagcccagtgtgcaattaaacagactcaggtaactgttcagaaaattggaaaggaaattgaagaaaaactaagactcacatctacaagcaatgaactgaaaaaaaaaagtgaatgcctgcagttaaaaattttggtgcttcagaatgaactggaacggcagaagaaagctttgggacgggaggtggcattactgcataagcaacaaattgcattacaagacaaaggaagtgcattttcagctgagcacctcaaacttcaactccagaaggaatccctaaatgagctgaggaaggagtgcactgcaaaaagagaactcttcttgaagactaatgctcagttgacaattcgttgcaggcagttactctctgagctttcctacatttaccctattgatttgaatgaacataaggattactttgtatgcggtgtcaagttgcctaattctgaggacttccaagcaaaagatgatggaagcattgctgttgcccttggttatactgcacatctggtctccatgatttcctttttcctacaagtgcccctcagatatcctataattcataaggggtctagatcaacaatcaaagacaatatcaatgacaaactgacggaaaaggagagagagtttccactgtatccaaaaggaggggagaagttgcagtttgattatggtgtctatcttctgaacaaaaatatagcacagctaagatatcaacatggactagggactccagacttgcggcaaacccttcccaacctgaaaaacttcatggagcatggactaatggtcaggtgtgacagacatcacacctccagtgcaatccctgttcctaagagacaaagctccatatttgggggtgcagatgtaggcttctctggggggatcccttcaccagacaaaggacatcgaaaacgggccagctctgagaatgagagacttcagtacaaaacccctcctcccagttacaactcagcattagcccagcctgtgaccaccgtcccctccatgggagagaccgagagaaagataacatctctatcctcctccttggatacctccttggacttctccaaagaaaacaagaaaaaaggagaggatctagttggcagcttaaacggaggccacgcgaatgtgcaccctagccaagaacaaggagaagccctctccgggcaccgggccacagtcaatggcactctcctacccagcgagcaggccgggtccgccagtgtccagcttccaggcgagttccacccagtctcagaagctgagctctgctgtactgtggagcaagcagaagaaatcatcgggctggaagccacaggtttcgcctcaggtgatcagctagaagcatttaactgcatcccagtggacagtgctgtggcagtagagtgtgacgaacaagttctgggagaatttgaagagttctcccgaaggatctatgcactgaatgaaaacgtatccagcttccgccggccgcgcaggagttccgataagtgaagtgagcaggtcaacagtaggactggggcagaagctctgcctaaaatgaagtgaaagctgcacttaaccctttgtgataatgatgacacaaaatgaatattaatggaggatattcctcggaaaaacagactttgggaatgaaggagggactcaggatcattgttatcagtgggccaaagttagattttgctttcaagatttgcttttcgggcctgatgattttaaagcaaaaatcaccctctagttgaaagagcttacagctcgagtcaccttttagctatttgtctgctttttatttacccttgtatgttatcctcagagggaagatgataatatataaataatataatgaacacacccttagtttctcataagcatttgccctcaccatggtttataaaactttgggaaaacggaatattcagaaataggtttccgccatgtactgaaaggtctgtggccatctgtgaggtagatgaagaagcagcatagtggtctccttacatctaggcctaactgtccctcttcctgcccccgggtaccacagtccacctttagaccctactgtcgccccatcttctccgtggatgggccatgcgtcctgaaaacaggacatcagattcactggttctgtaacccagtagctgtgacgttccatctcttctaaccagccatggccttcccctcctctgccatacccttaatgcggccctcagattagatgaaaaacttgctcctggtggatcccaagggaccctcaaggacctcgaggttactgcagtcagatgccatctcatcccctgtgggggccaaagtttttatgtgggcagatgctgtggtcaggaactaggcatgctttctggcaatgcactcaccagacaaaaatcccttgatgtaaatcccatgttaatttattaaatttcagtcagaaggtcagcatttacatgacagaatgtatgtagagagttggggtgtctggtaggcaaactgcaaggcagttgagatagttggattaagaggctagacgagacatagaatactattggtatgtgtgcaatttcatgaatattaaattatgtttcgaagtccagttgtcattcccgcattcagatttcatttgctgttgctttatacgttacgtacccaaggacattgcctcagggttgcaaactctttaaaggaaaatttatccatatatccatgtattatatagaagaataaaaattgagtttacttcacccgacctgatttttttttaccagcttggaaattcctcttgaacctacgtctccatatgtcacatcatgacaggactagcctgaacaaaagccatgtctatctaagcggaggctgttgacttcattcagtttgcatattgtatatagcaacacaaacacttgacaggtatatactccagtcgccacatttgtcctgcataacagcttcactcacaggcctcaccgtcactttattttgtgtccaagcattcctgggctcaagtttaatgtatagctacattgttgttttccatgtagagaactcacaggatgactacatcacaaataaacccaactctcaggcagtcgaaagctttaactggatctgcagaagcccatcttcctccacatgaagaagtggggctccttcacctagagcaggagcttctctgcagtgtactgtctgtcgctcattttggagtcagtgtgggtggagacagcatcgtggatatgcacgtgctgcggggccctccagggaagtaacatttaccaaaaaaaaagaaaa

SEQ ID NO: 198523 - DNA, 1823 bp, Homo sapiens
  Payload ID: 19182
  Gene Name: UV radiation resistance associated
  Uniprot ID: Q9P2Y5
  ENST ID: ENST00000533454
  CDS Start-End: 753-1736
actacccacaagaggtggtgaaaacgatctctggtataaagcaaatggaaaaggcttcatagagcccagtgtgcaattaaacagactcaggtaactgttcagaaaattggaaaggaaattgaagaaaaactaagactcacatctacaagcaatgaactgaaaaaaaaaagtgaatgcctgcagttaaaaattttggtgcttcagaatgaactggaacggcagaagaaagctttgggacgggaggtggcattactgcataagcaacaaattgcattacaagacaaaggaagtgcattttcagctgagcacctcaaacttcaactccagaaggaatccctaaatgagctgaggaaggagtgcactgcaaaaagagaactcttcttgaagactaatgctcagttgacaattcgttgcaggcagttactctctgagctttcctacatttaccctattgatttgaatgaacataaggattactttgtatgcggtgtcaagttgcctaattctgaggacttccaaggcatgatttcttggaaaggagagtccatatgtcaaacaatgtctcattgagaacatggaatgattccatagatgctgtggcagtgattagagtcttaaatattttgtcctgtctggatcagtgggtgcttggttccttaacaaatcagctgcctcagtgattgggaaggcaggatgcaaaagatgatggaagcattgctgttgcccttggttatactgcacatctggtctccatgatttcctttttcctacaagtgcccctcagatatcctataattcataaggggtctagatcaacaatcaaagacaatatcaatgacaaactgacggaaaaggagagagagtttccactgtatccaaaaggaggggagaagttgcagtttgattatggtgtctatcttctgaacaaaaatatagcacagctaagatatcaacatggactagggactccagacttgcggcaaacccttcccaacctgaaaaacttcatggagcatggactaatggtcaggtgtgacagacatcacacctccagtgcaatccctgttcctaagagacaaagctccatatttgggggtgcagatgtaggcttctctggggggatcccttcaccagacaaaggacatcgaaaacgggccagctctgagaatgagagacttcagtacaaaacccctcctcccagttacaactcagcattagcccagcctgtgaccaccgtcccctccatgggagagaccgagagaaagataacatctctatcctcctccttggatacctccttggacttctccaaagaaaacaagaaaaaaggagaggatctagttggcagcttaaacggaggccacgcgaatgtgcaccctagccaagaacaaggagaagccctctccgggcaccgggccacagtcaatggcactctcctacccagcgagcaggccgggtccgccagtgtccagcttccaggcgagttccacccagtctcagaagctgagctctgctgtactgtggagcaagcagaagaaatcatcgggctggaagccacaggtttcgcctcaggtgatcagctagaagcatttaactgcatcccagtggacagtgctgtggcagtagagtgtgacgaacaagttctgggagaatttgaagagttctcccgaaggatctatgcactgaatgaaaacgtatccagcttccgccggccgcgcaggagttccgataagtgaagtgagcaggtcaacagtaggactggggcagaagctctgcctaaaatgaagtgaaagctgcacttaaccctttgtgataatgatgac

SEQ ID NO: 198524 - DNA, 1325 bp, Homo sapiens
  Payload ID: 19182
  Gene Name: UV radiation resistance associated
  ENST ID: ENST00000525183
  CDS Start-End: 1-273
aattctattttttcaccttcacagctaagatatcaacatggactagggactccagacttgcggcaaacccttcccaacctgaaaaacttcatggagcatggactaatggtcaggtggacatctgctttacaagaacacagcaaactaagaaagggtatagtggccactgcgggcaggggcactgattcaaccacccacagcgccagaggggactcgaagaacccacgccaggcttacctccagacctgcgtcctacagaacagacaccactgaacatcctgtagtccccttattgtgtcatcgctcagtaatgttcatatcagtggcccagaggcaacgagaaaatgccttttcttgttcaacttttttaagatgtgacagacatcacacctccagtgcaatccctgttcctaagagacaaagctccatatttgggggtgcagatgtaggcttctctggggggatcccttcaccagacaaaggacatcgaaaacgggccagctctgagaatgagagacttcagtacaaaacccctcctcccagttacaactcagcattagcccagcctgtgaccaccgtcccctccatgggagagaccgagagaaagataacatctctatcctcctccttggatacctccttggacttctccaaagaaaacaagaaaaaaggagaggatctagttggcagcttaaacggaggccacgcgaatgtgcaccctagccaagaacaaggagaagccctctccgggcaccgggccacagtcaatggcactctcctacccagcgagcaggccgggtccgccagtgtccagcttccaggcgagttccacccagtctcagaagctgagctctgctgtactgtggagcaagcagaagaaatcatcgggctggaagccacaggtttcgcctcaggtgatcagctagaagcatttaactgcatcccagtggacagtgctgtggcagtagagtgtgacgaacaagttctgggagaatttgaagagttctcccgaaggatctatgcactgaatgaaaacgtatccagcttccgccggccgcgcaggagttccgataagtgaagtgagcaggtcaacagtaggactggggcagaagctctgcctaaaatgaagtgaaagctgcacttaaccctttgtgataatgatgacacaaaatgaatattaatggaggatattcctcggaaaaacagactttgggaatgaaggagggactcaggatcattgttatcagtgggccaaagttagattttgctttcaagatttgcttttcgggcctgatgattttaaagcaaaaatcaccctctagttg

SEQ ID NO: 198525 - DNA, 511 bp, Homo sapiens
  Payload ID: 19182
  Gene Name: UV radiation resistance associated
  ENST ID: ENST00000528264
  CDS Start-End: 116-511
acatcccagacgatgggcggccaggcagagacgctcctcacttcctagacggggtggcggccgggcagaggctgcactctggaatcccacgtggcgaagtctcgattttggaattatgccagaccgtcttgatacatctgtgtcttgtttcgtggtgaagatatggggtggaaaggagaacatctaccagctgttgattgaatggaaagtctgtttggatgggctgaaatacttgggtcagcagattcatgcccgaaaccaaaatgaaataatttttgggctgaatgatggatactatggtgctccatttgaacataagggttattcaaatgctcagaagactattcttctgcaggtggatcagaactgtgttcgcaattcttacgatgtcttctctttgctacggcttcatagagcccagtgtgcaattaaacagactcaggtaactgttcagaaaattggaaaggaaattgaagaaaaactaagactcacatctacaagcaatgaactg

SEQ ID NO: 198526 - DNA, 3152 bp, Homo sapiens
  Payload ID: 19182
  Gene Name: UV radiation resistance associated
  Uniprot ID: Q9P2Y5
  ENST ID: ENST00000531818
  CDS Start-End: 931-1914
cagttcgagcttctgggcagctttgtttacctgctcaagcctcagcattggtgggcgcccctcccccagcctcgctgccgccttgcagtttgatctcagactgctgtgctagcagtgagcaaggctccgtgggcgtgggaccctctgagccaggcgcgggatataatcttctggtatgctgtttgctaagacctttggaaaagcacagtattagggtgggagtgacctgattttccgggtgcgattttccaggtgccgtctgtcgtggcttcccttggctgggaaagggagttccccgaccccttgtgcttccctggtgaggcgatgccttgccctgctttggctcacggtccgtgggctgcacccactgtcctacaagccccagtgagatgaacccggcacctcaattggaaatgcagaaatcatccatcttctgcgtcgctcacgctggaagctgtagactggagctattcctattcggccatcttggaacctccctgcctcttttttctgaaaaaaaaaagtgaatgcctgcagttaaaaattttggtgcttcagaatgaactggaacggcagaagaaagctttgggacgggaggtggcattactgcataagcaacaaattgcattacaagacaaaggaagtgcattttcagctgagcacctcaaacttcaactccagaaggaatccctaaatgagctgaggaaggagtgcactgcaaaaagagaactcttcttgaagactaatgctcagttgacaattcgttgcaggcagttactctctgagctttcctacatttaccctattgatttgaatgaacataaggattactttgtatgcggtgtcaagttgcctaattctgaggacttccaagcaaaagatgatggaagcattgctgttgcccttggttatactgcacatctggtctccatgatttcctttttcctacaagtgcccctcagatatcctataattcataaggggtctagatcaacaatcaaagacaatatcaatgacaaactgacggaaaaggagagagagtttccactgtatccaaaaggaggggagaagttgcagtttgattatggtgtctatcttctgaacaaaaatatagcacagctaagatatcaacatggactagggactccagacttgcggcaaacccttcccaacctgaaaaacttcatggagcatggactaatggtcaggtgtgacagacatcacacctccagtgcaatccctgttcctaagagacaaagctccatatttgggggtgcagatgtaggcttctctggggggatcccttcaccagacaaaggacatcgaaaacgggccagctctgagaatgagagacttcagtacaaaacccctcctcccagttacaactcagcattagcccagcctgtgaccaccgtcccctccatgggagagaccgagagaaagataacatctctatcctcctccttggatacctccttggacttctccaaagaaaacaagaaaaaaggagaggatctagttggcagcttaaacggaggccacgcgaatgtgcaccctagccaagaacaaggagaagccctctccgggcaccgggccacagtcaatggcactctcctacccagcgagcaggccgggtccgccagtgtccagcttccaggcgagttccacccagtctcagaagctgagctctgctgtactgtggagcaagcagaagaaatcatcgggctggaagccacaggtttcgcctcaggtgatcagctagaagcatttaactgcatcccagtggacagtgctgtggcagtagagtgtgacgaacaagttctgggagaatttgaagagttctcccgaaggatctatgcactgaatgaaaacgtatccagcttccgccggccgcgcaggagttccgataagtgaagtgagcaggtcaacagtaggactggggcagaagctctgcctaaaatgaagtgaaagctgcacttaaccctttgtgataatgatgacacaaaatgaatattaatggaggatattcctcggaaaaacagactttgggaatgaaggagggactcaggatcattgttatcagtgggccaaagttagattttgctttcaagatttgcttttcgggcctgatgattttaaagcaaaaatcaccctctagttgaaagagcttacagctcgagtcaccttttagctatttgtctgctttttatttacccttgtatgttatcctcagagggaagatgataatatataaataatataatgaacacacccttagtttctcataagcatttgccctcaccatggtttataaaactttgggaaaacggaatattcagaaataggtttccgccatgtactgaaaggtctgtggccatctgtgaggtagatgaagaagcagcatagtggtctccttacatctaggcctaactgtccctcttcctgcccccgggtaccacagtccacctttagaccctactgtcgccccatcttctccgtggatgggccatgcgtcctgaaaacaggacatcagattcactggttctgtaacccagtagctgtgacgttccatctcttctaaccagccatggccttcccctcctctgccatacccttaatgcggccctcagattagatgaaaaacttgctcctggtggatcccaagggaccctcaaggacctcgaggttactgcagtcagatgccatctcatcccctgtgggggccaaagtttttatgtgggcagatgctgtggtcaggaactaggcatgctttctggcaatgcactcaccagacaaaaatcccttgatgtaaatcccatgttaatttattaaatttcagtcagaaggtcagcatttacatgacagaatgtatgtagagagttggggtgtctggtaggcaaactgcaaggcagttgagatagttggattaagaggctagacgagacatagaatactattggtatgtgtgcaatttcatgaatattaaattatgtttcgaagtccagttgtcattcccgcattcagatttcatttgctgttgctttatacgttacgtacccaaggacattgcctcagggttgcaaactctttaaaggaaaatttatccatatatccatgtattatatagaagaataaaaattgagtttacttca

SEQ ID NO: 198527 - DNA, 2463 bp, Homo sapiens
  Payload ID: 19182
  Gene Name: UV radiation resistance associated
  ENST ID: ENST00000528420
  CDS Start-End: 286-2082
agtgctcagctcccttgccatgcgataccctgcaagtcctcaccagcaaaaaggctctcaccagaggctgcccctcggcctgtgttatcagattttttgcggcgtcttcgacatcttcggaacattgctgcccggaacattgttaatagaaatggccatcagctccttgatacctactttacacttcacttgtgtagtactgaaaagatatataaagaattttatagaagtgaagtgattaagaattccttgaatcccacgtggcgaagtctcgattttggaattatgccagaccgtcttgatacatctgtgtcttgtttcgtggtgaagatatggggtggaaaggagaacatctaccagctgttgattgaatggaaagtctgtttggatgggctgaaatacttgggtcagcagattcatgcccgaaaccaaaatgaaataatttttgggctgaatgatggatactatggtgctccatttgaacataagggttattcaaatgctcagaagactattcttctgcaggtggatcagaactgtgttcgcaattcttacgatgtcttctctttgctacggcttcatagagcccagtgtgcaattaaacagactcaggtaactgttcagaaaattggaaaggaaattgaagaaaaactaagactcacatctacaagcaatgaactgaaaaaaaaaagtgaatgcctgcagttaaaaattttggtgcttcagaatgaactggaacggcagaagaaagctttgggacgggaggtggcattactgcataagcaacaaattgcattacaagacaaaggaagtgcattttcagctgagcacctcaaacttcaactccagaaggaatccctaaatgagctgaggaaggagtgcactgcaaaaagagaactcttcttgaagactaatgctcagttgacaattcgttgcaggcagttactctctgagctttcctacatttaccctattgatttgaatgaacataaggattactttgtatgcggtgtcaagttgcctaattctgaggacttccaagcaaaagatgatggaagcattgctgttgcccttggttatactgcacatctggtctccatgatttcctttttcctacaagtgcccctcagatatcctataattcataaggggtctagatcaacaatcaaagacaatatcaatgacaaactgacggaaaaggagagagagtttccactgtatccaaaaggaggggagaagttgcagtttgattatggtgtctatcttctgaacaaaaatatagcacagctaagatatcaacatggactagggactccagacttgcggcaaacccttcccaacctgaaaaacttcatggagcatggactaatggtcaggtgtgacagacatcacacctccagtgcaatccctgttcctaagagacaaagctccatatttgggggtgcagatgtaggcttctctggggggatcccttcaccagacaaaggacatcgaaaacgggccagctctgagaatgagagacttcagtacaaaacccctcctcccagttacaactcagcattagcccagcctgtgaccaccgtcccctccatgggagagaccgagagaaagataacatctctatcctcctccttggatacctccttggacttctccaaagaaaacaagaaaaaaggagaggatctagttggcagcttaaacggaggccacgcgaatgtgcaccctagccaagaacaaggagaagccctctccgggcaccgggccacagtcaatggcactctcctacccagcgagcaggccgggtccgccagtgtccagcttccaggcgagttccacccagtctcagaagctgagctctgctgtactgtggagcaagcagaagaaatcatcgggctggaagccacaggtttcgcctcaggtgatcagctagaagcatttaactgcatcccagtggacagtgctgtggcagtagagtgtgacgaacaagttctgggagaatttgaagagttctcccgaaggatctatgcactgaatgaaaacgtatccagcttccgccggccgcgcaggagttccgataagtgaagtgagcaggtcaacagtaggactggggcagaagctctgcctaaaatgaagtgaaagctgcacttaaccctttgtgataatgatgacacaaaatgaatattaatggaggatattcctcggaaaaacagactttgggaatgaaggagggactcaggatcattgttatcagtgggccaaagttagattttgctttcaagatttgcttttcgggcctgatgattttaaagcaaaaatcaccctctagttgaaagagcttacagctcgagtcaccttttagctatttgtctgctttttatttacccttgtatgttatcctcagagggaagatgataatatataaataatataatgaacacacccttagtttctcataagcatttg

SEQ ID NO: 198528 - DNA, 1831 bp, Homo sapiens
  Payload ID: 19182
  Gene Name: UV radiation resistance associated
  Uniprot ID: Q9P2Y5
  ENST ID: ENST00000532130
  CDS Start-End: 478-1461
tttagtagaattcactgtgaaaccaactagaccttttttttttctcccctgtttctgaagaaaaaaaaaagtgaatgcctgcagttaaaaattttggtgcttcagaatgaactggaacggcagaagaaagctttgggacgggaggtggcattactgcataagcaacaaattgcattacaagacaaaggaagtgcattttcagctgagcacctcaaacttcaactccagaaggaatccctaaatgagctgaggaaggagtgcactgcaaaaagagaactcttcttgaagactaatgctcagttgacaattcgttgcaggcagttactctctgagctttcctacatttaccctattgatttgaatgaacataaggattactttgtatgcggtgtcaagttgcctaattctgaggacttccaagcaaaagatgatggaagcattgctgttgcccttggttatactgcacatctggtctccatgatttcctttttcctacaagtgcccctcagatatcctataattcataaggggtctagatcaacaatcaaagacaatatcaatgacaaactgacggaaaaggagagagagtttccactgtatccaaaaggaggggagaagttgcagtttgattatggtgtctatcttctgaacaaaaatatagcacagctaagatatcaacatggactagggactccagacttgcggcaaacccttcccaacctgaaaaacttcatggagcatggactaatggtcaggtgtgacagacatcacacctccagtgcaatccctgttcctaagagacaaagctccatatttgggggtgcagatgtaggcttctctggggggatcccttcaccagacaaaggacatcgaaaacgggccagctctgagaatgagagacttcagtacaaaacccctcctcccagttacaactcagcattagcccagcctgtgaccaccgtcccctccatgggagagaccgagagaaagataacatctctatcctcctccttggatacctccttggacttctccaaagaaaacaagaaaaaaggagaggatctagttggcagcttaaacggaggccacgcgaatgtgcaccctagccaagaacaaggagaagccctctccgggcaccgggccacagtcaatggcactctcctacccagcgagcaggccgggtccgccagtgtccagcttccaggcgagttccacccagtctcagaagctgagctctgctgtactgtggagcaagcagaagaaatcatcgggctggaagccacaggtttcgcctcaggtgatcagctagaagcatttaactgcatcccagtggacagtgctgtggcagtagagtgtgacgaacaagttctgggagaatttgaagagttctcccgaaggatctatgcactgaatgaaaacgtatccagcttccgccggccgcgcaggagttccgataagtgaagtgagcaggtcaacagtaggactggggcagaagctctgcctaaaatgaagtgaaagctgcacttaaccctttgtgataatgatgacacaaaatgaatattaatggaggatattcctcggaaaaacagactttgggaatgaaggagggactcaggatcattgttatcagtgggccaaagttagattttgctttcaagatttgcttttcgggcctgatgattttaaagcaaaaatcaccctctagttgaaagagcttacagctcgagtcaccttttagctatttgtctgctttttatttacccttgtatgttatcctcagagggaagatgataatatataaataatataatgaacacacccttagtttctc

SEQ ID NO: 198529 - DNA, 6939 bp, Homo sapiens
  Payload ID: 19183
  Gene Name: uveal autoantigen with coiled-coil domains and ankyrin repeats
  Uniprot ID: Q9BZF9
  ENST ID: ENST00000322954
  CDS Start-End: 187-4437
aattggctacgggaggggagccccgcctcaggcctgtcgacgtctgctgcccggggcccgcaggtggcaggcaggtggggctggtacagcccgcgccgcctctgctgcagccgctgccgtctactccttgcgcgctggcactccgcagcctttaaggttcgcgcgggggccaggcaagagttagccatgaagagcctcaagtcccgcctgaggaggcaggacgtgcccggccccgcgtcgtctggcgccgccgccgccagcgcgcatgcagcagattggaataaatatgatgaccgattgatgaaagcagcagaaaggggggatgtagaaaaagtgacctcaatccttgctaaaaagggggtcaatccaggcaaactagatgtggaaggcagatctgtcttccatgttgtgacctcaaaggggaatcttgagtgtttgaatgccatccttatacatggagttgatattacaaccagtgacactgcagggagaaatgctcttcacctggctgctaagtatggacatgcattgtgcctacaaaaacttctacagtacaattgtcccactgagcatgcagacctgcagggaagaactgcacttcacgatgccgcaatggcagattgtccttctagcatacagctgctttgtgaccatggggcctctgtgaatgccaaagatgtagacgggcggacaccacttgttctggctactcagatgagtaggccaacaatatgtcaactgctgatagatagaggagcggatgttaattccagagacaaacaaaacagaactgccctcatgctaggttgcgaatatggttgcagagatgcagtagaagtcttaattaaaaatggtgctgatataagcttgctggatgcgcttggccatgatagttcttactatgcaagaattggtgacaatctggacattctaaccttgttgaagactgcatcggaaaataccaacaaagggagagaactttggaagaaagggccatctttgcaacagcgaaatttgacacacatgcaagatgaagtaaatgtgaagtcacatcagagggagcatcaaaatattcaggatttggagattgaaaatgaagatttgaaagagaggttgagaaaaattcagcaagaacaaagaatacttttggataaagtcaatggtttacagttacagctgaatgaggaagttatggttgctgatgatctggaaagcgagagagaaaagctgaagtcccttttggcagctaaagaaaagcaacatgaagaaagcttaaggactattgaggctctgaaaaatagatttaaatattttgagagtgatcatttaggatcaggaagtcatttcagtaaccgaaaagaagatatgcttcttaaacaaggtcagatgtatatggcagactcacagtgtacttccccaggtataccagcccatatgcaaagcagatctatgttaagacctctggaactatctttacccagtcaaacgtcatactctgaaaatgaaattttaaagaaagagttagaagcaatgcgaactttctgtgagtcagcaaaacaagaccgactgaagctccaaaatgaactggcacacaaagtggcagaatgcaaagctttagcattagaatgtgaaagggtcaaggaggattcagatgaacagataaagcaattagaagatgcattaaaagatgtgcagaagaggatgtatgagtcagaaggtaaagttaaacaaatgcagacccattttcttgcccttaaagaacacttaacaagtgaagcagcctcagggaatcacagactaaccgaggaactgaaggatcagttgaaagacttgaaagtaaaatatgaaggtgcttcagcagaagtggggaaattaagaaaccaaatcaaacaaaatgagatgatagtagaagagtttaagagggatgaaggcaagctgatagaagaaaataagcgattacagaaggaacttagtatgtgtgaaatggagcgagagaagaaaggaagaaaggtcacagagatggaaggccaggcaaaagaattgtcagcgaagttggccctttccattccagctgaaaaatttgaaaacatgaagagctcattatcaaatgaagtgaatgagaaagcaaaaaaattagtagaaatggaaagagaacatgaaaaatcacttagtgaaattagacagttaaagagagaacttgagaatgttaaggccaagcttgctcagcacgtcaaaccagaggaacatgaacaggttaagagcagattagaacagaaatcaggagaacttgggaagaagatcactgagttaacattgaaaaatcagacactacaaaaggaaattgaaaaagtttatttggataataagctcctcaaggagcaagcacataacttaacaattgaaatgaaaaatcattatgttcctttaaaagtaagtgaagacatgaaaaagtcacatgatgcaattattgatgatcttaatagaaagcttttagatgtaacacaaaaatatacagaaaagaagttggaaatggagaaattgctactggaaaatgacagcttaagtaaggatgtaagccgcctagaaactgtgtttgtacctcctgagaaacatgaaaaagagataatagctctgaaatccaatattgttgaacttaagaaacagctgtctgaacttaagaaaaaatgtggtgaagaccaggagaaaatacacgctctcacatctgaaaacactaacttgaagaagatgatgagtaatcagtatgtgccagttaaaacccatgaagaggttaaaatgacactgaatgacacgttagccaaaactaacagagaattattagatgtgaagaaaaaatttgaagatataaatcaggaatttgtaaaaataaaagataagaatgaaatattaaaaagaaacctggaaaacactcagaaccaaataaaagctgagtacatcagcctggcagagcacgaggcaaagatgagctcgctaagtcagagcatgagaaaggtgcaggatagtaatgctgaaatcttggccaactacagaaaaggccaagaagagattgtgacactgcatgccgaaattaaagcccagaagaaggagctcgacacaatacaagaatgcattaaggtaaaatacgccccaattgtcagctttgaggagtgcgagagaaaatttaaagcaacagagaaagaactaaaagaccagttatcagagcagacacaaaagtatagtgtcagtgaagaagaagtcaagaaaaacaagcaagagaatgacaagttaaagaaggagatttttacccttcagaaagatttgagagataagacagttctcattgagaagtctcatgaaatggaaagagcattaagcagaaaaacagacgagctaaacaaacagttaaaagacttgtcacagaaatacacggaagtaaagaatgtgaaagagaagctagtagaagaaaatgccaaacagacttctgagatacttgcagtgcaaaatcttttgcaaaaacaacatgttccattggaacaggttgaggctctgaaaaaatctcttaatggcacaattgaaaatctaaaggaagaactgaagagtatgcaaaggtgttacgagaaagagcagcagacagtgaccaaactgcatcaattgttggagaatcaaaagaactcttctgtacccctggcagagcatttgcagattaaagaagcatttgagaaagaagttggaatcataaaagccagcttgagagaaaaggaagaagaaagccaaaacaaaatggaagaagtctccaaacttcagtcggaggttcagaatactaaacaagcattaaaaaaattagagactagagaggtagttgacttgtctaaatataaagcaacaaaaagtgatttggagacacagatttctagcttaaatgaaaaattggccaatctgaatagaaagtatgaggaagtatgtgaggaagttttgcatgccaaaaagaaggaaatatctgcaaaagatgagaaggaattactgcatttcagcattgagcaagaaattaaggatcagaaggaacgatgtgataagtccttaacaacaatcacagagttacaaagaagaatacaagaatctgctaaacaaatagaagcaaaagataataagataactgaactgcttaatgatgtggaaagattaaaacaggcactcaatggcctttcccaactcacctacacaagtgggaaccccaccaagaggcagagccagctgattgacactctgcagcaccaagtgaaatctctggagcaacagctggccgatgctgacagacagcaccaagaagtaattgcaatttatcggacacaccttcttagtgctgcacagggtcacatggatgaagatgttcaggaggctctgctccagatcatacaaatgcggcaggggcttgtgtgctagccgttagcactgactgccagtatctgttttatcttgctggtgctgaacattctttgtgcaactccatggtctttctgggccttactgtgctggtataattaaaataaaatatattttgttctattggtaggtttttttttaaaattagatgaatatgttagtctttttcaatatcagtttgaatcttattttctgtatgtgttaattttacaaataggcaaacaacataactttgccctggattgactacatatttttaaaccttcaagtccctaataaaacatgagccatctgagtgagtccatatgaagcgaggttaggctgaaataattgcttaaagatgtctttcagagaaattaatttggttggtggccacttttaggtggatcaaaagacctttcagatcctcagaaccttgagacataatacagttgtgaggaatgtgttgtaacttggctggccaagttacatgttacagtatctttactgaggtaacttcattagtgtctttggccttttttgtaggtatagatattttttctttttacactaataacttttatgccttttaaaataaatttattttcataaatggtttgcagtgctaaattacatttagattaagaacaggcaggggtggaatatatcaggaatttataataaaattgccttaatctctacaacagtatcttaatttttacttgcggtgactattcttgccacaatattggagaataatgatagatgatatactagatttttcaaagtgtgaaaacctttagactttttttagcaattagtttgacattcgctactatagtaaccaagcactcattatatatgcatcctccaaatgtttcatgcttatttataggaaagttatattaatgagattaataatgtgaaatacagttttcctgcaaaattagcattagagaattgattttagataacagatttttaaagttttagagaaaagtacagtaatacagtaaactgaaagagtatatagatagcaataaaataacataagtggacatgtttatagtaaatactctgaagtaaacaaccgtttttattaactgcatctcattagggaaagtttatatgtcttgttattttttattaacattttatttaccattcagagtgaaaattactaatttgagtattaacaaataactgaataaatggatcattacagttaggttttctcaaattgcaaaatttgccttagcaattatctttgaacatcccgaaccagatttttaaatcccatttttgtttaatagggtaaaaataccatcaaaatgacttctcataccaaagaataagccatcatattttttcggtgttgaaacaacattgaaagtcagaattggatttgtttttaattctttatacggtttacataagcaatatctgtctctttaattattatgattaatgtcgtccttcagcatgagttctgtttcacaagttttgggccacctatttcaataaaaaataaaatataaattaaaaaagttgccgggggtggtggctcatgcctgtaatcccagcactttgggaggctgagggaggtagatcacctgaggtcagaagttcgagaccagccttaccaatatggtgaagccccatctctactaaaaatacaaaaattagccctgcatggtggcaggtgcctgtagtcccaggtactcgggaggctgagacaggagaatcgcttgaacctgggaggcggaggttgcagtgagccaagatctcgccactgcactccagcttgggcaatagcaagactccatctcaaaataaaataaaataaaacttagagcaaagtttaaaactgagtattcatattaagtgttttattttccatattagagatgggaagggaaccttatgtgtattttattttgttttcaaccatcaataaagttttctctagaatattgttttgaacatccttgtaaaagatttgcgagttaaactattttatttactgtctgtgagagcattgggagtaggaaacgatggactccaaagtacaagggagaatacccattttcattcagctatctggagtaaaatatcaagtacttccttcaactaatcttgtctcattcactcaccttttgatatcgaaggcagaaattgcgtttacaacactgaagaccaaagctttttaattagtaaacaagcggaacatagataatggacaatgctggccactgccattctgtgttcagaaagactatgagacctgaacatatggccaagaggaaagaagagtgacgttgtctaagatgtaatgagtgctctctgagagaatcactcaattcctattggagtgcaatccttacttgagaactttattactcttgttctgtgtagttttttttttttgtcacttccccatcagaaaagcatattctttttgatagagggtcagtgttataaataattgtcttttgaaataaaatcaaatattcatgcattgaa

SEQ ID NO: 198530 - DNA, 4859 bp, Homo sapiens
  Payload ID: 19183
  Gene Name: uveal autoantigen with coiled-coil domains and ankyrin repeats
  Uniprot ID: Q9BZF9
  ENST ID: ENST00000379983
  CDS Start-End: 394-4605
atcatgcactgcagcgtctgtgttgcagtgttgaggcagcaggatgcagagtgctgttcaagttttccagtggggtccctcaaagggacaactttgaaagatagctagcttccaaagaataagaaatagatagagttactgtacctgacttggggctgctcttaatcaagttctgcattgcaaggaagataatattcgagcgttatgaaggcggagaaggatcctgaagacgaagaaaatatcgttagagatccaagctaagtgtagcacagcatgtgagggactgagtcacttgtcaggagtttgtctgagagtttgctttgtgagcttacagagatttgtaacttaatgcaaagtagtttgccattagcaacaagaaactaaatcctgtctatgatgaactgttggttttcttgtactcctaagaacagacatgcagcagattggaataaatatgatgaccgattgatgaaagcagcagaaaggggggatgtagaaaaagtgacctcaatccttgctaaaaagggggtcaatccaggcaaactagatgtggaaggcagatctgtcttccatgttgtgacctcaaaggggaatcttgagtgtttgaatgccatccttatacatggagttgatattacaaccagtgacactgcagggagaaatgctcttcacctggctgctaagtatggacatgcattgtgcctacaaaaacttctacagtacaattgtcccactgagcatgcagacctgcagggaagaactgcacttcacgatgccgcaatggcagattgtccttctagcatacagctgctttgtgaccatggggcctctgtgaatgccaaagatgtagacgggcggacaccacttgttctggctactcagatgagtaggccaacaatatgtcaactgctgatagatagaggagcggatgttaattccagagacaaacaaaacagaactgccctcatgctaggttgcgaatatggttgcagagatgcagtagaagtcttaattaaaaatggtgctgatataagcttgctggatgcgcttggccatgatagttcttactatgcaagaattggtgacaatctggacattctaaccttgttgaagactgcatcggaaaataccaacaaagggagagaactttggaagaaagggccatctttgcaacagcgaaatttgacacacatgcaagatgaagtaaatgtgaagtcacatcagagggagcatcaaaatattcaggatttggagattgaaaatgaagatttgaaagagaggttgagaaaaattcagcaagaacaaagaatacttttggataaagtcaatggtttacagttacagctgaatgaggaagttatggttgctgatgatctggaaagcgagagagaaaagctgaagtcccttttggcagctaaagaaaagcaacatgaagaaagcttaaggactattgaggctctgaaaaatagatttaaatattttgagagtgatcatttaggatcaggaagtcatttcagtaaccgaaaagaagatatgcttcttaaacaaggtcagatgtatatggcagactcacagtgtacttccccaggtataccagcccatatgcaaagcagatctatgttaagacctctggaactatctttacccagtcaaacgtcatactctgaaaatgaaattttaaagaaagagttagaagcaatgcgaactttctgtgagtcagcaaaacaagaccgactgaagctccaaaatgaactggcacacaaagtggcagaatgcaaagctttagcattagaatgtgaaagggtcaaggaggattcagatgaacagataaagcaattagaagatgcattaaaagatgtgcagaagaggatgtatgagtcagaaggtaaagttaaacaaatgcagacccattttcttgcccttaaagaacacttaacaagtgaagcagcctcagggaatcacagactaaccgaggaactgaaggatcagttgaaagacttgaaagtaaaatatgaaggtgcttcagcagaagtggggaaattaagaaaccaaatcaaacaaaatgagatgatagtagaagagtttaagagggatgaaggcaagctgatagaagaaaataagcgattacagaaggaacttagtatgtgtgaaatggagcgagagaagaaaggaagaaaggtcacagagatggaaggccaggcaaaagaattgtcagcgaagttggccctttccattccagctgaaaaatttgaaaacatgaagagctcattatcaaatgaagtgaatgagaaagcaaaaaaattagtagaaatggaaagagaacatgaaaaatcacttagtgaaattagacagttaaagagagaacttgagaatgttaaggccaagcttgctcagcacgtcaaaccagaggaacatgaacaggttaagagcagattagaacagaaatcaggagaacttgggaagaagatcactgagttaacattgaaaaatcagacactacaaaaggaaattgaaaaagtttatttggataataagctcctcaaggagcaagcacataacttaacaattgaaatgaaaaatcattatgttcctttaaaagtaagtgaagacatgaaaaagtcacatgatgcaattattgatgatcttaatagaaagcttttagatgtaacacaaaaatatacagaaaagaagttggaaatggagaaattgctactggaaaatgacagcttaagtaaggatgtaagccgcctagaaactgtgtttgtacctcctgagaaacatgaaaaagagataatagctctgaaatccaatattgttgaacttaagaaacagctgtctgaacttaagaaaaaatgtggtgaagaccaggagaaaatacacgctctcacatctgaaaacactaacttgaagaagatgatgagtaatcagtatgtgccagttaaaacccatgaagaggttaaaatgacactgaatgacacgttagccaaaactaacagagaattattagatgtgaagaaaaaatttgaagatataaatcaggaatttgtaaaaataaaagataagaatgaaatattaaaaagaaacctggaaaacactcagaaccaaataaaagctgagtacatcagcctggcagagcacgaggcaaagatgagctcgctaagtcagagcatgagaaaggtgcaggatagtaatgctgaaatcttggccaactacagaaaaggccaagaagagattgtgacactgcatgccgaaattaaagcccagaagaaggagctcgacacaatacaagaatgcattaaggtaaaatacgccccaattgtcagctttgaggagtgcgagagaaaatttaaagcaacagagaaagaactaaaagaccagttatcagagcagacacaaaagtatagtgtcagtgaagaagaagtcaagaaaaacaagcaagagaatgacaagttaaagaaggagatttttacccttcagaaagatttgagagataagacagttctcattgagaagtctcatgaaatggaaagagcattaagcagaaaaacagacgagctaaacaaacagttaaaagacttgtcacagaaatacacggaagtaaagaatgtgaaagagaagctagtagaagaaaatgccaaacagacttctgagatacttgcagtgcaaaatcttttgcaaaaacaacatgttccattggaacaggttgaggctctgaaaaaatctcttaatggcacaattgaaaatctaaaggaagaactgaagagtatgcaaaggtgttacgagaaagagcagcagacagtgaccaaactgcatcaattgttggagaatcaaaagaactcttctgtacccctggcagagcatttgcagattaaagaagcatttgagaaagaagttggaatcataaaagccagcttgagagaaaaggaagaagaaagccaaaacaaaatggaagaagtctccaaacttcagtcggaggttcagaatactaaacaagcattaaaaaaattagagactagagaggtagttgacttgtctaaatataaagcaacaaaaagtgatttggagacacagatttctagcttaaatgaaaaattggccaatctgaatagaaagtatgaggaagtatgtgaggaagttttgcatgccaaaaagaaggaaatatctgcaaaagatgagaaggaattactgcatttcagcattgagcaagaaattaaggatcagaaggaacgatgtgataagtccttaacaacaatcacagagttacaaagaagaatacaagaatctgctaaacaaatagaagcaaaagataataagataactgaactgcttaatgatgtggaaagattaaaacaggcactcaatggcctttcccaactcacctacacaagtgggaaccccaccaagaggcagagccagctgattgacactctgcagcaccaagtgaaatctctggagcaacagctggccgatgctgacagacagcaccaagaagtaattgcaatttatcggacacaccttcttagtgctgcacagggtcacatggatgaagatgttcaggaggctctgctccagatcatacaaatgcggcaggggcttgtgtgctagccgttagcactgactgccagtatctgttttatcttgctggtgctgaacattctttgtgcaactccatggtctttctgggccttactgtgctggtataattaaaataaaatatattttgttctattggtaggtttttttttaaaattagatgaatatgttagtctttttcaatatcagtttgaatcttattttctgtatgtgttaattttacaaataggcaaacaacataactttgccctggattgactacatat

SEQ ID NO: 198531 - DNA, 4026 bp, Homo sapiens
  Payload ID: 19183
  Gene Name: uveal autoantigen with coiled-coil domains and ankyrin repeats
  ENST ID: ENST00000539319
  CDS Start-End: 24-3947
cgggggccaggcaagagttagccatgaagagcctcaagtcccgcctgaggaggcaggacgtgcccggccccgcgtcgtctggcgccgccgccgccagcgcgcatgcagcagattggaataaatatgatgaccgattgatgaaagcagcagaaaggggggatgtagaaaaagtgacctcaatccttgctaaaaagggggtcaatccaggcaaactagatgtggaaggcagatctgtcttccatgttgtgacctcaaaggggaatcttgagtgtttgaatgccatccttatacatggagttgatattacaaccagtgacactgcagggagaaatgctcttcacctggctgctaagtatggacatgcattgtgcctacaaaaacttctacagtacaattgtcccactgagcatgcagacctgcagggaagaactgcacttcacgatgccgcaatggcagattgtccttctagcatacagctgctttgtgaccatggggcctctgtgaatgccaaagatgtacgaaatttgacacacatgcaagatgaagtaaatgtgaagtcacatcagagggagcatcaaaatattcaggatttggagattgaaaatgaagatttgaaagagaggttgagaaaaattcagcaagaacaaagaatacttttggataaagtcaatggtttacagttacagctgaatgaggaagttatggttgctgatgatctggaaagcgagagagaaaagctgaagtcccttttggcagctaaagaaaagcaacatgaagaaagcttaaggactattgaggctctgaaaaatagatttaaatattttgagagtgatcatttaggatcaggaagtcatttcagtaaccgaaaagaagatatgcttcttaaacaaggtcagatgtatatggcagactcacagtgtacttccccaggtataccagcccatatgcaaagcagatctatgttaagacctctggaactatctttacccagtcaaacgtcatactctgaaaatgaaattttaaagaaagagttagaagcaatgcgaactttctgtgagtcagcaaaacaagaccgactgaagctccaaaatgaactggcacacaaagtggcagaatgcaaagctttagcattagaatgtgaaagggtcaaggaggattcagatgaacagataaagcaattagaagatgcattaaaagatgtgcagaagaggatgtatgagtcagaaggtaaagttaaacaaatgcagacccattttcttgcccttaaagaacacttaacaagtgaagcagcctcagggaatcacagactaaccgaggaactgaaggatcagttgaaagacttgaaagtaaaatatgaaggtgcttcagcagaagtggggaaattaagaaaccaaatcaaacaaaatgagatgatagtagaagagtttaagagggatgaaggcaagctgatagaagaaaataagcgattacagaaggaacttagtatgtgtgaaatggagcgagagaagaaaggaagaaaggtcacagagatggaaggccaggcaaaagaattgtcagcgaagttggccctttccattccagctgaaaaatttgaaaacatgaagagctcattatcaaatgaagtgaatgagaaagcaaaaaaattagtagaaatggaaagagaacatgaaaaatcacttagtgaaattagacagttaaagagagaacttgagaatgttaaggccaagcttgctcagcacgtcaaaccagaggaacatgaacaggttaagagcagattagaacagaaatcaggagaacttgggaagaagatcactgagttaacattgaaaaatcagacactacaaaaggaaattgaaaaagtttatttggataataagctcctcaaggagcaagcacataacttaacaattgaaatgaaaaatcattatgttcctttaaaagtaagtgaagacatgaaaaagtcacatgatgcaattattgatgatcttaatagaaagcttttagatgtaacacaaaaatatacagaaaagaagttggaaatggagaaattgctactggaaaatgacagcttaagtaaggatgtaagccgcctagaaactgtgtttgtacctcctgagaaacatgaaaaagagataatagctctgaaatccaatattgttgaacttaagaaacagctgtctgaacttaagaaaaaatgtggtgaagaccaggagaaaatacacgctctcacatctgaaaacactaacttgaagaagatgatgagtaatcagtatgtgccagttaaaacccatgaagaggttaaaatgacactgaatgacacgttagccaaaactaacagagaattattagatgtgaagaaaaaatttgaagatataaatcaggaatttgtaaaaataaaagataagaatgaaatattaaaaagaaacctggaaaacactcagaaccaaataaaagctgagtacatcagcctggcagagcacgaggcaaagatgagctcgctaagtcagagcatgagaaaggtgcaggatagtaatgctgaaatcttggccaactacagaaaaggccaagaagagattgtgacactgcatgccgaaattaaagcccagaagaaggagctcgacacaatacaagaatgcattaaggtaaaatacgccccaattgtcagctttgaggagtgcgagagaaaatttaaagcaacagagaaagaactaaaagaccagttatcagagcagacacaaaagtatagtgtcagtgaagaagaagtcaagaaaaacaagcaagagaatgacaagttaaagaaggagatttttacccttcagaaagatttgagagataagacagttctcattgagaagtctcatgaaatggaaagagcattaagcagaaaaacagacgagctaaacaaacagttaaaagacttgtcacagaaatacacggaagtaaagaatgtgaaagagaagctagtagaagaaaatgccaaacagacttctgagatacttgcagtgcaaaatcttttgcaaaaacaacatgttccattggaacaggttgaggctctgaaaaaatctcttaatggcacaattgaaaatctaaaggaagaactgaagagtatgcaaaggtgttacgagaaagagcagcagacagtgaccaaactgcatcaattgttggagaatcaaaagaactcttctgtacccctggcagagcatttgcagattaaagaagcatttgagaaagaagttggaatcataaaagccagcttgagagaaaaggaagaagaaagccaaaacaaaatggaagaagtctccaaacttcagtcggaggttcagaatactaaacaagcattaaaaaaattagagactagagaggtagttgacttgtctaaatataaagcaacaaaaagtgatttggagacacagatttctagcttaaatgaaaaattggccaatctgaatagaaagtatgaggaagtatgtgaggaagttttgcatgccaaaaagaaggaaatatctgcaaaagatgagaaggaattactgcatttcagcattgagcaagaaattaaggatcagaaggaacgatgtgataagtccttaacaacaatcacagagttacaaagaagaatacaagaatctgctaaacaaatagaagcaaaagataataagataactgaactgcttaatgatgtggaaagattaaaacaggcactcaatggcctttcccaactcacctacacaagtgggaaccccaccaagaggcagagccagctgattgacactctgcagcaccaagtgaaatctctggagcaacagctggccgatgctgacagacagcaccaagaagtaattgcaatttatcggacacaccttcttagtgctgcacagggtcacatggatgaagatgttcaggaggctctgctccagatcatacaaatgcggcaggggcttgtgtgctagccgttagcactgactgccagtatctgttttatcttgctggtgctgaacattctttgtgcaactccatggtctttctggg

SEQ ID NO: 198532 - DNA, 749 bp, Homo sapiens
  Payload ID: 19183
  Gene Name: uveal autoantigen with coiled-coil domains and ankyrin repeats
  ENST ID: ENST00000560167
  CDS Start-End: 73-749
gaaacaattttcacaaatgtgtctttttagaggaagtgtaaattattctcatgctattgtggtaatgagaacatggttaaaaaacaacaacaacagccaccacaaaaaaaccaccctgaatttgcaccggccttgcatgcagcagattggaataaatatgatgaccgattgatgaaagcagcagaaaggggggatgtagaaaaagtgacctcaatccttgctaaaaagggggtcaatccaggcaaactagatgtggaaggcagatctgtcttccatgttgtgacctcaaaggggaatcttgagtgtttgaatgccatccttatacatggagttgatattacaaccagtgacactgcagggagaaatgctcttcacctggctgctaagtatggacatgcattgtgcctacaaaaacttctacagtacaattgtcccactgagcatgcagacctgcagggaagaactgcacttcacgatgccgcaatggcagattgtccttctagcatacagctgctttgtgaccatggggcctctgtgaatgccaaagatgtagacgggcggacaccacttgttctggctactcagatgagtaggccaacaatatgtcaactgctgatagatagaggagcggatgttaattccagagacaaacaaaacagaactgccctcatgctaggttgcgaatatggttgcagagatgcagtagaagtcttaattaaaaatggtgctgatataagcttgctggatgc

SEQ ID NO: 198533 - DNA, 2060 bp, Homo sapiens
  Payload ID: 19183
  Gene Name: uveal autoantigen with coiled-coil domains and ankyrin repeats
  ENST ID: ENST00000558758
  CDS Start-End: 367-2060
gtgttgaggcagcaggatgcagagtgctgttcaagttttccagtggggtccctcaaagggacaactttgaaagatagctagcttccaaagaataagaaatagatagagttactgtacctgacttggggctgctcttaatcaagttctgcattgcaaggaagataatattcgagcgttatgaaggcggagaaggatcctgaagacgaagaaaatatcgttagagatccaagctaagtgtagcacagcatgtgagggactgagtcacttgtcaggagtttgtctgagagtttgctttgtgagcttacagagatttgtaacttaatgcaaagtagtttgccattagcaacaagaaactaaatcctgtctatgatgaactgttggttttcttgtactcctaagaacagacatgcagcagattggaataaatatgatgaccgattgatgaaagcagcagaaaggggggatgtagaaaaagtgacctcaatccttgctaaaaagggggtcaatccaggcaaactagatgtggaaggcagatctgtcttccatgttgtgacctcaaaggggaatcttgagtgtttgaatgccatccttatacatggagttgatattacaaccagtgacactgcagggagaaatgctcttcacctggctgctaagtatggacatgcattgtgcctacaaaaacttctacagtacaattgtcccactgagcatgcagacctgcagggaagaactgcacttcacgatgccgcaatggcagattgtccttctagcatacagctgctttgtgaccatggggcctctgtgaatgccaaagatgtagacgggcggacaccacttgttctggctactcagatgagtaggccaacaatatgtcaactgctgatagatagaggagcggatgttaattccagagacaaacaaaacagaactgccctcatgctaggttgcgaatatggttgcagagatgcagtagaagtcttaattaaaaatggtgctgatataagcttgctggatgcgcttggccatgatagttcttactatgcaagaattggtgacaatctggacattctaaccttgttgaagactgcatcggaaaataccaacaaagggagagaactttggaagaaagggccatctttgcaacagcgaaatttgacacacatgcaagatgaagtaaatgtgaagtcacatcagagggagcatcaaaatattcaggatttggagattgaaaatgaagatttgaaagagaggttgagaaaaattcagcaagaacaaagaatacttttggataaagtcaatggtttacagttacagctgaatgagagagaaaagctgaagtcccttttggcagctaaagaaaagcaacatgaagaaagcttaaggactattgaggctctgaaaaatagatttaaatattttgagagtgatcatttaggatcaggaagtcatttcagtaaccgaaaagaagatatgcttcttaaacaaggtcagatgtatatggcagactcacagtgtacttccccaggtataccagcccatatgcaaagcagatctatgttaagacctctggaactatctttacccagtcaaacgtcatactctgaaaatgaaattttaaagaaagagttagaagcaatgcgaactttctgtgagtcagcaaaacaagaccgactgaagctccaaaatgaactggcacacaaagtggcagaatgcaaagctttagcattagaatgtgaaagggtcaaggaggattcagatgaacagataaagcaattagaagatgcattaaaagatgtgcagaagaggatgtatgagtcagaaggtaaagttaaacaaatgcagacccattttcttgcccttaaagaacacttaacaagtgaagcagcctcagggaatcacagactaaccgaggaactgaaggatcagttgaaagacttgaaagtaaaatatgaaggtgcttcagcagaagtggggaaattaagaaaccaaatcaaacaaaatgagatgatagtagaagagtttaagagggatgaaggcaagctgatagaagaaaataa

SEQ ID NO: 198534 - DNA, 4723 bp, Homo sapiens
  Payload ID: 19183
  Gene Name: uveal autoantigen with coiled-coil domains and ankyrin repeats
  ENST ID: ENST00000560441
  CDS Start-End: 394-4599
atcatgcactgcagcgtctgtgttgcagtgttgaggcagcaggatgcagagtgctgttcaagttttccagtggggtccctcaaagggacaactttgaaagatagctagcttccaaagaataagaaatagatagagttactgtacctgacttggggctgctcttaatcaagttctgcattgcaaggaagataatattcgagcgttatgaaggcggagaaggatcctgaagacgaagaaaatatcgttagagatccaagctaagtgtagcacagcatgtgagggactgagtcacttgtcaggagtttgtctgagagtttgctttgtgagcttacagagatttgtaacttaatgcaaagtagtttgccattagcaacaagaaactaaatcctgtctatgatgaactgttggttttcttgtactcctaagaacagacatgcagcagattggaataaatatgatgaccgattgatgaaagcagcagaaaggggggatgtagaaaaagtgacctcaatccttgctaaaaagggggtcaatccaggcaaactagatgtggaaggcagatctgtcttccatgttgtgacctcaaaggggaatcttgagtgtttgaatgccatccttatacatggagttgatattacaaccagtgacactgcagggagaaatgctcttcacctggctgctaagtatggacatgcattgtgcctacaaaaacttctacagtacaattgtcccactgagcatgcagacctgcagggaagaactgcacttcacgatgccgcaatggcagattgtccttctagcatacagctgctttgtgaccatggggcctctgtgaatgccaaagatgtagacgggcggacaccacttgttctggctactcagatgagtaggccaacaatatgtcaactgctgatagatagaggagcggatgttaattccagagacaaacaaaacagaactgccctcatgctaggttgcgaatatggttgcagagatgcagtagaagtcttaattaaaaatggtgctgatataagcttgctggatgcgcttggccatgatagttcttactatgcaagaattggtgacaatctggacattctaaccttgttgaagactgcatcggaaaataccaacaaagggagagaactttggaagaaagggccatctttgcaacagcgaaatttgacacacatgcaagatgaagtaaatgtgaagtcacatcagagggagcatcaaaatattcaggatttggagattgaaaatgaagatttgaaagagaggttgagaaaaattcagcaagaacaaagaatacttttggataaagtcaatggtttacagttacagctgaatgaggaagttatggttgctgatgatctggaaagcgagagagaaaagctgaagtcccttttggcagctaaagaaaagcaacatgaagaaagcttaaggactattgaggctctgaaaaatagatttaaatattttgagagtgatcatttaggatcaggaagtcatttcagaaaagaagatatgcttcttaaacaaggtcagatgtatatggcagactcacagtgtacttccccaggtataccagcccatatgcaaagcagatctatgttaagacctctggaactatctttacccagtcaaacgtcatactctgaaaatgaaattttaaagaaagagttagaagcaatgcgaactttctgtgagtcagcaaaacaagaccgactgaagctccaaaatgaactggcacacaaagtggcagaatgcaaagctttagcattagaatgtgaaagggtcaaggaggattcagatgaacagataaagcaattagaagatgcattaaaagatgtgcagaagaggatgtatgagtcagaaggtaaagttaaacaaatgcagacccattttcttgcccttaaagaacacttaacaagtgaagcagcctcagggaatcacagactaaccgaggaactgaaggatcagttgaaagacttgaaagtaaaatatgaaggtgcttcagcagaagtggggaaattaagaaaccaaatcaaacaaaatgagatgatagtagaagagtttaagagggatgaaggcaagctgatagaagaaaataagcgattacagaaggaacttagtatgtgtgaaatggagcgagagaagaaaggaagaaaggtcacagagatggaaggccaggcaaaagaattgtcagcgaagttggccctttccattccagctgaaaaatttgaaaacatgaagagctcattatcaaatgaagtgaatgagaaagcaaaaaaattagtagaaatggaaagagaacatgaaaaatcacttagtgaaattagacagttaaagagagaacttgagaatgttaaggccaagcttgctcagcacgtcaaaccagaggaacatgaacaggttaagagcagattagaacagaaatcaggagaacttgggaagaagatcactgagttaacattgaaaaatcagacactacaaaaggaaattgaaaaagtttatttggataataagctcctcaaggagcaagcacataacttaacaattgaaatgaaaaatcattatgttcctttaaaagtaagtgaagacatgaaaaagtcacatgatgcaattattgatgatcttaatagaaagcttttagatgtaacacaaaaatatacagaaaagaagttggaaatggagaaattgctactggaaaatgacagcttaagtaaggatgtaagccgcctagaaactgtgtttgtacctcctgagaaacatgaaaaagagataatagctctgaaatccaatattgttgaacttaagaaacagctgtctgaacttaagaaaaaatgtggtgaagaccaggagaaaatacacgctctcacatctgaaaacactaacttgaagaagatgatgagtaatcagtatgtgccagttaaaacccatgaagaggttaaaatgacactgaatgacacgttagccaaaactaacagagaattattagatgtgaagaaaaaatttgaagatataaatcaggaatttgtaaaaataaaagataagaatgaaatattaaaaagaaacctggaaaacactcagaaccaaataaaagctgagtacatcagcctggcagagcacgaggcaaagatgagctcgctaagtcagagcatgagaaaggtgcaggatagtaatgctgaaatcttggccaactacagaaaaggccaagaagagattgtgacactgcatgccgaaattaaagcccagaagaaggagctcgacacaatacaagaatgcattaaggtaaaatacgccccaattgtcagctttgaggagtgcgagagaaaatttaaagcaacagagaaagaactaaaagaccagttatcagagcagacacaaaagtatagtgtcagtgaagaagaagtcaagaaaaacaagcaagagaatgacaagttaaagaaggagatttttacccttcagaaagatttgagagataagacagttctcattgagaagtctcatgaaatggaaagagcattaagcagaaaaacagacgagctaaacaaacagttaaaagacttgtcacagaaatacacggaagtaaagaatgtgaaagagaagctagtagaagaaaatgccaaacagacttctgagatacttgcagtgcaaaatcttttgcaaaaacaacatgttccattggaacaggttgaggctctgaaaaaatctcttaatggcacaattgaaaatctaaaggaagaactgaagagtatgcaaaggtgttacgagaaagagcagcagacagtgaccaaactgcatcaattgttggagaatcaaaagaactcttctgtacccctggcagagcatttgcagattaaagaagcatttgagaaagaagttggaatcataaaagccagcttgagagaaaaggaagaagaaagccaaaacaaaatggaagaagtctccaaacttcagtcggaggttcagaatactaaacaagcattaaaaaaattagagactagagaggtagttgacttgtctaaatataaagcaacaaaaagtgatttggagacacagatttctagcttaaatgaaaaattggccaatctgaatagaaagtatgaggaagtatgtgaggaagttttgcatgccaaaaagaaggaaatatctgcaaaagatgagaaggaattactgcatttcagcattgagcaagaaattaaggatcagaaggaacgatgtgataagtccttaacaacaatcacagagttacaaagaagaatacaagaatctgctaaacaaatagaagcaaaagataataagataactgaactgcttaatgatgtggaaagattaaaacaggcactcaatggcctttcccaactcacctacacaagtgggaaccccaccaagaggcagagccagctgattgacactctgcagcaccaagtgaaatctctggagcaacagctggccgatgctgacagacagcaccaagaagtaattgcaatttatcggacacaccttcttagtgctgcacagggtcacatggatgaagatgttcaggaggctctgctccagatcatacaaatgcggcaggggcttgtgtgctagccgttagcactgactgccagtatctgttttatcttgctggtgctgaacattctttgtgcaactccatggtctttctgggccttactgtgctggtataattaaaataaaatatattttgttctat

SEQ ID NO: 198535 - DNA, 4560 bp, Homo sapiens
  Payload ID: 19184
  Gene Name: UV-stimulated scaffold protein A
  Uniprot ID: Q2YD98
  ENST ID: ENST00000389851
  CDS Start-End: 448-2577
gccagggcgtgtcccgtgtgcccgagagcgccggcggcggggccggagggcgggccctgggccgagtgacaggccgcagccccccgagcaccgtcgaagccggcgcgcccgcccggtgcagccgctgtgcgagagcgaccccgcggtccaagcctcgcgtggccctgccgggccccttctttccccgagtagggcgcagcttcccagcctccgccccggcctcgcctggcgcttccttccgggtccttcggcctttccctggcggtgcggcaggccctcgcctcatcccaccaggcacgccgcggtgctcggccctgggtatccgggcaggctgcctccgttagggccgcccctgctctccggacgcgacttttcattggtctcagaatttcttggctcctcttggcctctgcagccttgctggaggctgccctgcggaatctgaatatggatcagaaactttcgaagttggtagaagagctcacaacttcaggagaaccccgactaaatcctgagaaaatgaaggaactgaagaaaatttgcaagtcttcagaggagcagctgagccgcgcctaccgcctgctgatagcacagctgacccaggagcacgccgagatccgtctctcagccttccagattgtggaggaactcttcgtcaggtctcaccagttccggatgctggttgtttccaacttccaggagttcctggagctcacgctgggcacagaccccgcacagcctctgccgccccccagggaggcggcacagaggctgaggcaggcgaccacccgggccgtggaagggtggaatgagaagtttggggaggcctacaagaagcttgccttgggctaccacttcttaagacacaacaaaaaggtggattttcaagacacgaatgctcggagtctggcagaaaggaagagagaagaggagaagcagaagcacttggataaaatttatcaagaaagagccagccaggcggagagggagatgcaagaaatgtctggagaaattgaatcctgcttgacggaggtagagagctgctttaggctgctggtgccttttgactttgacccgaacccggagacggaatcccttggcatggcttctggcatgtccgatgcccttcgctcctcctgcgcgggccaggtgggcccctgccggtctggcacccctgacccccgggacggggagcagccctgctgcagtagagacctgcctgcctctgcaggccaccccagagcgggcggcggggcacagccatcccagacagccacaggtgacccctcagatgaggacgaggacagcgacctcgaggagtttgtgcggagccacgggctgggctcgcacaagtacacgctggatgtggagctctgctcagagggcctgaaggtgcaggagaacgaggacaaccttgctctcatccacgccgcccgcgacacactcaagctcatccggaacaagttcctgccggctgtgtgctcgtggatccagcgcttcacccgcgtcgggacccacggtggatgtttaaagcgtgccattgacctgaaggctgaattggagctcgtactgagaaaatacaaggagctggacatcgagcctgagggaggggaaaggcgcaggacagaagccctgggggatgcggaggaagatgaggacgatgaggactttgtggaggtccctgagaaggaggggtatgagccacacatccccgaccacttgcggcctgagtatgggctggaggcagcaccagagaaagacacagttgtgcggtgcttgcggacgaggacgaggatggacgaggaggtgtcggaccccacctctgcggctgctcagctgcggcagctccgggaccacttgcctccaccctcatctgccagcccctccagagcgttgccagagccacaggaggcccagaagctggcagcagagcgggcccgggcgcctgtggtgccctacggcgtggacctgcactactggggccaggagctccccacagccgggaagattgtcaagtctgactcccagcaccgcttctggaagcccagcgaggtggaggaggaagtggtcaatgccgacatctccgagatgctccggagccgccacatcacttttgccgggaagtttgagcctgtgcagcactggtgccgtgccccgaggccagacggccggctctgtgagcgccaagaccggctgaagtgccctttccatgggaagattgttccacgggacgacgaaggacggccgctcgacccggaagacagggctcgtgagcagcggcggcagctgcagaagcaggagcgcccggaatggcaggaccctgagttgatgagagacgtggaagcagccacagggcaggatctcggctcatccaggtacagcgggaaaggcagggggaagaagaggaggtaccccagcctcaccaacctgaaggctcaggctgataccgcccgcgctcgcattgggagaaaagtcttcgccaaggcagctgtgcggagggtagtggcagccatgaaccggatggaccagaagaagcacgagaagttttcaaaccagtttaactacgcactgaactagagagcggggcccagtgcactggccatcagcactttctccctctgccagtgtctcaggacagcagagtgggcgtgggtctgggcagtaaccatgctttgtctattactgtgtttgatgtaaagaaatggtgtgttgcaatgccctgaaggtacggccgctctgctgctacagggttcggcatcgtctggtgatgggtctggcctcgcagaagaggccctcgggcctggagatgtgaacacaggcagcgaccctgttccagagggcttctgcgagtcctcgtgagaccagtgcttgtcgtggtgtggggttcagcacggacggaatgtgtgtgcagctcagccttcagagcgtgcattccccagccaggaggcgaccactcagaggaactctgggaaacccacttttgtgcaaatgctgtttttaacacaaacacaaaggctagtgaaccgttcagtcatctgctttctgtttctggatgtgccttttcatacatgtgtcctcttgtccctggcttcttacacttggcgttgtttttaaggtttatccatgcagttcccctccaatgtataaaacaaaggaggtgaaaacctgtccatgcggaagcttgtgcacccatgttcacagcagcattggagaaggataccgaacatcttctcgtgggcttactggccatttgtgtatctcctttggagaggagtctattcaaacctcttgcctatttttaattgaatgatttatcttgagttgtaacagttgttttttttgtttttccttttagagatgggcttttgctcttacccaggctgagtgcagtggcagaatcatagctcagtgcagcctcaaactcctgggctcaagccatccttccacgtcagcctcccaggtagctgggactacaggcacacaccacaacacctggctaattttttaaattttttgtagagatgaggtctcactgtgttgcccacggtgatctcgaactcctagcctcaagcgatcctcctgcttcggtctcccaaagtgttgggattacaggcatgagccaccactcctggccaggagtttatatgtatactgtggatactagatcctcatgtgatttgcaaaaactttatttatttatttatttatttttgaaatggaatcttgctctgtcgccaggctggagtgcaatggcgtgatctcggctcactgcaactaccacctcctgggttcaagcgattcgcctgcgtcagcgtcctgagtagctgggactacaggcgcgcaccaccacgcccagctaatttttgtatttttagtagagacgggatttcactgtgttggctgggatggtcttgatctcttgacctcgtgatccacccacctcggcctcccatagtgctgggattacaggtgtgagccaccgcactcagctgatttgcaaaaactttcttccatactgttgtttcactttctggatagtgtcctctgaagcacaaaagttaattttgatgaagtacagcaatttatctgtttttttcttttgttgcttatgcttttgctgtcacatttcagaagccatcacctaatccaagatcacagagatttacacctagtttctaataagcattttataatttcagctcttatgtgtagatctttgatccattgtgaattaagttttgtgtgtggtgtaagagcccacattcttttgcatgtggatatccagttgtcccagcaccatttgttgaaaacattatttttccccattgaattatcttcgcaccattattgataatcagttgaccaaaaatgtacaggcttatttctgggcacttgactctattccattgacctgtttaaccttatgccagtgccacagtgccttgatcagtgctgctttgttgtgagaagttttactttgttctgcttcaaggctgttttgactcttctgcatctcttgcatttccaaatgaattttaggatccactcatcagtttcttc

SEQ ID NO: 198536 - DNA, 2597 bp, Homo sapiens
  Payload ID: 19184
  Gene Name: UV-stimulated scaffold protein A
  Uniprot ID: Q2YD98
  ENST ID: ENST00000507531
  CDS Start-End: 185-2314
tcttggctcctcttggcctctgcagccttgctggaggctgccctgcggaatctgagtgaataagggaaacagcaacagtcacgttggggaaaagctgattcggacagcgccactggttcctttaacgcacgaccctcaatgcagcgtcccacacacgggattgtagaggtcccgagtttaagatatggatcagaaactttcgaagttggtagaagagctcacaacttcaggagaaccccgactaaatcctgagaaaatgaaggaactgaagaaaatttgcaagtcttcagaggagcagctgagccgcgcctaccgcctgctgatagcacagctgacccaggagcacgccgagatccgtctctcagccttccagattgtggaggaactcttcgtcaggtctcaccagttccggatgctggttgtttccaacttccaggagttcctggagctcacgctgggcacagaccccgcacagcctctgccgccccccagggaggcggcacagaggctgaggcaggcgaccacccgggccgtggaagggtggaatgagaagtttggggaggcctacaagaagcttgccttgggctaccacttcttaagacacaacaaaaaggtggattttcaagacacgaatgctcggagtctggcagaaaggaagagagaagaggagaagcagaagcacttggataaaatttatcaagaaagagccagccaggcggagagggagatgcaagaaatgtctggagaaattgaatcctgcttgacggaggtagagagctgctttaggctgctggtgccttttgactttgacccgaacccggagacggaatcccttggcatggcttctggcatgtccgatgcccttcgctcctcctgcgcgggccaggtgggcccctgccggtctggcacccctgacccccgggacggggagcagccctgctgcagtagagacctgcctgcctctgcaggccaccccagagcgggcggcggggcacagccatcccagacagccacaggtgacccctcagatgaggacgaggacagcgacctcgaggagtttgtgcggagccacgggctgggctcgcacaagtacacgctggatgtggagctctgctcagagggcctgaaggtgcaggagaacgaggacaaccttgctctcatccacgccgcccgcgacacactcaagctcatccggaacaagttcctgccggctgtgtgctcgtggatccagcgcttcacccgcgtcgggacccacggtggatgtttaaagcgtgccattgacctgaaggctgaattggagctcgtactgagaaaatacaaggagctggacatcgagcctgagggaggggaaaggcgcaggacagaagccctgggggatgcggaggaagatgaggacgatgaggactttgtggaggtccctgagaaggaggggtatgagccacacatccccgaccacttgcggcctgagtatgggctggaggcagcaccagagaaagacacagttgtgcggtgcttgcggacgaggacgaggatggacgaggaggtgtcggaccccacctctgcggctgctcagctgcggcagctccgggaccacttgcctccaccctcatctgccagcccctccagagcgttgccagagccacaggaggcccagaagctggcagcagagcgggcccgggcgcctgtggtgccctacggcgtggacctgcactactggggccaggagctccccacagccgggaagattgtcaagtctgactcccagcaccgcttctggaagcccagcgaggtggaggaggaagtggtcaatgccgacatctccgagatgctccggagccgccacatcacttttgccgggaagtttgagcctgtgcagcactggtgccgtgccccgaggccagacggccggctctgtgagcgccaagaccggctgaagtgccctttccatgggaagattgttccacgggacgacgaaggacggccgctcgacccggaagacagggctcgtgagcagcggcggcagctgcagaagcaggagcgcccggaatggcaggaccctgagttgatgagagacgtggaagcagccacagggcaggatctcggctcatccaggtacagcgggaaaggcagggggaagaagaggaggtaccccagcctcaccaacctgaaggctcaggctgataccgcccgcgctcgcattgggagaaaagtcttcgccaaggcagctgtgcggagggtagtggcagccatgaaccggatggaccagaagaagcacgagaagttttcaaaccagtttaactacgcactgaactagagagcggggcccagtgcactggccatcagcactttctccctctgccagtgtctcaggacagcagagtgggcgtgggtctgggcagtaaccatgctttgtctattactgtgtttgatgtaaagaaatggtgtgttgcaatgccctgaaggtacggccgctctgctgctacagggttcggcatcgtctggtgatgggtctggcctcgcagaagaggccctcgggcctggagatgtgaacacaggcagcgaccctgttccagagggcttctgcgagtcctcgtgag

SEQ ID NO: 198537 - DNA, 4819 bp, Homo sapiens
  Payload ID: 19184
  Gene Name: UV-stimulated scaffold protein A
  ENST ID: ENST00000503548
  CDS Start-End: 1-409
cccctccagagcgttgccagagccacaggaggcccagaagctggcagcagagcgggcccgggcgcctgtggtgccctacggcgtggacctgcactactggggccaggagctccccacagccgggaagattgtcaagtctgactcccagcaccgcttctggaagcccagcgaggtggaggaggaagtggtcaatgccgacatctccgagatgctccggagccgccacatcacttttgccgggaagtttgagcctgtgcagcactggtgccgtgccccgaggccagacggccggctctgtgagcgccaagaccggctgaagactttccacagctgcccaagaccttccggctccagaggagggacggagccatccccacgtccctgtggctctcaggacgccctcctctgaggggcgcgtgattccagtgccctttccatgggaagattgttccacgggacgacgaaggacggccgctcgacccggaagacagggctcgtgagcagcggcggcagctgcagaagcaggagcgcccggaatggcaggaccctgagttgatgagagacgtggaagcagccacagggcaggatctcggctcatccaggtacagcgggaaaggcagggggaagaagaggaggtaccccagcctcaccaacctgaaggctcaggctgataccgcccgcgctcgcattgggagaaaagtcttcgccaagtaagagtggctgctgggtcacctcccaccgcgtggcccccccgtgtgagggtgttcgaggggggccatctgagcgccaagatattccagggacttggggcctccaggggctcccctgctttgagttcccctgggggaccacccagcctttccccggggaggggcagtgccagccagcaggggcagcaggcaggtctgctcaggaacgccccccagcattccccaggataagaggggctcgaccgccaggcaccgccatcctcgcttcctgggggagccatgccaggacacaggccttggctggtgcagagtgagcccctcgtctctcccttgcctggctgtacccccaggtcagtgcctgcgtatttctgcagcggtgacttcagggagggcgatgactgcaaaggcgggcagaacgggggtccacgcgtcagccccagcagagcccagccccagcatgtcttctctgagcactggctctgggaggctggcctggtgtctctgcagcccagcatgggcctgtgtgactggtgaggacttggcagggccagagtgcgaagcccaccagcccggcgtccctgcgtgcagtctgtcagctggggcaccagccactcgcacggccttgtgtttctgtcttcatattgccttgttctcgcctaagaaaatccagaatgcttgtttagaagccacctgaggctgttgactccctcccaaatctgtgtcaagtccctgctggtgcaggtttgtctggtagcaccagtgaggtggcccccacccatcgccatcccagaaaccctcccttggacacacctggaaggtgctaagtgcaccgggcagaggaggcccctcctggccagcatgaccgtgcaccggcctgagtgggctcgggtgggaggcgccttcacagcactcagaccaggcttcccccaggcttgtgggtggtacatccacagccttgcttgggtggggcaggggcgctggtgggggctgtggagaggctgcctggggcccctggcacagggctggacccatcccgtatgccagccacccaaggcaccttagcccttggagctcagggtgaggctgttttcccgtggatcagccaggggcagaggccagccttggtgctgatgcccaggaggaggaatggccagtgggcccatgccaggcctcctccctgtgtctcatggggacactgaagcccatggcaggagctggctcttcgccacagctgtgtggcccagacccctccctacagaaaggatctggggtgaccacaggcaaaaccctgcctcgaggggcccccacagcagcgcctggcagccccacaggggccgcagctgagcggcagcttcaccacattgtggcctcaggccctgctggctccacagctccacaccctcgtgggtcgcagcagctgagctggtcagcacagcacacctcatcctgctccccggaatgcctgcctggcccgtgccccccctgctgcagccctccaggtttccagccctggccgtggagccgtgcgtgcagcagcgggcagggctgtcctgacgcctcctggctgcatctcctgcgaggccgctccccgggaggccaagggggaggctgccctcatcctggagtgcgggaggccacgggagaagtgccaaggtggggctggggccaccttcaccgcgcagaaccacccgccgcagactccgcttctgggacctggggcggccctttctaagcctgtctgtctcgggccagggccaaggggcccgtcgcccatctgtctctgaaggtggcacccacaggcagtctgtcagtgtccgagggcagcagttgccccaggaccagtgcctaactttggtgatgccgccactgggagcccaggcccctggcggaagcctcccaggtcacatcttgccttgtttccccacagggcagctgtgcggagggtagtggcagccatgaaccggatggaccagaagaagcacgagaagttttcaaaccagtttaactacgcactgaactagagagcggggcccagtgcactggccatcagcactttctccctctgccagtgtctcaggacagcagagtgggcgtgggtctgggcagtaaccatgctttgtctattactgtgtttgatgtaaagaaatggtgtgttgcaatgccctgaaggtacggccgctctgctgctacagggttcggcatcgtctggtgatgggtctggcctcgcagaagaggccctcgggcctggagatgtgaacacaggcagcgaccctgttccagagggcttctgcgagtcctcgtgagaccagtgcttgtcgtggtgtggggttcagcacggacggaatgtgtgtgcagctcagccttcagagcgtgcattccccagccaggaggcgaccactcagaggaactctgggaaacccacttttgtgcaaatgctgtttttaacacaaacacaaaggctagtgaaccgttcagtcatctgctttctgtttctggatgtgccttttcatacatgtgtcctcttgtccctggcttcttacacttggcgttgtttttaaggtttatccatgcagttcccctccaatgtataaaacaaaggaggtgaaaacctgtccatgcggaagcttgtgcacccatgttcacagcagcattggagaaggataccgaacatcttctcgtgggcttactggccatttgtgtatctcctttggagaggagtctattcaaacctcttgcctatttttaattgaatgatttatcttgagttgtaacagttgttttttttgtttttccttttagagatgggcttttgctcttacccaggctgagtgcagtggcagaatcatagctcagtgcagcctcaaactcctgggctcaagccatccttccacgtcagcctcccaggtagctgggactacaggcacacaccacaacacctggctaattttttaaattttttgtagagatgaggtctcactgtgttgcccacggtgatctcgaactcctagcctcaagcgatcctcctgcttcggtctcccaaagtgttgggattacaggcatgagccaccactcctggccaggagtttatatgtatactgtggatactagatcctcatgtgatttgcaaaaactttatttatttatttatttatttttgaaatggaatcttgctctgtcgccaggctggagtgcaatggcgtgatctcggctcactgcaactaccacctcctgggttcaagcgattcgcctgcgtcagcgtcctgagtagctgggactacaggcgcgcaccaccacgcccagctaatttttgtatttttagtagagacgggatttcactgtgttggctgggatggtcttgatctcttgacctcgtgatccacccacctcggcctcccatagtgctgggattacaggtgtgagccaccgcactcagctgatttgcaaaaactttcttccatactgttgtttcactttctggatagtgtcctctgaagcacaaaagttaattttgatgaagtacagcaatttatctgtttttttcttttgttgcttatgcttttgctgtcacatttcagaagccatcacctaatccaagatcacagagatttacacctagtttctaataagcattttataatttcagctcttatgtgtagatctttgatccattgtgaattaagttttgtgtgtggtgtaagagcccacattcttttgcatgtggatatccagttgtcccagcaccatttgttgaaaacattatttttccccattgaattatcttcgcaccattattgataatcagttgaccaaaaatgtacaggcttatttctgggcacttgactctattccattgacctgtttaaccttatgccagtgccacagtgccttgatcagtgctgctttgttgtgagaagttttactttgttctgcttcaaggctgttttgactcttctgcatctcttgcatttccaaatgaattttaggatccactcatcagtttcttcaaaaaaaaaaaaaaagcagctgagatttttgataggaattacattaaatctagagattgctttggaatgtattaccgtcttaatattaaatcttctgagtcatga

SEQ ID NO: 198538 - DNA, 1494 bp, Homo sapiens
  Payload ID: 19184
  Gene Name: UV-stimulated scaffold protein A
  Uniprot ID: Q2YD98
  ENST ID: ENST00000511563
  CDS Start-End: 415-1197
gtggttttaacatagactctaaacagcccccagcacaggggcagtgcagaggtggtgtgattttggggaacaagaacagccttggagacgatcttaaatgcagtccaaccgtggctgatgttggagccctaagcaggggaaaaagctccacaagaaataggaatttccagggctctgcccaccgggagctgtgttcatacacagggtctgggggttgatttgtattggggtgtttttccacagacagaagccctgggggatgcggaggaagatgaggacgatgaggactttgtggaggtccctgagaaggaggggtatgagccacacatccccgaccacttgcggcctgagtatgggctggaggcagcaccagagaaagacacagttgtgcggtgcttgcggacgaggacgaggatggacgaggaggtgtcggaccccacctctgcggctgctcagctgcggcagctccgggaccacttgcctccaccctcatctgccagcccctccagagcgttgccagagccacaggaggcccagaagctggcagcagagcgggcccgggcgcctgtggtgccctacggcgtggacctgcactactggggccaggagctccccacagccgggaagattgtcaagtctgactcccagcaccgcttctggaagcccagcgaggtggaggaggaagtggtcaatgccgacatctccgagatgctccggagccgccacatcacttttgccgggaagtttgagcctgtgcagcactggtgccgtgccccgaggccagacggccggctctgtgagcgccaagaccggctgaagtgccctttccatgggaagattgttccacgggacgacgaaggacggccgctcgacccggaagacagggctcgtgagcagcggcggcagctgcagaagcaggagcgcccggaatggcaggaccctgagttgatgagagacgtggaagcagccacagggcaggatctcggctcatccaggtacagcgggaaaggcagggggaagaagaggaggtaccccagcctcaccaacctgaaggctcaggctgataccgcccgcgctcgcattgggagaaaagtcttcgccaaggcagctgtgcggagggtagtggcagccatgaaccggatggaccagaagaagcacgagaagttttcaaaccagtttaactacgcactgaactagagagcggggcccagtgcactggccatcagcactttctccctctgccagtgtctcaggacagcagagtgggcgtgggtctgggcagtaaccatgctttgtctattactgtgtttgatgtaaagaaatggtgtgttgcaatgccctgaaggtacggccgctctgctgctacagggttcggcatcgtctggtgatgggtctggcctcgcagaagaggccctcgggcctggagatgtgaacacaggcagcgaccctgttccagagggcttctgcgagtcctcgtgagaccagtgcttgtcg

SEQ ID NO: 198539 - DNA, 2927 bp, Homo sapiens
  Payload ID: 19184
  Gene Name: UV-stimulated scaffold protein A
  Uniprot ID: Q2YD98
  ENST ID: ENST00000511216
  CDS Start-End: 347-2476
cgcgccggttcggtccccggggctctgcgggcgccgggcagagacctgcggccagggcgtgtcccgtgtgcccgagagcgccggcggcggggccggagggcgggccctgggccgagtgacaggccgcagccccccgagcaccgtcgaagccggcgcgcccgcccggtgcagccgctgtgcgagagcgaccccgcggtccaagcctcgcgtggccctgccgggccccttctttccccgagtagggcgcagcttcccagcctccgccccggcctcgcctggcgcttccttccgggtccttcggcctttccctggcggtgcggcaggccctcgcctcatcccaccagatatggatcagaaactttcgaagttggtagaagagctcacaacttcaggagaaccccgactaaatcctgagaaaatgaaggaactgaagaaaatttgcaagtcttcagaggagcagctgagccgcgcctaccgcctgctgatagcacagctgacccaggagcacgccgagatccgtctctcagccttccagattgtggaggaactcttcgtcaggtctcaccagttccggatgctggttgtttccaacttccaggagttcctggagctcacgctgggcacagaccccgcacagcctctgccgccccccagggaggcggcacagaggctgaggcaggcgaccacccgggccgtggaagggtggaatgagaagtttggggaggcctacaagaagcttgccttgggctaccacttcttaagacacaacaaaaaggtggattttcaagacacgaatgctcggagtctggcagaaaggaagagagaagaggagaagcagaagcacttggataaaatttatcaagaaagagccagccaggcggagagggagatgcaagaaatgtctggagaaattgaatcctgcttgacggaggtagagagctgctttaggctgctggtgccttttgactttgacccgaacccggagacggaatcccttggcatggcttctggcatgtccgatgcccttcgctcctcctgcgcgggccaggtgggcccctgccggtctggcacccctgacccccgggacggggagcagccctgctgcagtagagacctgcctgcctctgcaggccaccccagagcgggcggcggggcacagccatcccagacagccacaggtgacccctcagatgaggacgaggacagcgacctcgaggagtttgtgcggagccacgggctgggctcgcacaagtacacgctggatgtggagctctgctcagagggcctgaaggtgcaggagaacgaggacaaccttgctctcatccacgccgcccgcgacacactcaagctcatccggaacaagttcctgccggctgtgtgctcgtggatccagcgcttcacccgcgtcgggacccacggtggatgtttaaagcgtgccattgacctgaaggctgaattggagctcgtactgagaaaatacaaggagctggacatcgagcctgagggaggggaaaggcgcaggacagaagccctgggggatgcggaggaagatgaggacgatgaggactttgtggaggtccctgagaaggaggggtatgagccacacatccccgaccacttgcggcctgagtatgggctggaggcagcaccagagaaagacacagttgtgcggtgcttgcggacgaggacgaggatggacgaggaggtgtcggaccccacctctgcggctgctcagctgcggcagctccgggaccacttgcctccaccctcatctgccagcccctccagagcgttgccagagccacaggaggcccagaagctggcagcagagcgggcccgggcgcctgtggtgccctacggcgtggacctgcactactggggccaggagctccccacagccgggaagattgtcaagtctgactcccagcaccgcttctggaagcccagcgaggtggaggaggaagtggtcaatgccgacatctccgagatgctccggagccgccacatcacttttgccgggaagtttgagcctgtgcagcactggtgccgtgccccgaggccagacggccggctctgtgagcgccaagaccggctgaagtgccctttccatgggaagattgttccacgggacgacgaaggacggccgctcgacccggaagacagggctcgtgagcagcggcggcagctgcagaagcaggagcgcccggaatggcaggaccctgagttgatgagagacgtggaagcagccacagggcaggatctcggctcatccaggtacagcgggaaaggcagggggaagaagaggaggtaccccagcctcaccaacctgaaggctcaggctgataccgcccgcgctcgcattgggagaaaagtcttcgccaaggcagctgtgcggagggtagtggcagccatgaaccggatggaccagaagaagcacgagaagttttcaaaccagtttaactacgcactgaactagagagcggggcccagtgcactggccatcagcactttctccctctgccagtgtctcaggacagcagagtgggcgtgggtctgggcagtaaccatgctttgtctattactgtgtttgatgtaaagaaatggtgtgttgcaatgccctgaaggtacggccgctctgctgctacagggttcggcatcgtctggtgatgggtctggcctcgcagaagaggccctcgggcctggagatgtgaacacaggcagcgaccctgttccagagggcttctgcgagtcctcgtgagaccagtgcttgtcgtggtgtggggttcagcacggacggaatgtgtgtgcagctcagccttcagagcgtgcattccccagccaggaggcgaccactcagaggaactctgggaaacccacttttgtgcaaatgctgtttttaacacaaacacaaaggctagtgaaccgtt

SEQ ID NO: 198540 - DNA, 1668 bp, Homo sapiens
  Payload ID: 19184
  Gene Name: UV-stimulated scaffold protein A
  Uniprot ID: Q2YD98
  ENST ID: ENST00000512728
  CDS Start-End: 433-1215
gtggcctttccaagcggctgccacctcaggcttgggtgctggggagggctccaggctgcctacatctcaccaccggagcctgagctgccggggctatgggcacagggtgccgggcagtctgggctctcgctgctgcccagcttctttccagcctggcgaatccatctgctcaggctggcacttctgcaaagcccggcagcacagtgtgtgaacagcgtggccacaaggcgggactgccggaccccccgacgcacgccatgttctggcagagcgtggcctgagctgctgctccgggcctcaccctcgcccgtgaggagcagatagcaggcacccacctcgggactgttggaagatggaacacgctaacgcatagggctggaggcagcaccagagaaagacacagttgtgcggtgcttgcggacgaggacgaggatggacgaggaggtgtcggaccccacctctgcggctgctcagctgcggcagctccgggaccacttgcctccaccctcatctgccagcccctccagagcgttgccagagccacaggaggcccagaagctggcagcagagcgggcccgggcgcctgtggtgccctacggcgtggacctgcactactggggccaggagctccccacagccgggaagattgtcaagtctgactcccagcaccgcttctggaagcccagcgaggtggaggaggaagtggtcaatgccgacatctccgagatgctccggagccgccacatcacttttgccgggaagtttgagcctgtgcagcactggtgccgtgccccgaggccagacggccggctctgtgagcgccaagaccggctgaagtgccctttccatgggaagattgttccacgggacgacgaaggacggccgctcgacccggaagacagggctcgtgagcagcggcggcagctgcagaagcaggagcgcccggaatggcaggaccctgagttgatgagagacgtggaagcagccacagggcaggatctcggctcatccaggtacagcgggaaaggcagggggaagaagaggaggtaccccagcctcaccaacctgaaggctcaggctgataccgcccgcgctcgcattgggagaaaagtcttcgccaaggcagctgtgcggagggtagtggcagccatgaaccggatggaccagaagaagcacgagaagttttcaaaccagtttaactacgcactgaactagagagcggggcccagtgcactggccatcagcactttctccctctgccagtgtctcaggacagcagagtgggcgtgggtctgggcagtaaccatgctttgtctattactgtgtttgatgtaaagaaatggtgtgttgcaatgccctgaaggtacggccgctctgctgctacagggttcggcatcgtctggtgatgggtctggcctcgcagaagaggccctcgggcctggagatgtgaacacaggcagcgaccctgttccagagggcttctgcgagtcctcgtgagaccagtgcttgtcgtggtgtggggttcagcacggacggaatgtgtgtgcagctcagccttcagagcgtgcattccccagccaggaggcgaccactcagaggaactctgggaaacccacttttgtgcaaatgctgtttttaacacaaacacaaaggctagtgaaccgttca

SEQ ID NO: 198541 - DNA, 3099 bp, Homo sapiens
  Payload ID: 19185
  Gene Name: Vac14 homolog (S. cerevisiae)
  Uniprot ID: Q08AM6
  ENST ID: ENST00000261776
  CDS Start-End: 262-2610
tgtgactcgagtaacatggccgctgtctcgtgagtcccgctagtgccgggcgggagttgttaagcggccagggtcaggtgtgctggagcggggtccgggcccgggttccagggcgaggcggcggagcgtggcaggcaagcctagagcggcgtggtccatgcgccggcgccgggggcagagcggagccgcagactcccctggccccggcgcggccccggcagccgcgggctaaggagtcgcgaggttcccccagctgccaccatgaaccccgagaaggatttcgcgccgctcacgcctaacatcgtgcgcgccctcaatgacaagctgtacgaaaagcggaaggtggcagcgctggagatcgagaagctggtccgggagttcgtggcccagaacaataccgtgcaaatcaagcatgtgatccagaccctgtcccaggagtttgccctgtctcagcacccccacagccggaaagggggcctcatcggcctggccgcctgctccatcgcactgggcaaggactcagggctctacctgaaggagctgatcgagccagtgctgacctgcttcaatgatgcagacagcaggctgcgctactatgcctgcgaggccctctacaacatcgtcaaggtggcccggggcgctgtgctgccccacttcaacgtgctctttgacgggctgagcaagctggcagccgacccagaccccaatgtgaaaagcggatctgagctcctagaccgccttttaaaggacattgtgactgagagcaacaagtttgacctggtgagcttcatccccttgttgcgagagaggatttactccaacaaccagtatgcccggcagttcatcatctcctggatcctggttctggagtcggtgccagacattaacctgctggattacctgccggagatcctggatggactcttccagatcctgggtgacaatggcaaagagattcgcaaaatgtgtgaggttgttcttggagaattcttaaaagaaattaagaagaacccctccagtgtgaagtttgctgagatggccaacatcctggtgatccactgccagacaacagatgacctcatccagctgacagccatgtgctggatgcgggagttcatccagctggcgggccgcgtcatgctgccttactcctccgggatcctgactgctgtcttgccctgcttggcctacgatgaccgcaagaaaagcatcaaagaagtggccaacgtgtgcaaccagagcctgatgaagctggtcacccccgaggacgacgagctggatgagctgagacctgggcagaggcaggcagagcccacccctgacgatgccctgccaaagcaggagggcacagccagtggaggtccagatggttcctgtgactccagcttcagtagcggcatcagtgtcttcactgcagccagcactgaaagagccccagtgacccttcacctcgacgggatcgtgcaggtcctaaactgccacctcagtgacacggccattgggatgatgaccaggattgcagttctcaagtggctctaccacctctacatcaaaactcctcggaagatgttccggcacacggacagcctctttcccatcctactgcagacgttatcggatgaatcggatgaggtgatcctgaaggacctggaggtgctggcagaaatcgcttcctcccccgcaggccagacggatgacccaggccccctcgatggccctgacctccaggccagccactcagagctccaggtgcccacccctggcagagccggcctactgaacacctctggtaccaaaggcttagaatgttctccttcaactcccaccatgaattcttacttttataagttcatgatcaaccttctcaagagattcagcagcgaacggaagctcctggaggtcagaggccctttcatcatcaggcagctgtgcctcctgctgaatgcggagaacatcttccactcaatggcagacatcctgctgcgggaggaggacctcaagttcgcctcgaccatggtccacgccctcaacaccatcctgctgacctccacagagctcttccagctaaggaaccagctgaaggacctgaagaccctggagagccagaacctgttctgctgcctgtaccgctcctggtgccacaacccagtcaccacggtgtccctctgcttcctcacccagaactaccggcacgcctatgacctcatccagaagtttggggacctggaggtcaccgtggacttcctcgcagaggtggacaagctggtgcagctgattgagtgccccatcttcacatatctgcgcctgcagctgctggacgtgaagaacaacccctacctgatcaaggccctctacggcctgctcatgctcctgccgcagagcagcgccttccagctgctctcgcaccggctccagtgcgtgcccaaccctgagctgctgcagaccgaagacagtctaaaggcagcccccaagtcccagaaagctgactcccctagcatcgactacgcagagctgctgcagcactttgagaaggtccagaacaagcacctggaagtgcggcaccagcggagcgggcgtggggaccacctggaccggagggttgtcctctgacaggcctggcacggaggagggcccaccgagtggtcccatgaaacactaagggtcgtcacgccctcccgaggagctcaaggacctgcctgtcaggaccagggctgggcctgccaacccagggcagtgttggggccggaggctgctgtgtctgcccaagctcctctcagagtccagtccccaggcctccagcgctgtcagctgcaccctggcattctcacagagctggctgcccacccagtggggggctatagcctcagagaccactcatcctctggaatcaacctctttctaataccctcttggaaaaagagcttgcccctcctccagcacactagagctctggccttgtgtgtatatgtatacatacgtgaacacatgcctgtgtgtgtgtgtgtgtgtgtgtacttgtatgcacgtaggcaccagcacaaagatctgaatgatgcaccccacccccaccccaataaagaaataacagaaaaccctcaa

SEQ ID NO: 198542 - DNA, 2161 bp, Homo sapiens
  Payload ID: 19185
  Gene Name: Vac14 homolog (S. cerevisiae)
  Uniprot ID: Q08AM6
  ENST ID: ENST00000536184
  CDS Start-End: 1031-1675
gaacggcctgcctactgtttgcgctttgtggtctggcctctttgttaccaaatgctctggggttgctttggggctgggggtggggaggaatcttctccagcctggccccagagccatggctggcgttcaggggcatttgggaagctgggcccaggtcatgcggagcggaggctgagtccagcgacctaggaggagatggaggtgtttcaggcctcccaccaagaaatgtggctcacgtcactgagcacccaagacctcggggcctccgacgccgtgttggaactgtggtgatgcttccctggagacgggatgcggcgtcaggcactggagcttagccccagacggaaggtggtgtgggcaggggtgccacgctgccgccagcccagcactcaggaagcgcagtgctgcacaccaccctctcaccagccaccccgctcatgccccatcctgcctgcatcatgctgttttggggaagctcccgaatccctgggactccagctgggaagcattgcccaggtgcccttcccctgcaggccaggcctccaagggcacgtggaaaagcagcgcggattcctccaagcctgtcctcaccacccacttctcactgctcgtgtcatccggcccagggaccctgaggaatctgcttttcttcatcctctgggttccctttttgccttttgtataacagggaggctcctcttcacaaagtccgatccttagccctgaacgactcttaactagacaagagatgggaaaggggtcatggcccagggaccagcgagccctaagtgactctggccgtaagtgactctgcgaccttagtcaagtcacttcaccagagtttcaccatccgtacagtgaagaaaaaactcagggtcataacgctgatcccacacggatctgtgctccaggccgcagggtacagcccgaacagtgcaaatccctgacctcgggggcttccaggaggaggagtggggcagtaaacaggcagctgtgcctcctgctgaatgcggagaacatcttccactcaatggcagacatcctgctgcgggaggaggacctcaagttcgcctcgaccatggtccacgccctcaacaccatcctgctgacctccacagagctcttccagctaaggaaccagctgaaggacctgaagaccctggagagccagaacctgttctgctgcctgtaccgctcctggtgccacaacccagtcaccacggtgtccctctgcttcctcacccagaactaccggcacgcctatgacctcatccagaagtttggggacctggaggtcaccgtggacttcctcgcagaggtggacaagctggtgcagctgattgagtgccccatcttcacatatctgcgcctgcagctgctggacgtgaagaacaacccctacctgatcaaggccctctacggcctgctcatgctcctgccgcagagcagcgccttccagctgctctcgcaccggctccagtgcgtgcccaaccctgagctgctgcagaccgaagacagtctaaaggcagcccccaagtcccagaaagctgactcccctagcatcgactacgcagagctgctgcagcactttgagaaggtccagaacaagcacctggaagtgcggcaccagcggagcgggcgtggggaccacctggaccggagggttgtcctctgacaggcctggcacggaggagggcccaccgagtggtcccatgaaacactaagggtcgtcacgccctcccgaggagctcaaggacctgcctgtcaggaccagggctgggcctgccaacccagggcagtgttggggccggaggctgctgtgtctgcccaagctcctctcagagtccagtccccaggcctccagcgctgtcagctgcaccctggcattctcacagagctggctgcccacccagtggggggctatagcctcagagaccactcatcctctggaatcaacctctttctaataccctcttggaaaaagagcttgcccctcctccagcacactagagctctggccttgtgtgtatatgtatacatacgtgaacacatgcctgtgtgtgtgtgtgtgtgtgtgtacttgtatgcacgtaggcaccagcacaaagatctgaatgatgcaccccacccccaccccaataaagaaataacagaaaaccct

SEQ ID NO: 198543 - DNA, 2945 bp, Homo sapiens
  Payload ID: 19185
  Gene Name: Vac14 homolog (S. cerevisiae)
  ENST ID: ENST00000568548
  CDS Start-End: 261-383
gtgactcgagtaacatggccgctgtctcgtgagtcccgctagtgccgggcgggagttgttaagcggccagggtcaggtgtgctggagcggggtccgggcccgggttccagggcgaggcggcggagcgtggcaggcaagcctagagcggcgtggtccatgcgccggcgccgggggcagagcggagccgcagactcccctggccccggcgcggccccggcagccgcgggctaaggagtcgcgaggttcccccagctgccaccatgaaccccgagaaggatttcgcgccgctcacgcctaacatcgtgcgcgccctcaatgacaagctgtacgaaaagcggaaggtggcagcgctggagatcgagaagactcagggctctacctgaaggagctgatcgagccagtgctgacctgcttcaatgatgcagacagcaggctgcgctactatgcctgcgaggccctctacaacatcgtcaaggtggcccggggcgctgtgctgccccacttcaacgtgctctttgacgggctgagcaagctggcagccgacccagaccccaatgtgaaaagcggatctgagctcctagaccgccttttaaaggacattgtgactgagagcaacaagtttgacctggtgagcttcatccccttgttgcgagagaggatttactccaacaaccagtatgcccggcagttcatcatctcctggatcctggttctggagtcggtgccagacattaacctgctggattacctgccggagatcctggatggactcttccagatcctgggtgacaatggcaaagagattcgcaaaatgtgtgaggttgttcttggagaattcttaaaagaaattaagaagaacccctccagtgtgaagtttgctgagatggccaacatcctggtgatccactgccagacaacagatgacctcatccagctgacagccatgtgctggatgcgggagttcatccagctggcgggccgcgtcatgctgccttactcctccgggatcctgactgctgtcttgccctgcttggcctacgatgaccgcaagaaaagcatcaaagaagtggccaacgtgtgcaaccagagcctgatgaagctggtcacccccgaggacgacgagctggatgagctgagacctgggcagaggcaggcagagcccacccctgacgatgccctgccaaagcaggagggcacagccagtggaggtccagatggttcctgtgactccagcttcagtagcggcatcagtgtcttcactgcagccagcactgaaagagccccagtgacccttcacctcgacgggatcgtgcaggtcctaaactgccacctcagtgacacggccattgggatgatgaccaggattgcagttctcaagtggctctaccacctctacatcaaaactcctcggaagatgttccggcacacggacagcctctttcccatcctactgcagacgttatcggatgaatcggatgaggtgatcctgaaggacctggaggtgctggcagaaatcgcttcctcccccgcaggccagacggatgacccaggccccctcgatggccctgacctccaggccagccactcagagctccaggtgcccacccctggcagagccggcctactgaacacctctggtaccaaaggcttagaatgttctccttcaactcccaccatgaattcttacttttataagttcatgatcaaccttctcaagagattcagcagcgaacggaagctcctggaggtcagaggccctttcatcatcaggcagctgtgcctcctgctgaatgcggagaacatcttccactcaatggcagacatcctgctgcgggaggaggacctcaagttcgcctcgaccatggtccacgccctcaacaccatcctgctgacctccacagagctcttccagctaaggaaccagctgaaggacctgaagaccctggagagccagaacctgttctgctgcctgtaccgctcctggtgccacaacccagtcaccacggtgtccctctgcttcctcacccagaactaccggcacgcctatgacctcatccagaagtttggggacctggaggtcaccgtggacttcctcgcagaggtggacaagctggtgcagctgattgagtgccccatcttcacatatctgcgcctgcagctgctggacgtgaagaacaacccctacctgatcaaggccctctacggcctgctcatgctcctgccgcagagcagcgccttccagctgctctcgcaccggctccagtgcgtgcccaaccctgagctgctgcagaccgaagacagtctaaaggcagcccccaagtcccagaaagctgactcccctagcatcgactacgcagagctgctgcagcactttgagaaggtccagaacaagcacctggaagtgcggcaccagcggagcgggcgtggggaccacctggaccggagggttgtcctctgacaggcctggcacggaggagggcccaccgagtggtcccatgaaacactaagggtcgtcacgccctcccgaggagctcaaggacctgcctgtcaggaccagggctgggcctgccaacccagggcagtgttggggccggaggctgctgtgtctgcccaagctcctctcagagtccagtccccaggcctccagcgctgtcagctgcaccctggcattctcacagagctggctgcccacccagtggggggctatagcctcagagaccactcatcctctggaatcaacctctttctaataccctcttggaaaaagagcttgcccctcctccagcacactagagctctggccttgtgtgtatatgtatacatacgtgaacacatgcctgtgtgtgtgtgtgtgtgtgtgtacttgtatgcacgtaggcaccagcacaaagatctgaatgatgcaccccacccccaccccaataaagaaataacagaaaaccctc

SEQ ID NO: 198544 - DNA, 780 bp, Homo sapiens
  Payload ID: 19185
  Gene Name: Vac14 homolog (S. cerevisiae)
  ENST ID: ENST00000566416
  CDS Start-End: 1-780
ggtgatcctgaaggacctggaggtgctggcagaaatcgcttcctcccccgcaggccagacggatgacccaggccccctcgatggccctgacctccaggccagccactcagagctccaggtgcccacccctggcagagccggcctactgaacacctctggtaccaaaggcttagaatgttctccttcaactcccaccatgaattcttacttttataagttcatgatcaaccttctcaagagattcagcagcgaacggaagctcctggaggtcagaggccctttcatcatcaggcagctgtgcctcctgctgaatgcggagaacatcttccactcaatggcagacatcctgctgcgggaggaggacctcaagttcgcctcgaccatggtccacgccctcaacaccatcctgctgacctccacagagctcttccagctaaggaaccagctgaaggacctgaagaccctgaactaccggcacgcctatgacctcatccagaagtttggggacctggaggtcaccgtggacttcctcgcagaggtggacaagctggtgcagctgattgagtgccccatcttcacatatctgcgcctgcagctgctggacgtgaagaacaacccctacctgatcaaggccctctacggcctgctcatgctcctgccgcagagcagcgccttccagctgctctcgcaccggctccagtgcgtgcccaaccctgagctgctgcagaccgaagacagtctaaaggcagcccccaagtcccagaaagctgactcccctag

SEQ ID NO: 198545 - DNA, 2151 bp, Homo sapiens
  Payload ID: 19185
  Gene Name: Vac14 homolog (S. cerevisiae)
  ENST ID: ENST00000568886
  CDS Start-End: 83-688
gcggagccgcagactcccctggccccggcgcggccccggcagccgcgggctaaggagtcgcgaggttcccccagctgccaccatgaaccccgagaaggatttcgcgccgctcacgcctaacatcgtgcgcgccctcaatgacaagctgtacgaaaagcggaaggtggcagcgctggagatcgagaagctggtccgggagttcgtggcccagaacaataccgtgcaaatcaagcatgtgatccagaccctgtcccaggagtttgccctgtctcagcacccccacagccggaaagggggcctcatcggcctggccgcctgctccatcgcactgggcaaggactcagggctctacctgaaggagctgatcgagccagtgctgacctgcttcaatgatgcagacagcaggctgcgctactatgcctgcgaggccctctacaacatcgtcaaggtggcccggggcgctgtgctgccccacttcaacgtgctctttgacgggctgagcaagctggcagccgacccagaccccaatgtgaaaagcggatctgagctcctagaccgccttttaaaggtatttttctcaagtggctctaccacctctacatcaaaactcctcggaagatgttccggcacacggacagcctctttcccatcctactgcagacgttatcggatgaatcggatgaggtgatcctgaaggacctggaggtgctggcagaaatcgcttcctcccccgcaggccagacggatgacccaggccccctcgatggccctgacctccaggccagccactcagagctccaggtgcccacccctggcagagccggcctactgaacacctctggtaccaaaggcttagaatgttctccttcaactcccaccatgaattcttacttttataagttcatgatcaaccttctcaagagattcagcagcgaacggaagctcctggaggtcagaggccctttcatcatcaggcagctgtgcctcctgctgaatgcggagaacatcttccactcaatggcagacatcctgctgcgggaggaggacctcaagttcgcctcgaccatggtccacgccctcaacaccatcctgctgacctccacagagctcttccagctaaggaaccagctgaaggacctgaagaccctggagagccagaacctgttctgctgcctgtaccgctcctggtgccacaacccagtcaccacggtgtccctctgcttcctcacccagaactaccggcacgcctatgacctcatccagaagtttggggacctggaggtcaccgtggacttcctcgcagaggtggacaagctggtgcagctgattgagtgccccatcttcacatatctgcgcctgcagctgctggacgtgaagaacaacccctacctgatcaaggccctctacggcctgctcatgctcctgccgcagagcagcgccttccagctgctctcgcaccggctccagtgcgtgcccaaccctgagctgctgcagaccgaagacagtctaaaggcagcccccaagtcccagaaagctgactcccctagcatcgactacgcagagctgctgcagcactttgagaaggtccagaacaagcacctggaagtgcggcaccagcggagcgggcgtggggaccacctggaccggagggttgtcctctgacaggcctggcacggaggagggcccaccgagtggtcccatgaaacactaagggtcgtcacgccctcccgaggagctcaaggacctgcctgtcaggaccagggctgggcctgccaacccagggcagtgttggggccggaggctgctgtgtctgcccaagctcctctcagagtccagtccccaggcctccagcgctgtcagctgcaccctggcattctcacagagctggctgcccacccagtggggggctatagcctcagagaccactcatcctctggaatcaacctctttctaataccctcttggaaaaagagcttgcccctcctccagcacactagagctctggccttgtgtgtatatgtatacatacgtgaacacatgcctgtgtgtgtgtgtgtgtgtgtgtacttgtatgcacgtaggcaccagcacaaagatctgaatgatgcaccccacccccaccccaataaagaaataacagaaaaccctcaa

SEQ ID NO: 198546 - DNA, 702 bp, Homo sapiens
  Payload ID: 19185
  Gene Name: Vac14 homolog (S. cerevisiae)
  ENST ID: ENST00000567648
  CDS Start-End: 1-52
cgcagaggtggacaagctggtgcagctgattgagtgccccatcttcacatagacagtctaaaggcagcccccaagtcccagaaagctgactcccctagcatcgactacgcagagctgctgcagcactttgagaaggtccagaacaagcacctggaagtgcggcaccagcggagcgggcgtggggaccacctggaccggagggttgtcctctgacaggcctggcacggaggagggcccaccgagtggtcccatgaaacactaagggtcgtcacgccctcccgaggagctcaaggacctgcctgtcaggaccagggctgggcctgccaacccagggcagtgttggggccggaggctgctgtgtctgcccaagctcctctcagagtccagtccccaggcctccagcgctgtcagctgcaccctggcattctcacagagctggctgcccacccagtggggggctatagcctcagagaccactcatcctctggaatcaacctctttctaataccctcttggaaaaagagcttgcccctcctccagcacactagagctctggccttgtgtgtatatgtatacatacgtgaacacatgcctgtgtgtgtgtgtgtgtgtgtgtacttgtatgcacgtaggcaccagcacaaagatctgaatgatgcaccccacccccaccccaataaagaaataacagaaaaccctcaa

SEQ ID NO: 198547 - DNA, 554 bp, Homo sapiens
  Payload ID: 19185
  Gene Name: Vac14 homolog (S. cerevisiae)
  ENST ID: ENST00000563662
  CDS Start-End: 1-554
ctcctcggaagatgttccggcacacggacagcctctttcccatcctactgcagacgttatcggatgaatcggatgaggtgatcctgaaggacctggaggtgctggcagaaatcgcttcctcccccgcaggccagacggatgacccaggccccctcgatggccctgacctccaggccagccactcagagctccaggtgcccacccctggcagagccggcctactgaacacctctggtaccaaaggcttagaatgttctccttcaactcccaccatgaattcttacttttataagttcatgatcaaccttctcaagagattcagcagcgaacggaagctcctggaggtcagaggccctttcatcatcaggtcagccttggcggcgcgctttctcctcttcctcccacggccccggcttttcactttcacgccattcaagtgtcaaagcagccaccttctctttcccttctctctcctccttttcctgacctttggatctgtaagaaatgaagaaggttgccccttcatactggttgctgatgcttctgacatgaaa

SEQ ID NO: 198548 - DNA, 1745 bp, Homo sapiens
  Payload ID: 19186
  Gene Name: vaccinia related kinase 1
  Uniprot ID: Q99986
  ENST ID: ENST00000216639
  CDS Start-End: 150-1340
cccgcccctcctcgtcgcctccgagccaatgggaaggctccatactgcagggtgcgaaggggccggcgccgctgccgagttacgagtcggcgaaagcggcgggaagttcgtactgggcagaacgcgacgggtctgcggcttaggtgaaaatgcctcgtgtaaaagcagctcaagctggaagacagagctctgcaaagagacatcttgcagaacaatttgcagttggagagataataactgacatggcaaaaaaggaatggaaagtaggattacccattggccaaggaggctttggctgtatatatcttgctgatatgaattcttcagagtcagttggcagtgatgcaccttgtgttgtaaaagtggaacccagtgacaatggacctctttttactgaattaaagttctaccaacgagctgcaaaaccagagcaaattcagaaatggattcgtacccgtaagctgaagtacctgggtgttcctaagtattgggggtctggtctacatgacaaaaatggaaaaagttacaggtttatgataatggatcgctttgggagtgaccttcagaaaatatatgaagcaaatgccaaaaggttttctcggaaaactgtcttgcagctaagcttaagaattctggatattctggaatatattcacgagcatgagtatgtgcatggagatatcaaggcctcaaatcttcttctgaactacaagaatcctgaccaggtgtacttggtagattatggccttgcttatcggtactgcccagaaggagttcataaagaatacaaagaagaccccaaaagatgtcacgatggcactattgaattcacgagcatcgatgcacacaatggcgtggccccatcaagacgtggtgatttggaaatacttggttattgcatgatccaatggcttactggccatcttccttgggaggataatttgaaagatcctaaatatgttagagattccaaaattagatacagagaaaatattgcaagtttgatggacaaatgttttcctgagaaaaacaaaccaggtgaaattgccaaatacatggaaacagtgaaattactagactacactgaaaaacctctttatgaaaatttacgtgacattcttttgcaaggactaaaagctataggaagtaaggatgatggcaaattggacctcagtgttgtggagaatggaggtttgaaagcaaaaacaataacaaagaagcgaaagaaagaaattgaagaaagcaaggaacctggtgttgaagatacggaatggtcaaacacacagacagaggaggccatacagacccgttcaagaaccagaaagagagtccagaagtaattcagatgctgtgaaccagatttccttttctttgttttcttttgacttttttctccttttctatttgaactgttttattttcctgtgagtcttgcgaggtggaagtaatgattaaatactcatgtgttcagaaaacataaactttttttataaaaatattttgtacaattcattaaaggctaatttatgaaatttgaaaatcttcaggttatactccttaagttatcccaaagccgtgtgtttgtgatgttttggagtacatatatatgaaaattattatgacacgcacttttctaatcattgtacatttctcagagtggataaaaatgtttgacaaagtcctcacttttaaggaaatgcaaagcttaaaataaaactctcttttgtttgatgcaaacacacagt

SEQ ID NO: 198549 - DNA, 1029 bp, Homo sapiens
  Payload ID: 19186
  Gene Name: vaccinia related kinase 1
  ENST ID: ENST00000557222
  CDS Start-End: 1-697
aaatgccaaaaggttttctcggaaaactgtcttgcagctaagcttaagaattctggatattctggaatatattcacgagcatgagtatgtgcatggagatatcaaggcctcaaatcttcttctgaactacaagaatcctgaccaggtgtacttggtagattatggccttgcttatcggtactgcccagaaggagttcataaagaatacaaagaagaccccaaaagatgtcacgatggcactattgaattcacgagcatcgatgcacacaatggcgtggccccatcaagacgtggtgatttggaaatacttggttattgcatgatccaatggcttactggccatcttccttgggaggataatttgaaagatcctaaatatgttagagattccaaaattagatacagagaaaatattgcaagtttgatggacaaatgttttcctgagaaaaacaaaccaggtgaaattgccaaatacatggaaacagtgaaattactagactacactgaaaaacctctttatgaaaatttacgtgacattcttttgcaaggactaaaagctataggaagtaaggatgatggcaaattggacctcagtgttgtggagaatggaggtttgaaagcaaaaacaataacaaaggtgggcctcatgagagatgtggagtcctcatcacggggttgcctggtgattatggaataagcagcggacttacagacactcagcgtccaggcgcaccaggccaccacatcccagacatgagtacctgtgcaaaatgcattcattcctccatcttggacgagtttactgagcacctgtgatgtgccaggcactaggggtgctgcagcggaagagctaagcattgagggtttgtttgtttgttttttgttttttgagacagagtttcgctcttgttgcccaggctggagtgcaatggcgcgatctcggctcactgcaaccgctgcctcccaggtacaagcgattctcctgtctcagcctcctaagcagctcgaattaacaggcatgcgccacca

SEQ ID NO: 198550 - DNA, 247 bp, Homo sapiens
  Payload ID: 19186
  Gene Name: vaccinia related kinase 1
  ENST ID: ENST00000553683
  CDS Start-End: 1-196
gaagcgaaagaaagaaattgaagaaagcaaggaacctggtgttgaagatacggaatggtcaaacacacagacagaggaggccatacagacccgaagtgaggagtcccaaggagcaatacatcgaagcatgtctcagccagaggctagcagcagcagctatgacagttcaagaaccagaaagagagtccagaagtaattcagatgctgtgaaccagatttccttttctttgttttcttttgacttttt

SEQ ID NO: 198551 - DNA, 599 bp, Homo sapiens
  Payload ID: 19186
  Gene Name: vaccinia related kinase 1
  ENST ID: ENST00000557352
  CDS Start-End: 1-529
atgtcacgatggcactattgaattcacgagcatcgatgcacacaatggcgtggccccatcaagacgtggtgatttggaaatacttggttattgcatgatccaatggcttactggccatcttccttgggaggataatttgaaagatcctaaatatgttagagattccaaaattagatacagagaaaatattgcaagtttgatggacaaatgttttcctgagaaaaacaaaccaggtgaaattgccaaatacatggaaacagtgaaattactagactacactgaaaaacctctttatgaaaatttacgtgacattcttttgcaaggactaaaagctataggaagtaaggatgatggcaaattggacctcagtgttgtggagaatggaggtttgaaagcaaaaacaataacaaaggtgaattttgttattaaattattctttggtcttcttgtgtttataattgcaataaatactaaaagaaagtatagcagtagttcaatgaagaacaataacagattgcatggcaattaaggcaaacattttttgtaatacagaaaatgtgtagagggttgtagaaaaataaatatttatatatttctta

SEQ ID NO: 198552 - DNA, 1888 bp, Homo sapiens
  Payload ID: 19187
  Gene Name: vaccinia related kinase 2
  Uniprot ID: Q86Y07
  ENST ID: ENST00000340157
  CDS Start-End: 184-1710
gggccgctgcactgcgaggccgacgcagctggagagaagttaggcaggtcctagggagggcaggctcgagtgctgggcccgcctccccgcgggactgtaggcccgggggctccgcctcgtcgcagcggcaggtaggaggcggtgcgcgcggcccggcgacgggggatcctgaggcccgaagtgatgccaccaaaaagaaatgaaaaatacaaacttcctattccatttccagaaggcaaggttctggatgatatggaaggcaatcagtgggtactgggcaagaagattggctctggaggatttggattgatatatttagctttccccacaaataaaccagagaaagatgcaagacatgtagtaaaagtggaatatcaagaaaatggcccgttattttcagaacttaaattttatcagagagttgcaaaaaaagactgtatcaaaaagtggatagaacgcaaacaacttgattatttaggaattcctctgttttatggatctggtctgactgaattcaagggaagaagttacagatttatggtaatggaaagactaggaatagatttacagaagatctcaggccagaatggtacctttaaaaagtcaactgtcctgcaattaggtatccgaatgttggatgtactggaatatatacatgaaaatgaatatgttcatggtgatataaaagcagcaaatctacttttgggttacaaaaatccagaccaggtttatcttgcagattatggactttcctacagatattgtcccaatgggaaccacaaacagtatcaggaaaatcctagaaaaggccataatgggacaatagagtttaccagcttggatgcccacaagggagtagccttgtccagacgaagtgacgttgagatcctcggctactgcatgctgcggtggttgtgtgggaaacttccctgggaacagaacctgaaggaccctgtggctgtgcagactgctaaaacaaatctgttggacgagctcccccagtcagtgcttaaatgggctccttctggaagcagttgctgtgaaatagcccaatttttggtatgtgctcatagtttagcatatgatgaaaagccaaactatcaagccctcaagaaaattttgaaccctcatggaatacctttaggaccactggacttttccacaaaaggacagagtataaatgtccatactccaaacagtcaaaaagttgattcacaaaaggctgcaacaaagcaagtcaacaaggcacacaataggttaatcgaaaaaaaagtccacagtgagagaagcgctgagtcctgtgcaacatggaaagtgcagaaagaggagaaactgattggattgatgaacaatgaagcagctcaggaaagcacaaggagaagacagaaatatcaagagtctcaagaacctttgaatgaagtaaacagtttcccacaaaaaatcagctatacacaattcccaaactcattttatgagcctcatcaagattttaccagtccagatatattcaagaagtcaagatctccatcttggtataaatacacttccacagtcagcacggggatcacagacttagaaagttcaactggactttggcctacaatttcccagtttactcttagtgaagagacaaacgcagatgtttattattatcgcatcatcatacctgtccttttgatgttagtatttcttgctttattttttctctgaagatgataccaaaattccttttgataattttttaagtttccagctcttcaccgaaatgttgtattcttatttcagtgtttccttccagacatttttaaggtaattggctttaaaaagagaacatattttaacaaagtttgtggacactctaaaaaataaaattgctttgtactagaaa

SEQ ID NO: 198553 - DNA, 1676 bp, Homo sapiens
  Payload ID: 19187
  Gene Name: vaccinia related kinase 2
  Uniprot ID: Q86Y07
  ENST ID: ENST00000440705
  CDS Start-End: 128-1585
gcagctggagagaagttaggcaggtcctagggagggcaggctcgagtgctgggcccgcctccccgcgggactgtaggcccgggggctccgcctcgtcgcagcggcagaaggcaaggttctggatgatatggaaggcaatcagtgggtactgggcaagaagattggctctggaggatttggattgatatatttagctttccccacaaataaaccagagaaagatgcaagacatgtagtaaaagtggaatatcaagaaaatggcccgttattttcagaacttaaattttatcagagagttgcaaaaaaagactgtatcaaaaagtggatagaacgcaaacaacttgattatttaggaattcctctgttttatggatctggtctgactgaattcaagggaagaagttacagatttatggtaatggaaagactaggaatagatttacagaagatctcaggccagaatggtacctttaaaaagtcaactgtcctgcaattaggtatccgaatgttggatgtactggaatatatacatgaaaatgaatatgttcatggtgatataaaagcagcaaatctacttttgggttacaaaaatccagaccaggtttatcttgcagattatggactttcctacagatattgtcccaatgggaaccacaaacagtatcaggaaaatcctagaaaaggccataatgggacaatagagtttaccagcttggatgcccacaagggagtagccttgtccagacgaagtgacgttgagatcctcggctactgcatgctgcggtggttgtgtgggaaacttccctgggaacagaacctgaaggaccctgtggctgtgcagactgctaaaacaaatctgttggacgagctcccccagtcagtgcttaaatgggctccttctggaagcagttgctgtgaaatagcccaatttttggtatgtgctcatagtttagcatatgatgaaaagccaaactatcaagccctcaagaaaattttgaaccctcatggaatacctttaggaccactggacttttccacaaaaggacagagtataaatgtccatactccaaacagtcaaaaagttgattcacaaaaggctgcaacaaagcaagtcaacaaggcacacaataggttaatcgaaaaaaaagtccacagtgagagaagcgctgagtcctgtgcaacatggaaagtgcagaaagaggagaaactgattggattgatgaacaatgaagcagctcaggaaagcacaaggagaagacagaaatatcaagagtctcaagaacctttgaatgaagtaaacagtttcccacaaaaaatcagctatacacaattcccaaactcattttatgagcctcatcaagattttaccagtccagatatattcaagaagtcaagatctccatcttggtataaatacacttccacagtcagcacggggatcacagacttagaaagttcaactggactttggcctacaatttcccagtttactcttagtgaagagacaaacgcagatgtttattattatcgcatcatcatacctgtccttttgatgttagtatttcttgctttattttttctctgaagatgataccaaaattccttttgataattttttaagtttccagctcttcaccgaaatgttgtattcttatttcagtgtttccttccagaca

SEQ ID NO: 198554 - DNA, 1870 bp, Homo sapiens
  Payload ID: 19187
  Gene Name: vaccinia related kinase 2
  ENST ID: ENST00000432057
  CDS Start-End: 116-295
gacgcagctggagagaagttaggcaggtcctagggagggcaggctcgagtgctgggcccgcctccccgcgggactgtaggcccgggggctccgcctcgtcgcagcggcagaagtgatgccaccaaaaagaaatgaaaaatacaaacttcctattccatttccagaaggcaaggttctggatgatatggaaggcaatcagtgggtactgggcaagaagattggctctggaggatttggattgatatatttagagacactggccatttttctctctccaatgcttagtgtggagtaaaggcagcttcccgcaaatttatttcaagcaagagcaatcggaagcttcgacatgtgtgaaagaggcgcatagagaacatagcttccatttcagctttccccacaaataaaccagagaaagatgcaagacatgtagtaaaagtggaatatcaagaaaatggcccgttattttcagaacttaaattttatcagagagttgcaaaaaaagactgtatcaaaaagtggatagaacgcaaacaacttgattatttaggaattcctctgttttatggatctggtctgactgaattcaagggaagaagttacagatttatggtaatggaaagactaggaatagatttacagaagatctcaggccagaatggtacctttaaaaagtcaactgtcctgcaattaggtatccgaatgttggatgtactggaatatatacatgaaaatgaatatgttcatggtgatataaaagcagcaaatctacttttgggttacaaaaatccagaccaggtttatcttgcagattatggactttcctacagatattgtcccaatgggaaccacaaacagtatcaggaaaatcctagaaaaggccataatgggacaatagagtttaccagcttggatgcccacaagggagtagccttgtccagacgaagtgacgttgagatcctcggctactgcatgctgcggtggttgtgtgggaaacttccctgggaacagaacctgaaggaccctgtggctgtgcagactgctaaaacaaatctgttggacgagctcccccagtcagtgcttaaatgggctccttctggaagcagttgctgtgaaatagcccaatttttggtatgtgctcatagtttagcatatgatgaaaagccaaactatcaagccctcaagaaaattttgaaccctcatggaatacctttaggaccactggacttttccacaaaaggacagagtataaatgtccatactccaaacagtcaaaaagttgattcacaaaaggctgcaacaaagcaagtcaacaaggcacacaataggttaatcgaaaaaaaagtccacagtgagagaagcgctgagtcctgtgcaacatggaaagtgcagaaagaggagaaactgattggattgatgaacaatgaagcagctcaggaaagcacaaggagaagacagaaatatcaagagtctcaagaacctttgaatgaagtaaacagtttcccacaaaaaatcagctatacacaattcccaaactcattttatgagcctcatcaagattttaccagtccagatatattcaagaagtcaagatctccatcttggtataaatacacttccacagtcagcacggggatcacagacttagaaagttcaactggactttggcctacaatttcccagtttactcttagtgaagagacaaacgcagatgtttattattatcgcatcatcatacctgtccttttgatgttagtatttcttgctttattttttctctgaagatgataccaaaattccttttgataattttttaagtttccagctcttcaccgaaatgttgtattcttatttcagtgtttccttccagaca

SEQ ID NO: 198555 - DNA, 2381 bp, Homo sapiens
  Payload ID: 19187
  Gene Name: vaccinia related kinase 2
  Uniprot ID: Q86Y07
  ENST ID: ENST00000417641
  CDS Start-End: 628-1818
ggctattcacacgcttcagttcacaacttccatccagaatcctacttctctgattgtcctcatggggaaagtatgctatttccttcatcctacaagatgcttctcactgactctatccatattcttctcatccttcaagagccaagtcaaatctctctgcttccaataagccttccttgctacactcagaaatggaatgaatccccaagatggcttaaggatgcccttctgttttggaatgctttctcttggtgtatatcaaggttggttcagtttaccagagaaaagatgccagtgtcataaagaagaatatttgaagctctataaatatgttgctttacgtggcaaaaaggactttacagatctgagtacactggattatctgggtgggcacaatgtaatcacaaggggctttctaagaaggaagaaggagggttcaaggcagaaaaaccggaagaagttataacattggctttgaagatggaagatggggacacaagtcaaggaattcaggtggcctctagaagcctgaaaagtcaaagaaatgaattctcccctagagcctcaagaaggaacacagccctgctgacagcttgattttaggatttctgacctccagactaagtgatgccaccaaaaagaaatgaaaaatacaaacttcctattccatttccagaaggcaaggttctggatgatatggaaggcaatcagtgggtactgggcaagaagattggctctggaggatttggattgatatatttagctttccccacaaataaaccagagaaagatgcaagacatgtagtaaaagtggaatatcaagaaaatggcccgttattttcagaacttaaattttatcagagagttgcaaaaaaagactgtatcaaaaagtggatagaacgcaaacaacttgattatttaggaattcctctgttttatggatctggtctgactgaattcaagggaagaagttacagatttatggtaatggaaagactaggaatagatttacagaagatctcaggccagaatggtacctttaaaaagtcaactgtcctgcaattaggtatccgaatgttggatgtactggaatatatacatgaaaatgaatatgttcatggtgatataaaagcagcaaatctacttttgggttacaaaaatccagaccaggtttatcttgcagattatggactttcctacagatattgtcccaatgggaaccacaaacagtatcaggaaaatcctagaaaaggccataatgggacaatagagtttaccagcttggatgcccacaagggagtagccttgtccagacgaagtgacgttgagatcctcggctactgcatgctgcggtggttgtgtgggaaacttccctgggaacagaacctgaaggaccctgtggctgtgcagactgctaaaacaaatctgttggacgagctcccccagtcagtgcttaaatgggctccttctggaagcagttgctgtgaaatagcccaatttttggtatgtgctcatagtttagcatatgatgaaaagccaaactatcaagccctcaagaaaattttgaaccctcatggaatacctttaggaccactggacttttccacaaaaggacagagtataaatgtccatactccaaacagtcaaaaagttgattcacaaaaggctgcaacaaagcaagtcaacaaggcacacaataggttaatcgaaaaaaaagtccacagtgagagaagcgctgagtcctgtgcaacatggaaagtgcagaaagaggagaaactgattggattgatgaacaatgaagcagctcagtttaggtagaagcttaggctattgatttgaacccactattttttctaatgaaagcacaaggagaagacagaaatatcaagagtctcaagaacctttgaatgaagtaaacagtttcccacaaaaaatcagctatacacaattcccaaactcattttatgagcctcatcaagattttaccagtccagatatattcaagaagtcaagatctccatcttggtataaatacacttccacagtcagcacggggatcacagacttagaaagttcaactggactttggcctacaatttcccagtttactcttagtgaagagacaaacgcagatgtttattattatcgcatcatcatacctgtccttttgatgttagtatttcttgctttattttttctctgaagatgataccaaaattccttttgataattttttaagtttccagctcttcaccgaaatgttgtattcttatttcagtgtttccttccagacatttttaaggtaattggctttaaaaagagaacatattttaacaaagtttgtggacactctaaaaaataaaattgctttgtactagaaa

SEQ ID NO: 198556 - DNA, 1916 bp, Homo sapiens
  Payload ID: 19187
  Gene Name: vaccinia related kinase 2
  Uniprot ID: Q86Y07
  ENST ID: ENST00000412104
  CDS Start-End: 517-1689
gtggacaggccgctgaaaggaaccggctgcggcctgtgtgaggctccgcgggccgctgcactgcgaggccgacgcagctggagagaagttaggcaggtcctagggagggcaggctcgagtgctgggcccgcctccccgcgggactgtaggcccgggggctccgcctcgtcgcagcggcaggtaggaggcggtgcgcgcggcccggcgacgggggatcctgaggcccgaagtgatgccaccaaaaagaaatgaaaaatacaaacttcctattccatttccagaaggcaaggttctggatgatatggaaggcaatcagtgggtactgggcaagaagattggctctggaggatttggattgatatatttagctttccccacaaataaaccagagaaagatgcaagacatgtagtaaaagtgtcaaaaagtggatagaacgcaaacaacttgattatttaggaattcctctgttttatggatctggtctgactgaattcaagggaagaagttacagatttatggtaatggaaagactaggaatagatttacagaagatctcaggccagaatggtacctttaaaaagtcaactgtcctgcaattaggtatccgaatgttggatgtactggaatatatacatgaaaatgaatatgttcatggtgatataaaagcagcaaatctacttttgggttacaaaaatccagaccaggtttatcttgcagattatggactttcctacagatattgtcccaatgggaaccacaaacagtatcaggaaaatcctagaaaaggccataatgggacaatagagtttaccagcttggatgcccacaagggagtagccttgtccagacgaagtgacgttgagatcctcggctactgcatgctgcggtggttgtgtgggaaacttccctgggaacagaacctgaaggaccctgtggctgtgcagactgctaaaacaaatctgttggacgagctcccccagtcagtgcttaaatgggctccttctggaagcagttgctgtgaaatagcccaatttttggtatgtgctcatagtttagcatatgatgaaaagccaaactatcaagccctcaagaaaattttgaaccctcatggaatacctttaggaccactggacttttccacaaaaggacagagtataaatgtccatactccaaacagtcaaaaagttgattcacaaaaggctgcaacaaagcaagtcaacaaggcacacaataggttaatcgaaaaaaaagtccacagtgagagaagcgctgagtcctgtgcaacatggaaagtgcagaaagaggagaaactgattggattgatgaacaatgaagcagctcaggaaagcacaaggagaagacagaaatatcaagagtctcaagaacctttgaatgaagtaaacagtttcccacaaaaaatcagctatacacaattcccaaactcattttatgagcctcatcaagattttaccagtccagatatattcaagaagtcaagatctccatcttggtataaatacacttccacagtcagcacggggatcacagacttagaaagttcaactggactttggcctacaatttcccagtttactcttagtgaagagacaaacgcagatgtttattattatcgcatcatcatacctgtccttttgatgttagtatttcttgctttattttttctctgaagatgataccaaaattccttttgataattttttaagtttccagctcttcaccgaaatgttgtattcttatttcagtgtttccttccagacatttttaaggtaattggctttaaaaagagaacatattttaacaaagtttgtggacactctaaaaaataaaattgctttgtactagaaatagtgtcatagaatagtgtcatagtacagtttggaaaacacttctgaag

SEQ ID NO: 198557 - DNA, 553 bp, Homo sapiens
  Payload ID: 19187
  Gene Name: vaccinia related kinase 2
  ENST ID: ENST00000428021
  CDS Start-End: 306-553
ctcttgctctggggtcttgggtggcgggcggcacctccgcttgcagtgccggagccgcggccccgctcggaaaagggctgccgtcggagttagatgccggggactccgggccgtcccagcccccgggcctcagctccggcccgggcagagtcgctgcttccgcgtttggttcttttttccccgctgggagtgagaacaaggcgtccccttctactcacgtttgccaaaagcgggtccgacgtgttagcggaaaagtgtgtcctgcactgttaatatgtgctatagaaccccgaaatgaattttggatgaaatttgaagtgatgccaccaaaaagaaatgaaaaatacaaacttcctattccatttccagaaggcaaggttctggatgatatggaaggcaatcagtgggtactgggcaagaagattggctctggaggatttggattgatatatttagctttccccacaaataaaccagagaaagatgcaagacatgtagtaaaagtggaatatcaagaaaatggcccgttattttcagaacttaaattttatca

SEQ ID NO: 198558 - DNA, 2446 bp, Homo sapiens
  Payload ID: 19187
  Gene Name: vaccinia related kinase 2
  Uniprot ID: Q86Y07
  ENST ID: ENST00000435505
  CDS Start-End: 746-2272
ggctattcacacgcttcagttcacaacttccatccagaatcctacttctctgattgtcctcatggggaaagtatgctatttccttcatcctacaagatgcttctcactgactctatccatattcttctcatccttcaagagccaagtcaaatctctctgcttccaataagccttccttgctacactcagaaatggaatgaatccccaagatggcttaaggatgcccttctgttttggaatgctttctcttggtgtatatcaaggttggttcagtttaccagagaaaagatgccagggtctcattctgtcacccaagctggagtccagtgacatggtcacagctcactgaagcctcaacctccttggctcaagcaatcctttcacctcagccttctaagtagctaggagcacagtgtcataaagaagaatatttgaagctctataaatatgttgctttacgtggcaaaaaggactttacagatctgagtacactggattatctgggtgggcacaatgtaatcacaaggggctttctaagaaggaagaaggagggttcaaggcagaaaaaccggaagaagttataacattggctttgaagatggaagatggggacacaagtcaaggaattcaggtggcctctagaagcctgaaaagtcaaagaaatgaattctcccctagagcctcaagaaggaacacagccctgctgacagcttgattttaggatttctgacctccagactaagtgatgccaccaaaaagaaatgaaaaatacaaacttcctattccatttccagaaggcaaggttctggatgatatggaaggcaatcagtgggtactgggcaagaagattggctctggaggatttggattgatatatttagctttccccacaaataaaccagagaaagatgcaagacatgtagtaaaagtggaatatcaagaaaatggcccgttattttcagaacttaaattttatcagagagttgcaaaaaaagactgtatcaaaaagtggatagaacgcaaacaacttgattatttaggaattcctctgttttatggatctggtctgactgaattcaagggaagaagttacagatttatggtaatggaaagactaggaatagatttacagaagatctcaggccagaatggtacctttaaaaagtcaactgtcctgcaattaggtatccgaatgttggatgtactggaatatatacatgaaaatgaatatgttcatggtgatataaaagcagcaaatctacttttgggttacaaaaatccagaccaggtttatcttgcagattatggactttcctacagatattgtcccaatgggaaccacaaacagtatcaggaaaatcctagaaaaggccataatgggacaatagagtttaccagcttggatgcccacaagggagtagccttgtccagacgaagtgacgttgagatcctcggctactgcatgctgcggtggttgtgtgggaaacttccctgggaacagaacctgaaggaccctgtggctgtgcagactgctaaaacaaatctgttggacgagctcccccagtcagtgcttaaatgggctccttctggaagcagttgctgtgaaatagcccaatttttggtatgtgctcatagtttagcatatgatgaaaagccaaactatcaagccctcaagaaaattttgaaccctcatggaatacctttaggaccactggacttttccacaaaaggacagagtataaatgtccatactccaaacagtcaaaaagttgattcacaaaaggctgcaacaaagcaagtcaacaaggcacacaataggttaatcgaaaaaaaagtccacagtgagagaagcgctgagtcctgtgcaacatggaaagtgcagaaagaggagaaactgattggattgatgaacaatgaagcagctcaggaaagcacaaggagaagacagaaatatcaagagtctcaagaacctttgaatgaagtaaacagtttcccacaaaaaatcagctatacacaattcccaaactcattttatgagcctcatcaagattttaccagtccagatatattcaagaagtcaagatctccatcttggtataaatacacttccacagtcagcacggggatcacagacttagaaagttcaactggactttggcctacaatttcccagtttactcttagtgaagagacaaacgcagatgtttattattatcgcatcatcatacctgtccttttgatgttagtatttcttgctttattttttctctgaagatgataccaaaattccttttgataattttttaagtttccagctcttcaccgaaatgttgtattcttatttcagtgtttccttccagacatttttaaggtaattggctttaaaaagagaacatattttaacaaagtttgtggacactctaaaaaataaaattgctttgtacta

SEQ ID NO: 198559 - DNA, 1938 bp, Homo sapiens
  Payload ID: 19188
  Gene Name: vaccinia related kinase 3
  Uniprot ID: Q8IV63
  ENST ID: ENST00000316763
  CDS Start-End: 185-1609
gctctccgcccagcggaagttttcgctgggcaactgagaaggtgagtccgggtaactgcggaggatccgagggtcaggctgcagaagcccagaatcccaccccagtccccaagtacagaggtcgctgtcaagatggagtttccaacccagtaaatccaagggccagaccgtgacctcataaagcatgatctccttctgtccagactgtggcaaaagtatccaagcggcattcaaattctgcccctactgtggaaattctttgcctgtagaggagcatgtagggtcccagacctttgtcaatccacatgtgtcatccttccaaggctcaaagagagggctgaactccagttttgaaacctctcctaagaaagtgaaatggtccagcaccgtcacctctccccgattatccctcttctcagatggtgacagttctgagtctgaagatactctgagttcctctgagagatccaaaggctccgggagcagacccccaacccccaaaagcagccctcagaagaccaggaagagccctcaggtgaccaggggtagccctcagaagaccagctgtagccctcagaagaccaggcagagccctcagacgctgaagcggagccgagtgaccacctcacttgaagctttgcccacagggacagtgctgacagacaagagtgggcgacagtggaagctgaagtccttccagaccagggacaaccagggcattctctatgaagctgcacccacctccaccctcacctgtgactcaggaccacagaagcaaaagttctcactcaaactggatgccaaggatgggcgcttgttcaatgagcagaacttcttccagcgggccgccaagcctctgcaagtcaacaagtggaagaagctgtactcgaccccactgctggccatccctacctgcatgggtttcggtgttcaccaggacaaatacaggttcttggtgttacccagcctggggaggagccttcagtcggccctggatgtcagcccaaagcatgtgctgtcagagaggtctgtgctgcaggtggcctgccggctgctggatgccctggagttcctccatgagaatgagtatgttcatggaaatgtgacagctgaaaatatctttgtggatccagaggaccagagtcaggtgactttggcaggctatggcttcgccttccgctattgcccaagtggcaaacacgtggcctacgtggaaggcagcaggagccctcacgagggggaccttgagttcattagcatggacctgcacaagggatgcgggccctcccgccgcagcgacctccagagcctgggctactgcatgctgaagtggctctacgggtttctgccatggacaaattgccttcccaacactgaggacatcatgaagcaaaaacagaagtttgttgataagccggggcccttcgtgggaccctgcggtcactggatcaggccctcagagaccctgcagaagtacctgaaggtggtgatggccctcacgtatgaggagaagccgccctacgccatgctgaggaacaacctagaagctttgctgcaggatctgcgtgtgtctccatatgaccccattggcctcccgatggtgccctaggtggaatccagaactttccatttgcagtgtgcaacagaaaaaaaaaaatgaagtaatgtgactcaaggcctgctgtttaatcacagataagcttctagaacaagccctggaatgtgcattcctgccactggtttcaggatactcatcagtcctgattagcctcccggagggccccagtttccctcccgtgaatgtgaagttccccatcttggtggcctgcccttcagccagtgtcctagcaaagctggatggggttgggccggcccacaggggggacccctcctacccttgacacctctgtgctttggtaataaattgttttaccagag

SEQ ID NO: 198560 - DNA, 1749 bp, Homo sapiens
  Payload ID: 19188
  Gene Name: vaccinia related kinase 3
  Uniprot ID: Q8IV63
  ENST ID: ENST00000377011
  CDS Start-End: 171-1445
ggaagttttcgctgggcaactgagaaggtgagtccgggtaactgcggaggatccgagggtcaggctgcagaagcccagaatcccaccccagtccccaagtacagaggtcgctgtcaagatggagtttccaacccagtaaatccaagggccagaccgtgacctcataaagcatgatctccttctgtccagactgtggcaaaagtatccaagcggcattcaaattctgcccctactgtggaaattctttgcctgtagaggagcatgtagggtcccagacctttgtcaatccacatgtgtcatccttccaaggctccgggagcagacccccaacccccaaaagcagccctcagaagaccaggaagagccctcaggtgaccaggggtagccctcagaagaccagctgtagccctcagaagaccaggcagagccctcagacgctgaagcggagccgagtgaccacctcacttgaagctttgcccacagggacagtgctgacagacaagagtgggcgacagtggaagctgaagtccttccagaccagggacaaccagggcattctctatgaagctgcacccacctccaccctcacctgtgactcaggaccacagaagcaaaagttctcactcaaactggatgccaaggatgggcgcttgttcaatgagcagaacttcttccagcgggccgccaagcctctgcaagtcaacaagtggaagaagctgtactcgaccccactgctggccatccctacctgcatgggtttcggtgttcaccaggacaaatacaggttcttggtgttacccagcctggggaggagccttcagtcggccctggatgtcagcccaaagcatgtgctgtcagagaggtctgtgctgcaggtggcctgccggctgctggatgccctggagttcctccatgagaatgagtatgttcatggaaatgtgacagctgaaaatatctttgtggatccagaggaccagagtcaggtgactttggcaggctatggcttcgccttccgctattgcccaagtggcaaacacgtggcctacgtggaaggcagcaggagccctcacgagggggaccttgagttcattagcatggacctgcacaagggatgcgggccctcccgccgcagcgacctccagagcctgggctactgcatgctgaagtggctctacgggtttctgccatggacaaattgccttcccaacactgaggacatcatgaagcaaaaacagaagtttgttgataagccggggcccttcgtgggaccctgcggtcactggatcaggccctcagagaccctgcagaagtacctgaaggtggtgatggccctcacgtatgaggagaagccgccctacgccatgctgaggaacaacctagaagctttgctgcaggatctgcgtgtgtctccatatgaccccattggcctcccgatggtgccctaggtggaatccagaactttccatttgcagtgtgcaacagaaaaaaaaaaatgaagtaatgtgactcaaggcctgctgtttaatcacagataagcttctagaacaagccctggaatgtgcattcctgccactggtttcaggatactcatcagtcctgattagcctcccggagggccccagtttccctcccgtgaatgtgaagttccccatcttggtggcctgcccttcagccagtgtcctagcaaagctggatggggttgggccggcccacaggggggacccctcctacccttgacacctctgtgct

SEQ ID NO: 198561 - DNA, 822 bp, Homo sapiens
  Payload ID: 19188
  Gene Name: vaccinia related kinase 3
  ENST ID: ENST00000600137
  CDS Start-End: 290-822
agagcggctccgggtcgcggggttcactggcctcctcttgagcttcccaagccaccttgggctccgtgttgggcatggctaaggcggagatgggcggaacttgtgggaagttcgacagctcctccgctgtgaaacttggcgtctaagtcatcccgtggtttctatggaggtgcggccgaagggaggctctgtcgtcgcctaggcaatcgccccacctgcgctgaggtcgctgtcaagatggagtttccaacccagtaaatccaagggccagaccgtgacctcataaagcatgatctccttctgtccagactgtggcaaaagtatccaagcggcattcaaattctgcccctactgtggaaattctttgcctgtagaggagcatgtagggtcccagacctttgtcaatccacatgtgtcatccttccaaggctccgggagcagacccccaacccccaaaagcagccctcagaagaccaggaagagccctcaggtgaccaggggtagccctcagaagaccagctgtagccctcagaagaccaggcagagccctcagacgctgaagcggagccgagtgaccacctcacttgaagctttgcccacagggacagtgctgacagacaagagtgggcgacagtggaagctgaagtccttccagaccagggacaaccagggcattctctatgaagctgcacccacctccaccctcacctgtgactcaggaccacagaagcaaaagttctcactcaaactgtcaacaagtggaagaagctgtactcgaccccactgctggccatccctacctgcatgggtttcggtgttcac

SEQ ID NO: 198562 - DNA, 840 bp, Homo sapiens
  Payload ID: 19188
  Gene Name: vaccinia related kinase 3
  ENST ID: ENST00000596445
  CDS Start-End: 334-840
cttctttcgccttcccatctcctcctgcttcttcagccttagcactgtgggagtagagtagaaagagaatcaggaccaggcggcatcagtttgtagtccagatttttaccttgttaaagaatcatctaattagcttcttgcctttactagaagtcagggagtgttaaccttttccgaagagcaagcggtaggttgccatggaaacgcgttgtgacgggtttctgagaaaacaagcggaagtaaggggcggagttgaggcagaagtttaggtcgctgtcaagatggagtttccaacccagtaaatccaagggccagaccgtgacctcataaagcatgatctccttctgtccagactgtggcaaaagtatccaagcggcattcaaattctgcccctactgtggaaattctttgcctgtagaggagcatgtagggtcccagacctttgtcaatccacatgtgtcatccttccaaggctcaaagagagggctgaactccagttttgaaacctctcctaagaaagtgaaatggtccagcaccgtcacctctccccgattatccctcttctcagatggtgacagttctgagtctgaagatactctgagttcctctgagagatccaaaggctccgggagcagacccccaacccccaaaagcagccctcagaagaccaggaagagccctcaggtgaccaggggtagccctcagaagaccagctgtagccctcagaagaccaggcagagccctcagacgctgaagcggagccgagtgaccacctcacttgaagctttgcccacagggacagtgctgacagacaagagtgggcgacagtggaagctgaag

SEQ ID NO: 198563 - DNA, 1448 bp, Homo sapiens
  Payload ID: 19188
  Gene Name: vaccinia related kinase 3
  ENST ID: ENST00000594090
  CDS Start-End: 89-307
agttttcgctgggcaactgagaaggtcgctgtcaagatggagtttccaacccagtaaatccaagggccagaccgtgacctcataaagcatgatctccttctgtccagactgtggcaaaagtatccaagcggcattcaaattctgcccctactgtggaaattctttgcctgtagaggagcatgtagggtcccagacctttgtcaatccacatgtgtcatccttccaagccagcctggactcccctgcttggaggagatatatgtgcagcctgccagcttggcacctgcaggctcaaagagagggctgaactccagttttgaaacctctcctaagaaagtgaaatggtccagcaccgtcacctctccccgattatccctcttctcagatggtgacagttctgagtctgaagatactctgagttcctctgagagatccaaaggctccgggagcagacccccaacccccaaaagcagccctcagaagaccaggaagagccctcaggtgaccaggggtagccctcagaagaccagctgtagccctcagaagaccaggcagagccctcagacgctgaagcggagccgagtgaccacctcacttgaagctttgcccacagggacagtgctgacagacaagagtgggcgacagtggaagctgaagtccttccagaccagggacaaccagggcattctctatgaagctgcacccacctccaccctcacctgtgactcaggaccacagaagcaaaagttctcactcaaactggatgccaaggatgggcgcttgttcaatgagcagaacttcttccagcgggccgccaagcctctgcaagtcaacaagtggaagaagctgtactcgaccccactgctggccatccctacctgcatgggtttcggtgttcaccaggacaaatacaggttcttggtgttacccagcctggggaggagccttcagtcggccctggatgtcagcccaaagcatgtgctgtcagagaggtctgtgctgcaggtggcctgccggctgctggatgccctggagttcctccatgagaatgagtatgttcatggaaatgtgacagctgaaaatatctttgtggatccagaggaccagagtcaggtgactttggcaggctatggcttcgccttccgctattgcccaagtggcaaacacgtggcctacgtggaaggcagcaggagccctcacgagggggaccttgagttcattagcatggacctgcacaagggatgcgggccctcccgccgcagcgacctccagagcctgggctactgcatgctgaagtggctctacgggtttctgccatggacaaattgccttcccaacactgaggacatcatgaagcaaaaacagaagtgagtctaggggtcagcagaacccctgcaggtggtcagcagaacccctgcaggtggacagaagcccagagcccaactggg

SEQ ID NO: 198564 - DNA, 572 bp, Homo sapiens
  Payload ID: 19188
  Gene Name: vaccinia related kinase 3
  ENST ID: ENST00000600259
  CDS Start-End: 122-572
aggatgcgcgcgcagcgctctccgcccagcggaagttttcgctgggcaactgagaaggtcgctgtcaagatggagtttccaacccagtaaatccaagggccagaccgtgacctcataaagcatgatctccttctgtccagactgtggcaaaagtatccaagcggcattcaaattctgcccctactgtggaaattctttgcctgtagaggagcatgtagggtcccagacctttgtcaatccacatgtgtcatccttccaagatggtgacagttctgagtctgaagatactctgagttcctctgagagatccaaaggctccgggagcagacccccaacccccaaaagcagccctcagaagaccaggaagagccctcaggtgaccaggggtagccctcagaagaccagctgtagccctcagaagaccaggcagagccctcagacgctgaagcggagccgagtgaccacctcacttgaagctttgcccacagggacagtgctgacagacaagagtgggcgacagtggaagctgaagtccttccagaccagggacaaccagggcattctctatgaag

SEQ ID NO: 198565 - DNA, 1979 bp, Homo sapiens
  Payload ID: 19188
  Gene Name: vaccinia related kinase 3
  ENST ID: ENST00000593919
  CDS Start-End: 92-1312
ggaagttttcgctgggcaactgagaaggtcgctgtcaagatggagtttccaacccagtaaatccaagggccagaccgtgacctcataaagcatgatctccttctgtccagactgtggcaaaagtatccaagcggcattcaaattctgcccctactgtggaaattctttgcctgtagaggagcatgtagggtcccagacctttgtcaatccacatgtgtcatccttccaaggctcaaagagagggctgaactccagttttgaaacctctcctaagaaagtgaaatggtccagcaccgtcacctctccccgattatccctcttctcagatggtgacagttctgagtctgaagatactctgagttcctctgagagatccaaaggctccgggagcagacccccaacccccaaaagcagccctcagaagaccaggaagagccctcaggtgaccaggggtagccctcagaagaccagctgtagccctcagaagaccaggcagagccctcagacgctgaagcggagccgagtgaccacctcacttgaagctttgcccacagggacagtgctgacagacaagagtgggcgacagtggaagctgaagtccttccagaccagggacaaccagggcattctctatgaagctgcacccacctccaccctcacctgtgactcaggaccacagaagcaaaagttctcactcaaactggatgccaaggatgggcgcttgttcaatgagcagaacttcttccagcgggccgccaagcctctgcaagtcaacaagtggaagaagctgtactcgaccccactgctggccatccctacctgcatgggtttcggtgttcaccaggacaaatacaggttcttggtgttacccagcctggggaggagccttcagtcggccctggatgtcagcccaaagcatgtgctgtcagagaggtctgtgctgcaggtggcctgccggctgctggatgccctggagttcctccatgagaatgagtatgttcatggaaatgtgacagctgaaaatatctttgtggatccagaggaccagagtcaggtgactttggcaggctatggcttcgccttccgctattgcccaagtggcaaacacgtggcctacgtggaaggcagcaggagccctcacgagggggaccttgagttcattagcatggacctgcacaagggatgcgggccctcccgccgcagcgacctccagagcctgggctactgcatgctgaagtggctctacgggtttctgccatggacaaattgccttcccaacactgaggacatcatgaagcaaaaacagaagtgagtctaggggtcagcagaacccctgcaggtggtcagcagaacccctgcaggtggacagaagcccagagcccaactgggagcaggagggaaggggaggtggcatccagcagagcccaagtcctctgagccgcacaggcatgtgctgcagtgtccacacagcaggcgaggcaggtgttccggagccacactgcctgggctcagactctggcaccaccactgtggggtgttaacgtctgcgagcctcagtgtcctgctccatgagatggtctcctactagctactaccttatgggactgcaaagagttcagggaagtcaggtgcacacagcacttagcacaggggctggctcagagaaaatgctcattgtggccgggcgcggtggctcacgcctgtaatcccagcactttgggaggcagaggcgggcggatcacgaggtcaggagatcgagaccatcctgactaacacagtgaaaccccgtctctactaaaaatacaaaaaattagccaggcatggtggcgggcgcctgtagtcccagctacttgggaggctgaggcaggagaatggcgtgaacctgggagtgggagcttgcagtgagccaagattgcaccactgcactccagcctgggcgacagagcgagactccgtctcaaaaaaaaaaaaaaaaaaaa

SEQ ID NO: 198566 - DNA, 983 bp, Homo sapiens
  Payload ID: 19188
  Gene Name: vaccinia related kinase 3
  ENST ID: ENST00000596121
  CDS Start-End: 67-810
aggtcgctgtcaagatggagtttccaacccagtaaatccaagggccagaccgtgacctcataaagcatgatctccttctgtccagactgtggcaaaagtatccaagcggcattcaaattctgcccctactgtggaaattctttgcctgtagaggagcatgtagggtcccagacctttgtcaatccacatgtgtcatccttccaaggctcaaagagagggctgaactccagttttgaaacctctcctaagaaagtgaaatggtccagcaccgtcacctctccccgattatccctcttctcagatggtgacagttctgagtctgaagatactctgagttcctctgagagatccaaaggctccgggagcagacccccaacccccaaaagcagccctcagaagaccaggaagagccctcaggtgaccaggggtagccctcagaagaccagctgtagccctcagaagaccaggcagagccctcagacgctgaagcggagccgagtgaccacctcacttgaagctttgcccacagggacagtgctgacagacaagagtgggcgacagtggaagctgaagtccttccagaccagggacaaccagggcattctctatgaagctgcacccacctccaccctcacctgtgactcaggaccacagaagcaaaagttctcactcaaactggttcttggtgttacccagcctggggaggagccttcagtcggccctggatgtcagcccaaagcatgtgctgtcagagaggtctgtgctgcaggtggcctgccggctgctggatgccctggagttcctccatgagaatgagtatgttcatggaaatgtgacagctgaaaatatctttgtggatccagaggaccagagtcaggtgactttggcaggctatggcttcgccttccgctattgcccaagtggcaaacacgtggcctacgtggaaggcagcaggagccctcacgagggggaccttgagttca

SEQ ID NO: 198567 - DNA, 2126 bp, Homo sapiens
  Payload ID: 19188
  Gene Name: vaccinia related kinase 3
  Uniprot ID: Q8IV63
  ENST ID: ENST00000599538
  CDS Start-End: 666-2090
gtgcgggcgacttctttcgccttcccatctcctcctgcttcttcagccttagcactgtgggagtagagtagaaagagaatcaggaccaggcggcatcagtttgtagtccagatttttaccttgttaaagaatcatctaattagcttcttgcctttactagaagtcagggagtgttaaccttttccgaagagcaagcggtaggttgccatggaaacgcgttgtgacgggtttctgagaaaacaagcggaagtaaggggcggagttgaggcagaagtttaggtaatgtgacctctgattggtggagaggtacctcacggtgcattccgattggtctgacactgacacatgcgcagtagaaccagaaggcgttccaaagcggctagaacggaggggagggggatgagcaatgagggaataatccccattccgtctggaatcagagggcgggcctgccgcggaggcatctgggaaacggagttcccaggcaggcgaagcccaggggccgtcaggaagtcagcggcgcctgcgcgggcgcctcagattcaggatgcgcgcgcagcgctctccgcccagcggaagttttcgctgggcaactgagaaggtcgctgtcaagatggagtttccaacccagtaaatccaagggccagaccgtgacctcataaagcatgatctccttctgtccagactgtggcaaaagtatccaagcggcattcaaattctgcccctactgtggaaattctttgcctgtagaggagcatgtagggtcccagacctttgtcaatccacatgtgtcatccttccaaggctcaaagagagggctgaactccagttttgaaacctctcctaagaaagtgaaatggtccagcaccgtcacctctccccgattatccctcttctcagatggtgacagttctgagtctgaagatactctgagttcctctgagagatccaaaggctccgggagcagacccccaacccccaaaagcagccctcagaagaccaggaagagccctcaggtgaccaggggtagccctcagaagaccagctgtagccctcagaagaccaggcagagccctcagacgctgaagcggagccgagtgaccacctcacttgaagctttgcccacagggacagtgctgacagacaagagtgggcgacagtggaagctgaagtccttccagaccagggacaaccagggcattctctatgaagctgcacccacctccaccctcacctgtgactcaggaccacagaagcaaaagttctcactcaaactggatgccaaggatgggcgcttgttcaatgagcagaacttcttccagcgggccgccaagcctctgcaagtcaacaagtggaagaagctgtactcgaccccactgctggccatccctacctgcatgggtttcggtgttcaccaggacaaatacaggttcttggtgttacccagcctggggaggagccttcagtcggccctggatgtcagcccaaagcatgtgctgtcagagaggtctgtgctgcaggtggcctgccggctgctggatgccctggagttcctccatgagaatgagtatgttcatggaaatgtgacagctgaaaatatctttgtggatccagaggaccagagtcaggtgactttggcaggctatggcttcgccttccgctattgcccaagtggcaaacacgtggcctacgtggaaggcagcaggagccctcacgagggggaccttgagttcattagcatggacctgcacaagggatgcgggccctcccgccgcagcgacctccagagcctgggctactgcatgctgaagtggctctacgggtttctgccatggacaaattgccttcccaacactgaggacatcatgaagcaaaaacagaagtttgttgataagccggggcccttcgtgggaccctgcggtcactggatcaggccctcagagaccctgcagaagtacctgaaggtggtgatggccctcacgtatgaggagaagccgccctacgccatgctgaggaacaacctagaagctttgctgcaggatctgcgtgtgtctccatatgaccccattggcctcccgatggtgccctaggtggaatccagaactttccatttgcagtgtgcaaca

SEQ ID NO: 198568 - DNA, 1777 bp, Homo sapiens
  Payload ID: 19188
  Gene Name: vaccinia related kinase 3
  Uniprot ID: Q8IV63
  ENST ID: ENST00000601341
  CDS Start-End: 122-1396
aggatgcgcgcgcagcgctctccgcccagcggaagttttcgctgggcaactgagaaggtcgctgtcaagatggagtttccaacccagtaaatccaagggccagaccgtgacctcataaagcatgatctccttctgtccagactgtggcaaaagtatccaagcggcattcaaattctgcccctactgtggaaattctttgcctgtagaggagcatgtagggtcccagacctttgtcaatccacatgtgtcatccttccaaggctccgggagcagacccccaacccccaaaagcagccctcagaagaccaggaagagccctcaggtgaccaggggtagccctcagaagaccagctgtagccctcagaagaccaggcagagccctcagacgctgaagcggagccgagtgaccacctcacttgaagctttgcccacagggacagtgctgacagacaagagtgggcgacagtggaagctgaagtccttccagaccagggacaaccagggcattctctatgaagctgcacccacctccaccctcacctgtgactcaggaccacagaagcaaaagttctcactcaaactggatgccaaggatgggcgcttgttcaatgagcagaacttcttccagcgggccgccaagcctctgcaagtcaacaagtggaagaagctgtactcgaccccactgctggccatccctacctgcatgggtttcggtgttcaccaggacaaatacaggttcttggtgttacccagcctggggaggagccttcagtcggccctggatgtcagcccaaagcatgtgctgtcagagaggtctgtgctgcaggtggcctgccggctgctggatgccctggagttcctccatgagaatgagtatgttcatggaaatgtgacagctgaaaatatctttgtggatccagaggaccagagtcaggtgactttggcaggctatggcttcgccttccgctattgcccaagtggcaaacacgtggcctacgtggaaggcagcaggagccctcacgagggggaccttgagttcattagcatggacctgcacaagggatgcgggccctcccgccgcagcgacctccagagcctgggctactgcatgctgaagtggctctacgggtttctgccatggacaaattgccttcccaacactgaggacatcatgaagcaaaaacagaagtttgttgataagccggggcccttcgtgggaccctgcggtcactggatcaggccctcagagaccctgcagaagtacctgaaggtggtgatggccctcacgtatgaggagaagccgccctacgccatgctgaggaacaacctagaagctttgctgcaggatctgcgtgtgtctccatatgaccccattggcctcccgatggtgccctaggtggaatccaggtgggaagagcttgtgaggcttaagcctctcaccccttgccctcacccgagccctgccccaggctccaggagacacttcccagaggctgttccacgttcataccagggcccagcttcccagggagacactgggtttttccgcacggtccttgaacttcccagcctcaaggaatggcaagtagcagaaacccggctcaacttggctttaagaaaagtggggattgattggctgttgtagctagaaaattacaagggggagcttcaggcacaacgggattcagggcctcaaaaatagcatcaagacgttgtttgtctctcgccatcttctgtcccttcttgcatccatgcctccctctgtccttccacccgg

SEQ ID NO: 198569 - DNA, 552 bp, Homo sapiens
  Payload ID: 19188
  Gene Name: vaccinia related kinase 3
  ENST ID: ENST00000601324
  CDS Start-End: 215-552
ggaagttttcgctgggcaactgagaaggtcgctgtcaagatggagtttccaacccagtaaatccaagggccagaccgtgacctcataaaggtattatcccttgggcacagcctctcaagacctttttcctttttcccaccagcagctggctcctgcttgtctcctctgggttgctgctggccagctttactcccagaaggaacgttgtcatagcatgatctccttctgtccagactgtggcaaaagtatccaagcggcattcaaattctgcccctactgtggaaattctttgcctgtagaggagcatgtagggtcccagacctttgtcaatccacatgtgtcatccttccaaggctcaaagagagggctgaactccagttttgaaacctctcctaagaaagtgaaatggtccagcaccgtcacctctccccgattatccctcttctcagatggtgacagttctgagtctgaagatactctgagttcctctgagagatccaaaggctccgggagcagacccccaacccccaaaagcagccctcagaagaccag

SEQ ID NO: 198570 - DNA, 836 bp, Homo sapiens
  Payload ID: 19188
  Gene Name: vaccinia related kinase 3
  ENST ID: ENST00000597215
  CDS Start-End: 290-836
agagcggctccgggtcgcggggttcactggcctcctcttgagcttcccaagccaccttgggctccgtgttgggcatggctaaggcggagatgggcggaacttgtgggaagttcgacagctcctccgctgtgaaacttggcgtctaagtcatcccgtggtttctatggaggtgcggccgaagggaggctctgtcgtcgcctaggcaatcgccccacctgcgctgaggtcgctgtcaagatggagtttccaacccagtaaatccaagggccagaccgtgacctcataaagcatgatctccttctgtccagactgtggcaaaagtatccaagcggcattcaaattctgcccctactgtggaaattctttgcctgtagaggagcatgtagggtcccagacctttgtcaatccacatgtgtcatccttccaaggctcaaagagagggctgaactccagttttgaaacctctcctaagaaagtgaaatggtccagcaccgtcacctctccccgattatccctcttctcagatggtgacagttctgagtctgaagatactctgagttcctctgagagatccaaaggctccgggagcagacccccaacccccaaaagcagccctcagaagaccaggaagagccctcaggtgaccaggggtagccctcagaagaccagctgtagccctcagaagaccaggcagagccctcagacgctgaagcggagccgagtgaccacctcacttgaagctttgcccacagggacagtgctgacagacaagagtgggcgacagtggaagctgaagtccttccagaccagggacaaccagggcattctctatgaag

SEQ ID NO: 198571 - DNA, 1668 bp, Homo sapiens
  Payload ID: 19188
  Gene Name: vaccinia related kinase 3
  ENST ID: ENST00000601912
  CDS Start-End: 67-1155
aggtcgctgtcaagatggagtttccaacccagtaaatccaagggccagaccgtgacctcataaagcatgatctccttctgtccagactgtggcaaaagtatccaagcggcattcaaattctgcccctactgtggaaattctttgcctgtagaggagcatgtagggtcccagacctttgtcaatccacatgtgtcatccttccaaggctccgggagcagacccccaacccccaaaagcagccctcagaagaccaggaagagccctcaggtgaccaggggtagccctcagaagaccagctgtagccctcagaagaccaggcagagccctcagacgctgaagcggagccgagtgaccacctcacttgaagctttgcccacagggacagtgctgacagacaagagtgggcgacagtggaagctgaagtccttccagaccagggacaaccagggcattctctatgaagctgcacccacctccaccctcacctgtgactcaggaccacagaagcaaaagttctcactcaaactggatgccaaggatgggcgcttgttcaatgagcagaacttcttccagcgggccgccaagcctctgcaagtcaacaagtggaagaagctgtactcgaccccactgctggccatccctacctgcatgggtttcggtgttcaccaggacaaatacaggttcttggtgttacccagcctggggaggagccttcagtcggccctggatgtcagcccaaagcatgtgctgtcagagaggtctgtgctgcaggtggcctgccggctgctggatgccctggagttcctccatgagaatgagtatgttcatggaaatgtgacagctgaaaatatctttgtggatccagaggaccagagtcaggtgactttggcaggctatggcttcgccttccgctattgcccaagtggcaaacacgtggcctacgtggaaggcagcaggagccctcacgagggggaccttgagttcattagcatggacctgcacaagggatgcgggccctcccgccgcagcgacctccagagcctgggctactgcatgctgaagtggctctacgggtttctgccatggacaaattgccttcccaacactgaggacatcatgaagcaaaaacagaagttgccttgggattcattttaatgtaagctggactttgtcatgccagaaacaaggctcggtcaccgtcagcagtttgcagttttccacctcctcccagttcctccgtgtggttgacccagatatctccgttatgcagccgcctccgggggaccacctccctccctttgagtcagccacagacagcctacttgacggccccgctggcccccacattccactgaactgtgcggatgccacagtgaccccctctcaggcacagcatgacctcctgaagtcgagcctgcttgctttgaacctaccagttaaaatctcctcaaaatgtttggataccgcccattggcccctcacagccacgagctccctgaccagtgtgcgtgtgtgtgtgtgtgtgtgtctgtgtgtgtgcttgggacgggtggggaggtcacctttgggtgtgcggtgtgcccccaggacctgtaagtaataaaatctttatttccatcttggatctttcctcatcatcaaagggatcctctccgtcttaaggatcac

SEQ ID NO: 198572 - DNA, 795 bp, Homo sapiens
  Payload ID: 19188
  Gene Name: vaccinia related kinase 3
  ENST ID: ENST00000599342
  CDS Start-End: 65-283
gtcgctgtcaagatggagtttccaacccagtaaatccaagggccagaccgtgacctcataaagcatgatctccttctgtccagactgtggcaaaagtatccaagcggcattcaaattctgcccctactgtggaaattctttgcctgtagaggagcatgtagggtcccagacctttgtcaatccacatgtgtcatccttccaagccagcctggactcccctgcttggaggagatatatgtgcagcctgccagcttggcacctgcaggctcaaagagagggctgaactccagttttgaaacctctcctaagaaagtgaaatggtccagcaccgtcacctctccccgattatccctcttctcagatggtgacagttctgagtctgaagatactctgagttcctctgagagatccaaaggctccgggagcagacccccaacccccaaaagcagccctcagaagaccaggaagagccctcaggtgaccaggggtagccctcagaagaccagctgtagccctcagaagaccaggcagagccctcagacgctgaagcggagccgagtgaccacctcacttgaagctttgcccacagggacagtgctgacagacaagagtgggcgacagtggaagctgaagtccttccagaccagggacaaccagggcattctctatgaagctgcacccacctccaccctcacctgtgactcaggaccacagaagcaaaagttctcactcaaactggttcttggtgttacccagcctggggaggagccttcagtcggccctggatgtcagccc

SEQ ID NO: 198573 - DNA, 1736 bp, Homo sapiens
  Payload ID: 19188
  Gene Name: vaccinia related kinase 3
  ENST ID: ENST00000596814
  CDS Start-End: 89-682
agttttcgctgggcaactgagaaggtcgctgtcaagatggagtttccaacccagtaaatccaagggccagaccgtgacctcataaagcatgatctccttctgtccagactgtggcaaaagtatccaagcggcattcaaattctgcccctactgtggaaattctttgcctgtagaggagcatgtagggtcccagacctttgtcaatccacatgtgtcatccttccaaggctccgggagcagacccccaacccccaaaagcagccctcagaagaccaggaagagccctcaggtgaccaggggtagccctcagaagaccagctgtagccctcagaagaccaggcagagccctcagacgctgaagcggagccgagtgaccacctcacttgaagctttgcccacagggacagtgctgacagacaagagtgggcgacagtggaagctgaagtccttccagaccagggacaaccagggcattctctatgaagctgcacccacctccaccctcacctgtgactcaggaccacagaagcaaaagttctcactcaaactggttcttggtgttacccagcctggggaggagccttcagtcggccctggatgtcagcccaaagcatgtgctgtcagagaggtctgtgctgcaggtggcctgccggctgctggatgccctggagttcctccatgagaatgagtatgttcatggaaatgtgacagctgaaaatatctttgtggatccagaggaccagagtcaggtgactttggcaggctatggcttcgccttccgctattgcccaagtggcaaacacgtggcctacgtggaaggcagcaggagccctcacgagggggaccttgagttcattagcatggacctgcacaagggatgcgggccctcccgccgcagcgacctccagagcctgggctactgcatgctgaagtggctctacgggtttctgccatggacaaattgccttcccaacactgaggacatcatgaagcaaaaacagaagtttgttgataagccggggcccttcgtgggaccctgcggtcactggatcaggccctcagagaccctgcagaagtacctgaaggtggtgatggccctcacgtatgaggagaagccgccctacgccatgctgaggaacaacctagaagctttgctgcaggatctgcgtgtgtctccatatgaccccattggcctcccgatggtgccctaggtggaatccaggtgggaagagcttgtgaggcttaagcctctcaccccttgccctcacccgagccctgccccaggctccaggagacacttcccagaggctgttccacgttcataccagggcccagcttcccagggagacactgggtttttccgcacggtccttgaacttcccagcctcaaggaatggcaagtagcagaaacccggctcaacttggctttaagaaaagtggggattgattggctgttgtagctagaaaattacaagggggagcttcaggcacaacgggattcagggcctcaaaaatagcatcaagacgttgtttgtctctcgccatcttctgtcccttcttgcatccatgcctccctctgtccttccacccggccacctgtagtctctactttcctttggcctggcccccttggcgcccccatacacaaaaggtagctgctccatgccttcgggtctcgttcatagtgcgcactaccccttcctgtggatgacggacactcctcacagccagcagct

SEQ ID NO: 198574 - DNA, 1831 bp, Homo sapiens
  Payload ID: 19188
  Gene Name: vaccinia related kinase 3
  Uniprot ID: Q8IV63
  ENST ID: ENST00000594092
  CDS Start-End: 126-1364
ggaggatccgagggtcaggctgcagaagcccagaatcccaccccagtccccaagtacagaggtcgctgtcaagatggagtttccaacccagtaaatccaagggccagaccgtgacctcataaagcatgatctccttctgtccagactgtggcaaaagtatccaagcggcattcaaattctgcccctactgtggaaattctttgcctgtagaggagcatgtagggtcccagacctttgtcaatccacatgtgtcatccttccaaggctcaaagagagggctgaactccagttttgaaacctctcctaagaaagtgaaatggtccagcaccgtcacctctccccgattatccctcttctcagatggtgacagttctgagtctgaagatactctgagttcctctgagagatccaaaggctccgggagcagacccccaacccccaaaagcagccctcagaagaccaggaagagccctcaggtgaccaggggtagccctcagaagaccagctgtagccctcagaagaccaggcagagccctcagacgctgaagcggagccgagtgaccacctcacttgaagctttgcccacagggacagtgctgacagacaagagtgggcgacagtggaagctgaagtccttccagaccagggacaaccagggcattctctatgaagctgcacccacctccaccctcacctgtgactcaggaccacagaagcaaaagttctcactcaaactggatgccaaggatgggcgcttgttcaatgagcagaacttcttccagcgggccgccaagcctctgcaagtcaacaagtggaagaagctgtactcgaccccactgctggccatccctacctgcatgggtttcggtgttcaccaggacaaatacaggttcttggtgttacccagcctggggaggagccttcagtcggccctggatgtcagcccaaagcatgtgctgtcagagaggtctgtgctgcaggtggcctgccggctgctggatgccctggagttcctccatgagaatgagtatgttcatggaaatgtgacagctgaaaatatctttgtggatccagaggaccagagtcaggtgactttggcaggctatggcttcgccttccgctattgcccaagtggcaaacacgtggcctacgtggaaggcagcaggagccctcacgagggggaccttgagttcattagcatggacctgcacaagggatgcgggccctcccgccgcagcgacctccagagcctgggctactgcatgctgaagtggctctacgggtttctgccatggacaaattgccttcccaacactgaggacatcatgaagcaaaaacagaagttgccttgggattcattttaatgtaagctggactttgtcatgccagaaacaaggctcggtcaccgtcagcagtttgcagttttccacctcctcccagttcctccgtgtggttgacccagatatctccgttatgcagccgcctccgggggaccacctccctccctttgagtcagccacagacagcctacttgacggccccgctggcccccacattccactgaactgtgcggatgccacagtgaccccctctcaggcacagcatgacctcctgaagtcgagcctgcttgctttgaacctaccagttaaaatctcctcaaaatgtttggataccgcccattggcccctcacagccacgagctccctgaccagtgtgcgtgtgtgtgtgtgtgtgtgtctgtgtgtgtgcttgggacgggtggggaggtcacctttgggtgtgcggtgtgcccccaggacctgtaagtaataaaatctttatttccatcttg

SEQ ID NO: 198575 - DNA, 1847 bp, Homo sapiens
  Payload ID: 19188
  Gene Name: vaccinia related kinase 3
  Uniprot ID: Q8IV63
  ENST ID: ENST00000594948
  CDS Start-End: 89-1513
agttttcgctgggcaactgagaaggtcgctgtcaagatggagtttccaacccagtaaatccaagggccagaccgtgacctcataaagcatgatctccttctgtccagactgtggcaaaagtatccaagcggcattcaaattctgcccctactgtggaaattctttgcctgtagaggagcatgtagggtcccagacctttgtcaatccacatgtgtcatccttccaaggctcaaagagagggctgaactccagttttgaaacctctcctaagaaagtgaaatggtccagcaccgtcacctctccccgattatccctcttctcagatggtgacagttctgagtctgaagatactctgagttcctctgagagatccaaaggctccgggagcagacccccaacccccaaaagcagccctcagaagaccaggaagagccctcaggtgaccaggggtagccctcagaagaccagctgtagccctcagaagaccaggcagagccctcagacgctgaagcggagccgagtgaccacctcacttgaagctttgcccacagggacagtgctgacagacaagagtgggcgacagtggaagctgaagtccttccagaccagggacaaccagggcattctctatgaagctgcacccacctccaccctcacctgtgactcaggaccacagaagcaaaagttctcactcaaactggatgccaaggatgggcgcttgttcaatgagcagaacttcttccagcgggccgccaagcctctgcaagtcaacaagtggaagaagctgtactcgaccccactgctggccatccctacctgcatgggtttcggtgttcaccaggacaaatacaggttcttggtgttacccagcctggggaggagccttcagtcggccctggatgtcagcccaaagcatgtgctgtcagagaggtctgtgctgcaggtggcctgccggctgctggatgccctggagttcctccatgagaatgagtatgttcatggaaatgtgacagctgaaaatatctttgtggatccagaggaccagagtcaggtgactttggcaggctatggcttcgccttccgctattgcccaagtggcaaacacgtggcctacgtggaaggcagcaggagccctcacgagggggaccttgagttcattagcatggacctgcacaagggatgcgggccctcccgccgcagcgacctccagagcctgggctactgcatgctgaagtggctctacgggtttctgccatggacaaattgccttcccaacactgaggacatcatgaagcaaaaacagaagtttgttgataagccggggcccttcgtgggaccctgcggtcactggatcaggccctcagagaccctgcagaagtacctgaaggtggtgatggccctcacgtatgaggagaagccgccctacgccatgctgaggaacaacctagaagctttgctgcaggatctgcgtgtgtctccatatgaccccattggcctcccgatggtgccctaggtggaatccaggtgggaagagcttgtgaggcttaagcctctcaccccttgccctcacccgagccctgccccaggctccaggagacacttcccagaggctgttccacgttcataccagggcccagcttcccagggagacactgggtttttccgcacggtccttgaacttcccagcctcaaggaatggcaagtagcagaaacccggctcaacttggctttaagaaaagtggggattgattggctgttgtagctagaaaattacaagggggagcttcaggcacaacgggattcagggcctcaaaaatagcatcaagacgttgtttgtctctcgccat

SEQ ID NO: 198576 - DNA, 551 bp, Homo sapiens
  Payload ID: 19188
  Gene Name: vaccinia related kinase 3
  ENST ID: ENST00000593912
  CDS Start-End: 1-354
ggaaatgtgacagctgaaaatatctttgtggatccagaggaccagagtcaggtgactttggcaggctatggcttcgccttccgctattgcccaagtggcaaacacgtggcctacgtggaaggcagcaggagccctcacgagggggaccttgagttcattagcatggacctgcacaagggatgcgggccctcccgccgcagcgacctccagagcctgggctactgcatgctgaagtggctctacgggtttctgccatggacaaattgccttcccaacactgaggacatcatgaagcaaaaacagaaatgtatttgtaccctcaaaatcgcatgctggccgtggtgctgtgtgtgatttgcgtaagtgatgttccactctgcgtctcatctgtctctggctctcttcagctttaaccctatccctacatgtggaccgagttcactgcttctgactccggcttctaaatcaattttctatagacatgtctgtgtccttaaactatatatggtggtactgtgtgttaatttgtataaatggcactatgctctaaa

SEQ ID NO: 198577 - DNA, 2739 bp, Homo sapiens
  Payload ID: 19189
  Gene Name: vacuolar protein sorting 11 homolog (S. cerevisiae)
  Uniprot ID: Q9H270
  ENST ID: ENST00000620429
  CDS Start-End: 1206-2660
tatcttgtttgactgtccatgaaaatctcaactttatggccattggtttcacagatggcagtgttacattgaacaaaggagacatcacccgggaccggcatagcaagacccagattttgcacaagggcaactatcctgtaactggattggcctttcgccaagcaggaaagaccactcacttgtttgttgtgacaacagagaacgtccagtcctatatagtttctggaaaagactaccctcgcgtggagttggacacccatggttgtggcctgcgctgctcagccctaagtgacccttctcaggacctgcagttcattgtggccggggatgagtgtgtctacttgtaccagcctgatgaacgtgggccctgcttcgcctttgagggccataagctcattgcccactggtttagaggctaccttatcattgtctcccgtgaccggaaggtttctcccaagtcagagtttaccagcagggattcacagagctccgacaagcagattctaaacatctatgacctgtgcaacaagttcatagcctatagcaccgtctttgaggatgtagtggatgtgcttgctgagtggggctccctgtacgtgctgacgcgggatgggcgggtccacgcactgcaggagaaggacacacagaccaaactggagatgctgtttaagaagaacctatttgagatggcgattaaccttgccaagagccagcatctggacagtgatgggctggcccagattttcatgcagtatggagaccatctctacagcaagggcaaccacgatggggctgtccagcaatatatccgaaccattggaaagttggagccatcctacgtgatccgcaagtttctggatgcccagcgcattcacaacctgactgcctacctgcagaccctgcaccgacaatccctggccaatgccgaccataccaccctgctcctcaactgctataccaagctcaaggacagctcgaagctggaggagttcatcaagaaaaagagtgagagtgaagtccactttgatgtggagacagccatcaaggtcctccggcaggctggctactactcccatgccctgtatctggcggagaaccatgcacatcatgagtggtacctgaagatccagctagaagacattaagaattatcaggaagcccttcgatacatcggcaagctgccttttgagcaggcagagagcaacatgaagcgctacggcaagatcctcatgcaccacataccagagcagacaactcagttgctgaagggactttgtactgattatcggcccagcctcgaaggccgcagcgatagggaggccccaggctgcagggccaactctgaggagttcatccccatctttgccaataacccgcgagagctgaaagccttcctagagcacatgagtgaagtgcagccagactcaccccaggggatctacgacacactccttgagctgcgactgcagaactgggcccacgagaaggatccacaggtcaaagagaagcttcacgcagaggccatttccctgctgaagagtggtcgcttctgcgacgtctttgacaaggccctggtcctgtgccagatgcacgacttccaggatggtgtcctttacctttatgagcaggggaagctgttccagcagatcatgcactaccacatgcagcacgagcagtaccggcaggtcatcagcgtgtgtgagcgccatggggagcaggacccctccttgtgggagcaggccctcagctacttcgctcgcaaggaggaggactgcaaggagtatgtggcagctgtcctcaagcatatcgagaacaagaacctcatgccacctcttctagtggtgcagaccctggcccacaactccacagccacactctccgtcatcagggactacctggtccaaaaactacagaaacagagccagcagattgcacaggatgagctgcgggtgcggcggtaccgagaggagaccacccgtatccgccaggagatccaagagctcaaggccagtcctaagattttccaaaagaccaagtgcagcatctgtaacagtgccttggagttgccctcagtccacttcctgtgtggccactccttccaccaacactgctttgagagttactcggaaagtgatgctgactgccccacctgcctccctgaaaaccggaaggtcatggatatgatccgggcccaggaacagaaacgagatctccatgatcaattccagcatcagctcaagtgctccaatgacagcttttctgtgattgctgactactttggcagaggtgttttcaacaaattgactctgctgaccgaccctcccacagccagactgacctccgcctggaggctgggctgcaacgcgacctactcatgcactccaggaggggcacttaagcagcctggaggaagatgtgggcaacagtggaggaccaagagaacagacacaatgggacctgggcgggcgttacacagaaggctggctgacatgcccagggctccactctcatctaatgtcacagccctcagaactaaagcggactttctttccctgccttcttatttagtcagcttgccatccctcctcttcactagcagtgtagatcattccagatcagtgggggagggcacctcagcaacctctgagtgtggacaatagctgctttcttctctatccaagagcaccaggctgtgcttgggtccttgctctcagagtctataaataaaagaatataatg

SEQ ID NO: 198578 - DNA, 3313 bp, Homo sapiens
  Payload ID: 19189
  Gene Name: vacuolar protein sorting 11 homolog (S. cerevisiae)
  ENST ID: ENST00000621676
  CDS Start-End: 133-2958
tcccagcagcgggacgctgtcaccccgactcaggagctcctgggcccgcgggctcccggaagctgccgaccacgtgattcgctggctcagctcacgtgacaaagctcccggaggtgggagccctgggccaaaatggcggcctacctgcagtggcggcgcttcgttttcttcgacaaggagctggtgaaggagccgctgagcaatgatggggccgctcccggggccacacctgcttctggatccgctgcttccaagttcctttgcctccctcctggcatcactgtctgcgactcaggccgagggagcctggtctttggagatatggaaggccagatctggttcttgccacgttccctacagcttacaggcttccaagcctacaaactacgggtgacacacctgtaccaactgaagcagcacaatattctggcatctgttggagaagatgaagagggcatcaaccccttggttaagatctggaacctggagaagagagatggtggcaatccactctgcactcgaatcttccctgctattccaggaacagagccaactgttgtatcttgtttgactgtccatgaaaatctcaactttatggccattggtttcacagatggcagtgttacattgaacaaaggagacatcacccgggaccggcatagcaagacccagattttgcacaagggcaactatcctgtaactggattggcctttcgccaagcaggaaagaccactcacttgtttgttgtgacaacagagaacgtccagtcctatatagtttctggaaaagactaccctcgcgtggagttggacacccatggttgtggcctgcgctgctcagccctaagtgacccttctcaggacctgcagttcattgtggccggggatgagtgtgtctacttgtaccagcctgatgaacgtgggccctgcttcgcctttgagggccataagctcattgcccactggtttagaggctaccttatcattgtctcccgtgaccggaaggtttctcccaagtcagagtttaccagcagggattcacagagctccgacaagcagattctaaacatctatgacctgtgcaacaagttcatagcctatagcaccgtctttgaggatgtagtggatgtgcttgctgagtggggctccctgtacgtgctgacgcgggatgggcgggtccacgcactgcaggagaaggacacacagaccaaactggagatgctgtttaagaagaacctatttgagatggcgattaaccttgccaagagccagcatctggacagtgatgggctggcccagattttcatgcagtatggagaccatctctacagcaagggcaaccacgatggggctgtccagcaatatatccgaaccattggaaagttggagccatcctacgtgatccgcaagtttctggatgcccagcgcattcacaacctgactgcctacctgcagaccctgcaccgacaatccctggccaatgccgaccataccaccctgctcctcaactgctataccaagctcaaggacagctcgaagctggaggagttcatcaagaaaaagagtgagagtgaagtccactttgatgtggagacagccatcaaggtcctccggcaggctggctactactcccatgccctgtatctggcggagaaccatgcacatcatgagtggtacctgaagatccagctagaagacattaagaattatcaggaagcccttcgatacatcggcaagctgccttttgagcaggcagagagcaacatgaagcgctacggcaagatcctcatgcaccacataccagagcagacaactcagttgctgaagggactttgtactgattatcggcccagcctcgaaggccgcagcgatagggaggccccaggctgcagggccaactctgaggagttcatccccatctttgccaataacccgcgagagctgaaagccttcctagagcacatgagtgaagtgcagccagactcaccccaggggatctacgacacactccttgagctgcgactgcagaactgggcccacgagaaggatccacaggtcaaagagaagcttcacgcagaggccatttccctgctgaagagtggtcgcttctgcgacgtctttgacaaggccctggtcctgtgccagatgcacgacttccaggatggtgtcctttacctttatgagcaggggaagctgttccagcagatcatgcactaccacatgcagcacgagcagtaccggcaggtcatcagcgtgtgtgagcgccatggggagcaggacccctccttgtgggagcaggccctcagctacttcgctcgcaaggaggaggactgcaaggagtatgtggcagctgtcctcaagcatatcgagaacaagaacctcatgccacctcttctagtggtgcagaccctggcccacaactccacagccacactctccgtcatcagggactacctggtccaaaaactacagaaacagagccagcagattgcacaggatgagctgcgggtgcggcggtaccgagaggagaccacccgtatccgccaggagatccaagagctcaaggccagtcctaagattttccaaaagaccaagtgcagcatctgtaacagtgccttggagttgccctcagtccacttcctgtgtggccactccttccaccaacactgctttgagagttactcggaaagtgatgctgactgccccacctgcctccctgaaaaccggaaggtcatggatatgatccgggcccaggaacagaaacgagatctccatgatcaattccagcatcagctcaagtgctccaatgacagcttttctgtgattgctgactactttggcagaggtgttttcaacaaattgactctgctgaccgaccctcccacagccagactgacctccagcctggaggctgggctgcaacgcgacctactcatgcactccaggaggggcacttaagcagcctggaggaagatgtgggcaacagtggaggaccaagagaacagacacaatgggacctgggcgggcgttacacagaaggctggctgacatgcccagggctccactctcatctaatgtcacagccctcagaactaaagcggactttctttccctgccttcttatttagtcagcttgccatccctcctcttcactagcagtgtagatcattccagatcagtgggggagggcacctcagcaacctctgagtgtggacaatagctgctttcttctctatccaagagcaccaggctgtgcttgggtccttgctctcagagtctataaataaaagaatataatgatttgggagcttaa

SEQ ID NO: 198579 - DNA, 3388 bp, Homo sapiens
  Payload ID: 19189
  Gene Name: vacuolar protein sorting 11 homolog (S. cerevisiae)
  ENST ID: ENST00000614944
  CDS Start-End: 249-3044
aaaatggcggcctacctgcagtggcggcgcttcgttttcttcgacaaggagctggtgaaggagccgctgagcaatgatggggccgctcccggggccacacctgcttctggatccgctgcttccaagttcctttgcctccctcctggcatcactgtctgcgactcaggccgagggagcctggtctttggagatatccttcgtttggagctgtcttttccctcccgggatcccgaagagatcgagttaggatgaaatctgtttgtcggaggggtccgtgccgcgcgcctctttggtttagctggtcatccagagttgttctgtggtctacgggaagaaagaaggaagtccatctcctaacttgttatcaactgagcaatcctgggaggctccttgactaccctgcacatatggaaggccagatctggttcttgccacgttccctacagcttacaggcttccaagcctacaaactacgggtgacacacctgtaccaactgaagcagcacaatattctggcatctgttggagaagatgaagagggcatcaaccccttggttaagatctggaacctggagaagagagatggtggcaatccactctgcactcgaatcttccctgctattccaggaacagagccaactgttgtatcttgtttgactgtccatgaaaatctcaactttatggccattggtttcacagatggcagtgttacattgaacaaaggagacatcacccgggaccggcatagcaagacccagattttgcacaagggcaactatcctgtaactggattggcctttcgccaagcaggaaagaccactcacttgtttgttgtgacaacagagaacgtccagtcctatatagtttctggaaaagactaccctcgcgtggagttggacacccatggttgtggcctgcgctgctcagccctaagtgacccttctcaggacctgcagttcattgtggccggggatgagtgtgtctacttgtaccagcctgatgaacgtgggccctgcttcgcctttgagggccataagctcattgcccactggtttagaggctaccttatcattgtctcccgtgaccggaaggtttctcccaagtcagagtttaccagcagggattcacagagctccgacaagcagattctaaacatctatgacctgtgcaacaagttcatagcctatagcaccgtctttgaggatgtagtggatgtgcttgctgagtggggctccctgtacgtgctgacgcgggatgggcgggtccacgcactgcaggagaaggacacacagaccaaactggagatgctgtttaagaagaacctatttgagatggcgattaaccttgccaagagccagcatctggacagtgatgggctggcccagattttcatgcagtatggagaccatctctacagcaagggcaaccacgatggggctgtccagcaatatatccgaaccattggaaagttggagccatcctacgtgatccgcaagtttctggatgcccagcgcattcacaacctgactgcctacctgcagaccctgcaccgacaatccctggccaatgccgaccataccaccctgctcctcaactgctataccaagctcaaggacagctcgaagctggaggagttcatcaagaaaaagagtgagagtgaagtccactttgatgtggagacagccatcaaggtcctccggcaggctggctactactcccatgccctgtatctggcggagaaccatgcacatcatgagtggtacctgaagatccagctagaagacattaagaattatcaggaagcccttcgatacatcggcaagctgccttttgagcaggcagagagcaacatgaagcgctacggcaagatcctcatgcaccacataccagagcagacaactcagttgctgaagggactttgtactgattatcggcccagcctcgaaggccgcagcgatagggaggccccaggctgcagggccaactctgaggagttcatccccatctttgccaataacccgcgagagctgaaagccttcctagagcacatgagtgaagtgcagccagactcaccccaggggatctacgacacactccttgagctgcgactgcagaactgggcccacgagaaggatccacaggtcaaagagaagcttcacgcagaggccatttccctgctgaagagtggtcgcttctgcgacgtctttgacaaggccctggtcctgtgccagatgcacgacttccaggatggtgtcctttacctttatgagcaggggaagctgttccagcagatcatgcactaccacatgcagcacgagcagtaccggcaggtcatcagcgtgtgtgagcgccatggggagcaggacccctccttgtgggagcaggccctcagctacttcgctcgcaaggaggaggactgcaaggagtatgtggcagctgtcctcaagcatatcgagaacaagaacctcatgccacctcttctagtggtgcagaccctggcccacaactccacagccacactctccgtcatcagggactacctggtccaaaaactacagaaacagagccagcagattgcacaggatgagctgcgggtgcggcggtaccgagaggagaccacccgtatccgccaggagatccaagagctcaaggccagtcctaagattttccaaaagaccaagtgcagcatctgtaacagtgccttggagttgccctcagtccacttcctgtgtggccactccttccaccaacactgctttgagagttactcggaaagtgatgctgactgccccacctgcctccctgaaaaccggaaggtcatggatatgatccgggcccaggaacagaaacgagatctccatgatcaattccagcatcagctcaagtgctccaatgacagcttttctgtgattgctgactactttggcagaggtgttttcaacaaattgactctgctgaccgaccctcccacagccagactgacctccagcctggaggctgggctgcaacgcgacctactcatgcactccaggaggggcacttaagcagcctggaggaagatgtgggcaacagtggaggaccaagagaacagacacaatgggacctgggcgggcgttacacagaaggctggctgacatgcccagggctccactctcatctaatgtcacagccctcagaactaaagcggactttctttccctgccttcttatttagtcagcttgccatccctcctcttcactagcagtgtagatcattccagatcagtgggggagggcacctcagcaacctctgagtgtggacaatagctgctttcttctctatccaagagcaccaggctgtgcttgggtccttgctctcagagtctataaataaaagaatataatgatt

SEQ ID NO: 198580 - DNA, 542 bp, Homo sapiens
  Payload ID: 19189
  Gene Name: vacuolar protein sorting 11 homolog (S. cerevisiae)
  ENST ID: ENST00000530809
  CDS Start-End: 1-542
ttgagatggcgattaaccttgccaagagccagcatctggacagtgatgggctggcccagattttcatgcagtatggagaccatctctacagcaagggcaaccacgatggggctgtccagcaatatatccgatctgcaagtgattcctgtgtacatgagctggagaagtacactgattcagatgctatcgggtgcacatgtctccctagaaccattggaaagttggagccatcctacgtgatccgcaagtttctggatgcccagcgcattcacaacctgactgcctacctgcagaccctgcaccgacaatccctggccaatgccgaccataccaccctgctcctcaactgctataccaagctcaaggacagctcgaagctggaggagttcatcaagaaaaagagtgagagtgaagtccactttgatgtggagacagccatcaaggtcctccggcaggctggctactactcccatgccctgtatctggcggagaaccatgcacatcatgagtggtacctgaagatccagctagaagacattaag

SEQ ID NO: 198581 - DNA, 9967 bp, Homo sapiens
  Payload ID: 19190
  Gene Name: vacuolar protein sorting 13 homolog A (S. cerevisiae)
  Uniprot ID: Q96RL7
  ENST ID: ENST00000357409
  CDS Start-End: 172-9459
gcctccgtctctcgctgggctcgctagggctgcgcgttgggccagcgggggcgccgcagctgaagccgccccggagccggtgaaccgaattacctcgagggaggggcgtggggaaggcggcgggaggaggagcgcacgggccggctgccgtgcccaccacggctgaggaacatggttttcgagtcggtggtcgtggacgtgttgaaccggttcttgggggactatgtggtggacttggacacgtcccagctctctctgggcatctggaaaggagctgtggccctcaagaatcttcaaattaaagaaaatgccctgagtcaactggatgtaccatttaaagttaaagttggtcacataggtaatcttaaacttataattccatggaaaaacctttatactcaacctgttgaagccgtattggaagaaatttatttacttatagtgccttcttctagaataaaatatgatcctttaaaagaagagaaacaactcatggaagcaaagcaacaggaactgaaaagaatagaagaagcaaaacaaaaagtagttgatcaagaacaacatctgccggaaaaacaggacacttttgcagaaaaattagttacacagatcataaaaaatcttcaggtgaaaatttccagtatccatattcgttatgaagatgatatcacaaatcgggacaaaccgctgtcatttggtatttcccttcaaaatctgagcatgcagacaactgatcaatactgggttccatgtttacatgatgaaactgagaaactggttcgtaagttaatccgattggataacctgtttgcctattggaatgtgaagtctcagatgttttatcttagtgattatgataactccttggacgacttgaagaatggcattgtcaatgaaaatattgttccagaaggttatgattttgtatttcgtcccatatctgctaatgccaaacttgtgatgaatcgccgatctgattttgacttttctgcccccaaaataaacttggaaattgagttacataacatagcaattgaatttaataaaccacagtatttcagtattatggagcttcttgaatcagttgatatgatggcacaaaatctgccatataggaagttcaaacctgatgtgcctcttcaccaccatgccagagaatggtgggcttatgctatacatggcgttcttgaagtaaatgtttgccccaggttatggatgtggtcatggaagcatattagaaaacataggcaaaaagtgaagcaatataaagaactgtataaaaaaaagttaacaagtaagaagccacctggtgaacttctcgtgtctttggaggagttggaaaaaaccttggatgtctttaatataactatagctagacagacggcagaagttgaggtaaagaaagctggatacaaaatttacaaagaaggagtaaaagatccagaggataataaagggtggtttagctggctatggtcttggtcagaacaaaatactaatgaacagcaaccagatgttcaacctgaaactcttgaagaaatgttgacacctgaagaaaaagctttactctatgaagcaattggctatagtgaaacagcagttgatccaactttactaaaaacatttgaagccttgaagttttttgtccacttgaaaagtatgtctattgttctaagagaaaatcatcaaaaacctgagctggtagatattgtaatagaagaatttagcaccttaattgtgcaaagaccaggagcacaagcaataaaatttgaaactaaaatagattcatttcatattactggcttaccagataattcagaaaaaccccgcctcctgtcttcattggatgatgcaatgtcacttttccaaattacatttgagataaatccattagatgaaactgtttctcagaggtgtatcatagaagctgaacctttagaaatcatatatgatgcaaggacagtgaatagtatagtggaattcttcagacctccaaaagaggtacatctagcacagctcactgcagcaactttgacaaaactggaagaatttcgcagtaagacagcaacaggtctactgtatattattgaaacacagaaagttcttgatctcaaaattaatttgaaggcttcatatattattgtcccacaagatggaatttttagtcctacatcaaatctgcttcttttggaccttggtcatctaaaggtgacgagtaaaagtcgttctgaattaccagatgtgaaacaaggtgaggccaatcttaaagagataatggatagagcttatgattcatttgatattcaacttacaagtgtacagctgctttacagtagagttggtgataattggagagaagcacgaaaactcagtgtatctacccagcatattttggtacccatgcacttcaatttggaactgtctaaggccatggttttcatggatgtaaggatgcccaaattcaagatttatggaaagttacctcttatttctttacgaatctcagataaaaaactacaagggattatggaattgattgaaagcattccaaaacctgaaccagtaactgaagtatctgcccctgtcaaatcattccagattcaaacatctacttctttgggaacatcacagatttcacagaaaataattcctctcttggaacttccatctgtttctgaagatgattcagaggaggaattttttgatgcaccatgtagtcccttggaagaacctcttcagtttccaactggagttaaaagtattcgaaccagaaagttacaaaagcaggattgttcagtaaatatgactacatttaaaataagatttgaagtaccaaaggttttgatcgagttttatcaccttgttggagattgtgaactatctgtggtagaaattcttgttttaggattgggtgcagaaattgagattagaacatacgatttgaaagcaaatgcctttttgaaagagttctgcttaaaatgcccagaatacttggatgaaaacaagaaaccagtttatttggttacaaccctggataacacaatggaagacctgttaacgctggaatatgtaaaggctgaaaagaatgtacccgacttgaaaagtacctataacaatgttttacaattgattaaggtaaatttttcctctttggatattcatttacacactgaagcacttctgaatacaataaattatcttcataatatccttccgcaatcagaggaaaaatcagccccagtgtccactacagagactgaagacaaaggagatgtcattaaaaaattagctttaaaactatccacaaatgaagatatcattactttgcagattttagcagaattatcgtgtttacagatctttattcaagatcagaaatgtaacatttctgaaattaagattgaagggcttgattctgagatgattatgaggccttcagaaactgaaataaacgcaaagctaaggaatataattgttttagattctgatataacagctatatacaaaaaggctgtttatatcactggaaaagaagttttcagcttcaaaatggtttcttacatggatgcaactgctggttctgcatacacagatatgaatgtggttgacattcaggttaatttaatagttggttgcattgaagtagtttttgtcacgaaatttctatattctatattggcttttatagataattttcaggcagctaaacaagccttggctgaggcaactgttcaggcagctggaatggctgctactggtgtaaaagaactcgcacaaaggagttccagaatggcactggatattaacatcaaagccccagttgtggtcatcccgcagtctccagtttctgaaaatgtttttgttgctgattttggactaattacaatgacaaatacctttcatatgataacagagagccagagctctcccccacctgttattgatttgataacaataaagctgagtgaaatgcgactatacagatctcgatttattaatgatgcataccaggaagtactggatctactcctgccattaaatcttgaggttgtggttgaacgaaatttatgctgggagtggtaccaggaagttccttgttttaatgtaaatgctcagctgaaaccaatggagttcattcttagtcaagaagatataacaactatttttaaaacattgcatggcaatatatggtatgaaaaagatggtagtgcctcacctgctgtaacaaaagaccaatacagtgccactagtggagttactactaatgcttcacaccattcaggaggagcaactgtggtgacagctgctgtggtagaagtacattcacgtgccttactagttaagacaacactaaacataagcttcaaaactgatgatctcaccatggtgctgtatagtccaggtcctaaacaggcttcctttacagatgttcgtgatccttctctgaaacttgctgaatttaaattggagaatattataagtactttaaaaatgtatacagatggctcaacattttcttccttctcattaaaaaactgtattttagatgataaaagacctcatgtcaagaaagcaactcctcgaatgataggactgacagttggttttgacaaaaaagacatgatggatataaagtacaggaaagtcagagatggttgtgtgactgatgcggtctttcaagaaatgtatatttgtgcaagcgtagaatttctgcagactgttgcaaatgtctttcttgaggcctacaccacaggcactgctgtagaaaccagtgtgcaaacatggactgctaaggaagaagtacctacacaggaatcagtgaagtgggaaattaatgttattattaaaaatcctgaaattgtgtttgtagctgacatgacaaaaaatgatgctcctgctttagtcattacaacacaatgtgaaatttgctataaaggtaaccttgaaaatagtacaatgactgctgccattaaagatctccaagtgagagcctgcccgtttcttccagtcaagagaaaaggcaaaatcactactgttttgcagccctgtgacttgttttatcaaactactcagaaaggtacagatccacaagtgatcgatatgtcagtaaaatccctgacactaaaggtttcaccagttattataaatactatgattaccataacttcagcactgtatacaactaaggaaaccatcccagaagaaacggcttcttctactgcacatttatgggaaaagaaggatacaaagactttaaaaatgtggtttcttgaagaatcaaatgaaactgaaaaaatagctcccacaactgaattggtacccaaaggcgagatgataaaaatgaacattgattctatttttatagttcttgaggctggaattggtcatagaacagtacctatgcttctggcaaagtcacgtttttcaggggaaggcaaaaactggagttccctaataaatctgcactgtcagcttgagctagaagtgcattattataatgaaatgtttggtgtatgggagcctttgcttgaacccttagaaattgatcagactgaggattttagaccatggaatcttggtatcaagatgaaaaagaaagcaaaaatggccattgttgagtcagatcctgaagaagaaaactacaaagtgccagaatataaaactgtcatcagtttccattcaaaagaccaattaaacattacattatccaaatgtggtcttgtaatgttaaacaatttagtcaaggcatttacagaagctgccactggatcttcagctgacttcgtaaaggatctagcaccatttatgattttaaattcccttggacttactatttctgtttcgccaagtgattcttttagtgtactcaacattcctatggcaaaatcatatgtattgaaaaatggagaaagtttaagtatggattatatccgaaccaaggacaatgatcatttcaatgcaatgaccagcctaagcagcaaactcttcttcattcttcttacacctgttaaccattctactgctgataagattcctttaacaaaagtgggacgacgtctgtacactgtaagacacagagagtctggcgttgaaagatctattgtttgtcaaattgatacagtagaaggaagtaagaaggtcacaattcgctccccagtgcagataagaaatcatttttcagtcccactgtctgtttacgaaggggataccttattgggaactgcctcacctgaaaatgaattcaacataccattaggatcttaccgatcattcatttttctgaagccagaagatgagaactatcaaatgtgtgaaggaattgactttgaagagattataaaaaatgatggtgctcttctaaagaagaaatgtagatctaaaaacccttctaaggaatcatttctcattaatattgttccagaaaaagataatttaacatctctatcagtgtattcagaagatggttgggatttaccatacataatgcatttgtggccacctatcctgctccgaaatcttcttccttacaaaattgcttattatatagagggaattgaaaattcggtttttactctaagtgaaggacattcagcccagatttgtactgcacagttgggtaaagccaggctacatttaaaattacttgactatctcaatcacgattggaaaagtgaatatcacataaagcctaatcagcaagacattagttttgtcagttttacttgtgttacagaaatggaaaagactgatttagatattgctgtccatatgacttacaatactggtcagacagttgtggcatttcatagtccttattggatggtcaataaaactggccgcatgttacagtacaaagcagacggaattcatcgaaagcatccacctaattataaaaagccagttctcttttcttttcagccaaatcacttttttaataacaataaggttcaacttatggtaactgatagtgagttgtccaatcagttttcaattgatactgttggtagtcatggagctgttaaatgtaaaggcctgaaaatggactatcaagttggtgtcactatagacctgagcagttttaacattactagaattgtgacatttacccctttttatatgattaaaaacaaaagcaaataccatatatcagtggctgaagaaggaaatgataaatggctctctcttgatttggagcagtgtatccccttttggcctgagtatgcttctagtaaacttcttattcaagtcgaaaggagtgaagatcctcccaaaaggatatattttaacaagcaggaaaattgtattctattgcgtctagataacgagcttggaggtattatagcagaagtgaatttggccgagcattctacagttattacatttttagattatcatgatggagcagctacattcctcttaataaatcacacaaagaatgaacttgttcaatacaatcaaagttctctcagtgaaatagaagattccctccctcctggtaaagccgtgttttatacatgggctgatccggtgggctctagaaggctgaagtggagatgtagaaaaagccatggtgaagtaacacagaaggatgatatgatgatgcctatagatttgggggaaaagacaatatatttagtttcattctttgaaggtttacaacgcattattttattcactgaagatccaagggtatttaaagtaacatatgaaagtgagaaagcagagttagcagagcaagaaattgcagtggcattacaagatgttggaatttctcttgtcaacaattacacgaagcaagaagtagcctatataggcattacaagttctgatgtggtttgggaaacaaagcccaagaagaaggcaagatggaagccaatgagtgtaaagcacactgagaagttagagagagaatttaaggaatatactgaatcttctccttcagaagataaggttattcagttggacactaatgttccggttcgcctaacccctactggtcataacatgaaaattctgcagccgcatgtaatagctctacgaagaaattatcttccagcattaaaagtggaatataacacatctgcacatcaatcatcatttagaattcagatttacagaatacagatccaaaatcagatacatggtgctgtatttccctttgtgttttatcctgttaaacctccaaagtcggtcaccatggattcagcaccaaagccctttacagatgtcagtattgtcatgagatctgcaggacattcccagatatcacgtattaagtatttcaaagtattgattcaagaaatggatctcaggttagatcttgggtttatctatgctttaacagaccttatgacagaagctgaggtgactgaaaatacagaggttgagctttttcataaagatatagaagctttcaaagaagaatataaaacagcctcattagtagatcaatcacaagtcagcctctatgaatattttcatatatctcctatcaagttacatttaagtgtttcactgagttccggcagagaagaagctaaagattcaaaacaaaatggaggactgattccagttcattctttaaatcttttgctgaagagtattggtgccacactgacagatgtacaagatgtagtttttaagcttgcattttttgaactcaactatcagttccatacaacatccgatctacagtctgaagtcataagacactattcaaaacaggccattaagcagatgtatgtactcattcttggacttgatgttttgggaaatccatttggcttaattagagaattttctgaaggtgtagaagcatttttttatgaaccttaccagggagccatccagggtcctgaagagtttgtggaaggaatggcactaggacttaaggcactagttggtggagctgttggtggattggctggtgctgcctccaaaatcaccggtgctatggctaagggggtagcagctatgaccatggatgaagactaccaacagaagagaagagaagccatgaataagcaaccagctggttttagagaaggcatcactcgtggaggaaaaggcttagtttctggatttgttagtggcataacaggaattgttacaaaaccaatcaaaggagctcaaaaaggaggagcagctggtttctttaaaggtgttgggaaaggtttagtaggagcggtagcaaggccaactggaggcatcatagacatggctagcagtacatttcagggaataaaaagagctacagagacttctgaagtggagagtctgcgacctcctcggttcttcaatgaagatggagttatcagaccgtacaggttgagggatgggactggaaatcaaatgttacagaaaattcaattctacagggagtggattatgactcacagtagcagtagtgatgatgatgatgatgatgatgatgatgatgagtcagatctaaaccattaaaattcatatgttctttattttacttggaatgtttcattaacatgttttgtatgacttataccataatgcccatatgtccatttatagggaggtaaaacacattttcttttaaaatgttttcctacacattttcataaagcaaaataattgtattatttaagcacagaaaaaaatgtatcttacatccaaagtagggagggcatccaacatattatagatttgcttttatatattttatagctttgtattgcatagtttgtctttaagagttcaagttagacttaaatataattttgatgttcactggttttattttaaattgccttcttatttgttagcaaaatgcctttttttaatggtctctgtaaattttctgggctttaatgtaatgccactgtgtaaaaaaaaaggaagaaaatagtaatagccatttaatgttttatatttatcattttaaagatatttttgtcaaatttcttttaataataataaacatatgtaatctaaa

SEQ ID NO: 198582 - DNA, 15320 bp, Homo sapiens
  Payload ID: 19190
  Gene Name: vacuolar protein sorting 13 homolog A (S. cerevisiae)
  Uniprot ID: Q96RL7
  ENST ID: ENST00000360280
  CDS Start-End: 261-9785
ttcctccctctcagggctgcgcgcccaggtctgcgccgcgctccgcctccagccgcgcgcagacttgcgcacgcgtcgtgagagcgaccgcctccgtctctcgctgggctcgctagggctgcgcgttgggccagcgggggcgccgcagctgaagccgccccggagccggtgaaccgaattacctcgagggaggggcgtggggaaggcggcgggaggaggagcgcacgggccggctgccgtgcccaccacggctgaggaacatggttttcgagtcggtggtcgtggacgtgttgaaccggttcttgggggactatgtggtggacttggacacgtcccagctctctctgggcatctggaaaggagctgtggccctcaagaatcttcaaattaaagaaaatgccctgagtcaactggatgtaccatttaaagttaaagttggtcacataggtaatcttaaacttataattccatggaaaaacctttatactcaacctgttgaagccgtattggaagaaatttatttacttatagtgccttcttctagaataaaatatgatcctttaaaagaagagaaacaactcatggaagcaaagcaacaggaactgaaaagaatagaagaagcaaaacaaaaagtagttgatcaagaacaacatctgccggaaaaacaggacacttttgcagaaaaattagttacacagatcataaaaaatcttcaggtgaaaatttccagtatccatattcgttatgaagatgatatcacaaatcgggacaaaccgctgtcatttggtatttcccttcaaaatctgagcatgcagacaactgatcaatactgggttccatgtttacatgatgaaactgagaaactggttcgtaagttaatccgattggataacctgtttgcctattggaatgtgaagtctcagatgttttatcttagtgattatgataactccttggacgacttgaagaatggcattgtcaatgaaaatattgttccagaaggttatgattttgtatttcgtcccatatctgctaatgccaaacttgtgatgaatcgccgatctgattttgacttttctgcccccaaaataaacttggaaattgagttacataacatagcaattgaatttaataaaccacagtatttcagtattatggagcttcttgaatcagttgatatgatggcacaaaatctgccatataggaagttcaaacctgatgtgcctcttcaccaccatgccagagaatggtgggcttatgctatacatggcgttcttgaagtaaatgtttgccccaggttatggatgtggtcatggaagcatattagaaaacataggcaaaaagtgaagcaatataaagaactgtataaaaaaaagttaacaagtaagaagccacctggtgaacttctcgtgtctttggaggagttggaaaaaaccttggatgtctttaatataactatagctagacagacggcagaagttgaggtaaagaaagctggatacaaaatttacaaagaaggagtaaaagatccagaggataataaagggtggtttagctggctatggtcttggtcagaacaaaatactaatgaacagcaaccagatgttcaacctgaaactcttgaagaaatgttgacacctgaagaaaaagctttactctatgaagcaattggctatagtgaaacagcagttgatccaactttactaaaaacatttgaagccttgaagttttttgtccacttgaaaagtatgtctattgttctaagagaaaatcatcaaaaacctgagctggtagatattgtaatagaagaatttagcaccttaattgtgcaaagaccaggagcacaagcaataaaatttgaaactaaaatagattcatttcatattactggcttaccagataattcagaaaaaccccgcctcctgtcttcattggatgatgcaatgtcacttttccaaattacatttgagataaatccattagatgaaactgtttctcagaggtgtatcatagaagctgaacctttagaaatcatatatgatgcaaggacagtgaatagtatagtggaattcttcagacctccaaaagaggtacatctagcacagctcactgcagcaactttgacaaaactggaagaatttcgcagtaagacagcaacaggtctactgtatattattgaaacacagaaagttcttgatctcaaaattaatttgaaggcttcatatattattgtcccacaagatggaatttttagtcctacatcaaatctgcttcttttggaccttggtcatctaaaggtgacgagtaaaagtcgttctgaattaccagatgtgaaacaaggtgaggccaatcttaaagagataatggatagagcttatgattcatttgatattcaacttacaagtgtacagctgctttacagtagagttggtgataattggagagaagcacgaaaactcagtgtatctacccagcatattttggtacccatgcacttcaatttggaactgtctaaggccatggttttcatggatgtaaggatgcccaaattcaagatttatggaaagttacctcttatttctttacgaatctcagataaaaaactacaagggattatggaattgattgaaagcattccaaaacctgaaccagtaactgaagtatctgcccctgtcaaatcattccagattcaaacatctacttctttgggaacatcacagatttcacagaaaataattcctctcttggaacttccatctgtttctgaagatgattcagaggaggaattttttgatgcaccatgtagtcccttggaagaacctcttcagtttccaactggagttaaaagtattcgaaccagaaagttacaaaagcaggattgttcagtaaatatgactacatttaaaataagatttgaagtaccaaaggttttgatcgagttttatcaccttgttggagattgtgaactatctgtggtagaaattcttgttttaggattgggtgcagaaattgagattagaacatacgatttgaaagcaaatgcctttttgaaagagttctgcttaaaatgcccagaatacttggatgaaaacaagaaaccagtttatttggttacaaccctggataacacaatggaagacctgttaacgctggaatatgtaaaggctgaaaagaatgtacccgacttgaaaagtacctataacaatgttttacaattgattaaggtaaatttttcctctttggatattcatttacacactgaagcacttctgaatacaataaattatcttcataatatccttccgcaatcagaggaaaaatcagccccagtgtccactacagagactgaagacaaaggagatgtcattaaaaaattagctttaaaactatccacaaatgaagatatcattactttgcagattttagcagaattatcgtgtttacagatctttattcaagatcagaaatgtaacatttctgaaattaagattgaagggcttgattctgagatgattatgaggccttcagaaactgaaataaacgcaaagctaaggaatataattgttttagattctgatataacagctatatacaaaaaggctgtttatatcactggaaaagaagttttcagcttcaaaatggtttcttacatggatgcaactgctggttctgcatacacagatatgaatgtggttgacattcaggttaatttaatagttggttgcattgaagtagtttttgtcacgaaatttctatattctatattggcttttatagataattttcaggcagctaaacaagccttggctgaggcaactgttcaggcagctggaatggctgctactggtgtaaaagaactcgcacaaaggagttccagaatggcactggatattaacatcaaagccccagttgtggtcatcccgcagtctccagtttctgaaaatgtttttgttgctgattttggactaattacaatgacaaatacctttcatatgataacagagagccagagctctcccccacctgttattgatttgataacaataaagctgagtgaaatgcgactatacagatctcgatttattaatgatgcataccaggaagtactggatctactcctgccattaaatcttgaggttgtggttgaacgaaatttatgctgggagtggtaccaggaagttccttgttttaatgtaaatgctcagctgaaaccaatggagttcattcttagtcaagaagatataacaactatttttaaaacattgcatggcaatatatggtatgaaaaagatggtagtgcctcacctgctgtaacaaaagaccaatacagtgccactagtggagttactactaatgcttcacaccattcaggaggagcaactgtggtgacagctgctgtggtagaagtacattcacgtgccttactagttaagacaacactaaacataagcttcaaaactgatgatctcaccatggtgctgtatagtccaggtcctaaacaggcttcctttacagatgttcgtgatccttctctgaaacttgctgaatttaaattggagaatattataagtactttaaaaatgtatacagatggctcaacattttcttccttctcattaaaaaactgtattttagatgataaaagacctcatgtcaagaaagcaactcctcgaatgataggactgacagttggttttgacaaaaaagacatgatggatataaagtacaggaaagtcagagatggttgtgtgactgatgcggtctttcaagaaatgtatatttgtgcaagcgtagaatttctgcagactgttgcaaatgtctttcttgaggcctacaccacaggcactgctgtagaaaccagtgtgcaaacatggactgctaaggaagaagtacctacacaggaatcagtgaagtgggaaattaatgttattattaaaaatcctgaaattgtgtttgtagctgacatgacaaaaaatgatgctcctgctttagtcattacaacacaatgtgaaatttgctataaaggtaaccttgaaaatagtacaatgactgctgccattaaagatctccaagtgagagcctgcccgtttcttccagtcaagagaaaaggcaaaatcactactgttttgcagccctgtgacttgttttatcaaactactcagaaaggtacagatccacaagtgatcgatatgtcagtaaaatccctgacactaaaggtttcaccagttattataaatactatgattaccataacttcagcactgtatacaactaaggaaaccatcccagaagaaacggcttcttctactgcacatttatgggaaaagaaggatacaaagactttaaaaatgtggtttcttgaagaatcaaatgaaactgaaaaaatagctcccacaactgaattggtacccaaaggcgagatgataaaaatgaacattgattctatttttatagttcttgaggctggaattggtcatagaacagtacctatgcttctggcaaagtcacgtttttcaggggaaggcaaaaactggagttccctaataaatctgcactgtcagcttgagctagaagtgcattattataatgaaatgtttggtgtatgggagcctttgcttgaacccttagaaattgatcagactgaggattttagaccatggaatcttggtatcaagatgaaaaagaaagcaaaaatggccattgttgagtcagatcctgaagaagaaaactacaaagtgccagaatataaaactgtcatcagtttccattcaaaagaccaattaaacattacattatccaaatgtggtcttgtaatgttaaacaatttagtcaaggcatttacagaagctgccactggatcttcagctgacttcgtaaaggatctagcaccatttatgattttaaattcccttggacttactatttctgtttcgccaagtgattcttttagtgtactcaacattcctatggcaaaatcatatgtattgaaaaatggagaaagtttaagtatggattatatccgaaccaaggacaatgatcatttcaatgcaatgaccagcctaagcagcaaactcttcttcattcttcttacacctgttaaccattctactgctgataagattcctttaacaaaagtgggacgacgtctgtacactgtaagacacagagagtctggcgttgaaagatctattgtttgtcaaattgatacagtagaaggaagtaagaaggtcacaattcgctccccagtgcagataagaaatcatttttcagtcccactgtctgtttacgaaggggataccttattgggaactgcctcacctgaaaatgaattcaacataccattaggatcttaccgatcattcatttttctgaagccagaagatgagaactatcaaatgtgtgaaggaattgactttgaagagattataaaaaatgatggtgctcttctaaagaagaaatgtagatctaaaaacccttctaaggaatcatttctcattaatattgttccagaaaaagataatttaacatctctatcagtgtattcagaagatggttgggatttaccatacataatgcatttgtggccacctatcctgctccgaaatcttcttccttacaaaattgcttattatatagagggaattgaaaattcggtttttactctaagtgaaggacattcagcccagatttgtactgcacagttgggtaaagccaggctacatttaaaattacttgactatctcaatcacgattggaaaagtgaatatcacataaagcctaatcagcaagacattagttttgtcagttttacttgtgttacagaaatggaaaagactgatttagatattgctgtccatatgacttacaatactggtcagacagttgtggcatttcatagtccttattggatggtcaataaaactggccgcatgttacagtacaaagcagacggaattcatcgaaagcatccacctaattataaaaagccagttctcttttcttttcagccaaatcacttttttaataacaataaggttcaacttatggtaactgatagtgagttgtccaatcagttttcaattgatactgttggtagtcatggagctgttaaatgtaaaggcctgaaaatggactatcaagttggtgtcactatagacctgagcagttttaacattactagaattgtgacatttacccctttttatatgattaaaaacaaaagcaaataccatatatcagtggctgaagaaggaaatgataaatggctctctcttgatttggagcagtgtatccccttttggcctgagtatgcttctagtaaacttcttattcaagtcgaaaggagtgaagatcctcccaaaaggatatattttaacaagcaggaaaattgtattctattgcgtctagataacgagcttggaggtattatagcagaagtgaatttggccgagcattctacagttattacatttttagattatcatgatggagcagctacattcctcttaataaatcacacaaagaatgaacttgttcaatacaatcaaagttctctcagtgaaatagaagattccctccctcctggtaaagccgtgttttatacatgggctgatccggtgggctctagaaggctgaagtggagatgtagaaaaagccatggtgaagtaacacagaaggatgatatgatgatgcctatagatttgggggaaaagacaatatatttagtttcattctttgaaggtttacaacgcattattttattcactgaagatccaagggtatttaaagtaacatatgaaagtgagaaagcagagttagcagagcaagaaattgcagtggcattacaagatgttggaatttctcttgtcaacaattacacgaagcaagaagtagcctatataggcattacaagttctgatgtggtttgggaaacaaagcccaagaagaaggcaagatggaagccaatgagtgtaaagcacactgagaagttagagagagaatttaaggaatatactgaatcttctccttcagaagataaggttattcagttggacactaatgttccggttcgcctaacccctactggtcataacatgaaaattctgcagccgcatgtaatagctctacgaagaaattatcttccagcattaaaagtggaatataacacatctgcacatcaatcatcatttagaattcagatttacagaatacagatccaaaatcagatacatggtgctgtatttccctttgtgttttatcctgttaaacctccaaagtcggtcaccatggattcagcaccaaagccctttacagatgtcagtattgtcatgagatctgcaggacattcccagatatcacgtattaagtatttcaaagtattgattcaagaaatggatctcaggttagatcttgggtttatctatgctttaacagaccttatgacagaagctgaggtgactgaaaatacagaggttgagctttttcataaagatatagaagctttcaaagaagaatataaaacagcctcattagtagatcaatcacaagtcagcctctatgaatattttcatatatctcctatcaagttacatttaagtgtttcactgagttccggcagagaagaagctaaagattcaaaacaaaatggaggactgattccagttcattctttaaatcttttgctgaagagtattggtgccacactgacagatgtacaagatgtagtttttaagcttgcattttttgaactcaactatcagttccatacaacatccgatctacagtctgaagtcataagacactattcaaaacaggccattaagcagatgtatgtactcattcttggacttgatgttttgggaaatccatttggcttaattagagaattttctgaaggtgtagaagcatttttttatgaaccttaccagggagccatccagggtcctgaagagtttgtggaaggaatggcactaggacttaaggcactagttggtggagctgttggtggattggctggtgctgcctccaaaatcaccggtgctatggctaagggggtagcagctatgaccatggatgaagactaccaacagaagagaagagaagccatgaataagcaaccagctggttttagagaaggcatcactcgtggaggaaaaggcttagtttctggatttgttagtggcataacaggaattgttacaaaaccaatcaaaggagctcaaaaaggaggagcagctggtttctttaaaggtgttgggaaaggtttagtaggagcggtagcaaggccaactggaggcatcatagacatggctagcagtacatttcagggaataaaaagagctacagagacttctgaagtggagagtctgcgacctcctcggttcttcaatgaagatggagttatcagaccgtacaggttgagggatgggactggaaatcaaatgttacaggtcatggaaaatggaagatttgcaaaatacaaatattttacccatgtcatgatcaataagacagatatgctaatgataaccagacgtggtgtattgtttgtaacaaagggaacatttggacaactcacgtgtgagtggcagtatagttttgatgaatttaccaaagagccattcattgttcatgggagaagattgcgcattgaagcaaaggaacgagtgaagtctgtatttcatgccagagagtttggaaaaataattaacttcaagaccccagaggatgccaggtggatcctcacaaagctacaagaagcaagagaaccttctccgagcctctgacagagaacactgcctgaagacacacagcaataagtgattacagctcctagactaccttccaaaacctgtttgggaagcatattacagaaatgatttcaagtaccctgtattctggatgctaaaaaacaaaaacaaacaaaaaaacaaaaacaaaaaaacaaaaccagaatcaggtaaaacagctatgtgattaaaatattttaattcttcagcaattacccggttttctaaattgaatcatgcatctatttataattctaattattttgtaaaagaagacaaaattatgaatcttaagtatttgctccatctttttctctgtaatggtggagaggctgcccataattcatctccacatggagccaagtttaatgtttctagttcacattttgtacttctgtcatgcttatttcaaactccctgagtgatgggtaagaaatcaaacattgcctcagtggtatcaagagaactttggtggtggtttcttcagaatcatgaagttcttttgccagataaatattttgatattattttcctttttaatataaaggataggtttgaattgtacttaaaatgcatagcattattaaaaacaatcttttaaaatataatttataacatagattgaagcctccccttaagaaaccttaaagaaataagtatcctactcaaaaaaggaagtctgtttcagaactttagggcctttgaaatatttcctcaagcctatttcatgagatctacttggtttacccaagtcatgtttttaatagactgctaatatcaaaggagaatttttaaagccttaacaatgcctactttccattcactgttaacatggaataaacacaattcccaacatcttagatagtgtattatgcttccaacagacagtccctctcatataaagtttatgtaccctaaaatctaacccaataacctgtcccgttgccaatagattgagaatttctggtttgcttactctacagttattcaaatgagagtcacgcttttaaatttacagctcatcacagaaatcatcagctatacattagtaaaaataaggacatgaggttttctttcttggtttttgtccaagatctttgcaccttaatattaatggactgtttcaggtaaaagagaatgaatgtatgattgtgaactgtgaagagaatgatgcaggatcctatttagttactgaataatacagagtattcaatgcatgttgtatgtgccaccaagttactattaactgtttttggaattgaagactctgtatagtcaatagttgtgaaattcttctcaggctccttaaaccctcgctttgttgtaaaagctaaaataaacagcatgctatattgtaattgtatttcttgctgaccaaatctactaaatgctattgatttctctctgattactaaaacacattgtttattctcagtagtttcccccaaaatgcttttttctttgctgaacttaaattgaatcaaaccacaagtttaaaatcacatgaaagtgtgtttccatgttgacctttgtttaaaaaaaaaaaaaagtgcttattttctctgtcgctaagctcctccagttttgcttttgtcagaattaaacttaacagtagaggtagtcagaaagcttgcatcagactgtcctcatccaaaacgaaatacttcattacccaatgttatgatttcaccattctcagaaaaattacagtcccctgcctccctgggtgtagtgtcgtgaagtagaaaagccttacataaatagtaaacatagaaattcttctggtgccctctggcagccagcaggagtgggtcttgtgactaatccacatggaaaggatagtgcctgtctttcctgttcccttgccataagaaccgtgaaatctctcctttccctgccactcgtttactcatcacctcctcccatcacttccttgtctctagactagagggacccacagttttaagagctacatcatatcatttgttgttttagaagattgtcttcatctaaacaaaaacactaagaaatcagtagatcactagataatgagtcagtgtttttagcatcacattttacaatttacagtttttgtttgattctgtagcccatttttcttgaaggttagaataagaatcttcttgtatttgaaaaccatctgccctaaattacatttaactacaagaaatggctctctgctggagaaatttaagcttgtcttagttgtttggtagtggctatggaatgagaggtgttgagtcttgtgccccttccatgtattatttgctaactaactatattactaggcccttaattccagcacagcatgtcttctggtctatgataattgtgtgaggactaaggcagagtgcctgttccctgccaactctccaccagaaaatcataatcagaaagagtgactttgatttctggtacttgtgatcaaaagcagcttgtgatttcttcacatttgcaaaatactctctgagccaaaaggcacatacagttctccagtgtcttcccttttagagtatacatatttgctgcttttcctttagtgttcacaaaaatcccaaggtcagtttagtgtggctgagttgttgttatctggaccctaaacaatcattaccacctgtagacagttcttacctacccctctcctccacaatcctagtccatttggaggcaactatcctgtggcctccaagtgaataaatctttcttacacttacttacgtgatattttctatcataattatctctctcatttcttccaatagtaatagcggtaatattgttccattgaatatctatgcacctagctcatctcttagaaacatcccacatagtagcatcgtattactctctggtaaaaagaaagattaaattaaaaggactctacacagtgctgaatttcctgcacctaaattattcagttatcacttgccagtattagttgatccttcaggctatgccaagtgccccctcatgtaggcctctgtattaaaaagattgggacaaaatacttgattagtttgcctgtagaagctcaaagtgtgtaccaaatacattgacagtggatgctttcatggctcagccaacacagttcagaggaatcttttcggcttccagggcattgcttgttaccttttgtcaggatcaacccaaatcctcagggatgctgtttttccacactgtaagtcctaactcattagtgggtcatgaaatcaacttaacagctcaagaccagtatattttaaacgtgaaataataaaaaatagaggaacaatagagcatataaaatggttaagtattggttcctgaaatactgtttcagctaaatattctatttactgtgtatactgggtcacaatataaagtgtttcctgttatgaaatgcaatttaaaaaaagaaagcttgaaagactgctgcaggaggcaccggccatccagtgattgttggaagagtctggattgtgtggagcctgaccttagataaggagcagcagatccacaactcaggaagtctagagatgcttagcacttcttcttttgagtgagaagatggaatcactcttggtttctaaaatatttttcttctctgctgtgtatcgggcaacctcacatgattcagtgggaccagaaaaagcatagaaaaattagatccacacacagcacccaaaaaaggccatagtcttttgtttacctagatgtattttaacctctttaccactaagcattttactataatagaactggggacatacattgtccttttgagtccgttgaatctgcaccatctaccttttggctgattcaccatacaggtggcaaaggcctttaaaaatggggagctaatacgtagggcacattctggtagggccaaaatattcagtgtctggggggtgctatgcaaatatcaatgactttttactaaaaacagtggatttcctcatttctttaagatccaagtagaaaatgtaaataacttacattctgtatgcaggactcaatacagacttagtcaatctgattttttttggtgcttttcagtatagcgcaactctaaaaggaaacccattcaccctccttagtcctttgaagtatacttttgaaattataccttattgttaatggcaacctaatcaagctaggatttgtcggttaaaattttgattcttgtaatctgtactgtcaatttttggccactctggctgttacagcaaacttttctcccactgtcataattggtctaaagtagtatttgtttcaggactatccaaaaagcaaggccagcacattgagaagatgcagaatcctactctattacaaacctcactcatgtttcttttattgaaacctttttctactttatatttcctcttttgtaaatttttccatgtcatttaaaaaattttttactttagaattacagattagttctttttttaaagcattatggcattttcaaaaaaaaaattattttggttacccaaaaagctatacaagaaatataacttcaattttttaggttgatatgggtatatttttaaagtttttattactttatacaaatacaaattaatttatattatagtttaacacctgctatgatgatagatatcacactgctatgatagaaaatccctgtctgtcattgaactattcatttagtgttactctgatatgttaataatgtattccttctaatgaagtccttgtaacaagaaaccctgtgagattggtataatgagatatcaaataatcagaagtataattaaaatagaacatgttggaaaatcccaacatttcctgttatgccgtcatacctccggtgttcagtttgttactcaaaagttcccagttcttaggctgaaaaacattcaagtaaaaatgtagcatagattacactgaaatattttcagtatcaatgatttaatatccacacaaactattaggaatggtatctggaacttgttacaaggtcagataaactgttacagaattttagaaataattatctctgtatgtgactgtgtattacatataaaaatgaatttttcaggaaaagtgcactttaaaaatactttctcttgctagttttttaaattgatgaaatagcctgtgctgctttggaatgcttattctttctttgatgaaaatacggtcattgattatgataattttaaaaatatctatttctgcatcgctgcaggatttcctacacttttctgttcctcatccctcttttatgtgtgcttggctcagttgcctgttacacagcctctgccttggttttgtgtattctaagataatttataaacacagatatttacagtgaagttcttccttttgaaactaatcttattcttttattcctctctctaaaaattggttggccatgctcactaatgattttttttcttaacaataagcatttcttggtattggtagatttggattgcatggtaagatgactgcccattttcaccatgtatacctttgtcaaataaagatttctgatctttggtc

SEQ ID NO: 198583 - DNA, 10269 bp, Homo sapiens
  Payload ID: 19190
  Gene Name: vacuolar protein sorting 13 homolog A (S. cerevisiae)
  Uniprot ID: Q96RL7
  ENST ID: ENST00000376634
  CDS Start-End: 353-9562
aggcgatggggaggaggcggggccgacaggaaagaggagccgggctcggcgcgaaaagggcaccctccagagccgcggccgcgcagccgcctttcctccctctcagggctgcgcgcccaggtctgcgccgcgctccgcctccagccgcgcgcagacttgcgcacgcgtcgtgagagcgaccgcctccgtctctcgctgggctcgctagggctgcgcgttgggccagcgggggcgccgcagctgaagccgccccggagccggtgaaccgaattacctcgagggaggggcgtggggaaggcggcgggaggaggagcgcacgggccggctgccgtgcccaccacggctgaggaacatggttttcgagtcggtggtcgtggacgtgttgaaccggttcttgggggactatgtggtggacttggacacgtcccagctctctctgggcatctggaaaggagctgtggccctcaagaatcttcaaattaaagaaaatgccctgagtcaactggatgtaccatttaaagttaaagttggtcacataggtaatcttaaacttataattccatggaaaaacctttatactcaacctgttgaagccgtattggaagaaatttatttacttatagtgccttcttctagaataaaatatgatcctttaaaagaagagaaacaactcatggaagcaaagcaacaggaactgaaaagaatagaagaagcaaaacaaaaagtagttgatcaagaacaacatctgccggaaaaacaggacacttttgcagaaaaattagttacacagatcataaaaaatcttcaggtgaaaatttccagtatccatattcgttatgaagatgatatcacaaatcgggacaaaccgctgtcatttggtatttcccttcaaaatctgagcatgcagacaactgatcaatactgggttccatgtttacatgatgaaactgagaaactggttcgtaagttaatccgattggataacctgtttgcctattggaatgtgaagtctcagatgttttatcttagtgattatgataactccttggacgacttgaagaatggcattgtcaatgaaaatattgttccagaaggttatgattttgtatttcgtcccatatctgctaatgccaaacttgtgatgaatcgccgatctgattttgacttttctgcccccaaaataaacttggaaattgagttacataacatagcaattgaatttaataaaccacagtatttcagtattatggagcttcttgaatcagttgatatgatggcacaaaatctgccatataggaagttcaaacctgatgtgcctcttcaccaccatgccagagaatggtgggcttatgctatacatggcgttcttgaagtaaatgtttgccccaggttatggatgtggtcatggaagcatattagaaaacataggcaaaaagtgaagcaatataaagaactgtataaaaaaaagttaacaagtaagaagccacctggtgaacttctcgtgtctttggaggagttggaaaaaaccttggatgtctttaatataactatagctagacagacggcagaagttgaggtaaagaaagctggatacaaaatttacaaagaaggagtaaaagatccagaggataataaagggtggtttagctggctatggtcttggtcagaacaaaatactaatgaacagcaaccagatgttcaacctgaaactcttgaagaaatgttgacacctgaagaaaaagctttactctatgaagcaattggctatagtgaaacagcagttgatccaactttactaaaaacatttgaagccttgaagttttttgtccacttgaaaagtatgtctattgttctaagagaaaatcatcaaaaacctgagctggtagatattgtaatagaagaatttagcaccttaattgtgcaaagaccaggagcacaagcaataaaatttgaaactaaaatagattcatttcatattactggcttaccagataattcagaaaaaccccgcctcctgtcttcattggatgatgcaatgtcacttttccaaattacatttgagataaatccattagatgaaactgtttctcagaggtgtatcatagaagctgaacctttagaaatcatatatgatgcaaggacagtgaatagtatagtggaattcttcagacctccaaaagaggtacatctagcacagctcactgcagcaactttgacaaaactggaagaatttcgcagtaagacagcaacaggtctactgtatattattgaaacacagaaagttcttgatctcaaaattaatttgaaggcttcatatattattgtcccacaagatggaatttttagtcctacatcaaatctgcttcttttggaccttggtcatctaaaggtgacgagtaaaagtcgttctgaattaccagatgtgaaacaaggtgaggccaatcttaaagagataatggatagagcttatgattcatttgatattcaacttacaagtgtacagctgctttacagtagagttggtgataattggagagaagcacgaaaactcagtgtatctacccagcatattttggtacccatgcacttcaatttggaactgtctaaggccatggttttcatggatgtaaggatgcccaaattcaagatttatggaaagttacctcttatttctttacgaatctcagataaaaaactacaagggattatggaattgattgaaagcattccaaaacctgaaccagtaactgaagtatctgcccctgtcaaatcattccagattcaaacatctacttctttgggaacatcacagatttcacagaaaataattcctctcttggaacttccatctgtttctgaagatgattcagaggaggaattttttgatgcaccatgtagtcccttggaagaacctcttcagtttccaactggagttaaaagtattcgaaccagaaagttacaaaagcaggattgttcagtaaatatgactacatttaaaataagatttgaagtaccaaaggttttgatcgagttttatcaccttgttggagattgtgaactatctgtggtagaaattcttgttttaggattgggtgcagaaattgagattagaacatacgatttgaaagcaaatgcctttttgaaagagttctgcttaaaatgcccagaatacttggatgaaaacaagaaaccagtttatttggttacaaccctggataacacaatggaagacctgttaacgctggaatatgtaaaggctgaaaagaatgtacccgacttgaaaagtacctataacaatgttttacaattgattaaggtaaatttttcctctttggatattcatttacacactgaagcacttctgaatacaataaattatcttcataatatccttccgcaatcagaggaaaaatcagccccagtgtccactacagagactgaagacaaaggagatgtcattaaaaaattagctttaaaactatccacaaatgaagatatcattactttgcagattttagcagaattatcgtgtttacagatctttattcaagatcagaaatgtaacatttctgaaattaagattgaagggcttgattctgagatgattatgaggccttcagaaactgaaataaacgcaaagctaaggaatataattgttttagattctgatataacagctatatacaaaaaggctgtttatatcactggaaaagaagttttcagcttcaaaatggtttcttacatggatgcaactgctggttctgcatacacagatatgaatgtggttgacattcaggttaatttaatagttggttgcattgaagtagtttttgtcacgaaatttctatattctatattggcttttatagataattttcaggcagctaaacaagccttggctgaggcaactgttcaggcagctggaatggctgctactggtgtaaaagaactcgcacaaaggagttccagaatggcactggatattaacatcaaagccccagttgtggtcatcccgcagtctccagtttctgaaaatgtttttgttgctgattttggactaattacaatgacaaatacctttcatatgataacagagagccagagctctcccccacctgttattgatttgataacaataaagctgagtgaaatgcgactatacagatctcgatttattaatgatgcataccaggaagtactggatctactcctgccattaaatcttgaggttgtggttgaacgaaatttatgctgggagtggtaccaggaagttccttgttttaatgtaaatgctcagctgaaaccaatggagttcattcttagtcaagaagatataacaactatttttaaaacattgcatggcaatatatggtatgaaaaagatggtagtgcctcacctgctgtaacaaaagaccaatacagtgccactagtggagttactactaatgcttcacaccattcaggaggagcaactgtggtgacagctgctgtggtagaagtacattcacgtgccttactagttaagacaacactaaacataagcttcaaaactgatgatctcaccatggtgctgtatagtccaggtcctaaacaggcttcctttacagatgttcgtgatccttctctgaaacttgctgaatttaaattggagaatattataagtactttaaaaatgtatacagatggctcaacattttcttccttctcattaaaaaactgtattttagatgataaaagacctcatgtcaagaaagcaactcctcgaatgataggactgacagttggttttgacaaaaaagacatgatggatataaagtacaggaaagtcagagatggttgtgtgactgatgcggtctttcaagaaatgtatatttgtgcaagcgtagaatttctgcagactgttgcaaatgtctttcttgaggcctacaccacaggcactgctgtagaaaccagtgtgcaaacatggactgctaaggaagaagtacctacacaggaatcagtgaagtgggaaattaatgttattattaaaaatcctgaaattgtgtttgtagctgacatgacaaaaaatgatgctcctgctttagtcattacaacacaatgtgaaatttgctataaaggtaaccttgaaaatagtacaatgactgctgccattaaagatctccaagtgagagcctgcccgtttcttccagtcaagagaaaaggcaaaatcactactgttttgcagccctgtgacttgttttatcaaactactcagaaaggtacagatccacaagtgatcgatatgtcagtaaaatccctgacactaaaggtttcaccagttattataaatactatgattaccataacttcagcactgtatacaactaaggaaaccatcccagaagaaacggcttcttctactgcacatttatgggaaaagaaggatacaaagactttaaaaatgtggtttcttgaagaatcaaatgaaactgaaaaaatagctcccacaactgaattggtacccaaaggcgagatgataaaaatgaacattgattctatttttatagttcttgaggctggaattggtcatagaacagtacctatgcttctggcaaagtcacgtttttcaggggaaggcaaaaactggagttccctaataaatctgcactgtcagcttgagctagaagtgcattattataatgaaatgtttggtgtatgggagcctttgcttgaacccttagaaattgatcagactgaggattttagaccatggaatcttggtatcaagatgaaaaagaaagcaaaaatggccattgttgagtcagatcctgaagaagaaaactacaaagtgccagaatataaaactgtcatcagtttccattcaaaagaccaattaaacattacattatccaaatgtggtcttgtaatgttaaacaatttagtcaaggcatttacagaagctgccactggatcttcagctgacttcgtaaaggatctagcaccatttatgattttaaattcccttggacttactatttctgtttcgccaagtgattcttttagtgtactcaacattcctatggcaaaatcatatgtattgaaaaatggagaaagtttaagtatggattatatccgaaccaaggacaatgatcatttcaatgcaatgaccagcctaagcagcaaactcttcttcattcttcttacacctgttaaccattctactgctgataagattcctttaacaaaagtgggacgacgtctgtacactgtaagacacagagagtctggcgttgaaagatctattgtttgtcaaattgatacagtagaaggaagtaagaaggtcacaattcgctccccagtgcagataagaaatcatttttcagtcccactgtctgtttacgaaggggataccttattgggaactgcctcacctgaaaatgaattcaacataccattaggatcttaccgatcattcatttttctgaagccagaagatgagaactatcaaatgtgtgaaggaattgactttgaagagattataaaaaatgatggtgctcttctaaagaagaaatgtagatctaaaaacccttctaaggaatcatttctcattaatattgttccagaaaaagataatttaacatctctatcagtgtattcagaagatggttgggatttaccatacataatgcatttgtggccacctatcctgctccgaaatcttcttccttacaaaattgcttattatatagagggaattgaaaattcggtttttactctaagtgaaggacattcagcccagatttgtactgcacagttgggtaaagccaggctacatttaaaattacttgactatctcaatcacgattggaaaagtgaatatcacataaagcctaatcagcaagacattagttttgtcagttttacttgtgttacagaaatggaaaagactgatttagatattgctgtccatatgacttacaatactggtcagacagttgtggcatttcatagtccttattggatggtcaataaaactggccgcatgttacagtacaaagcagacggaattcatcgaaagcatccacctaattataaaaagccagttctcttttcttttcagccaaatcacttttttaataacaataaggttcaacttatggtaactgatagtgagttgtccaatcagttttcaattgatactgttggtagtcatggagctgttaaatgtaaaggcctgaaaatggactatcaagttggtgtcactatagacctgagcagttttaacattactagaattgtgacatttacccctttttatatgattaaaaacaaaagcaaataccatatatcagtggctgaagaaggaaatgataaatggctctctcttgatttggagcagtgtatccccttttggcctgagtatgcttctagtaaacttcttattcaagtcgaaaggagtgaagatcctcccaaaaggatatattttaacaagcaggaaaattgtattctattgcgtctagataacgagcttggaggtattatagcagaagtgaatttggccgagcattctacagttattacatttttagattatcatgatggagcagctacattcctcttaataaatcacacaaagaatgaacttgttcaatacaatcaaagttctctcagtgaaatagaagattccctccctcctggtaaagccgtgttttatacatgggctgatccggtgggctctagaaggctgaagtggagatgtagaaaaagccatggtgaagtaacacagaaggatgatatgatgatgcctatagatttgggggaaaagacaatatatttagtttcattctttgaaggtttacaacgcattattttattcactgaagatccaagggtatttaaagtaacatatgaaagtgagaaagcagagttagcagagcaagaaattgcagtggcattacaagatgttggaatttctcttgtcaacaattacacgaagcaagaagtagcctatataggcattacaagttctgatgtggtttgggaaacaaagcccaagaagaaggcaagatggaagccaatgagtgtaaagcacactgagaagttagagagagaatttaaggaatatactgaatcttctccttcagaagataaggttattcagttggacactaatgttccggttcgcctaacccctactggtcataacatgaaaattctgcagccgcatgtaatagctctacgaagaaattatcttccagcattaaaagtggaatataacacatctgcacatcaatcatcatttagaattcagatttacagaatacagatccaaaatcagatacatggtgctgtatttccctttgtgttttatcctgttaaacctccaaagtcggtcaccatggattcagcaccaaagccctttacagatgtcagtattgtcatgagatctgcaggacattcccagatatcacgtattaagtatttcaaagtattgattcaagaaatggatctcaggttagatcttgggtttatctatgctttaacagaccttatgacagaagctgaggtgactgaaaatacagaggttgagctttttcataaagatatagaagctttcaaagaagaatataaaacagcctcattagtagatcaatcacaagtcagcctctatgaatattttcatatatctcctatcaagttacatttaagtgtttcactgagttccggcagagaagaagctaaagattcaaaacaaaatggaggactgattccagttcattctttaaatcttttgctgaagagtattggtgccacactgacagatgtacaagatgtagtttttaagcttgcattttttgaactcaactatcagttccatacaacatccgatctacagtctgaagtcataagacactattcaaaacaggccattaagcagatgtatgtactcattcttggacttgatgttttgggaaatccatttggcttaattagagaattttctgaaggtgtagaagcatttttttatgaaccttaccagggagccatccagggtcctgaagagtttgtggaaggaatggcactaggacttaaggcactagttggtggagctgttggtggattggctggtgctgcctccaaaatcaccggtgctatggctaagggggtagcagctatgaccatggatgaagactaccaacagaagagaagagaagccatgaataagcaaccagctggttttagagaaggcatcactcgtggaggaaaaggcttagtttctggatttgttagtggcataacaggaattgttacaaaaccaatcaaaggagctcaaaaaggaggagcagctggtttctttaaaggtgttgggaaaggtttagtaggagcggtagcaaggccaactggaggcatcatagacatggctagcagtacatttcagggaataaaaagagctacagagacttctgaagtggagagtctgcgacctcctcggttcttcaatgaagatggagttatcagaccgtacaggttgagggatgggactggaaatcaaatgttacaggcatcaaaaagtttgatatgaaaagttaatgcatgactttgcaagtgaaagccaacagtagattttagtcttaaaatttacaaactacgtacagctgtttcagtattttgaatacaaagaaaaccttttgtattggtaacttttaataggaattttaatgaatctggtttttttatagggtgttcttagttctgcactggatttgctagatttgttggaagcctttgtaccttatgtatcctcgtcattggtggtacttacttaaccaattaaaccatttctgttgtggggttattaaaccactggtagcttttataccagatatataatccttatatccaattacacatgaagaaggaaaagcaaaactcaggaacactgctattgtgaattactcttggattcttgtgctttgcctttgaaaatgcttaaatggccatgaccctcttcctgctttattctagtgtagtctttataaaacttgtgggatttgataagcagttcacatgcaaaccagtatcttttaataatacaaagtagcatctggaacaatagacagtttgaagttagaatctgcttagacaactttcttacttggtaaattcgactttttaaaacctggattatgctgtaggtaactagtaatcatatataggctataccagtgtcatgttgtttctgtggtttagaggtggaatactaaattaaatcatttgtttgaaaacaaa

SEQ ID NO: 198584 - DNA, 11145 bp, Homo sapiens
  Payload ID: 19190
  Gene Name: vacuolar protein sorting 13 homolog A (S. cerevisiae)
  Uniprot ID: Q96RL7
  ENST ID: ENST00000376636
  CDS Start-End: 261-9668
ttcctccctctcagggctgcgcgcccaggtctgcgccgcgctccgcctccagccgcgcgcagacttgcgcacgcgtcgtgagagcgaccgcctccgtctctcgctgggctcgctagggctgcgcgttgggccagcgggggcgccgcagctgaagccgccccggagccggtgaaccgaattacctcgagggaggggcgtggggaaggcggcgggaggaggagcgcacgggccggctgccgtgcccaccacggctgaggaacatggttttcgagtcggtggtcgtggacgtgttgaaccggttcttgggggactatgtggtggacttggacacgtcccagctctctctgggcatctggaaaggagctgtggccctcaagaatcttcaaattaaagaaaatgccctgagtcaactggatgtaccatttaaagttaaagttggtcacataggtaatcttaaacttataattccatggaaaaacctttatactcaacctgttgaagccgtattggaagaaatttatttacttatagtgccttcttctagaataaaatatgatcctttaaaagaagagaaacaactcatggaagcaaagcaacaggaactgaaaagaatagaagaagcaaaacaaaaagtagttgatcaagaacaacatctgccggaaaaacaggacacttttgcagaaaaattagttacacagatcataaaaaatcttcaggtgaaaatttccagtatccatattcgttatgaagatgatatcacaaatcgggacaaaccgctgtcatttggtatttcccttcaaaatctgagcatgcagacaactgatcaatactgggttccatgtttacatgatgaaactgagaaactggttcgtaagttaatccgattggataacctgtttgcctattggaatgtgaagtctcagatgttttatcttagtgattatgataactccttggacgacttgaagaatggcattgtcaatgaaaatattgttccagaaggttatgattttgtatttcgtcccatatctgctaatgccaaacttgtgatgaatcgccgatctgattttgacttttctgcccccaaaataaacttggaaattgagttacataacatagcaattgaatttaataaaccacagtatttcagtattatggagcttcttgaatcagttgatatgatggcacaaaatctgccatataggaagttcaaacctgatgtgcctcttcaccaccatgccagagaatggtgggcttatgctatacatggcgttcttgaagtaaatgtttgccccaggttatggatgtggtcatggaagcatattagaaaacataggcaaaaagtgaagcaatataaagaactgtataaaaaaaagttaacaagtaagaagccacctggtgaacttctcgtgtctttggaggagttggaaaaaaccttggatgtctttaatataactatagctagacagacggcagaagttgaggtaaagaaagctggatacaaaatttacaaagaaggagtaaaagatccagaggataataaagggtggtttagctggctatggtcttggtcagaacaaaatactaatgaacagcaaccagatgttcaacctgaaactcttgaagaaatgttgacacctgaagaaaaagctttactctatgaagcaattggctatagtgaaacagcagttgatccaactttactaaaaacatttgaagccttgaagttttttgtccacttgaaaagtatgtctattgttctaagagaaaatcatcaaaaacctgagctggtagatattgtaatagaagaatttagcaccttaattgtgcaaagaccaggagcacaagcaataaaatttgaaactaaaatagattcatttcatattactggcttaccagataattcagaaaaaccccgcctcctgtcttcattggatgatgcaatgtcacttttccaaattacatttgagataaatccattagatgaaactgtttctcagaggtgtatcatagaagctgaacctttagaaatcatatatgatgcaaggacagtgaatagtatagtggaattcttcagacctccaaaagaggtacatctagcacagctcactgcagcaactttgacaaaactggaagaatttcgcagtaagacagcaacaggtctactgtatattattgaaacacagaaagttcttgatctcaaaattaatttgaaggcttcatatattattgtcccacaagatggaatttttagtcctacatcaaatctgcttcttttggaccttggtcatctaaaggtgacgagtaaaagtcgttctgaattaccagatgtgaaacaaggtgaggccaatcttaaagagataatggatagagcttatgattcatttgatattcaacttacaagtgtacagctgctttacagtagagttggtgataattggagagaagcacgaaaactcagtgtatctacccagcatattttggtacccatgcacttcaatttggaactgtctaaggccatggttttcatggatgtaaggatgcccaaattcaagatttatggaaagttacctcttatttctttacgaatctcagataaaaaactacaagggattatggaattgattgaaagcattccaaaacctgaaccagtaactgaagtatctgcccctgtcaaatcattccagattcaaacatctacttctttgggaacatcacagatttcacagaaaataattcctctcttggaacttccatctgtttctgaagatgattcagaggaggaattttttgatgcaccatgtagtcccttggaagaacctcttcagtttccaactggagttaaaagtattcgaaccagaaagttacaaaagcaggattgttcagtaaatatgactacatttaaaataagatttgaagtaccaaaggttttgatcgagttttatcaccttgttggagattgtgaactatctgtggtagaaattcttgttttaggattgggtgcagaaattgagattagaacatacgatttgaaagcaaatgcctttttgaaagagttctgcttaaaatgcccagaatacttggatgaaaacaagaaaccagtttatttggttacaaccctggataacacaatggaagacctgttaacgctggaatatgtaaaggctgaaaagaatgtacccgacttgaaaagtacctataacaatgttttacaattgattaaggtaaatttttcctctttggatattcatttacacactgaagcacttctgaatacaataaattatcttcataatatccttccgcaatcagaggaaaaatcagccccagtgtccactacagagactgaagacaaaggagatgtcattaaaaaattagggcttgattctgagatgattatgaggccttcagaaactgaaataaacgcaaagctaaggaatataattgttttagattctgatataacagctatatacaaaaaggctgtttatatcactggaaaagaagttttcagcttcaaaatggtttcttacatggatgcaactgctggttctgcatacacagatatgaatgtggttgacattcaggttaatttaatagttggttgcattgaagtagtttttgtcacgaaatttctatattctatattggcttttatagataattttcaggcagctaaacaagccttggctgaggcaactgttcaggcagctggaatggctgctactggtgtaaaagaactcgcacaaaggagttccagaatggcactggatattaacatcaaagccccagttgtggtcatcccgcagtctccagtttctgaaaatgtttttgttgctgattttggactaattacaatgacaaatacctttcatatgataacagagagccagagctctcccccacctgttattgatttgataacaataaagctgagtgaaatgcgactatacagatctcgatttattaatgatgcataccaggaagtactggatctactcctgccattaaatcttgaggttgtggttgaacgaaatttatgctgggagtggtaccaggaagttccttgttttaatgtaaatgctcagctgaaaccaatggagttcattcttagtcaagaagatataacaactatttttaaaacattgcatggcaatatatggtatgaaaaagatggtagtgcctcacctgctgtaacaaaagaccaatacagtgccactagtggagttactactaatgcttcacaccattcaggaggagcaactgtggtgacagctgctgtggtagaagtacattcacgtgccttactagttaagacaacactaaacataagcttcaaaactgatgatctcaccatggtgctgtatagtccaggtcctaaacaggcttcctttacagatgttcgtgatccttctctgaaacttgctgaatttaaattggagaatattataagtactttaaaaatgtatacagatggctcaacattttcttccttctcattaaaaaactgtattttagatgataaaagacctcatgtcaagaaagcaactcctcgaatgataggactgacagttggttttgacaaaaaagacatgatggatataaagtacaggaaagtcagagatggttgtgtgactgatgcggtctttcaagaaatgtatatttgtgcaagcgtagaatttctgcagactgttgcaaatgtctttcttgaggcctacaccacaggcactgctgtagaaaccagtgtgcaaacatggactgctaaggaagaagtacctacacaggaatcagtgaagtgggaaattaatgttattattaaaaatcctgaaattgtgtttgtagctgacatgacaaaaaatgatgctcctgctttagtcattacaacacaatgtgaaatttgctataaaggtaaccttgaaaatagtacaatgactgctgccattaaagatctccaagtgagagcctgcccgtttcttccagtcaagagaaaaggcaaaatcactactgttttgcagccctgtgacttgttttatcaaactactcagaaaggtacagatccacaagtgatcgatatgtcagtaaaatccctgacactaaaggtttcaccagttattataaatactatgattaccataacttcagcactgtatacaactaaggaaaccatcccagaagaaacggcttcttctactgcacatttatgggaaaagaaggatacaaagactttaaaaatgtggtttcttgaagaatcaaatgaaactgaaaaaatagctcccacaactgaattggtacccaaaggcgagatgataaaaatgaacattgattctatttttatagttcttgaggctggaattggtcatagaacagtacctatgcttctggcaaagtcacgtttttcaggggaaggcaaaaactggagttccctaataaatctgcactgtcagcttgagctagaagtgcattattataatgaaatgtttggtgtatgggagcctttgcttgaacccttagaaattgatcagactgaggattttagaccatggaatcttggtatcaagatgaaaaagaaagcaaaaatggccattgttgagtcagatcctgaagaagaaaactacaaagtgccagaatataaaactgtcatcagtttccattcaaaagaccaattaaacattacattatccaaatgtggtcttgtaatgttaaacaatttagtcaaggcatttacagaagctgccactggatcttcagctgacttcgtaaaggatctagcaccatttatgattttaaattcccttggacttactatttctgtttcgccaagtgattcttttagtgtactcaacattcctatggcaaaatcatatgtattgaaaaatggagaaagtttaagtatggattatatccgaaccaaggacaatgatcatttcaatgcaatgaccagcctaagcagcaaactcttcttcattcttcttacacctgttaaccattctactgctgataagattcctttaacaaaagtgggacgacgtctgtacactgtaagacacagagagtctggcgttgaaagatctattgtttgtcaaattgatacagtagaaggaagtaagaaggtcacaattcgctccccagtgcagataagaaatcatttttcagtcccactgtctgtttacgaaggggataccttattgggaactgcctcacctgaaaatgaattcaacataccattaggatcttaccgatcattcatttttctgaagccagaagatgagaactatcaaatgtgtgaaggaattgactttgaagagattataaaaaatgatggtgctcttctaaagaagaaatgtagatctaaaaacccttctaaggaatcatttctcattaatattgttccagaaaaagataatttaacatctctatcagtgtattcagaagatggttgggatttaccatacataatgcatttgtggccacctatcctgctccgaaatcttcttccttacaaaattgcttattatatagagggaattgaaaattcggtttttactctaagtgaaggacattcagcccagatttgtactgcacagttgggtaaagccaggctacatttaaaattacttgactatctcaatcacgattggaaaagtgaatatcacataaagcctaatcagcaagacattagttttgtcagttttacttgtgttacagaaatggaaaagactgatttagatattgctgtccatatgacttacaatactggtcagacagttgtggcatttcatagtccttattggatggtcaataaaactggccgcatgttacagtacaaagcagacggaattcatcgaaagcatccacctaattataaaaagccagttctcttttcttttcagccaaatcacttttttaataacaataaggttcaacttatggtaactgatagtgagttgtccaatcagttttcaattgatactgttggtagtcatggagctgttaaatgtaaaggcctgaaaatggactatcaagttggtgtcactatagacctgagcagttttaacattactagaattgtgacatttacccctttttatatgattaaaaacaaaagcaaataccatatatcagtggctgaagaaggaaatgataaatggctctctcttgatttggagcagtgtatccccttttggcctgagtatgcttctagtaaacttcttattcaagtcgaaaggagtgaagatcctcccaaaaggatatattttaacaagcaggaaaattgtattctattgcgtctagataacgagcttggaggtattatagcagaagtgaatttggccgagcattctacagttattacatttttagattatcatgatggagcagctacattcctcttaataaatcacacaaagaatgaacttgttcaatacaatcaaagttctctcagtgaaatagaagattccctccctcctggtaaagccgtgttttatacatgggctgatccggtgggctctagaaggctgaagtggagatgtagaaaaagccatggtgaagtaacacagaaggatgatatgatgatgcctatagatttgggggaaaagacaatatatttagtttcattctttgaaggtttacaacgcattattttattcactgaagatccaagggtatttaaagtaacatatgaaagtgagaaagcagagttagcagagcaagaaattgcagtggcattacaagatgttggaatttctcttgtcaacaattacacgaagcaagaagtagcctatataggcattacaagttctgatgtggtttgggaaacaaagcccaagaagaaggcaagatggaagccaatgagtgtaaagcacactgagaagttagagagagaatttaaggaatatactgaatcttctccttcagaagataaggttattcagttggacactaatgttccggttcgcctaacccctactggtcataacatgaaaattctgcagccgcatgtaatagctctacgaagaaattatcttccagcattaaaagtggaatataacacatctgcacatcaatcatcatttagaattcagatttacagaatacagatccaaaatcagatacatggtgctgtatttccctttgtgttttatcctgttaaacctccaaagtcggtcaccatggattcagcaccaaagccctttacagatgtcagtattgtcatgagatctgcaggacattcccagatatcacgtattaagtatttcaaagtattgattcaagaaatggatctcaggttagatcttgggtttatctatgctttaacagaccttatgacagaagctgaggtgactgaaaatacagaggttgagctttttcataaagatatagaagctttcaaagaagaatataaaacagcctcattagtagatcaatcacaagtcagcctctatgaatattttcatatatctcctatcaagttacatttaagtgtttcactgagttccggcagagaagaagctaaagattcaaaacaaaatggaggactgattccagttcattctttaaatcttttgctgaagagtattggtgccacactgacagatgtacaagatgtagtttttaagcttgcattttttgaactcaactatcagttccatacaacatccgatctacagtctgaagtcataagacactattcaaaacaggccattaagcagatgtatgtactcattcttggacttgatgttttgggaaatccatttggcttaattagagaattttctgaaggtgtagaagcatttttttatgaaccttaccagggagccatccagggtcctgaagagtttgtggaaggaatggcactaggacttaaggcactagttggtggagctgttggtggattggctggtgctgcctccaaaatcaccggtgctatggctaagggggtagcagctatgaccatggatgaagactaccaacagaagagaagagaagccatgaataagcaaccagctggttttagagaaggcatcactcgtggaggaaaaggcttagtttctggatttgttagtggcataacaggaattgttacaaaaccaatcaaaggagctcaaaaaggaggagcagctggtttctttaaaggtgttgggaaaggtttagtaggagcggtagcaaggccaactggaggcatcatagacatggctagcagtacatttcagggaataaaaagagctacagagacttctgaagtggagagtctgcgacctcctcggttcttcaatgaagatggagttatcagaccgtacaggttgagggatgggactggaaatcaaatgttacaggtcatggaaaatggaagatttgcaaaatacaaatattttacccatgtcatgatcaataagacagatatgctaatgataaccagacgtggtgtattgtttgtaacaaagggaacatttggacaactcacgtgtgagtggcagtatagttttgatgaatttaccaaagagccattcattgttcatgggagaagattgcgcattgaagcaaaggaacgagtgaagtctgtatttcatgccagagagtttggaaaaataattaacttcaagaccccagaggatgccaggtggatcctcacaaagctacaagaagcaagagaaccttctccgagcctctgacagagaacactgcctgaagacacacagcaataagtgattacagctcctagactaccttccaaaacctgtttgggaagcatattacagaaatgatttcaagtaccctgtattctggatgctaaaaaacaaaaacaaacaaaaaaacaaaaacaaaaaaacaaaaccagaatcaggtaaaacagctatgtgattaaaatattttaattcttcagcaattacccggttttctaaattgaatcatgcatctatttataattctaattattttgtaaaagaagacaaaattatgaatcttaagtatttgctccatctttttctctgtaatggtggagaggctgcccataattcatctccacatggagccaagtttaatgtttctagttcacattttgtacttctgtcatgcttatttcaaactccctgagtgatgggtaagaaatcaaacattgcctcagtggtatcaagagaactttggtggtggtttcttcagaatcatgaagttcttttgccagataaatattttgatattattttcctttttaatataaaggataggtttgaattgtacttaaaatgcatagcattattaaaaacaatcttttaaaatataatttataacatagattgaagcctccccttaagaaaccttaaagaaataagtatcctactcaaaaaaggaagtctgtttcagaactttagggcctttgaaatatttcctcaagcctatttcatgagatctacttggtttacccaagtcatgtttttaatagactgctaatatcaaaggagaatttttaaagccttaacaatgcctactttccattcactgttaacatggaataaacacaattcccaacatcttagatagtgtattatgcttccaacagacagtccctctcatataaagtttatgtaccctaaaatctaacccaataacctgtcccgttgccaatagattgagaatttctggtttgcttactctacagttattcaaatgagagtcacgcttttaaatttacagctcatcacagaaatcatcagctatacattagtaaaaataaggacatgaggttttctttcttggtttttgtccaagatctttgcaccttaatattaatggactgtttcaggtaaaagagaatgaatgtatgattgtgaactgtgaagagaatgatgcaggatcctatttagttactgaataatacagagtattcaatgcatgttgtatgtgccaccaagttactattaactgtttttggaattgaagactctgtatagtcaatagttgtgaaattcttctcaggctccttaaaccctcgctttgttgtaaaagctaaaataaacagcatgctatattgtaattgtatttcttgctgaccaaatctactaaatgctattgatttctctctgattactaaaacacattgtttattctcagtagtttcccccaaaatgcttttttctttgctgaacttaa

SEQ ID NO: 198585 - DNA, 2262 bp, Homo sapiens
  Payload ID: 19190
  Gene Name: vacuolar protein sorting 13 homolog A (S. cerevisiae)
  ENST ID: ENST00000376646
  CDS Start-End: 311-643
caattggaagataactgccgtcagccgacgtggtctttccctttacttcaggaggagaatgactactaatctggaagaaaggtcttactatagcagtcagatcaccagagtagtgccgaacacttcctggcttcatctgaaaatttgaatgaataccagtttatgcaagttcttagtcatcattatataaattcctcatttttgtcctctttggcaagacaaaatctattctatttaagagtagattttaagaatttaaaagaatagattttaagaatttaaaaaagaatctttttttcctttcaaggtcatggaaaatggaagatttgcaaaatacaaatattttacccatgtcatgatcaataagacagatatgctaatgataaccagacgtggtgtattgtttgtaacaaagggaacatttggacaactcacgtgtgagtggcagtatagttttgatgaatttaccaaagagccattcattgttcatgggagaagattgcgcattgaagcaaaggaacgagtgaagtctgtatttcatgccagagagtttggaaaaataattaacttcaagaccccagaggatgccaggtggatcctcacaaagctacaagaagcaagagaaccttctccgagcctctgacagagaacactgcctgaagacacacagcaataagtgattacagctcctagactaccttccaaaacctgtttgggaagcatattacagaaatgatttcaagtaccctgtattctggatgctaaaaaacaaaaacaaacaaaaaaacaaaaacaaaaaaacaaaaccagaatcaggtaaaacagctatgtgattaaaatattttaattcttcagcaattacccggttttctaaattgaatcatgcatctatttataattctaattattttgtaaaagaagacaaaattatgaatcttaagtatttgctccatctttttctctgtaatggtggagaggctgcccataattcatctccacatggagccaagtttaatgtttctagttcacattttgtacttctgtcatgcttatttcaaactccctgagtgatgggtaagaaatcaaacattgcctcagtggtatcaagagaactttggtggtggtttcttcagaatcatgaagttcttttgccagataaatattttgatattattttcctttttaatataaaggataggtttgaattgtacttaaaatgcatagcattattaaaaacaatcttttaaaatataatttataacatagattgaagcctccccttaagaaaccttaaagaaataagtatcctactcaaaaaaggaagtctgtttcagaactttagggcctttgaaatatttcctcaagcctatttcatgagatctacttggtttacccaagtcatgtttttaatagactgctaatatcaaaggagaatttttaaagccttaacaatgcctactttccattcactgttaacatggaataaacacaattcccaacatcttagatagtgtattatgcttccaacagacagtccctctcatataaagtttatgtaccctaaaatctaacccaataacctgtcccgttgccaatagattgagaatttctggtttgcttactctacagttattcaaatgagagtcacgcttttaaatttacagctcatcacagaaatcatcagctatacattagtaaaaataaggacatgaggttttctttcttggtttttgtccaagatctttgcaccttaatattaatggactgtttcaggtaaaagagaatgaatgtatgattgtgaactgtgaagagaatgatgcaggatcctatttagttactgaataatacagagtattcaatgcatgttgtatgtgccaccaagttactattaactgtttttggaattgaagactctgtatagtcaatagttgtgaaattcttctcaggctccttaaaccctcgctttgttgtaaaagctaaaataaacagcatgctatattgtaattgtatttcttgctgaccaaatctactaaatgctattgatttctctctgattactaaaacacattgtttattctcagtagtttcccccaaaatgcttttttctttgctgaacttaaattgaatcaaaccacaagtttaaaatcacatgaaagtgtgtttccatgttgacctttgtttaaaaaaaaaaaaaagtgcttattttctctgtcgctaagctcctccagttttgcttttgtcagaattaaacttaacagtaga

SEQ ID NO: 198586 - DNA, 2781 bp, Homo sapiens
  Payload ID: 19190
  Gene Name: vacuolar protein sorting 13 homolog A (S. cerevisiae)
  ENST ID: ENST00000419472
  CDS Start-End: 1-1151
agtcacgtttttcaggggaaggcaaaaactggagttccctaataaatctgcactgtcagcttgagctagaagtgcattattataatgaaatgtttggtgtatgggagcctttgcttgaacccttagaaattgatcagactgaggattttagaccatggaatcttggtatcaagatgaaaaagaaagcaaaaatggccattgttgagtcagatcctgaagaagaaaactacaaagtgccagaatataaaactgtcatcagtttccattcaaaagaccaattaaacattacattatccaaatgtggtcttgtaatgttaaacaatttagtcaaggcatttacagaagctgccactggatcttcagctgacttcgtaaaggatctagcaccatttatgattttaaattcccttggacttactatttctgtttcgccaagtgattcttttagtgtactcaacattcctatggcaaaatcatatgtattgaaaaatggagaaagtttaagtatggattatatccgaaccaaggacaatgatcatttcaatgcaatgaccagcctaagcagcaaactcttcttcattcttcttacacctgttaaccattctactgctgataagattcctttaacaaaagtgggacgacgtctgtacactgtaagacacagagagtctggcgttgaaagatctattgtttgtcaaattgatacagtagaaggaagtaagaaggtcacaattcgctccccagtgcagataagaaatcatttttcagtcccactgtctgtttacgaaggggataccttattgggaactgcctcacctgaaaatgaattcaacataccattaggatcttaccgatcattcatttttctgaagccagaagatgagaactatcaaatgtgtgaaggaattgactttgaagagattataaaaaatgatggtgctcttctaaagaagaaatgtagatctaaaaacccttctaaggaatcatttctcattaatattgttccagaaaaagataatttaacatctctatcagtgtattcagaagatggttgggatttaccatacataatgcatttgtggccacctatcctgctccgaaatcttcttccttacaaaattgcttattatatagaggtatcggcaaactgatttagtgccttcctgtttttgattttgtagtttcagttttttaagattaagatcaataaaaactattttaaagatctaataaaaattagaatactagtaaagaataggtaatgcagatattcttttgcaacaagtatgagaattattattgaaataacatttaagaactagacttcagtgacaaaaaagcatgctacattatgttgtattcttttagtgctgattttcttaaaagattgtatactttgtgaagttgctttttttctttcatactctgtgtggtttcttcctgttgttataggaatccatacatcttaagattttatgtaaatatttcatttgcagtgcttatcaaatggaagaaagtagttcttcattgtcatctattataggtttattttacttttagaattaccatttgctttttaaaaaaatttttttgagactaggtttctctctgttgctcagactggagtgcaatgatgcgatcatagctcactgtagtctcaaacttctaggctcaagtgatccttccacctcagccccccgagtagctgggactacaggtgcatgccatgcctggataatattttttaatttttaattttgtagggacagggactcactatggcttgtcttgaactcttgggctcaagtgatcctcccgcttcggcctcccaaagtgctggaattacaggcatgagccagtacacccagccgtttacacttttctgatacatgtctcttttggaggaaaaagttaacatatttatggttttaaatgtgtatttccatattgaataacaaattatcatagtggttaagaatttgtactttgctgtcaggtagatttgaaattgcatcctagctctgtcatttgctagctgtatgttcttaagcaggctttattgcttttctaaatcttttgctgtggtctgtaaaatgagaataataataaaatttgcttggttaagacatgggggaaatcaaattagattgtgtatgtaaaggatttggtacagtgcctcccagacacagggttgccatttatttatcactctagcactaccaccaccattgttattttgtggaatattatttaacttgtaaagaatcaagaactccttacttttgctttaattaatttaaaatcatgagatgaagagattcctatattataataataggaaaagaataggatagagatgctggaaaaactggtgagatattcagatgtactgtcaatttatatttctgttctcatagaacttttaattggatgctgttagtgatcacattctgtctgccagtttccaaagggtgtgatcagtttttagaaagacaattgagccatggtgtggggaagggactagaggggacaagagcggttaggggactcttaaactgagacgtcatatagtgacatgaactaagataatagaagggagggtcgagggaaatgagcagtttggagagatacatatgacgtaataatataaacagtgattggaaatgggtgatgagggattgtggaggtagtagggattacttattttggattaccatcagtttttgcccacattttacgttgttttgtagttttcaaaataaaaatcacgagtggttaaga

SEQ ID NO: 198587 - DNA, 2001 bp, Homo sapiens
  Payload ID: 19190
  Gene Name: vacuolar protein sorting 13 homolog A (S. cerevisiae)
  ENST ID: ENST00000493341
  CDS Start-End: 1-534
ctatattctatattggcttttatagataattttcaggcagctaaacaagccttggctgaggcaactgttcaggcagctggaatggctgctactggtgtaaaagaactcgcacaaaggagttccagaatggcactggatattaacatcaaagccccagttgtggtcatcccgcagtctccagtttctgaaaatgtttttgttgctgattttggactaattacaatgacaaatacctttcatatgataacagagagccagagctctcccccacctgttattgatttgataacaataaagctgagtgaaatgcgactatacagatctcgatttattaatgatgcataccaggaagtactggatctactcctgccattaaatcttgaggttgtggttgaacgaaatttatgctgggagtggtaccaggaagttccttgttttaatgtaaatgctcagctgaaaccaatggaggtagaatccatacagaatgtcctggtgatgctgccaacaatctgcaagtgcccagctgccttttgaggccaaccctctaggttcattcttagtcaagaagatataacaactatttttaaaacattgcatggcaatatatggtatgaaaaagatggtagtgcctcacctgctgtaacaaaagaccaatacagtgccactagtggagttactactaatgcttcacaccattcaggaggagcaactgtggtgacagctgctgtggtagaagtacattcacgtgccttactagttaagacaacactaaacataagcttcaaaactgatgatctcaccatggtgctgtatagtccaggtcctaaacaggcttcctttacagatgttcgtgatccttctctgaaacttgctgaatttaaattggagaatattataagtactttaaaaatgtatacagatggctcaacattttcttccttctcattaaaaaactgtattttagatgataaaagacctcatgtcaagaaagcaactcctcgaatgataggactgacagttggttttgacaaaaaagacatgatggatataaagtacaggaaagtcagagatggttgtgtgactgatgcggtctttcaagaaatgtatatttgtgcaagcgtagaatttctgcagactgttgcaaatgtctttcttgaggcctacaccacaggcactgctgtagaaaccagtgtgcaaacatggactgctaaggaagaagtacctacacaggaatcagtgaagtgggaaattaatgttattattaaaaatcctgaaattgtgtttgtagctgacatgacaaaaaatgatgctcctgctttagtcattacaacacaatgtgaaatttgctataaaggtaaccttgaaaatagtacaatgactgctgccattaaagatctccaagtgagagcctgcccgtttcttccagtcaagagaaaaggcaaaatcactactgttttgcagccctgtgacttgttttatcaaactactcagaaaggtacagatccacaagtgatcgatatgtcagtaaaatccctgacactaaaggtttcaccagttattataaatactatgattaccataacttcagcactgtatacaactaaggaaaccatcccagaagaaacggcttcttctactgcacatttatgggaaaagaaggatacaaagactttaaaaatgtggtttcttgaagaatcaaatgaaactgaaaaaatagctcccacaactgaattggtacccaaaggcgagatgataaaaatgaacattgattctatttttatagttcttgaggctggaattggtcatagaacagtacctatgcttctggcaaagtcacgtttttcaggggaaggcaaaaactggagttccctaataaatctgcactgtcagcttgagctagaagtgcattattataatgaaatgtttggtgtatgggagcctttgcttgaacccttagaaattgatcagactgaggattttagaccatggaatcttggtatc

SEQ ID NO: 198588 - DNA, 324 bp, Homo sapiens
  Payload ID: 19190
  Gene Name: vacuolar protein sorting 13 homolog A (S. cerevisiae)
  ENST ID: ENST00000467124
  CDS Start-End: 1-125
gattgcgcattgaagcaaaggaacgagtgaagtctgtatttcatgccagagagtttggaaaaataattaacttcaagaccccagaggatgccagggtaaatataataaatcttttatttaaataggagctgctcacttcaaaatcattggatcctcacaaagctacaagaagcaagagaaccttctccgagcctctgacagagaacactgcctgaagacacacagcaataagtgattacagctcctagactaccttccaaaacctgtttgggaagcatattacagaaatgatttcaagtaccctgtattctggatgctaaaaaa

SEQ ID NO: 198589 - DNA, 1155 bp, Homo sapiens
  Payload ID: 19190
  Gene Name: vacuolar protein sorting 13 homolog A (S. cerevisiae)
  ENST ID: ENST00000484581
  CDS Start-End: 436-768
ttaaaatgtgtttgcatgggtatgtgtgtgtatgattcctgtgtccttcattgtgtctgaatgttgacagctgagttgttgtcctgtgggtgtagtatagtgtgttcttaaacatttcaggtatttttgaatttatctatgttgtctttgaatcttttacagggattctataactgccgtcatgtaagttgttacagaagggaggctgtttttgtgtcttgtatatttcttttctttcagaaattacagatgtttataattagcttcaaacactgccttaatagcaattggaagataactgccgtcagccgacgtggtctttccctttacttcaggaggagaatgactactaatctggaagaaaggtcttactatagcagtcagatcaccagagtagtgccgaacacttcctggcttcatctgaaaatttgagtcatggaaaatggaagatttgcaaaatacaaatattttacccatgtcatgatcaataagacagatatgctaatgataaccagacgtggtgtattgtttgtaacaaagggaacatttggacaactcacgtgtgagtggcagtatagttttgatgaatttaccaaagagccattcattgttcatgggagaagattgcgcattgaagcaaaggaacgagtgaagtctgtatttcatgccagagagtttggaaaaataattaacttcaagaccccagaggatgccaggtggatcctcacaaagctacaagaagcaagagaaccttctccgagcctctgacagagaacactgcctgaagacacacagcaataagtgattacagctcctagactaccttccaaaacctgtttgggaagcatattacagaaatgatttcaagtaccctgtattctggatgctaaaaaacaaaaacaaacaaaaaaacaaaaacaaaaaaacaaaaccagaatcaggtaaaacagctatgtgattaaaatattttaattcttcagcaattacccggttttctaaattgaatcatgcatctatttataattctaattattttgtaaaagaagacaaaattatgaatcttaagtatttgctccatctttttctctgtaatggtggagaggctgcccataattcatctccacatggagccaagtttaatgtttctagttcaca

SEQ ID NO: 198590 - DNA, 2822 bp, Homo sapiens
  Payload ID: 19191
  Gene Name: vacuolar protein sorting 13 homolog B (yeast)
  Uniprot ID: Q7Z7G8
  ENST ID: ENST00000355155
  CDS Start-End: 112-2703
ggcgcggtacaggagcagcactgccggcgggggcgggtgccagggacttggaggtggaggggacgcggcggtactctggcgtcttccgacttcgactccttaccttaaaagatgctggagtcatatgtaactccaattttaatgagctatgtgaatcgctacatcaagaacttaaagccgtcggatctacagctttcactatggggtggagacgtggtactcagcaagctcgagttaaagttggatgtgctggaacaggaactgaaattaccattcacttttttaagtggacatattcatgaattgaggattcatgtaccatggacaaaactgggttcagaaccagtggtaattaccatcaatactatggaatgcattttgaaacttaaggatgggatacaggatgaccatgaaagctgtggttctaattctaccaaccgtagtactgctgagagcacaaaatcatcaatcaaaccgcggagaatgcagcaggctgctcctacagatcctgacttaccaccaggttatgtgcagagtctgattagacgagttgtaaataatgtaaacattgtgataaataatctcatactaaaatatgttgaagatgatatcgtcctttccgtcaatatcacttctgcagaatgttatacagtaggtgaattatgggatcgtgcattcatggatatttctgcaactgatttggtgctgagaaaggttatcaatttttctgactgtacagtttgtcttgataaacggaatgccagtggtaaaatagaattttaccaggatcctttattatacaaatgttccttcagaactcgtcttcattttacatatgaaaacctaaattccaagatgccatctgttattaaaattcatactttagtggaaagtttgaaactttctatcacagatcaacaactgcctatgtttattcgtataatgcaacttggaattgctctttactatggagaaataggcaattttaaagaaggcgaaatagaggaccttacttgtcataataaagatatgctaggaaacattacaggttctgaagatgaaacaagaatagatatgcaatatcctgctcagcataaaggtcaagagttatattcacagcaagatgaggagcagccacagggatgggtgtcatgggcctggtcctttgtgcctgcaattgtgagttatgacgatggcgaggaagactttgttgggaacgatcctgcatcaaccatgcatcaacaaaaagcacagactttgaaggatcctattgtttctataggattttattgcacaaaggcaacggtgactttcaaactcacagaaatgcaagttgagagtagttattacagtccacagaaagtaaaatctaaagaagtattgtgttgggaacaagaaggaactacagttgaggcccttatgatgggagaacctttctttgattgccagattgggtttgttggttgcagagccatgtgccttaaaggaattatgggtgttaaagattttgaagagaatatgaatagaagtgaaactgaagcctgtttcttcatttgtggtgacaatttgagtacgaaaggtttcacataccttacaaattcattgtttgattaccgaagcccagaaaataatggtactcgcgcagaatttatcttggattcaactcatcataaggagacatacactgagatagctggaatgcaacggtttggggctttttatatggattacctgtatacaatggagaacactagtggcaaaggttccacaaatcaacaagacttttcttcagggaaaagtgaagatttgggaacagttcaggagaagtccaccaaaagccttgttataggtcctcttgattttcgtttggatagcagtgcggtgcataggattttgaaaatgattgtgtgtgccttggaacatgaatatgaaccatatagcaggctaaaatcagatattaaggatgaaaatgaaacaatactgaatcctgaagaggtggctcttctggaggaatatattcctactcgacatacaagtgttactctcctcaaatgtacctgcacaatttccatggctgaattcaacttgctggaccatttactacctgtcattatgggagaaaagaactcaagtaacttcatgaatactacaaacttccagtctcttcggcctttgccatccattcgaatattggtggataaaattaatctggaacattcagtgccaatgtatgctgaacagttggtgcatgtggtcagcagccttactcaaccttctgataacctgcttcattattgttatgtacactgctatcttaagatatttggtttccaggcaggactgacgtctttggattgcagtggatcttactgcttacctgtaccagttattccctctttcagcactgctctttatgggaaacttctgaaactccccacatgctggaccaaaagatctcagattgctataactgaaggtatatttgaacttccaaatctcacaattcaagctacaagagcacagacacttctcttgcaagcaatatatcaaagttggtctcatcttggaaatgtcagctcttccgcagtgattgaagctttgataaatgaaatcttcctaagtatagagattgggtcttgctatgttgcccaggttgatcttgaactcctggcctcaaatgatcctcccacctcaacctcctgaagtgccgggattggaggcccaagccactgtgcctggccctttataaattatgttataatttcatgtaatacataattgtatagtcaaaatggctcacatattaaatattctttatacaa

SEQ ID NO: 198591 - DNA, 14019 bp, Homo sapiens
  Payload ID: 19191
  Gene Name: vacuolar protein sorting 13 homolog B (yeast)
  Uniprot ID: Q7Z7G8
  ENST ID: ENST00000357162
  CDS Start-End: 112-12105
ggcgcggtacaggagcagcactgccggcgggggcgggtgccagggacttggaggtggaggggacgcggcggtactctggcgtcttccgacttcgactccttaccttaaaagatgctggagtcatatgtaactccaattttaatgagctatgtgaatcgctacatcaagaacttaaagccgtcggatctacagctttcactatggggtggagacgtggtactcagcaagctcgagttaaagttggatgtgctggaacaggaactgaaattaccattcacttttttaagtggacatattcatgaattgaggattcatgtaccatggacaaaactgggttcagaaccagtggtaattaccatcaatactatggaatgcattttgaaacttaaggatgggatacaggatgaccatgaaagctgtggttctaattctaccaaccgtagtactgctgagagcacaaaatcatcaatcaaaccgcggagaatgcagcaggctgctcctacagatcctgacttaccaccaggttatgtgcagagtctgattagacgagttgtaaataatgtaaacattgtgataaataatctcatactaaaatatgttgaagatgatatcgtcctttccgtcaatatcacttctgcagaatgttatacagtaggtgaattatgggatcgtgcattcatggatatttctgcaactgatttggtgctgagaaaggttatcaatttttctgactgtacagtttgtcttgataaacggaatgccagtggtaaaatagaattttaccaggatcctttattatacaaatgttccttcagaactcgtcttcattttacatatgaaaacctaaattccaagatgccatctgttattaaaattcatactttagtggaaagtttgaaactttctatcacagatcaacaactgcctatgtttattcgtataatgcaacttggaattgctctttactatggagaaataggcaattttaaagaaggcgaaatagaggaccttacttgtcataataaagatatgctaggaaacattacaggttctgaagatgaaacaagaatagatatgcaatatcctgctcagcataaaggtcaagagttatattcacagcaagatgaggagcagccacagggatgggtgtcatgggcctggtcctttgtgcctgcaattgtgagttatgacgatggcgaggaagactttgttgggaacgatcctgcatcaaccatgcatcaacaaaaagcacagactttgaaggatcctattgtttctataggattttattgcacaaaggcaacggtgactttcaaactcacagaaatgcaagttgagagtagttattacagtccacagaaagtaaaatctaaagaagtattgtgttgggaacaagaaggaactacagttgaggcccttatgatgggagaacctttctttgattgccagattgggtttgttggttgcagagccatgtgccttaaaggaattatgggtgttaaagattttgaagagaatatgaatagaagtgaaactgaagcctgtttcttcatttgtggtgacaatttgagtacgaaaggtttcacataccttacaaattcattgtttgattaccgaagcccagaaaataatggtactcgcgcagaatttatcttggattcaactcatcataaggagacatacactgagatagctggaatgcaacggtttggggctttttatatggattacctgtatacaatggagaacactagtggcaaaggttccacaaatcaacaagacttttcttcagggaaaagtgaagatttgggaacagttcaggagaagtccaccaaaagccttgttataggtcctcttgattttcgtttggatagcagtgcggtgcataggattttgaaaatgattgtgtgtgccttggaacatgaatatgaaccatatagcaggctaaaatcagatattaaggatgaaaatgaaacaatactgaatcctgaagaggtggctcttctggaggaatatattcctactcgacatacaagtgttactctcctcaaatgtacctgcacaatttccatggctgaattcaacttgctggaccatttactacctgtcattatgggagaaaagaactcaagtaacttcatgaatactacaaacttccagtctcttcggcctttgccatccattcgaatattggtggataaaattaatctggaacattcagtgccaatgtatgctgaacagttggtgcatgtggtcagcagccttactcaaccttctgataacctgcttcattattgttatgtacactgctatcttaagatatttggtttccaggcaggactgacgtctttggattgcagtggatcttactgcttacctgtaccagttattccctctttcagcactgctctttatgggaaacttctgaaactccccacatgctggaccaaaagatctcagattgctataactgaaggtatatttgaacttccaaatctcacaattcaagctacaagagcacagacacttctcttgcaagcaatatatcaaagttggtctcatcttggaaatgtcagctcttccgcagtgattgaagctttgataaatgaaatcttcctaagtataggtgtgaaatctaagaatcccctgccaactcttgagggctcaatccagaatgttgaattgaagtactgcagcacatcattggtcaaatgtgcctctgggaccatgggatcaataaaaatttgtgccaaagccccagttgatagtggaaaagagaagttgattcccttgcttcagggtccttctgacactaaagaccttcatagcaccaagtggctcaatgagagtagaaagccagagtctctcttagctccagatttgatggccttcacaatccaagttccacaatatattgactactgccacaattccggtgctgtacttctttgcagtatacaaggactagcagttaatattgacccaatcttatatacgtggctcatctatcagcctcagaaacgaacaagtagacatatgcaacagcagcctgtggtagctgttcctcttgttatgccagtttgtagaaggaaagaggatgaggtgtctattggaagtgcccccttggcaaagcagcaatcatatcaggcctctgaatatgccagcagccctgtaaaaacaaaaacggtaacagaatcccgcccattgtcagttcctgttaaagccatgttgaatatatctgaaagctgtagaagtcctgaagaaagaatgaaggaatttattggaattgtttggaatgcagtgaagcatctcacactacagcttgaagtacaatcttgttgtgtgtttattccaaatgatagcctgccttccccaagtacaattgtatctggtgacattcctggaacagtaagaagttggtaccatggacaaaccagcatgccgggaacacttgtcctctgtttgcctcaaataaagattattagtgctgggcacaagtatatggaacctctgcaggagattccatttgttatcccacgacccatccttgaagaaggtgatgcttttccttggacgatcagcttgcataatttcagcatatatacccttcttggaaaacaagtgacactttgcctagtggaacctatgggttgcacctccactctagctgtcacgtctcaaaaactgcttgctacgggacctgatacacgacattcatttgttgtctgtctccatgttgacctagagtcactagagataaaatgctctaatccccaggtccagctcttctatgaactaactgatatcatgaataaggtctggaacaagattcagaagagaggcaatctcaacctatctccaacctctccagagaccatggcagggcctgttcctacttctccagttagaagcagtataggcacagctcctccagataccagcacatgcagcccatctgctgacattgggactactactgagggagattctatacaagcaggtgaggaatcaccattctcagattctgtgaccttggaacaaactacaagtaatattggaggaaccagtggacgtgttagtttatggatgcagtgggtgcttcccaaaattactataaagctctttgctccagatcctgaaaataaaggcacagaggtttgtatggtcagtgaactagaagatctcagtgcttccatagatgtccaggatgtatataccaaagtgaaatgtaaaatagagagtttcaatattgatcactatagaagcaggccaggggaaggttggcagtcaggacattttgaaggagtatttctacaatgcaaagaaaaatctgtgacaactacaaaacttctagatggcactcatcagcagcatggattcctctctctgacatacacaaaagctgtaacaaaaaatgtccgccacaagttaacatcaagaaatgagcgaagaagttttcataagttatctgaaggcctaatggatggttctcctcattttcttcatgaaattcttctttcagcacaagcttttgatattgttctttattttcctttacttaatgccattgcaagtatatttcaagcaaaactaccaaagacccaaaaagagaaaagaaaatctcctggtcagcccatgaggacccatacactgacatcccgcaatttacctttgatttatgtcaacacaagtgtaatcagaatttttattccaaaaacagaagaaatgcagccaactgttgaagctaatcaggcagcaaaagaagacactgtggttttgaagattggctctgttgccatggctccccaggctgacaatccccttggcagatctgtccttaggaaagatatttaccagagagccttgaacttaggaattcttcgagatcctggatcagaaatcgaagacagacaataccaaatagatctgcagtccatcaatattggtactgcacagtggcatcaactaaaaccagagaaggaaagtgtctcaggaggggtggtaacagagactgaaaggaattctcaaaatccagcccttgagtggaatatggccagcagcatacggcggcatcaagaaaggagagcaattttgacccccgttttgacagatttttctgtccgaataactggagcacctgctgtcattttcaccaaagtagtttctccagaaaatttgcatactgaggagattttagtgtgtggccattccttagaagtgaatataaccacaaacctggacttcttcctaagtgtggctcaagttcaactcttacatcagttaatagtagcaaatatgactggactggaaccatcaaacaaggctgcagagatctctaaacaagaacagaaaaaagtggatatatttgatggaggcatggctgaaacctcatctcgctacagtggtgctcaggatagtggaattggcagtgacagtgttaaaatcagaatagtgcaaatagagcagcacagtggtgccagtcagcatcgcattgcccgtccctcacgccagtcatcaattgtaaaaaatctaaattttattccctttgacatatttattactgcaagtagaatctcactaatgacctattcctgtatggccttatccaaatcgaaatcacaagaacagaagaataatgaaaaaacagacaagagttcattaaatctcccagaagttgattcagatgttgctaagcccaaccaggcatgtatttccacggtgacagcagaagatctcttaaggagcagcatttcttttccttcagggaaaaaaataggggtcctctctcttgaaagtcttcatgcatccacaaggtcatctgctagacaagcacttggtataactattgttcggcagcctggtcgaagaggaactggtgacttacagctagagccttttctgtactttattgtgtcccagccttccttgcttctgagttgtcaccacagaaagcagcgagtggaagtatccatttttgatgctgtgcttaaaggggtggcctctgattacaaatgtatagatcctgggaagactctgcctgaagcccttgattattgcactgtttggctacagacagtgcctggagaaatagacagcaaaagtggtattccaccttcctttataacactacagattaaagactttctgaatggaccagcggatgtcaatttggatatatcaaagcctttgaaagcaaacctgagtttcaccaaactggatcagataaacctttttttaaagaagataaaaaatgcacacagtttggcacatagtgaagagacttcagccatgtccaacaccatggtgaataaggatgatcttccagtctccaaatattaccgtggaaagttgtctaaacccaaaattcatggtgatggagtgcaaaagatttcagctcaagaaaacatgtggagagctgtttcctgctttcaaaaaatttctgttcaaactactcagattgtgatctccatggaaactgtaccccataccagcaaaccatgcctgttagcatctctctcaaacctcaatggaagccttagtgtcaaggcaacacaaaaagtacctggcataattcttgggtcatcatttctactcagtataaacgattttctccttaaaacaagtctcaaagaaagaagccgcattctgataggaccatgttgtgctactgccaatctggaagctaagtggtgtaaacacagcgggaatccaggcccagaacaatccataccaaaaatatccattgacttaagaggaggtctactacaggtcttctggggtcaagaacatttgaattgtttagttcttctacatgaattactcaatggataccttaatgaggagggaaattttgaagtacaagtttctgaaccagtgcctcaaatgtcatctcctgtggaaaagaatcagacatttaaaagtgaacaaagttcagatgacctacggacaggtctatttcagtatgtacaggatgctgaatctttgaaattgcctggggtctatgaagtcttattttataatgaaactgaagattgcccagggatgatgttatggagatatccagaacctagagtactcacccttgtacgaataactcctgtaccttttaacaccacagaggatccagatattagcacagcagaccttggtgatgtgctacaggttccttgtagcttggaatactgggatgaactccagaaggtttttgttgcatttagagaatttaatctgtctgaaagcaaagtttgtgaactgcagttgccggatatcaatctcgtgaatgaccagaagaaattagtatcttcagatctttggagaattgtcttgaacagcagtcaaaatggagctgatgaccaaagctctgcaagtgagtctggttctcaaagcacttgtgatccacttgtgactccaacagccctggctgcctgtaccagagttgactcctgctttaccccatggtttgtcccatccctttgcgtttctttccagtttgctcacctggaattccatctttgtcatcaccttgaccaactaggcacagctgcaccacagtacctacagccatttgtttccgacagaaatatgccatctgaactagaatacatgattgtttccttcagagaaccacacatgtatcttcgacagtggaataatggttctgtctgtcaggagatccagttcttagctcaagcagactgtaaacttctagagtgcagaaatgtcactatgcaaagtgtggtgaaacccttcagcatcttcgggcagatggcagtttccagcgatgtagtggaaaagctgcttgactgcaccgtgatagttgattctgtatttgtaaaccttggacagcatgtagtccattcactaaacactgcaatacaagcttggcaacagaacaaatgccctgaggtagaggagttggtcttcagccattttgtgatctgtaatgacacacaggagacactgcggtttggccaggtggatactgatgaaaatattctgctggcgagtctccacagtcaccagtacagctggcgctctcacaaatccccacagctgttacacatctgtattgaaggttggggcaactggcgttggtcagagcctttcagtgtggaccatgccgggacttttattagaacaattcagtacaggggtcgaactgcttctctcatcatcaaggttcagcaactcaatggagtacaaaaacagattatcatctgtggaagacagatcatctgtagttacttgtctcaaagcatagaactaaaagtcgttcagcattacattggtcaagatggacaagctgtagttcgggaacattttgactgcctcacagccaaacagaaattgccttcgtacatactagaaaacaatgaactgacggagctgtgtgtgaaggccaaaggagatgaagactggtcaagagatgtgtgcctggaatccaaagcccctgagtacagcattgtcattcaggtgccatcttcaaacagttccattatttatgtctggtgcacagttttgactttagaacccaactctcaagtgcaacaacgaatgattgtgttcagccctctttttatcatgaggagtcatcttccagaccccattatcatacatttggagaaaaggagtctgggattgagtgaaacacaaattattccaggaaaagggcaggaaaaaccactgcaaaacatagaacctgaccttgtacatcacctgacattccaagcaagagaagaatatgatccttcagattgtgcagttcccatctcaacatccctcattaagcaaatagccactaaggtacaccctggaggcacagttaatcagatccttgacgaattctatgggccagaaaagtcgcttcaacccatatggccctataataagaaggattctgacaggaatgaacagctaagtcagtgggatagcccaatgcgagtgaagctgtcaatctggaagccatatgttagaactttgttgatagaacttctgccctgggccctgcttatcaatgaatccaaatgggacctctggctatttgaaggagagaaaattgttctacaggttcctgctggcaaaattattattcctcctaattttcaggaagcttttcaaattggaatatactgggcaaatacaaacactgtgcacaagtcagtagcaattaaactggtccataacctgacatctccaaagtggaaagatggaggtaatggtgaagttgtgacactggatgaagaagcgtttgttgatactgaaataagacttggtgcttttccaggacatcagaagttatgtcagttctgcatttcctccatggtacagcaaggtatacaaattattcagattgaagacaagactacaataatcaataatacaccatatcaaatattttataaaccacagctatctgtctgcaatccccattctggaaaggagtattttcgtgttccagacagtgctacttttagcatttgcccaggtggagagcagcctgctatgaaatccagctcccttccttgctgggacttgatgcctgacatcagtcagtcagtactggatgcatccctgcttcagaaacagatcatgctgggcttttctcctgccccaggtgctgacagctcacagtgctggagcctgccagctatagttagaccagagtttcccagacagagtgtggcagtacccctcgggaatttccgggaaaatggattctgtaccagggctatagtgctgacatatcaagaacacctcggagtgacttatttaaccctctcagaagaccctagtcctcgagtaattatccacaatagatgtccagtaaaaatgcttataaaggaaaacattaaagatattccaaagtttgaggtttattgcaaaaaaattccctccgagtgctcaattcatcatgagctgtatcatcagatttccagttatccggactgcaagaccaaagacttacttccaagcctacttttgagagttgaacctctagatgaagtaacaactgagtggagtgatgccattgacatcaacagtcagggaacacaggttgtgttcctgactggctttggctatgtgtatgtggatgttgtacatcagtgtggcacagtcttcatcactgtggccccagaaggaaaagcaggacctattttaaccaataccaacagagcgccagagaagattgttacatttaaaatgttcatcactcagttaagcctggcagtgtttgatgacctcacccaccacaaagcatcagctgagcttctgagactcacactggacaacatttttctctgtgtggccccgggagctggtcccctccctggggaagagcctgtggctgcgttgtttgaactttactgtgtggagatctgctgtggggacctgcagctagacaaccagctttataacaagtccaatttccactttgctgtcttagtctgccagggagaaaaagcagaacccattcagtgttccaaaatgcagagtctcctcatatccaacaaagagttggaagaatacaaggaaaaatgttttatcaaactttgcatcaccttaaatgaaggcaagagcatcctctgtgatattaatgagttcagctttgaattaaaacctgctcggttatacgtggaagacacatttgtatactacatcaagactttgtttgacacctaccttcctaacagcaggttggctggtcactccacacacctctccgggggtaaacaggtgttgcccatgcaggtcacacagcacgccagggccttggtgaatcctgtgaagttacggaaactggtgatccagccagtaaatttgctcgtcagcatccacgcttccctcaagctgtacatagcctcagaccacactcctctctccttctcggtgtttgaaagaggacccatcttcaccactgcgaggcagcttgtgcacgccctggcaatgcactatgccgctggggccctttttagagcaggctgggtagttgggtctctggatattcttggcagccctgcaagcctggtgagaagcatcgggaacggggtcgccgacttcttcaggcttccgtatgaggggctgacccggggccctggagccttcgtgagtggcgtctccagagggaccacatcgtttgtaaagcacatctccaaaggtaccctcacatccatcaccaacctcgccacaagcctggcccggaacatggaccggctctcactggatgaggagcactacaaccggcaggaggagtggcggcggcagctccccgagagcctgggcgaggggcttcgacagggcctgtcccggctgggcatcagcctgcttggtgcaattgctggtatagttgatcagccgatgcagaacttccagaaaacatctgaggcacaggcttcagcaggacacaaggccaagggtgtcatctcgggtgtggggaaaggaatcatgggggtgttcacaaagcccatcggaggagctgctgagctggtgtcacagactggctatggtattttacatggagctggactttctcagcttcccaaacagcgccatcagccaagtgatctacatgctgaccaggctccaaacagccatgtcaaatatgtctggaaaatgcttcagtctctgggcagaccagaagtccacatggccctggacgtggttctggtgaggggctcaggccaggagcatgaagggtgcttgctgctgacatcagaagtgctcttcgtggtgagtgtcagtgaggacacacagcagcaggccttccccgtcacagaaatcgactgtgcacaggacagcaagcagaacaacttactcacagtgcagctcaagcagccaagagtggcctgtgatgtggaggtagatggagtccgagagagactgtcagagcaacagtacaacagactggtggactacatcacaaagacatcttgtcacctggcccccagctgttcttccatgcaaataccatgccctgtggtggctgcagaacctcccccctccactgttaaaacataccattacctggttgatccacattttgctcaggtcttccttagtaaatttaccatggtgaaaaataaagccctgaggaaagggtttccttgagtcccctctgaggtgtttattcctgcttgtgtgatttagtttttgggtttctttgagacagggtctcactgcattgcccttgctgacctcaaattctggggttcaagcaatcctcccacctcaacccacaagtagctacgactgcaagcacctgccaccataaagggctgcattttgccaccataaagggctgcatttttttaaaaagcctaggcagctctaacatcatctgatatggacacaaggccaacagtttccttatttacatccttacctctaaaagatacttcaaagtgacaaaaacgtgttccttccccacttagagacaatgattaacagggccctatatgttcttaccacatacagaggatgcatttatttttgctctatgacacttgcaaaaatctctactgtaattaatttgggtctattattaactctctgttccatcatagaatgtggccaggccttacaatggagagccagagttaaaacttcaagttgcatctgtttttgggctgagtcaccacctttgcctcatgctcctttgtctgcaaaggcctaggattctttctttaaatgaaatgcttaggactttgtggcttgttacatttgtcatttaactgcagtgctattctttgaaagctgctatgtgtattttctctgaagtctgcattttactaaaatttacaacagtctgatgattgattgattactgtccaggtacattttagaaaaagtgttcttcttccagtttgttttactaagcaaactttgagtaaatcctttgtcctatattgaatccagtcccaaagtgttcaggtgagtttctctagttccataaacaaaacatacatagtgggaactccctggtatgccatagagcacacaagaaccccaatattaatgctaacaattataccagtccattttgtttattctgtggaattgacttgacaaagcatgaagatattcccagtgtctgtctgataatattttgcatctaagaatgggtttgactcaagatcttgggttaccaagatgtcttaaatgttcagtaaatatctttcttacagtccagtagcttagagcatgtttgctgattgatattacatttaaacttggggctacagcttgttacctagaattttgagatactaagagaatgcaattttaaatgcccactggttttatttgttttggagagagggtctcattctgtcacccaggctagagtacagtgggaacagtcatggctcactgcagcttaagctcactgcctgggctcaagtgatcttactccagcctcccaagcagctgggactacaccaccacaggtatgcaccaccatacctggctgatttttaaaattttttctagagatgaggtctcactatgttgcccagctggtctcatactcctcagttcacgcattcctcccacctccacctcccaaactgctgggattacaggtgtgagccaccatgcccaacacccactgatctttaactctcacatgttgggcataagaagtcactatataattgttactggaaagcaagacttaacgaacaattctgactatgaaaaatgtctctttcagtttgttctgtaaatatttagaaaagtgacagctgtcaacctcagagtaactatttctaaaaatgtaaatatgtattaatccttgtatcttttatggtaattttgcatattgatatgaattatataaaattgtttaaaataaaaggtgtccttgaattactgaccacccatagatgtctactgttaccaggttttacaatgcaaattttcactaatacctgggtttaatacagctcacatcactgaatgttacacatgagtttaaatgggtaatatacaggttttgttataataaagttactgattaaatta

SEQ ID NO: 198592 - DNA, 14094 bp, Homo sapiens
  Payload ID: 19191
  Gene Name: vacuolar protein sorting 13 homolog B (yeast)
  Uniprot ID: Q7Z7G8
  ENST ID: ENST00000358544
  CDS Start-End: 112-12180
ggcgcggtacaggagcagcactgccggcgggggcgggtgccagggacttggaggtggaggggacgcggcggtactctggcgtcttccgacttcgactccttaccttaaaagatgctggagtcatatgtaactccaattttaatgagctatgtgaatcgctacatcaagaacttaaagccgtcggatctacagctttcactatggggtggagacgtggtactcagcaagctcgagttaaagttggatgtgctggaacaggaactgaaattaccattcacttttttaagtggacatattcatgaattgaggattcatgtaccatggacaaaactgggttcagaaccagtggtaattaccatcaatactatggaatgcattttgaaacttaaggatgggatacaggatgaccatgaaagctgtggttctaattctaccaaccgtagtactgctgagagcacaaaatcatcaatcaaaccgcggagaatgcagcaggctgctcctacagatcctgacttaccaccaggttatgtgcagagtctgattagacgagttgtaaataatgtaaacattgtgataaataatctcatactaaaatatgttgaagatgatatcgtcctttccgtcaatatcacttctgcagaatgttatacagtaggtgaattatgggatcgtgcattcatggatatttctgcaactgatttggtgctgagaaaggttatcaatttttctgactgtacagtttgtcttgataaacggaatgccagtggtaaaatagaattttaccaggatcctttattatacaaatgttccttcagaactcgtcttcattttacatatgaaaacctaaattccaagatgccatctgttattaaaattcatactttagtggaaagtttgaaactttctatcacagatcaacaactgcctatgtttattcgtataatgcaacttggaattgctctttactatggagaaataggcaattttaaagaaggcgaaatagaggaccttacttgtcataataaagatatgctaggaaacattacaggttctgaagatgaaacaagaatagatatgcaatatcctgctcagcataaaggtcaagagttatattcacagcaagatgaggagcagccacagggatgggtgtcatgggcctggtcctttgtgcctgcaattgtgagttatgacgatggcgaggaagactttgttgggaacgatcctgcatcaaccatgcatcaacaaaaagcacagactttgaaggatcctattgtttctataggattttattgcacaaaggcaacggtgactttcaaactcacagaaatgcaagttgagagtagttattacagtccacagaaagtaaaatctaaagaagtattgtgttgggaacaagaaggaactacagttgaggcccttatgatgggagaacctttctttgattgccagattgggtttgttggttgcagagccatgtgccttaaaggaattatgggtgttaaagattttgaagagaatatgaatagaagtgaaactgaagcctgtttcttcatttgtggtgacaatttgagtacgaaaggtttcacataccttacaaattcattgtttgattaccgaagcccagaaaataatggtactcgcgcagaatttatcttggattcaactcatcataaggagacatacactgagatagctggaatgcaacggtttggggctttttatatggattacctgtatacaatggagaacactagtggcaaaggttccacaaatcaacaagacttttcttcagggaaaagtgaagatttgggaacagttcaggagaagtccaccaaaagccttgttataggtcctcttgattttcgtttggatagcagtgcggtgcataggattttgaaaatgattgtgtgtgccttggaacatgaatatgaaccatatagcaggctaaaatcagatattaaggatgaaaatgaaacaatactgaatcctgaagaggtggctcttctggaggaatatattcctactcgacatacaagtgttactctcctcaaatgtacctgcacaatttccatggctgaattcaacttgctggaccatttactacctgtcattatgggagaaaagaactcaagtaacttcatgaatactacaaacttccagtctcttcggcctttgccatccattcgaatattggtggataaaattaatctggaacattcagtgccaatgtatgctgaacagttggtgcatgtggtcagcagccttactcaaccttctgataacctgcttcattattgttatgtacactgctatcttaagatatttggtttccaggcaggactgacgtctttggattgcagtggatcttactgcttacctgtaccagttattccctctttcagcactgctctttatgggaaacttctgaaactccccacatgctggaccaaaagatctcagattgctataactgaaggtatatttgaacttccaaatctcacaattcaagctacaagagcacagacacttctcttgcaagcaatatatcaaagttggtctcatcttggaaatgtcagctcttccgcagtgattgaagctttgataaatgaaatcttcctaagtataggtgtgaaatctaagaatcccctgccaactcttgagggctcaatccagaatgttgaattgaagtactgcagcacatcattggtcaaatgtgcctctgggaccatgggatcaataaaaatttgtgccaaagccccagttgatagtggaaaagagaagttgattcccttgcttcagggtccttctgacactaaagaccttcatagcaccaagtggctcaatgagagtagaaagccagagtctctcttagctccagatttgatggccttcacaatccaagttccacaatatattgactactgccacaattccggtgctgtacttctttgcagtatacaaggactagcagttaatattgacccaatcttatatacgtggctcatctatcagcctcagaaacgaacaagtagacatatgcaacagcagcctgtggtagctgttcctcttgttatgccagtttgtagaaggaaagaggatgaggtgtctattggaagtgcccccttggcaaagcagcaatcatatcaggcctctgaatatgccagcagccctgtaaaaacaaaaacggtaacagaatcccgcccattgtcagttcctgttaaagccatgttgaatatatctgaaagctgtagaagtcctgaagaaagaatgaaggaatttattggaattgtttggaatgcagtgaagcatctcacactacagcttgaagtacaatcttgttgtgtgtttattccaaatgatagcctgccttccccaagtacaattgtatctggtgacattcctggaacagtaagaagttggtaccatggacaaaccagcatgccgggaacacttgtcctctgtttgcctcaaataaagattattagtgctgggcacaagtatatggaacctctgcaggagattccatttgttatcccacgacccatccttgaagaaggtgatgcttttccttggacgatcagcttgcataatttcagcatatatacccttcttggaaaacaagtgacactttgcctagtggaacctatgggttgcacctccactctagctgtcacgtctcaaaaactgcttgctacgggacctgatacacgacattcatttgttgtctgtctccatgttgacctagagtcactagagataaaatgctctaatccccaggtccagctcttctatgaactaactgatatcatgaataaggtctggaacaagattcagaagagaggcaatctcaacctatctccaacctctccagagaccatggcagggcctgttcctacttctccagttagaagcagtataggcacagctcctccagataccagcacatgcagcccatctgctgacattgggactactactgagggagattctatacaagcaggtgaggaatcaccattctcagattctgtgaccttggaacaaactacaagtaatattggaggaaccagtggacgtgttagtttatggatgcagtgggtgcttcccaaaattactataaagctctttgctccagatcctgaaaataaaggcacagaggtttgtatggtcagtgaactagaagatctcagtgcttccatagatgtccaggatgtatataccaaagtgaaatgtaaaatagagagtttcaatattgatcactatagaagcagccttggggaagagtgttggtctttggggcaatgtggaggtgtcttcctttcctgtactgacaagctgaacagacgcaccttgttggttcgacccatcagcaagcaggaccctttcagtaattgctctggcttctttccttctacaactacaaaacttctagatggcactcatcagcagcatggattcctctctctgacatacacaaaagctgtaacaaaaaatgtccgccacaagttaacatcaagaaatgagcgaagaagttttcataagttatctgaaggcctaatggatggttctcctcattttcttcatgaaattcttctttcagcacaagcttttgatattgttctttattttcctttacttaatgccattgcaagtatatttcaagcaaaactaccaaagacccaaaaagagaaaagaaaatctcctggtcagcccatgaggacccatacactgacatcccgcaatttacctttgatttatgtcaacacaagtgtaatcagaatttttattccaaaaacagaagaaatgcagccaactgttgaagctaatcaggcagcaaaagaagacactgtggttttgaagattggctctgttgccatggctccccaggctgacaatccccttggcagatctgtccttaggaaagatatttaccagagagccttgaacttaggaattcttcgagatcctggatcagaaatcgaagacagacaataccaaatagatctgcagtccatcaatattggtactgcacagtggcatcaactaaaaccagagaaggaaagtgtctcaggaggggtggtaacagagactgaaaggaattctcaaaatccagcccttgagtggaatatggccagcagcatacggcggcatcaagaaaggagagcaattttgacccccgttttgacagatttttctgtccgaataactggagcacctgctgtcattttcaccaaagtagtttctccagaaaatttgcatactgaggagattttagtgtgtggccattccttagaagtgaatataaccacaaacctggacttcttcctaagtgtggctcaagttcaactcttacatcagttaatagtagcaaatatgactggactggaaccatcaaacaaggctgcagagatctctaaacaagaacagaaaaaagtggatatatttgatggaggcatggctgaaacctcatctcgctacagtggtgctcaggatagtggaattggcagtgacagtgttaaaatcagaatagtgcaaatagagcagcacagtggtgccagtcagcatcgcattgcccgtccctcacgccagtcatcaattgtaaaaaatctaaattttattccctttgacatatttattactgcaagtagaatctcactaatgacctattcctgtatggccttatccaaatcgaaatcacaagaacagaagaataatgaaaaaacagacaagagttcattaaatctcccagaagttgattcagatgttgctaagcccaaccaggcatgtatttccacggtgacagcagaagatctcttaaggagcagcatttcttttccttcagggaaaaaaataggggtcctctctcttgaaagtcttcatgcatccacaaggtcatctgctagacaagcacttggtataactattgttcggcagcctggtcgaagaggaactggtgacttacagctagagccttttctgtactttattgtgtcccagccttccttgcttctgagttgtcaccacagaaagcagcgagtggaagtatccatttttgatgctgtgcttaaaggggtggcctctgattacaaatgtatagatcctgggaagactctgcctgaagcccttgattattgcactgtttggctacagacagtgcctggagaaatagacagcaaaagtggtattccaccttcctttataacactacagattaaagactttctgaatggaccagcggatgtcaatttggatatatcaaagcctttgaaagcaaacctgagtttcaccaaactggatcagataaacctttttttaaagaagataaaaaatgcacacagtttggcacatagtgaagagacttcagccatgtccaacaccatggtgaataaggatgatcttccagtctccaaatattaccgtggaaagttgtctaaacccaaaattcatggtgatggagtgcaaaagatttcagctcaagaaaacatgtggagagctgtttcctgctttcaaaaaatttctgttcaaactactcagattgtgatctccatggaaactgtaccccataccagcaaaccatgcctgttagcatctctctcaaacctcaatggaagccttagtgtcaaggcaacacaaaaagtacctggcataattcttgggtcatcatttctactcagtataaacgattttctccttaaaacaagtctcaaagaaagaagccgcattctgataggaccatgttgtgctactgccaatctggaagctaagtggtgtaaacacagcgggaatccaggcccagaacaatccataccaaaaatatccattgacttaagaggaggtctactacaggtcttctggggtcaagaacatttgaattgtttagttcttctacatgaattactcaatggataccttaatgaggagggaaattttgaagtacaagtttctgaaccagtgcctcaaatgtcatctcctgtggaaaagaatcagacatttaaaagtgaacaaagttcagatgacctacggacaggtctatttcagtatgtacaggatgctgaatctttgaaattgcctggggtctatgaagtcttattttataatgaaactgaagattgcccagggatgatgttatggagatatccagaacctagagtactcacccttgtacgaataactcctgtaccttttaacaccacagaggatccagatattagcacagcagaccttggtgatgtgctacaggttccttgtagcttggaatactgggatgaactccagaaggtttttgttgcatttagagaatttaatctgtctgaaagcaaagtttgtgaactgcagttgccggatatcaatctcgtgaatgaccagaagaaattagtatcttcagatctttggagaattgtcttgaacagcagtcaaaatggagctgatgaccaaagctctgcaagtgagtctggttctcaaagcacttgtgatccacttgtgactccaacagccctggctgcctgtaccagagttgactcctgctttaccccatggtttgtcccatccctttgcgtttctttccagtttgctcacctggaattccatctttgtcatcaccttgaccaactaggcacagctgcaccacagtacctacagccatttgtttccgacagaaatatgccatctgaactagaatacatgattgtttccttcagagaaccacacatgtatcttcgacagtggaataatggttctgtctgtcaggagatccagttcttagctcaagcagactgtaaacttctagagtgcagaaatgtcactatgcaaagtgtggtgaaacccttcagcatcttcgggcagatggcagtttccagcgatgtagtggaaaagctgcttgactgcaccgtgatagttgattctgtatttgtaaaccttggacagcatgtagtccattcactaaacactgcaatacaagcttggcaacagaacaaatgccctgaggtagaggagttggtcttcagccattttgtgatctgtaatgacacacaggagacactgcggtttggccaggtggatactgatgaaaatattctgctggcgagtctccacagtcaccagtacagctggcgctctcacaaatccccacagctgttacacatctgtattgaaggttggggcaactggcgttggtcagagcctttcagtgtggaccatgccgggacttttattagaacaattcagtacaggggtcgaactgcttctctcatcatcaaggttcagcaactcaatggagtacaaaaacagattatcatctgtggaagacagatcatctgtagttacttgtctcaaagcatagaactaaaagtcgttcagcattacattggtcaagatggacaagctgtagttcgggaacattttgactgcctcacagccaaacagaaattgccttcgtacatactagaaaacaatgaactgacggagctgtgtgtgaaggccaaaggagatgaagactggtcaagagatgtgtgcctggaatccaaagcccctgagtacagcattgtcattcaggtgccatcttcaaacagttccattatttatgtctggtgcacagttttgactttagaacccaactctcaagtgcaacaacgaatgattgtgttcagccctctttttatcatgaggagtcatcttccagaccccattatcatacatttggagaaaaggagtctgggattgagtgaaacacaaattattccaggaaaagggcaggaaaaaccactgcaaaacatagaacctgaccttgtacatcacctgacattccaagcaagagaagaatatgatccttcagattgtgcagttcccatctcaacatccctcattaagcaaatagccactaaggtacaccctggaggcacagttaatcagatccttgacgaattctatgggccagaaaagtcgcttcaacccatatggccctataataagaaggattctgacaggaatgaacagctaagtcagtgggatagcccaatgcgagtgaagctgtcaatctggaagccatatgttagaactttgttgatagaacttctgccctgggccctgcttatcaatgaatccaaatgggacctctggctatttgaaggagagaaaattgttctacaggttcctgctggcaaaattattattcctcctaattttcaggaagcttttcaaattggaatatactgggcaaatacaaacactgtgcacaagtcagtagcaattaaactggtccataacctgacatctccaaagtggaaagatggaggtaatggtgaagttgtgacactggatgaagaagcgtttgttgatactgaaataagacttggtgcttttccaggacatcagaagttatgtcagttctgcatttcctccatggtacagcaaggtatacaaattattcagattgaagacaagactacaataatcaataatacaccatatcaaatattttataaaccacagctatctgtctgcaatccccattctggaaaggagtattttcgtgttccagacagtgctacttttagcatttgcccaggtggagagcagcctgctatgaaatccagctcccttccttgctgggacttgatgcctgacatcagtcagtcagtactggatgcatccctgcttcagaaacagatcatgctgggcttttctcctgccccaggtgctgacagctcacagtgctggagcctgccagctatagttagaccagagtttcccagacagagtgtggcagtacccctcgggaatttccgggaaaatggattctgtaccagggctatagtgctgacatatcaagaacacctcggagtgacttatttaaccctctcagaagaccctagtcctcgagtaattatccacaatagatgtccagtaaaaatgcttataaaggaaaacattaaagatattccaaagtttgaggtttattgcaaaaaaattccctccgagtgctcaattcatcatgagctgtatcatcagatttccagttatccggactgcaagaccaaagacttacttccaagcctacttttgagagttgaacctctagatgaagtaacaactgagtggagtgatgccattgacatcaacagtcagggaacacaggttgtgttcctgactggctttggctatgtgtatgtggatgttgtacatcagtgtggcacagtcttcatcactgtggccccagaaggaaaagcaggacctattttaaccaataccaacagagcgccagagaagattgttacatttaaaatgttcatcactcagttaagcctggcagtgtttgatgacctcacccaccacaaagcatcagctgagcttctgagactcacactggacaacatttttctctgtgtggccccgggagctggtcccctccctggggaagagcctgtggctgcgttgtttgaactttactgtgtggagatctgctgtggggacctgcagctagacaaccagctttataacaagtccaatttccactttgctgtcttagtctgccagggagaaaaagcagaacccattcagtgttccaaaatgcagagtctcctcatatccaacaaagagttggaagaatacaaggaaaaatgttttatcaaactttgcatcaccttaaatgaaggcaagagcatcctctgtgatattaatgagttcagctttgaattaaaacctgctcggttatacgtggaagacacatttgtatactacatcaagactttgtttgacacctaccttcctaacagcaggttggctggtcactccacacacctctccgggggtaaacaggtgttgcccatgcaggtcacacagcacgccagggccttggtgaatcctgtgaagttacggaaactggtgatccagccagtaaatttgctcgtcagcatccacgcttccctcaagctgtacatagcctcagaccacactcctctctccttctcggtgtttgaaagaggacccatcttcaccactgcgaggcagcttgtgcacgccctggcaatgcactatgccgctggggccctttttagagcaggctgggtagttgggtctctggatattcttggcagccctgcaagcctggtgagaagcatcgggaacggggtcgccgacttcttcaggcttccgtatgaggggctgacccggggccctggagccttcgtgagtggcgtctccagagggaccacatcgtttgtaaagcacatctccaaaggtaccctcacatccatcaccaacctcgccacaagcctggcccggaacatggaccggctctcactggatgaggagcactacaaccggcaggaggagtggcggcggcagctccccgagagcctgggcgaggggcttcgacagggcctgtcccggctgggcatcagcctgcttggtgcaattgctggtatagttgatcagccgatgcagaacttccagaaaacatctgaggcacaggcttcagcaggacacaaggccaagggtgtcatctcgggtgtggggaaaggaatcatgggggtgttcacaaagcccatcggaggagctgctgagctggtgtcacagactggctatggtattttacatggagctggactttctcagcttcccaaacagcgccatcagccaagtgatctacatgctgaccaggctccaaacagccatgtcaaatatgtctggaaaatgcttcagtctctgggcagaccagaagtccacatggccctggacgtggttctggtgaggggctcaggccaggagcatgaagggtgcttgctgctgacatcagaagtgctcttcgtggtgagtgtcagtgaggacacacagcagcaggccttccccgtcacagaaatcgactgtgcacaggacagcaagcagaacaacttactcacagtgcagctcaagcagccaagagtggcctgtgatgtggaggtagatggagtccgagagagactgtcagagcaacagtacaacagactggtggactacatcacaaagacatcttgtcacctggcccccagctgttcttccatgcaaataccatgccctgtggtggctgcagaacctcccccctccactgttaaaacataccattacctggttgatccacattttgctcaggtcttccttagtaaatttaccatggtgaaaaataaagccctgaggaaagggtttccttgagtcccctctgaggtgtttattcctgcttgtgtgatttagtttttgggtttctttgagacagggtctcactgcattgcccttgctgacctcaaattctggggttcaagcaatcctcccacctcaacccacaagtagctacgactgcaagcacctgccaccataaagggctgcattttgccaccataaagggctgcatttttttaaaaagcctaggcagctctaacatcatctgatatggacacaaggccaacagtttccttatttacatccttacctctaaaagatacttcaaagtgacaaaaacgtgttccttccccacttagagacaatgattaacagggccctatatgttcttaccacatacagaggatgcatttatttttgctctatgacacttgcaaaaatctctactgtaattaatttgggtctattattaactctctgttccatcatagaatgtggccaggccttacaatggagagccagagttaaaacttcaagttgcatctgtttttgggctgagtcaccacctttgcctcatgctcctttgtctgcaaaggcctaggattctttctttaaatgaaatgcttaggactttgtggcttgttacatttgtcatttaactgcagtgctattctttgaaagctgctatgtgtattttctctgaagtctgcattttactaaaatttacaacagtctgatgattgattgattactgtccaggtacattttagaaaaagtgttcttcttccagtttgttttactaagcaaactttgagtaaatcctttgtcctatattgaatccagtcccaaagtgttcaggtgagtttctctagttccataaacaaaacatacatagtgggaactccctggtatgccatagagcacacaagaaccccaatattaatgctaacaattataccagtccattttgtttattctgtggaattgacttgacaaagcatgaagatattcccagtgtctgtctgataatattttgcatctaagaatgggtttgactcaagatcttgggttaccaagatgtcttaaatgttcagtaaatatctttcttacagtccagtagcttagagcatgtttgctgattgatattacatttaaacttggggctacagcttgttacctagaattttgagatactaagagaatgcaattttaaatgcccactggttttatttgttttggagagagggtctcattctgtcacccaggctagagtacagtgggaacagtcatggctcactgcagcttaagctcactgcctgggctcaagtgatcttactccagcctcccaagcagctgggactacaccaccacaggtatgcaccaccatacctggctgatttttaaaattttttctagagatgaggtctcactatgttgcccagctggtctcatactcctcagttcacgcattcctcccacctccacctcccaaactgctgggattacaggtgtgagccaccatgcccaacacccactgatctttaactctcacatgttgggcataagaagtcactatataattgttactggaaagcaagacttaacgaacaattctgactatgaaaaatgtctctttcagtttgttctgtaaatatttagaaaagtgacagctgtcaacctcagagtaactatttctaaaaatgtaaatatgtattaatccttgtatcttttatggtaattttgcatattgatatgaattatataaaattgtttaaaataaaaggtgtccttgaattactgaccacccatagatgtctactgttaccaggttttacaatgcaaattttcactaatacctgggtttaatacagctcacatcactgaatgttacacatgagtttaaatgggtaatatacaggttttgttataataaagttactgattaaatta

SEQ ID NO: 198593 - DNA, 1626 bp, Homo sapiens
  Payload ID: 19191
  Gene Name: vacuolar protein sorting 13 homolog B (yeast)
  Uniprot ID: Q7Z7G8
  ENST ID: ENST00000441350
  CDS Start-End: 104-1351
acaggagcagcactgccggcgggggcgggtgccagggacttggaggtggaggggacgcggcggtactctggcgtcttccgacttcgactccttaccttaaaagatgctggagtcatatgtaactccaattttaatgagctatgtgaatcgctacatcaagaacttaaagccgtcggatctacagctttcactatggggtggagacgtggtactcagcaagctcgagttaaagttggatgtgctggaacaggaactgaaattaccattcacttttttaagtggacatattcatgaattgaggattcatgtaccatggacaaaactgggttcagaaccagtggtaattaccatcaatactatggaatgcattttgaaacttaaggatgggatacaggatgaccatgaaagctgtggttctaattctaccaaccgtagtactgctgagagcacaaaatcatcaatcaaaccgcggagaatgcagcaggctgctcctacagatcctgacttaccaccaggttatgtgcagagtctgattagacgagttgtaaataatgtaaacattgtgataaataatctcatactaaaatatgttgaagatgatatcgtcctttccgtcaatatcacttctgcagaatgttatacagtaggtgaattatgggatcgtgcattcatggatatttctgcaactgatttggtgctgagaaaggttatcaatttttctgactgtacagtttgtcttgataaacggaatgccagtggtaaaatagaattttaccaggatcctttattatacaaatgttccttcagaactcgtcttcattttacatatgaaaacctaaattccaagatgccatctgttattaaaattcatactttagtggaaagtttgaaactttctatcacagatcaacaactgcctatgtttattcgtataatgcaacttggaattgctctttactatggagaaataggcaattttaaagaaggcgaaatagaggaccttacttgtcataataaagatatgctaggaaacattacaggttctgaagatgaaacaagaatagatatgcaatatcctgctcagcataaaggtcaagagttatattcacagcaagatgaggagcagccacagggatgggtgtcatgggcctggtcctttgtgcctgcaattgtgagttatgacgatggcgaggaagactttgttgggaacgatcctgcatcaaccatgcatcaacaaaaagcacagactttgaaggatcctattgtttctataggattttattgcacaaaggcaacggtgactttcaaagtaggtcttttctcttgctgtttatatctctatcaactttaatgcttaaatttggattgttagtacaattctagctttattcaagtttgctttgcattcagtagatgtgagatagagtctaacagttcttacttcataaaattacatggctcctccacttgaaatctttgaattctgatcccttcctgtcttcttagggcattctccacatttcttttttattagcttcatggatagttttttgccctattgaatcattcagttggtgtacaaacatgccttaatattgtcattaaaaaagaaaggaacagcaaaaa

SEQ ID NO: 198594 - DNA, 466 bp, Homo sapiens
  Payload ID: 19191
  Gene Name: vacuolar protein sorting 13 homolog B (yeast)
  ENST ID: ENST00000521559
  CDS Start-End: 1-466
ctaatcaggcagcaaaagaagacactgtggttttgaagattggctctgttgccatggctccccaggctgacaatccccttggcagatctgtccttaggaaagatatttaccacatacggcggcatcaagaaaggagagcaattttgacccccgttttgacagatttttctgtccgaataactggagcacctgctgtcattttcaccaaagtagtttctccagaaaatttgcatactgaggagattttagtgtgtggccattccttagaagtgaatataaccacaaacctggacttcttcctaagtgtggctcaagttcaactcttacatcagttaatagtagcaaatatgactggactggaaccatcaaacaaggctgcagagatctctaaacaagaacagaaaaaagtggatatatttgatggaggcatggctgaaacctcatctcgctacagtggtgctcagga

SEQ ID NO: 198595 - DNA, 5625 bp, Homo sapiens
  Payload ID: 19191
  Gene Name: vacuolar protein sorting 13 homolog B (yeast)
  Uniprot ID: Q7Z7G8
  ENST ID: ENST00000496144
  CDS Start-End: 112-4395
ggcgcggtacaggagcagcactgccggcgggggcgggtgccagggacttggaggtggaggggacgcggcggtactctggcgtcttccgacttcgactccttaccttaaaagatgctggagtcatatgtaactccaattttaatgagctatgtgaatcgctacatcaagaacttaaagccgtcggatctacagctttcactatggggtggagacgtggtactcagcaagctcgagttaaagttggatgtgctggaacaggaactgaaattaccattcacttttttaagtggacatattcatgaattgaggattcatgtaccatggacaaaactgggttcagaaccagtggtaattaccatcaatactatggaatgcattttgaaacttaaggatgggatacaggatgaccatgaaagctgtggttctaattctaccaaccgtagtactgctgagagcacaaaatcatcaatcaaaccgcggagaatgcagcaggctgctcctacagatcctgacttaccaccaggttatgtgcagagtctgattagacgagttgtaaataatgtaaacattgtgataaataatctcatactaaaatatgttgaagatgatatcgtcctttccgtcaatatcacttctgcagaatgttatacagtaggtgaattatgggatcgtgcattcatggatatttctgcaactgatttggtgctgagaaaggttatcaatttttctgactgtacagtttgtcttgataaacggaatgccagtggtaaaatagaattttaccaggatcctttattatacaaatgttccttcagaactcgtcttcattttacatatgaaaacctaaattccaagatgccatctgttattaaaattcatactttagtggaaagtttgaaactttctatcacagatcaacaactgcctatgtttattcgtataatgcaacttggaattgctctttactatggagaaataggcaattttaaagaaggcgaaatagaggaccttacttgtcataataaagatatgctaggaaacattacaggttctgaagatgaaacaagaatagatatgcaatatcctgctcagcataaaggtcaagagttatattcacagcaagatgaggagcagccacagggatgggtgtcatgggcctggtcctttgtgcctgcaattgtgagttatgacgatggcgaggaagactttgttgggaacgatcctgcatcaaccatgcatcaacaaaaagcacagactttgaaggatcctattgtttctataggattttattgcacaaaggcaacggtgactttcaaactcacagaaatgcaagttgagagtagttattacagtccacagaaagtaaaatctaaagaagtattgtgttgggaacaagaaggaactacagttgaggcccttatgatgggagaacctttctttgattgccagattgggtttgttggttgcagagccatgtgccttaaaggaattatgggtgttaaagattttgaagagaatatgaatagaagtgaaactgaagcctgtttcttcatttgtggtgacaatttgagtacgaaaggtttcacataccttacaaattcattgtttgattaccgaagcccagaaaataatggtactcgcgcagaatttatcttggattcaactcatcataaggagacatacactgagatagctggaatgcaacggtttggggctttttatatggattacctgtatacaatggagaacactagtggcaaaggttccacaaatcaacaagacttttcttcagggaaaagtgaagatttgggaacagttcaggagaagtccaccaaaagccttgttataggtcctcttgattttcgtttggatagcagtgcggtgcataggattttgaaaatgattgtgtgtgccttggaacatgaatatgaaccatatagcaggctaaaatcagatattaaggatgaaaatgaaacaatactgaatcctgaagaggtggctcttctggaggaatatattcctactcgacatacaagtgttactctcctcaaatgtacctgcacaatttccatggctgaattcaacttgctggaccatttactacctgtcattatgggagaaaagaactcaagtaacttcatgaatactacaaacttccagtctcttcggcctttgccatccattcgaatattggtggataaaattaatctggaacattcagtgccaatgtatgctgaacagttggtgcatgtggtcagcagccttactcaaccttctgataacctgcttcattattgttatgtacactgctatcttaagatatttggtttccaggcaggactgacgtctttggattgcagtggatcttactgcttacctgtaccagttattccctctttcagcactgctctttatgggaaacttctgaaactccccacatgctggaccaaaagatctcagattgctataactgaaggtatatttgaacttccaaatctcacaattcaagctacaagagcacagacacttctcttgcaagcaatatatcaaagttggtctcatcttggaaatgtcagctcttccgcagtgattgaagctttgataaatgaaatcttcctaagtataggtgtgaaatctaagaatcccctgccaactcttgagggctcaatccagaatgttgaattgaagtactgcagcacatcattggtcaaatgtgcctctgggaccatgggatcaataaaaatttgtgccaaagccccagttgatagtggaaaagagaagttgattcccttgcttcagggtccttctgacactaaagaccttcatagcaccaagtggctcaatgagagtagaaagccagagtctctcttagctccagatttgatggccttcacaatccaagttccacaatatattgactactgccacaattccggtgctgtacttctttgcagtatacaaggactagcagttaatattgacccaatcttatatacgtggctcatctatcagcctcagaaacgaacaagtagacatatgcaacagcagcctgtggtagctgttcctcttgttatgccagtttgtagaaggaaagaggatgaggtgtctattggaagtgcccccttggcaaagcagcaatcatatcaggcctctgaatatgccagcagccctgtaaaaacaaaaacggtaacagaatcccgcccattgtcagttcctgttaaagccatgttgaatatatctgaaagctgtagaagtcctgaagaaagaatgaaggaatttattggaattgtttggaatgcagtgaagcatctcacactacagcttgaagtacaatcttgttgtgtgtttattccaaatgatagcctgccttccccaagtacaattgtatctggtgacattcctggaacagtaagaagttggtaccatggacaaaccagcatgccgggaacacttgtcctctgtttgcctcaaataaagattattagtgctgggcacaagtatatggaacctctgcaggagattccatttgttatcccacgacccatccttgaagaaggtgatgcttttccttggacgatcagcttgcataatttcagcatatatacccttcttggaaaacaagtgacactttgcctagtggaacctatgggttgcacctccactctagctgtcacgtctcaaaaactgcttgctacgggacctgatacacgacattcatttgttgtctgtctccatgttgacctagagtcactagagataaaatgctctaatccccaggtccagctcttctatgaactaactgatatcatgaataaggtctggaacaagattcagaagagaggcaatctcaacctatctccaacctctccagagaccatggcagggcctgttcctacttctccagttagaagcagtataggcacagctcctccagataccagcacatgcagcccatctgctgacattgggactactactgagggagattctatacaagcaggtgaggaatcaccattctcagattctgtgaccttggaacaaactacaagtaatattggaggaaccagtggacgtgttagtttatggatgcagtgggtgcttcccaaaattactataaagctctttgctccagatcctgaaaataaaggcacagaggtttgtatggtcagtgaactagaagatctcagtgcttccatagatgtccaggatgtatataccaaagtgaaatgtaaaatagagagtttcaatattgatcactatagaagcaggccaggggaaggttggcagtcaggacattttgaaggagtatttctacaatgcaaagaaaaatctgtgccttggggaagagtgttggtctttggggcaatgtggaggtgtcttcctttcctgtactgacaagctgaacagacgcaccttgttggttcgacccatcagcaagcaggaccctttcagtaattgctctggcttctttccttctacaactacaaaacttctagatggcactcatcagcagcatggattcctctctctgacatacacaaaagctgtaacaaaaaatgtccgccacaagttaacatcaagaaatgagcgaagaagttttcataagttatctgaaggcctaatggatggttctcctcattttcttcatgaaattcttctttcagcacaagcttttgatattgttctttattttcctttacttaatgccattgcaagtatatttcaagcaaaactaccaaagacccaaaaagagaaaagaaaatctcctggtcagcccatgaggacccatacactgacatcccgcaatttacctttgatttatgtcaacacaagtgtaatcagaatttttattccaaaaacagaagaaatgcagccaactgttgaagctaatcaggcagcaaaagaagacactgtggttttgaagattggctctgttgccatggctccccaggctgacaatccccttggcagatctgtccttaggaaagatatttaccagagagccttgaacttaggaattcttcgagatcctggatcagaaatcgaagacagacaataccaaatagatctgcagtccatcaatattggtactgcacagtggcatcaactaaaaccagagaaggaaagtgtctcaggaggggtggtaacagagactgaaaggaattctcaaaatccagcccttgagtggaatatggccagcagcatacggcggcatcaagaaaggagagcaattttgacccccgttttgacagatttttctgtccgaataactggagcacctgctgtcattttcaccaaagtagtttctccagaaaatttgcatactgaggagattttagtgtgtggccattccttagaagtgaatataaccacaaacctggacttcttcctaagtgtggctcaagttcaactcttacatcagttaatagtagcaaatatgactggactggaaccatcaaacaaggctgcagaggtaactgttacctgattttgatcaggcttactgcatttgttccaactttacattcacagtaggaaaactataattaagctgactgctttctgcttaattattctgtgtttaactttattcaaaatatagtcataagtcattttggattgata

SEQ ID NO: 198596 - DNA, 13300 bp, Homo sapiens
  Payload ID: 19192
  Gene Name: vacuolar protein sorting 13 homolog C (S. cerevisiae)
  Uniprot ID: Q709C8
  ENST ID: ENST00000249837
  CDS Start-End: 100-11232
ggcctgcgccggaggggctgtcatttgcagcgctggtcgcagccctcagctgcgccgggcggttccggctcctccctctccttgtgcctcagcgccaccatggtgctggagtcggtggtcgcggacttgctgaaccgcttcctgggggactatgtggagaacctgaacaagtcccagctgaagctgggcatctggggcggaaatgtggctttagataatctacagataaaagaaaatgccctgagtgaattggatgttccttttaaagtcaaggctggccaaattgataaattaactttgaagattccttggaagaacctttatggagaagcagttgttgcgaccctggaaggattatacctgcttgttgtccctggagcaagtattaagtatgatgctgtaaaagaagaaaaatccttgcaggatgttaaacagaaagagctatcccgaattgaagaagcccttcaaaaagcagcagaaaaagataagccaaaagaagccaaaaaggatacatttgtggaaaaattggcaactcaagtaataaaaaatgtacaagtaaaaatcacagatattcacattaaatatgaagatgatgtcactgatccaaagcggcctctttcatttggtgtcacactgggagagcttagtctactgactgcaaatgaacactggactccatgcatattaaatgaagcagacaaaattatatacaagcttatacgacttgatagtcttagcgcctactggaatgtaaattgcagcatgtcttaccagagatcaagggaacagattttggatcagctgaaaaatgaaattcttacaagtggaaatatacccccaaattatcaatacattttccagccaatatcagcctctgcaaaactctacatgaatccttatgcagaatcagagctcaaaacgcccaaactggattgcaacatagaaatacaaaatattgccattgaactgaccaaacctcagtacttaagtatgattgaccttttggagtcagtggattatatggttaggaatgcgccttataggaaatacaagccttatttaccacttcataccaatggtcgacgatggtggaaatatgcaattgattctgttcttgaagttcatataagaaggtatacacagatgtggtcatggagtaacataaaaaagcacaggcagttactcaagagttataaaattgcctacaaaaacaagttaacacagtctaaagtctcagaagaaatacagaaagaaattcaggacttggagaagactctagatgtttttaacataattttagcaaggcaacaagcacaagttgaggtgattcggtctgggcaaaaattaaggaaaaagtctgctgacacaggcgagaaacgtggaggctggtttagtgggttgtggggtaagaaagagtctaagaaaaaggacgaagaatcattgattcctgaaactattgatgaccttatgactccagaggaaaaagataaactcttcactgccattggttatagtgagagtacccacaacctaactttacctaagcagtatgttgcccatattatgaccctgaagttagtaagcacctctgttacgataagagaaaacaagaatattccagaaatactaaaaattcagataattggcctgggcactcaagtatctcagcgaccaggagcacaagcacttaaggtagaagcgaaattagaacactggtatataacaggtttgagacagcaggatattgtgccatcacttgtggcttcaattggtgacactacatcatccttgcttaaaattaaatttgaaaccaatccggaggatagtcctgctgaccagactctgattgttcagtcccagcctgtggaggtcatctatgatgctaaaactgtcaatgcagtggttgaattctttcaatcaaataagggattggatcttgagcaaataacatcagcaacattgatgaagctggaagaaattaaggagagaacagctacaggacttacacatattattgaaactcgaaaagtccttgatttaaggataaatctgaagccttcttatctagtagttccacagacgggtttccaccatgaaaagtcagatcttctgattttagattttggtacatttcagctcaacagtaaagatcaaggtttacagaagactactaattcatctctggaagaaataatggataaggcatatgacaagtttgatgttgaaataaaaaatgtacaactactttttgcaagagcagaggaaacctggaaaaagtgtcgatttcagcatccatcaactatgcatatattgcaacccatggatattcatgttgagttggctaaggccatggtagaaaaagacattagaatggccagatttaaagtgtcaggaggacttcctttgatgcatgtgagaatttctgaccagaagatgaaagatgtgctatatttgatgaacagtatacctttgccacagaaatcatcagcccagtctccagagagacaggtatcctcaattcctattatttcaggtggtacaaaaggtctacttggtacttcactattgctagacactgtggaatcagagtctgatgatgagtattttgatgctgaagatggagaaccacagacttgtaaaagtatgaaaggatcagaacttaaaaaagctgcagaggtcccaaatgaggagctcatcaatcttctactcaagtttgaaattaaagaagtgattttggaatttactaaacagcagaaagaagaagatacaattctagtatttaatgttactcagttaggaacagaggccacaatgagaacatttgacttaactgtggtatcttatttaaagaaaatcagcttggattatcatgaaattgaaggatccaaaaggaagccccttcacttgattagctcttctgacaaacctggattagatcttttgaaagtggagtatattaaggctgataagaatggacctagttttcaaactgcttttggaaaaactgaacaaacagttaaggtggccttttcatctttaaatctgttgctgcaaacacaagctcttgtcgcttctattaattacctcacaaccattattccatctgatgatcaaagcataagtgttgctaaggaggtacaaatttcaactgaaaaacaacaaaaaaattcaactctgccaaaagcgattgtatcctccagagatagtgacattattgatttcaggctatttgccaagttgaatgctttctgtgtcattgtttgcaacgaaaagaacaatatcgccgaaatcaagattcaaggactggattcctccctttctctccagtcaagaaagcagtcactttttgcccgactagaaaatattattgtcacagatgttgatccaaagacagttcataagaaagctgtgtcaataatgggaaatgaagttttccgttttaatttggatttgtatccagatgctactgagggggatttgtatactgacatgtccaaagtggatggtgtgctgtctctgaatgttggctgtattcagattgtctatcttcataaattccttatgtcacttctgaacttcctgaataatttccagacagccaaagagtctctgagtgctgccactgcccaggctgcagaaagggctgccacaagtgtgaaagatcttgcccagaggagttttcgtgtttccatcaatattgatttgaaagcaccggttatagtcatcccacagtcttctatttccaccaatgcagtagtggtagatcttgggttaatcagagttcataatcagttcagtctggtgtctgatgaagactacttaaatcctccagtaattgatagaatggatgtgcagctaacaaagcttacactttataggacagtgatccagccaggcatctaccatcctgatattcagctgttgcacccaattaacttggaatttcttgtaaatcggaatctagctgcatcttggtaccacaaggtgcctgttgtggaaattaaaggacatcttgattcaatgaatgttagtctaaatcaagaagatcttaatcttttatttaggatactaacagaaaatctctgtgagggtactgaagacttggataaagtgaaaccaagagtacaagagacaggtgaaattaaagagccccttgaaatctctatatcacaagatgtacatgattcaaaaaatactttaacaactggagtggaagaaattaggtctgtagacatcattaatatgctgctgaattttgaaattaaagaggttgtggttactttgatgaaaaaatcagaaaagaaaggaaggcctttacatgagctaaatgtcctgcaacttggaatggaagctaaagttaaaacctatgacatgactgctaaagcttatctaaaaaaaattagtatgcagtgctttgatttcactgactctaaaggggaacctcttcacattattaactcttctaatgtgactgacgaaccccttctgaaaatgttactgacaaaggcagacagtgatggaccagaatttaaaactattcatgacagtaccaaacagagactgaaggtttcatttgcatccttagacttagtacttcatttggaagctttactttccttcatggattttttatcatctgctgctccattctctgagccttcctcttctgagaaggaatccgagctgaaaccacttgtgggggagtccagaagtatcgctgtcaaagctgtatccagcaacatttcccaaaaggatgtgtttgatttaaagatcacagctgaattaaatgcatttaatgtctttgtctgtgatcagaagtgtaacattgcagatattaaaatacatggaatggatgcctctatttctgtgaagcctaagcagactgatgtgtttgccagacttaaagatattatagttatgaatgtagatttgcagtccattcacaaaaaggctgtctctattttgggagatgaagtctttaggttccaactgactctttatccagatgccacagaaggagaggcctatgctgatatgtccaaagtagacggcaaacttagttttaaagtgggttgtattcagattgtttatgttcataaattcttcatgtctcttttgaacttcctcaacaatttccaaactgctaaagaagctttgagtacagccacagtccaggctgcagaaagagctgcttccagcatgaaagacttggctcaaaagagtttccgccttttgatggatattaatttgaaagcaccagttattattattcctcagtcttcagtatcacctaatgctgttatagcagatctgggtttaatcagagttgaaaacaagtttagcttggttcctatggaacattattctcttcctccagtcattgataaaatgaacatcgaactcactcagttgaagctgtcaagaactattttgcaggctagcttgccacaaaatgacattgaaattttaaaaccagtcaacatgcttttgtccatacagcgaaacttagcagcagcatggtatgtgcaaattccagggatggagataaaaggaaaactaaaacctatgcaggttgctctcagtgaagatgacttgacagttttaatgaaaattttgctagaaaatcttggagaagcttcctcacaaccaagccctacacagtctgtgcaggagactgtaagagtgagaaaagttgatgtttcaagtgtacctgaccatctcaaagaacaagaagattggacagactcaaagctctctatgaaccagattgtcagtctccaatttgactttcactttgaatctctttccattatcctttataacaatgatatcaaccaggaatctggagttgcatttcataatgacagtttccaacttggtgaactcagactacatcttatggcctcctcagggaagatgtttaaggatggctcaatgaatgtcagcgttaaacttaagacatgcacccttgatgatctcagagaaggaattgagagagcaacatcgagaatgattgacagaaagaatgaccaagataacaacagttctatgattgatataagttacaaacaagacaaaaatggaagtcaaattgatgctgttcttgacaagctgtatgtatgtgccagtgtggaatttctgatgactgtggcagatttctttatcaaagctgtgcctcagagtccagaaaatgtggcaaaagaaacacagattttaccaagacagactgccacagggaaggtcaagatagagaaagatgactctgttagaccaaatatgactttaaaggccatgatcacagatccagaagtggtatttgttgccagcctgacaaaggctgatgctcctgctctgacagcctcgtttcagtgcaacctttctctgtcaacatccaaactcgaacagatgatggaagcttctgtgagagatctgaaagtgctcgcttgcccttttctcagagaaaagagagggaaaaacattaccacagtcttgcagccctgttctttatttatggaaaaatgtacgtgggcttcaggaaagcaaaatataaatattatggttaaagaatttataattaagatttcacccataattcttaatactgtgttgacaatcatggctgcattgtctccaaaaacaaaagaagatggatccaaagatacgtctaaggaaatggaaaatctttggggtatcaaatcgattaatgattataacacttggtttcttggtgttgacacggcaacagaaataacggaaagcttcaaaggcattgaacattcactgatagaggaaaattgtggtgttgttgtagaatccattcaagttaccttagaatgtggccttggacatcgaactgtacctttattattggcagagtctaagttttcaggaaatattaaaaattggacttctctaatggctgctgttgctgacgtgacactacaggtgcactattacaatgagatccatgctgtctgggagccactgattgagagagtggaggggaagagacaatggaatttaaggcttgatgtaaagaagaacccagttcaggataaaagtttgctgccaggagatgattttattcctgagccacaaatggcaattcatatttcttcaggaaatacaatgaatataacaatatccaaaagttgtcttaatgttttcaacaatttagcaaaaggtttttcagagggcactgcttctacttttgactactctttaaaggacagagctccttttacggtaaaaaatgctgtaggtgttcccattaaggtgaagcccaattgtaatctcagagtaatgggcttccctgagaaaagtgatatttttgatgttgatgctggccagaatttggaactggagtatgccagcatggtaccttcaagtcaagggaacctatctatattgagccgtcaagaaagctccttcttcactctgaccattgtacctcatggatatacagaagttgcaaatatccctgtggccagacctggacggcgattgtataatgtacggaatcccaatgccagtcattctgactctgtcttggtacaaattgatgcaactgaagggaataaagtaattacccttcgctctcctctacagatcaaaaaccatttctccattgcatttatcatctataaatttgttaagaatgttaagctattggagcgcattgggatagccagacctgaagaggagttccatgttcctttagattcatatagatgtcaattgtttatccagccagctggaatcttagagcatcagtacaaagaatctaccacttatatttcctggaaggaagaacttcataggagcagggaagtcagatgcatgttgcagtgtccatcagtagaagtcagcttcttacctctcatagtgaatacagttgctctgcctgatgaattgagctacatatgtacacatggggaagactgggatgtagcttacattattcatctttatccttctctcactttgcggaatcttctcccatattccctaagatatttacttgagggaacagcagaaactcatgagctggcagaaggcagtactgctgatgttctgcattcgagaatcagtggtgaaataatggaattagtcctggtgaaataccagggcaaaaactggaatggacatttccgcatacgtgatacactaccagaattctttcctgtgtgtttttcttctgactccacagaagtgacgacagtcgacctgtcagtccacgtcaggagaattggcagccggatggtgctgtctgtctttagtccctattggttaatcaacaagactacccgggttctccagtatcgttcagaagatattcatgtgaaacatccagctgatttcagggatattattttattttctttcaagaagaagaacatttttactaaaaataaggtacaattaaaaatttcaaccagtgcctggtccagtagtttctcattggatacagtgggaagttatgggtgtgtgaagtgtcctgccaacaatatggagtacctggttggtgttagcatcaaaatgagcagtttcaacctttcacgaatagttaccctgactcccttttgtaccattgcaaacaagtcatcattagaactagaagttggcgagattgcatctgatggctcaatgccaactaataaatggaactatattgcttcttcagagtgccttccattttggccagaaagtttgtcaggcaaactttgtgtgagagtggtgggctgtgaaggatcttccaaaccattcttttataaccgacaggataatggcactttattgagcttagaagatctgaatgggggtatcttggtggatgtaaacactgccgaacattcaactgtcataactttttctgattaccatgagggatctgcacctgccttgataatgaaccatacaccatgggacatcctcacatacaaacagagtgggtcaccagaagaaatggtcttgctgccaagacaggctcgactttttgcctgggcagatcctactggtaccagaaaacttacatggacatatgcagcaaatgttggggaacatgatctgttaaaggatggatgtggacagtttccatatgatgcaaacatccagatacactgggtatcatttctggatgggcgccagagagttttgcttttcaccgatgatgttgccttggtttccaaagcactgcaggcagaagaaatggaacaggctgattatgaaataaccttgtctctccacagtcttgggctttcactggttaacaatgaaagcaagcaggaagtttcctatattgggataaccagttctggtgttgtttgggaggtgaaaccaaagcagaaatggaagccatttagtcaaaagcagataatcttattggaacaatcctatcagaaacatcaaatatcaagagaccatggctggattaagctagataataattttgaggtcaattttgataaagatccaatggaaatgcgcctccctattcgtagccctattaaacgagactttttatcaggaattcagattgaatttaagcagtcttctcaccagagaagtttaagggccaggttgtactggcttcaggttgataatcagttaccaggtgcaatgttccctgttgtatttcatcctgttgcccctccaaaatctattgctttagattcagagcccaagcctttcattgatgtgagtgtcatcacaagatttaatgagtacagtaaagtcttacagttcaagtattttatggtcctcattcaggaaatggccttaaaaattgatcaagggtttctaggagctattattgcactgtttaccccaacaacagaccctgaagctgaaagaagacggacaaagttaatccaacaagatattgatgctctaaatgcagaattaatggagacttcaatgactgatatgtcaattcttagtttctttgaacatttccatatttctcctgtgaagttgcatttgagtttgtctttgggttccggaggtgaagaatcagacaaagaaaaacaggaaatgtttgcagttcattctgtcaacttgctgttgaaaagcataggtgctactctgactgatgtggatgaccttatattcaaacttgcttattatgaaattcgatatcagttctacaagagagatcagcttatatggagtgttgttaggcattacagtgaacagttcttgaaacagatgtatgtccttgtattggggttagatgtacttggaaacccatttggattaattagaggtctgtctgaaggagttgaagctttattctatgaacccttccagggtgctgttcaaggccctgaagaatttgcagaggggttagtgattggagtgagaagcctctttggacacacagtaggtggtgcagcaggagttgtatctcgaatcaccggttctgttgggaaaggtttggcagcaattacaatggacaaggaatatcagcaaaaaagaagagaagagttgagtcgacagcccagagattttggagacagcctggccagaggaggaaagggctttctgcgaggagttgttggtggagtgactggaataataacaaaacctgtggaaggtgccaaaaaggaaggagctgctggattctttaaaggaattggaaaagggcttgtgggtgctgtggcccgtccaactggtggaatcgtagatatggccagtagtaccttccaaggcattcagagggcagcagaatcaactgaggaagtatctagcctccgtccccctcgcctgatccatgaagatggcatcattcgtccttatgacagacaggaatctgagggctctgacttacttgagaatcatatcaaaaagttggaaggagagacttaccgataccactgtgctattcctggaagcaagaagacaatccttatggttacaaataggcgagtgttgtgtataaaggaagttgaaatcctgggccttatgtgtgtagactggcaatgtccatttgaagattttgtatttcctcctagtgtcagtgaaaatgtgctaaaaatttcagttaaggaacagggtctgttccacaaaaaagacagtgccaatcaaggctgtgttcgaaaagtttacctgaaggacaccgccacagcagagagagcatgtaatgccattgaggatgcacagtcaacgagacagcagcaaaaattgatgaagcagtcatcagtgagacttctcagaccccaattgccatcttaatcacagacctcaggggctccaacagggagaaaaaacaatcactggtcttgtctataagtcactctgctttatcttgctaaagacaatttttcaagcaatcctttagttttagttttctggaatagctagtattgggttttctagttttttcaccttttagtttttactctaattttgtaaccatgtatatgctagcagtccacttctacgccaccacccaaatgggtcagacccttgaagaaacgtcacttcaaactcagaatgaaattttcattaatattaaaattgtgaagcaaaggtcaataggcttatatttaattaaagccttactgaagaataagaaatgagcttagaatgactagtgttctttgaaaggtttttttatttttgtttttttggggttttttttttttttgagaccgagtcttgctctgtcgcccaggctggaatgcagtggtgcgatcttggctcactgcaatctctgcctctcgggttcaagctgttctactgcctcagcctcctgagtagctgggattacaggtgtgtgccaccacgcctgggtaattttttttttttttgtatttttagtagagatgagtttcaccatgttggtcagtctagtctcgaactcctgaccttgtgatccgcatgcctcagcctcccaaagtgctgggattacaggcatgagccaccacggcccgccaaaaggctttaacccatgaacaaatgttggatcctgacattttgtttaagagtgatttgttcaataattgaactgagttaacattcttggtaaaccaggtaattgaatgaagaaaggtcactaaagggagaaatgacatgttttctattttcttttcatgaaaacactgtttttccccctaataaagcatattttactttggtgcttatttttcctccttgcagtctaataaaaaaatctggacaatcaaaccttaaaatagctacactctgccctctgtaatgtagcattcataaaaatttggaagtatttacatcctctttcaagatgagcttatatgacacaattattatttgctgatacatgaaaatactgcactttaagtttctcaagactctgaaatatgtaaaattcaatatttttatattcccagaaattgtttcttacaggttgaaagtcttttaagggcatcacaaattaacatttactcctaatgcacgcctagaatgtattttaaatacttactaagaagaatgaaaattctttggttgttttatatataaataaggcatatataatgacactgtgttctgtgagggagcaggccctgtgagaatcaattcaggacagtatttttttttgtcctttctccatccttgatcagagataaactattaaaactttaaaaaatactcaaaaatatgtaagttttttggttgaacctttagatttgctcataatgtttaacataacaacatttatttcaaatcactgaattcatggagatgtggacacgcttggtttgctctatttttgtttatgtgtgatagtggttctgtcatcatcattcatgttttttaaggcctggtcataaaactttaaattttactagtgttacttaatgtatattctaaaaagagaatgcagtaactaatgccctaaatgtttgatctctgtttgtcattactttttcaaaattatttttttctgtaaagtataatatataaaacttcttgcttaaattgaatttctatattagtggttaattgcagtttattaaagggatcattatcagtaatttcatagcaactgttctagtgttttgtgtttttaaaacagaattaggaatttgagatatctgattatatttttcatatgaatcacagctgttgacaatgtcccatatatttaagaaattatatcatactgatactatttgtaacattttgatttgatttaatctccagggacagaaataattcattggtaaagtgtaataatgcgttttttaaaaatgctttgagaggtaattacttgcatatgagagaaataaaacatttggcacattgtttacaggtgtgaaaa

SEQ ID NO: 198597 - DNA, 13400 bp, Homo sapiens
  Payload ID: 19192
  Gene Name: vacuolar protein sorting 13 homolog C (S. cerevisiae)
  Uniprot ID: Q709C8
  ENST ID: ENST00000261517
  CDS Start-End: 75-11336
tgcagcgctggtcgcagccctcagctgcgccgggcggttccggctcctccctctccttgtgcctcagcgccaccatggtgctggagtcggtggtcgcggacttgctgaaccgcttcctgggggactatgtggagaacctgaacaagtcccagctgaagctgggcatctggggcggaaatgtggctttagataatctacagataaaagaaaatgccctgagtgaattggatgttccttttaaagtcaaggctggccaaattgataaattaactttgaagattccttggaagaacctttatggagaagcagttgttgcgaccctggaaggattatacctgcttgttgtccctggagcaagtattaagtatgatgctgtaaaagaagaaaaatccttgcaggatgttaaacagaaagagctatcccgaattgaagaagcccttcaaaaagcagcagaaaaaggcacacattcaggggagttcatatatggcttggagaactttgtttacaaggacatcaagcctggacgtaaacgtaaaaagcacaaaaaacattttaagaaaccttttaaaggtcttgatcgttcaaaagataagccaaaagaagccaaaaaggatacatttgtggaaaaattggcaactcaagtaataaaaaatgtacaagtaaaaatcacagatattcacattaaatatgaagatgatgtcactgatccaaagcggcctctttcatttggtgtcacactgggagagcttagtctactgactgcaaatgaacactggactccatgcatattaaatgaagcagacaaaattatatacaagcttatacgacttgatagtcttagcgcctactggaatgtaaattgcagcatgtcttaccagagatcaagggaacagattttggatcagctgaaaaatgaaattcttacaagtggaaatatacccccaaattatcaatacattttccagccaatatcagcctctgcaaaactctacatgaatccttatgcagaatcagagctcaaaacgcccaaactggattgcaacatagaaatacaaaatattgccattgaactgaccaaacctcagtacttaagtatgattgaccttttggagtcagtggattatatggttaggaatgcgccttataggaaatacaagccttatttaccacttcataccaatggtcgacgatggtggaaatatgcaattgattctgttcttgaagttcatataagaaggtatacacagatgtggtcatggagtaacataaaaaagcacaggcagttactcaagagttataaaattgcctacaaaaacaagttaacacagtctaaagtctcagaagaaatacagaaagaaattcaggacttggagaagactctagatgtttttaacataattttagcaaggcaacaagcacaagttgaggtgattcggtctgggcaaaaattaaggaaaaagtctgctgacacaggcgagaaacgtggaggctggtttagtgggttgtggggtaagaaagagtctaagaaaaaggacgaagaatcattgattcctgaaactattgatgaccttatgactccagaggaaaaagataaactcttcactgccattggttatagtgagagtacccacaacctaactttacctaagcagtatgttgcccatattatgaccctgaagttagtaagcacctctgttacgataagagaaaacaagaatattccagaaatactaaaaattcagataattggcctgggcactcaagtatctcagcgaccaggagcacaagcacttaaggtagaagcgaaattagaacactggtatataacaggtttgagacagcaggatattgtgccatcacttgtggcttcaattggtgacactacatcatccttgcttaaaattaaatttgaaaccaatccggaggatagtcctgctgaccagactctgattgttcagtcccagcctgtggaggtcatctatgatgctaaaactgtcaatgcagtggttgaattctttcaatcaaataagggattggatcttgagcaaataacatcagcaacattgatgaagctggaagaaattaaggagagaacagctacaggacttacacatattattgaaactcgaaaagtccttgatttaaggataaatctgaagccttcttatctagtagttccacagacgggtttccaccatgaaaagtcagatcttctgattttagattttggtacatttcagctcaacagtaaagatcaaggtttacagaagactactaattcatctctggaagaaataatggataaggcatatgacaagtttgatgttgaaataaaaaatgtacaactactttttgcaagagcagaggaaacctggaaaaagtgtcgatttcagcatccatcaactatgcatatattgcaacccatggatattcatgttgagttggctaaggccatggtagaaaaagacattagaatggccagatttaaagtgtcaggaggacttcctttgatgcatgtgagaatttctgaccagaagatgaaagatgtgctatatttgatgaacagtatacctttgccacagaaatcatcagcccagtctccagagagacaggtatcctcaattcctattatttcaggtggtacaaaaggtctacttggtacttcactattgctagacactgtggaatcagagtctgatgatgagtattttgatgctgaagatggagaaccacagacttgtaaaagtatgaaaggatcagaacttaaaaaagctgcagaggtcccaaatgaggagctcatcaatcttctactcaagtttgaaattaaagaagtgattttggaatttactaaacagcagaaagaagaagatacaattctagtatttaatgttactcagttaggaacagaggccacaatgagaacatttgacttaactgtggtatcttatttaaagaaaatcagcttggattatcatgaaattgaaggatccaaaaggaagccccttcacttgattagctcttctgacaaacctggattagatcttttgaaagtggagtatattaaggctgataagaatggacctagttttcaaactgcttttggaaaaactgaacaaacagttaaggtggccttttcatctttaaatctgttgctgcaaacacaagctcttgtcgcttctattaattacctcacaaccattattccatctgatgatcaaagcataagtgttgctaaggaggtacaaatttcaactgaaaaacaacaaaaaaattcaactctgccaaaagcgattgtatcctccagagatagtgacattattgatttcaggctatttgccaagttgaatgctttctgtgtcattgtttgcaacgaaaagaacaatatcgccgaaatcaagattcaaggactggattcctccctttctctccagtcaagaaagcagtcactttttgcccgactagaaaatattattgtcacagatgttgatccaaagacagttcataagaaagctgtgtcaataatgggaaatgaagttttccgttttaatttggatttgtatccagatgctactgagggggatttgtatactgacatgtccaaagtggatggtgtgctgtctctgaatgttggctgtattcagattgtctatcttcataaattccttatgtcacttctgaacttcctgaataatttccagacagccaaagagtctctgagtgctgccactgcccaggctgcagaaagggctgccacaagtgtgaaagatcttgcccagaggagttttcgtgtttccatcaatattgatttgaaagcaccggttatagtcatcccacagtcttctatttccaccaatgcagtagtggtagatcttgggttaatcagagttcataatcagttcagtctggtgtctgatgaagactacttaaatcctccagtaattgatagaatggatgtgcagctaacaaagcttacactttataggacagtgatccagccaggcatctaccatcctgatattcagctgttgcacccaattaacttggaatttcttgtaaatcggaatctagctgcatcttggtaccacaaggtgcctgttgtggaaattaaaggacatcttgattcaatgaatgttagtctaaatcaagaagatcttaatcttttatttaggatactaacagaaaatctctgtgagggtactgaagacttggataaagtgaaaccaagagtacaagagacaggtgaaattaaagagccccttgaaatctctatatcacaagatgtacatgattcaaaaaatactttaacaactggagtggaagaaattaggtctgtagacatcattaatatgctgctgaattttgaaattaaagaggttgtggttactttgatgaaaaaatcagaaaagaaaggaaggcctttacatgagctaaatgtcctgcaacttggaatggaagctaaagttaaaacctatgacatgactgctaaagcttatctaaaaaaaattagtatgcagtgctttgatttcactgactctaaaggggaacctcttcacattattaactcttctaatgtgactgacgaaccccttctgaaaatgttactgacaaaggcagacagtgatggaccagaatttaaaactattcatgacagtaccaaacagagactgaaggtttcatttgcatccttagacttagtacttcatttggaagctttactttccttcatggattttttatcatctgctgctccattctctgagccttcctcttctgagaaggaatccgagctgaaaccacttgtgggggagtccagaagtatcgctgtcaaagctgtatccagcaacatttcccaaaaggatgtgtttgatttaaagatcacagctgaattaaatgcatttaatgtctttgtctgtgatcagaagtgtaacattgcagatattaaaatacatggaatggatgcctctatttctgtgaagcctaagcagactgatgtgtttgccagacttaaagatattatagttatgaatgtagatttgcagtccattcacaaaaaggctgtctctattttgggagatgaagtctttaggttccaactgactctttatccagatgccacagaaggagaggcctatgctgatatgtccaaagtagacggcaaacttagttttaaagtgggttgtattcagattgtttatgttcataaattcttcatgtctcttttgaacttcctcaacaatttccaaactgctaaagaagctttgagtacagccacagtccaggctgcagaaagagctgcttccagcatgaaagacttggctcaaaagagtttccgccttttgatggatattaatttgaaagcaccagttattattattcctcagtcttcagtatcacctaatgctgttatagcagatctgggtttaatcagagttgaaaacaagtttagcttggttcctatggaacattattctcttcctccagtcattgataaaatgaacatcgaactcactcagttgaagctgtcaagaactattttgcaggctagcttgccacaaaatgacattgaaattttaaaaccagtcaacatgcttttgtccatacagcgaaacttagcagcagcatggtatgtgcaaattccagggatggagataaaaggaaaactaaaacctatgcaggttgctctcagtgaagatgacttgacagttttaatgaaaattttgctagaaaatcttggagaagcttcctcacaaccaagccctacacagtctgtgcaggagactgtaagagtgagaaaagttgatgtttcaagtgtacctgaccatctcaaagaacaagaagattggacagactcaaagctctctatgaaccagattgtcagtctccaatttgactttcactttgaatctctttccattatcctttataacaatgatatcaaccaggaatctggagttgcatttcataatgacagtttccaacttggtgaactcagactacatcttatggcctcctcagggaagatgtttaaggatggctcaatgaatgtcagcgttaaacttaagacatgcacccttgatgatctcagagaaggaattgagagagcaacatcgagaatgattgacagaaagaatgaccaagataacaacagttctatgattgatataagttacaaacaagacaaaaatggaagtcaaattgatgctgttcttgacaagctgtatgtatgtgccagtgtggaatttctgatgactgtggcagatttctttatcaaagctgtgcctcagagtccagaaaatgtggcaaaagaaacacagattttaccaagacagactgccacagggaaggtcaagatagagaaagatgactctgttagaccaaatatgactttaaaggccatgatcacagatccagaagtggtatttgttgccagcctgacaaaggctgatgctcctgctctgacagcctcgtttcagtgcaacctttctctgtcaacatccaaactcgaacagatgatggaagcttctgtgagagatctgaaagtgctcgcttgcccttttctcagagaaaagagagggaaaaacattaccacagtcttgcagccctgttctttatttatggaaaaatgtacgtgggcttcaggaaagcaaaatataaatattatggttaaagaatttataattaagatttcacccataattcttaatactgtgttgacaatcatggctgcattgtctccaaaaacaaaagaagatggatccaaagatacgtctaaggaaatggaaaatctttggggtatcaaatcgattaatgattataacacttggtttcttggtgttgacacggcaacagaaataacggaaagcttcaaaggcattgaacattcactgatagaggaaaattgtggtgttgttgtagaatccattcaagttaccttagaatgtggccttggacatcgaactgtacctttattattggcagagtctaagttttcaggaaatattaaaaattggacttctctaatggctgctgttgctgacgtgacactacaggtgcactattacaatgagatccatgctgtctgggagccactgattgagagagtggaggggaagagacaatggaatttaaggcttgatgtaaagaagaacccagttcaggataaaagtttgctgccaggagatgattttattcctgagccacaaatggcaattcatatttcttcaggaaatacaatgaatataacaatatccaaaagttgtcttaatgttttcaacaatttagcaaaaggtttttcagagggcactgcttctacttttgactactctttaaaggacagagctccttttacggtaaaaaatgctgtaggtgttcccattaaggtgaagcccaattgtaatctcagagtaatgggcttccctgagaaaagtgatatttttgatgttgatgctggccagaatttggaactggagtatgccagcatggtaccttcaagtcaagggaacctatctatattgagccgtcaagaaagctccttcttcactctgaccattgtacctcatggatatacagaagttgcaaatatccctgtggccagacctggacggcgattgtataatgtacggaatcccaatgccagtcattctgactctgtcttggtacaaattgatgcaactgaagggaataaagtaattacccttcgctctcctctacagatcaaaaaccatttctccattgcatttatcatctataaatttgttaagaatgttaagctattggagcgcattgggatagccagacctgaagaggagttccatgttcctttagattcatatagatgtcaattgtttatccagccagctggaatcttagagcatcagtacaaagaatctaccacttatatttcctggaaggaagaacttcataggagcagggaagtcagatgcatgttgcagtgtccatcagtagaagtcagcttcttacctctcatagtgaatacagttgctctgcctgatgaattgagctacatatgtacacatggggaagactgggatgtagcttacattattcatctttatccttctctcactttgcggaatcttctcccatattccctaagatatttacttgagggaacagcagaaactcatgagctggcagaaggcagtactgctgatgttctgcattcgagaatcagtggtgaaataatggaattagtcctggtgaaataccagggcaaaaactggaatggacatttccgcatacgtgatacactaccagaattctttcctgtgtgtttttcttctgactccacagaagtgacgacagtcgacctgtcagtccacgtcaggagaattggcagccggatggtgctgtctgtctttagtccctattggttaatcaacaagactacccgggttctccagtatcgttcagaagatattcatgtgaaacatccagctgatttcagggatattattttattttctttcaagaagaagaacatttttactaaaaataaggtacaattaaaaatttcaaccagtgcctggtccagtagtttctcattggatacagtgggaagttatgggtgtgtgaagtgtcctgccaacaatatggagtacctggttggtgttagcatcaaaatgagcagtttcaacctttcacgaatagttaccctgactcccttttgtaccattgcaaacaagtcatcattagaactagaagttggcgagattgcatctgatggctcaatgccaactaataaatggaactatattgcttcttcagagtgccttccattttggccagaaagtttgtcaggcaaactttgtgtgagagtggtgggctgtgaaggatcttccaaaccattcttttataaccgacaggataatggcactttattgagcttagaagatctgaatgggggtatcttggtggatgtaaacactgccgaacattcaactgtcataactttttctgattaccatgagggatctgcacctgccttgataatgaaccatacaccatgggacatcctcacatacaaacagagtgggtcaccagaagaaatggtcttgctgccaagacaggctcgactttttgcctgggcagatcctactggtaccagaaaacttacatggacatatgcagcaaatgttggggaacatgatctgttaaaggatggatgtggacagtttccatatgatgcaaacatccagatacactgggtatcatttctggatgggcgccagagagttttgcttttcaccgatgatgttgccttggtttccaaagcactgcaggcagaagaaatggaacaggctgattatgaaataaccttgtctctccacagtcttgggctttcactggttaacaatgaaagcaagcaggaagtttcctatattgggataaccagttctggtgttgtttgggaggtgaaaccaaagcagaaatggaagccatttagtcaaaagcagataatcttattggaacaatcctatcagaaacatcaaatatcaagagaccatggctggattaagctagataataattttgaggtcaattttgataaagatccaatggaaatgcgcctccctattcgtagccctattaaacgagactttttatcaggaattcagattgaatttaagcagtcttctcaccagagaagtttaagggccaggttgtactggcttcaggttgataatcagttaccaggtgcaatgttccctgttgtatttcatcctgttgcccctccaaaatctattgctttagattcagagcccaagcctttcattgatgtgagtgtcatcacaagatttaatgagtacagtaaagtcttacagttcaagtattttatggtcctcattcaggaaatggccttaaaaattgatcaagggtttctaggagctattattgcactgtttaccccaacaacagaccctgaagctgaaagaagacggacaaagttaatccaacaagatattgatgctctaaatgcagaattaatggagacttcaatgactgatatgtcaattcttagtttctttgaacatttccatatttctcctgtgaagttgcatttgagtttgtctttgggttccggaggtgaagaatcagacaaagaaaaacaggaaatgtttgcagttcattctgtcaacttgctgttgaaaagcataggtgctactctgactgatgtggatgaccttatattcaaacttgcttattatgaaattcgatatcagttctacaagagagatcagcttatatggagtgttgttaggcattacagtgaacagttcttgaaacagatgtatgtccttgtattggggttagatgtacttggaaacccatttggattaattagaggtctgtctgaaggagttgaagctttattctatgaacccttccagggtgctgttcaaggccctgaagaatttgcagaggggttagtgattggagtgagaagcctctttggacacacagtaggtggtgcagcaggagttgtatctcgaatcaccggttctgttgggaaaggtttggcagcaattacaatggacaaggaatatcagcaaaaaagaagagaagagttgagtcgacagcccagagattttggagacagcctggccagaggaggaaagggctttctgcgaggagttgttggtggagtgactggaataataacaaaacctgtggaaggtgccaaaaaggaaggagctgctggattctttaaaggaattggaaaagggcttgtgggtgctgtggcccgtccaactggtggaatcgtagatatggccagtagtaccttccaaggcattcagagggcagcagaatcaactgaggaagtatctagcctccgtccccctcgcctgatccatgaagatggcatcattcgtccttatgacagacaggaatctgagggctctgacttacttgagaatcatatcaaaaagttggaaggagagacttaccgataccactgtgctattcctggaagcaagaagacaatccttatggttacaaataggcgagtgttgtgtataaaggaagttgaaatcctgggccttatgtgtgtagactggcaatgtccatttgaagattttgtatttcctcctagtgtcagtgaaaatgtgctaaaaatttcagttaaggaacagggtctgttccacaaaaaagacagtgccaatcaaggctgtgttcgaaaagtttacctgaaggacaccgccacagcagagagagcatgtaatgccattgaggatgcacagtcaacgagacagcagcaaaaattgatgaagcagtcatcagtgagacttctcagaccccaattgccatcttaatcacagacctcaggggctccaacagggagaaaaaacaatcactggtcttgtctataagtcactctgctttatcttgctaaagacaatttttcaagcaatcctttagttttagttttctggaatagctagtattgggttttctagttttttcaccttttagtttttactctaattttgtaaccatgtatatgctagcagtccacttctacgccaccacccaaatgggtcagacccttgaagaaacgtcacttcaaactcagaatgaaattttcattaatattaaaattgtgaagcaaaggtcaataggcttatatttaattaaagccttactgaagaataagaaatgagcttagaatgactagtgttctttgaaaggtttttttatttttgtttttttggggttttttttttttttgagaccgagtcttgctctgtcgcccaggctggaatgcagtggtgcgatcttggctcactgcaatctctgcctctcgggttcaagctgttctactgcctcagcctcctgagtagctgggattacaggtgtgtgccaccacgcctgggtaattttttttttttttgtatttttagtagagatgagtttcaccatgttggtcagtctagtctcgaactcctgaccttgtgatccgcatgcctcagcctcccaaagtgctgggattacaggcatgagccaccacggcccgccaaaaggctttaacccatgaacaaatgttggatcctgacattttgtttaagagtgatttgttcaataattgaactgagttaacattcttggtaaaccaggtaattgaatgaagaaaggtcactaaagggagaaatgacatgttttctattttcttttcatgaaaacactgtttttccccctaataaagcatattttactttggtgcttatttttcctccttgcagtctaataaaaaaatctggacaatcaaaccttaaaatagctacactctgccctctgtaatgtagcattcataaaaatttggaagtatttacatcctctttcaagatgagcttatatgacacaattattatttgctgatacatgaaaatactgcactttaagtttctcaagactctgaaatatgtaaaattcaatatttttatattcccagaaattgtttcttacaggttgaaagtcttttaagggcatcacaaattaacatttactcctaatgcacgcctagaatgtattttaaatacttactaagaagaatgaaaattctttggttgttttatatataaataaggcatatataatgacactgtgttctgtgagggagcaggccctgtgagaatcaattcaggacagtatttttttttgtcctttctccatccttgatcagagataaactattaaaactttaaaaaatactcaaaaatatgtaagttttttggttgaacctttagatttgctcataatgtttaacataacaacatttatttcaaatcactgaattcatggagatgtggacacgcttggtttgctctatttttgtttatgtgtgatagtggttctgtcatcatcattcatgttttttaaggcctggtcataaaactttaaattttactagtgttacttaatgtatattctaaaaagagaatgcagtaactaatgccctaaatgtttgatctctgtttgtcattactttttcaaaattatttttttctgtaaagtataatatataaaacttcttgcttaaattgaatttctatattagtggttaattgcagtttattaaagggatcattatcagtaatttcatagcaactgttctagtgttttgtgtttttaaaacagaattaggaatttgagatatctgattatatttttcatatgaatcacagctgttgacaatgtcccatatatttaagaaattatatcatactgatactatttgtaacattttgatttgatttaatctccagggacagaaataattcattggtaaagtgtaataatgcgttttttaaaaatgctttgagaggtaattacttgcatatgagagaaataaaacatttggcacattgtttacaggtgtg

SEQ ID NO: 198598 - DNA, 14579 bp, Homo sapiens
  Payload ID: 19192
  Gene Name: vacuolar protein sorting 13 homolog C (S. cerevisiae)
  Uniprot ID: Q709C8
  ENST ID: ENST00000395896
  CDS Start-End: 75-10961
tgcagcgctggtcgcagccctcagctgcgccgggcggttccggctcctccctctccttgtgcctcagcgccaccatggtgctggagtcggtggtcgcggacttgctgaaccgcttcctgggggactatgtggagaacctgaacaagtcccagctgaagctgggcatctggggcggaaatgtggctttagataatctacagataaaagaaaatgccctgagtgaattggatgttccttttaaagtcaaggctggccaaattgataaattaactttgaagattccttggaagaacctttatggagaagcagttgttgcgaccctggaaggattatacctgcttgttgtccctggagcaagtattaagtatgatgctgtaaaagaagaaaaatccttgcaggatgttaaacagaaagagctatcccgaattgaagaagcccttcaaaaagcagcagaaaaaggcacacattcaggggagttcatatatggcttggagaactttgtttacaaggacatcaagcctggacgtaaacgtaaaaagcacaaaaaacattttaagaaaccttttaaaggtcttgatcgttcaaaagataagccaaaagaagccaaaaaggatacatttgtggaaaaattggcaactcaagtaataaaaaatgtacaagtaaaaatcacagatattcacattaaatatgaagatgatgtcactgatccaaagcggcctctttcatttggtgtcacactgggagagcttagtctactgactgcaaatgaacactggactccatgcatattaaatgaagcagacaaaattatatacaagcttatacgacttgatagtcttagcgcctactggaatgtaaattgcagcatgtcttaccagagatcaagggaacagattttggatcagctgaaaaatgaaattcttacaagtggaaatatacccccaaattatcaatacattttccagccaatatcagcctctgcaaaactctacatgaatccttatgcagaatcagagctcaaaacgcccaaactggattgcaacatagaaatacaaaatattgccattgaactgaccaaacctcagtacttaagtatgattgaccttttggagtcagtggattatatggttaggaatgcgccttataggaaatacaagccttatttaccacttcataccaatggtcgacgatggtggaaatatgcaattgattctgttcttgaagttcatataagaaggtatacacagatgtggtcatggagtaacataaaaaagcacaggcagttactcaagagttataaaattgcctacaaaaacaagttaacacagtctaaagtctcagaagaaatacagaaagaaattcaggacttggagaagactctagatgtttttaacataattttagcaaggcaacaagcacaagttgaggtgattcggtctgggcaaaaattaaggaaaaagtctgctgacacaggcgagaaacgtggaggctggtttagtgggttgtggggtaagaaagagtctaagaaaaaggacgaagaatcattgattcctgaaactattgatgaccttatgactccagaggaaaaagataaactcttcactgccattggttatagtgagagtacccacaacctaactttacctaagcagtatgttgcccatattatgaccctgaagttagtaagcacctctgttacgataagagaaaacaagaatattccagaaatactaaaaattcagataattggcctgggcactcaagtatctcagcgaccaggagcacaagcacttaaggtagaagcgaaattagaacactggtatataacaggtttgagacagcaggatattgtgccatcacttgtggcttcaattggtgacactacatcatccttgcttaaaattaaatttgaaaccaatccggaggatagtcctgctgaccagactctgattgttcagtcccagcctgtggaggtcatctatgatgctaaaactgtcaatgcagtggttgaattctttcaatcaaataagggattggatcttgagcaaataacatcagcaacattgatgaagctggaagaaattaaggagagaacagctacaggacttacacatattattgaaactcgaaaagtccttgatttaaggataaatctgaagccttcttatctagtagttccacagacgggtttccaccatgaaaagtcagatcttctgattttagattttggtacatttcagctcaacagtaaagatcaaggtttacagaagactactaattcatctctggaagaaataatggataaggcatatgacaagtttgatgttgaaataaaaaatgtacaactactttttgcaagagcagaggaaacctggaaaaagtgtcgatttcagcatccatcaactatgcatatattgcaacccatggatattcatgttgagttggctaaggccatggtagaaaaagacattagaatggccagatttaaagtgtcaggaggacttcctttgatgcatgtgagaatttctgaccagaagatgaaagatgtgctatatttgatgaacagtatacctttgccacagaaatcatcagcccagtctccagagagacaggtatcctcaattcctattatttcaggtggtacaaaaggtctacttggtacttcactattgctagacactgtggaatcagagtctgatgatgagtattttgatgctgaagatggagaaccacagacttgtaaaagtatgaaaggatcagaacttaaaaaagctgcagaggtcccaaatgaggagctcatcaatcttctactcaagtttgaaattaaagaagtgattttggaatttactaaacagcagaaagaagaagatacaattctagtatttaatgttactcagttaggaacagaggccacaatgagaacatttgacttaactgtggtatcttatttaaagaaaatcagcttggattatcatgaaattgaaggatccaaaaggaagccccttcacttgattagctcttctgacaaacctggattagatcttttgaaagtggagtatattaaggctgataagaatggacctagttttcaaactgcttttggaaaaactgaacaaacagttaaggtggccttttcatctttaaatctgttgctgcaaacacaagctcttgtcgcttctattaattacctcacaaccattattccatctgatgatcaaagcataagtgttgctaaggaggtacaaatttcaactgaaaaacaacaaaaaaattcaactctgccaaaagcgattgtatcctccagagatagtgacattattgatttcaggctatttgccaagttgaatgctttctgtgtcattgtttgcaacgaaaagaacaatatcgccgaaatcaagattcaaggactggattcctccctttctctccagtcaagaaagcagtcactttttgcccgactagaaaatattattgtcacagatgttgatccaaagacagttcataagaaagctgtgtcaataatgggaaatgaagttttccgttttaatttggatttgtatccagatgctactgagggggatttgtatactgacatgtccaaagtggatggtgtgctgtctctgaatgttggctgtattcagattgtctatcttcataaattccttatgtcacttctgaacttcctgaataatttccagacagccaaagagtctctgagtgctgccactgcccaggctgcagaaagggctgccacaagtgtgaaagatcttgcccagaggagttttcgtgtttccatcaatattgatttgaaagcaccggttatagtcatcccacagtcttctatttccaccaatgcagtagtggtagatcttgggttaatcagagttcataatcagttcagtctggtgtctgatgaagactacttaaatcctccagtaattgatagaatggatgtgcagctaacaaagcttacactttataggacagtgatccagccaggcatctaccatcctgatattcagctgttgcacccaattaacttggaatttcttgtaaatcggaatctagctgcatcttggtaccacaaggtgcctgttgtggaaattaaaggacatcttgattcaatgaatgttagtctaaatcaagaagatcttaatcttttatttaggatactaacagaaaatctctgtgagggtactgaagacttggataaagtgaaaccaagagtacaagagacaggtgaaattaaagagccccttgaaatctctatatcacaagatgtacatgattcaaaaaatactttaacaactggagtggaagaaattaggtctgtagacatcattaatatgctgctgaattttgaaattaaagaggttgtggttactttgatgaaaaaatcagaaaagaaaggaaggcctttacatgagctaaatgtcctgcaacttggaatggaagctaaagttaaaacctatgacatgactgctaaagcttatctaaaaaaaattagtatgcagtgctttgatttcactgactctaaaggggaacctcttcacattattaactcttctaatgtgactgacgaaccccttctgaaaatgttactgacaaaggcagacagtgatggaccagaatttaaaactattcatgacagtaccaaacagagactgaaggtttcatttgcatccttagacttagtacttcatttggaagctttactttccttcatggattttttatcatctgctgctccattctctgagccttcctcttctgagaaggaatccgagctgaaaccacttgtgggggagtccagaagtatcgctgtcaaagctgtatccagcaacatttcccaaaaggatgtgtttgatttaaagatcacagctgaattaaatgcatttaatgtctttgtctgtgatcagaagtgtaacattgcagatattaaaatacatggaatggatgcctctatttctgtgaagcctaagcagactgatgtgtttgccagacttaaagatattatagttatgaatgtagatttgcagtccattcacaaaaaggctgtctctattttgggagatgaagtctttaggttccaactgactctttatccagatgccacagaaggagaggcctatgctgatatgtccaaagtagacggcaaacttagttttaaagtgggttgtattcagattgtttatgttcataaattcttcatgtctcttttgaacttcctcaacaatttccaaactgctaaagaagctttgagtacagccacagtccaggctgcagaaagagctgcttccagcatgaaagacttggctcaaaagagtttccgccttttgatggatattaatttgaaagcaccagttattattattcctcagtcttcagtatcacctaatgctgttatagcagatctgggtttaatcagagttgaaaacaagtttagcttggttcctatggaacattattctcttcctccagtcattgataaaatgaacatcgaactcactcagttgaagctgtcaagaactattttgcaggctagcttgccacaaaatgacattgaaattttaaaaccagtcaacatgcttttgtccatacagcgaaacttagcagcagcatggtatgtgcaaattccagggatggagataaaaggaaaactaaaacctatgcaggttgctctcagtgaagatgacttgacagttttaatgaaaattttgctagaaaatcttggagaagcttcctcacaaccaagccctacacagtctgtgcaggagactgtaagagtgagaaaagttgatgtttcaagtgtacctgaccatctcaaagaacaagaagattggacagactcaaagctctctatgaaccagattgtcagtctccaatttgactttcactttgaatctctttccattatcctttataacaatgatatcaaccaggaatctggagttgcatttcataatgacagtttccaacttggtgaactcagactacatcttatggcctcctcagggaagatgtttaaggatggctcaatgaatgtcagcgttaaacttaagacatgcacccttgatgatctcagagaaggaattgagagagcaacatcgagaatgattgacagaaagaatgaccaagataacaacagttctatgattgatataagttacaaacaagacaaaaatggaagtcaaattgatgctgttcttgacaagctgtatgtatgtgccagtgtggaatttctgatgactgtggcagatttctttatcaaagctgtgcctcagagtccagaaaatgtggcaaaagaaacacagattttaccaagacagactgccacagggaaggtcaagatagagaaagatgactctgttagaccaaatatgactttaaaggccatgatcacagatccagaagtggtatttgttgccagcctgacaaaggctgatgctcctgctctgacagcctcgtttcagtgcaacctttctctgtcaacatccaaactcgaacagatgatggaagcttctgtgagagatctgaaagtgctcgcttgcccttttctcagagaaaagagagggaaaaacattaccacagtcttgcagccctgttctttatttatggaaaaatgtacgtgggcttcaggaaagcaaaatataaatattatggttaaagaatttataattaagatttcacccataattcttaatactgtgttgacaatcatggctgcattgtctccaaaaacaaaagaagatggatccaaagatacgtctaaggaaatggaaaatctttggggtatcaaatcgattaatgattataacacttggtttcttggtgttgacacggcaacagaaataacggaaagcttcaaaggcattgaacattcactgatagaggaaaattgtggtgttgttgtagaatccattcaagttaccttagaatgtggccttggacatcgaactgtacctttattattggcagagtctaagttttcaggaaatattaaaaattggacttctctaatggctgctgttgctgacgtgacactacaggtgcactattacaatgagatccatgctgtctgggagccactgattgagagagtggaggggaagagacaatggaatttaaggcttgatgtaaagaagaacccagttcaggataaaagtttgctgccaggagatgattttattcctgagccacaaatggcaattcatatttcttcaggaaatacaatgaatataacaatatccaaaagttgtcttaatgttttcaacaatttagcaaaaggtttttcagagggcactgcttctacttttgactactctttaaaggacagagctccttttacggtaaaaaatgctgtaggtgttcccattaaggtgaagcccaattgtaatctcagagtaatgggcttccctgagaaaagtgatatttttgatgttgatgctggccagaatttggaactggagtatgccagcatggtaccttcaagtcaagggaacctatctatattgagccgtcaagaaagctccttcttcactctgaccattgtacctcatggatatacagaagttgcaaatatccctgtggccagacctggacggcgattgtataatgtacggaatcccaatgccagtcattctgactctgtcttggtacaaattgatgcaactgaagggaataaagtaattacccttcgctctcctctacagatcaaaaaccatttctccattgcatttatcatctataaatttgttaagaatgttaagctattggagcgcattgggatagccagacctgaagaggagttccatgttcctttagattcatatagatgtcaattgtttatccagccagctggaatcttagagcatcagtacaaagaatctaccacttatatttcctggaaggaagaacttcataggagcagggaagtcagatgcatgttgcagtgtccatcagtagaagtcagcttcttacctctcatagtgaatacagttgctctgcctgatgaattgagctacatatgtacacatggggaagactgggatgtagcttacattattcatctttatccttctctcactttgcggaatcttctcccatattccctaagatatttacttgagggaacagcagaaactcatgagctggcagaaggcagtactgctgatgttctgcattcgagaatcagtggtgaaataatggaattagtcctggtgaaataccagggcaaaaactggaatggacatttccgcatacgtgatacactaccagaattctttcctgtgtgtttttcttctgactccacagaagtgacgacagtcgacctgtcagtccacgtcaggagaattggcagccggatggtgctgtctgtctttagtccctattggttaatcaacaagactacccgggttctccagtatcgttcagaagatattcatgtgaaacatccagctgatttcagggatattattttattttctttcaagaagaagaacatttttactaaaaataaggtacaattaaaaatttcaaccagtgcctggtccagtagtttctcattggatacagtgggaagttatgggtgtgtgaagtgtcctgccaacaatatggagtacctggttggtgttagcatcaaaatgagcagtttcaacctttcacgaatagttaccctgactcccttttgtaccattgcaaacaagtcatcattagaactagaagttggcgagattgcatctgatggctcaatgccaactaataaatggaactatattgcttcttcagagtgccttccattttggccagaaagtttgtcaggcaaactttgtgtgagagtggtgggctgtgaaggatcttccaaaccattcttttataaccgacaggataatggcactttattgagcttagaagatctgaatgggggtatcttggtggatgtaaacactgccgaacattcaactgtcataactttttctgattaccatgagggatctgcacctgccttgataatgaaccatacaccatgggacatcctcacatacaaacagagtgggtcaccagaagaaatggtcttgctgccaagacaggctcgactttttgcctgggcagatcctactggtaccagaaaacttacatggacatatgcagcaaatgttggggaacatgatctgttaaaggatggatgtggacagtttccatatgatgcaaacatccagatacactgggtatcatttctggatgggcgccagagagttttgcttttcaccgatgatgttgccttggtttccaaagcactgcaggcagaagaaatggaacaggctgattatgaaataaccttgtctctccacagtcttgggctttcactggttaacaatgaaagcaagcaggaagtttcctatattgggataaccagttctggtgttgtttgggaggtgaaaccaaagcagaaatggaagccatttagtcaaaagcagataatcttattggaacaatcctatcagaaacatcaaatatcaagagaccatggctggattaagctagataataattttgaggtcaattttgataaagatccaatggaaatgcgcctccctattcgtagccctattaaacgagactttttatcaggaattcagattgaatttaagcagtcttctcaccagagaagtttaagggccaggttgtactggcttcaggttgataatcagttaccaggtgcaatgttccctgttgtatttcatcctgttgcccctccaaaatctattgctttagattcagagcccaagcctttcattgatgtgagtgtcatcacaagatttaatgagtacagtaaagtcttacagttcaagtattttatggtcctcattcaggaaatggccttaaaaattgatcaagggtttctaggagctattattgcactgtttaccccaacaacagaccctgaagctgaaagaagacggacaaagttaatccaacaagatattgatgctctaaatgcagaattaatggagacttcaatgactgatatgtcaattcttagtttctttgaacatttccatatttctcctgtgaagttgcatttgagtttgtctttgggttccggaggtgaagaatcagacaaagaaaaacaggaaatgtttgcagttcattctgtcaacttgctgttgaaaagcataggtgctactctgactgatgtggatgaccttatattcaaacttgcttattatgaaattcgatatcagttctacaagagagatcagcttatatggagtgttgttaggcattacagtgaacagttcttgaaacagatgtatgtccttgtattggggttagatgtacttggaaacccatttggattaattagaggtctgtctgaaggagttgaagctttattctatgaacccttccagggtgctgttcaaggccctgaagaatttgcagaggggttagtgattggagtgagaagcctctttggacacacagtaggtggtgcagcaggagttgtatctcgaatcaccggttctgttgggaaaggtttggcagcaattacaatggacaaggaatatcagcaaaaaagaagagaagagttgagtcgacagcccagagattttggagacagcctggccagaggaggaaagggctttctgcgaggagttgttggtggagtgactggaataataacaaaacctgtggaaggtgccaaaaaggaaggagctgctggattctttaaaggaattggaaaagggcttgtgggtgctgtggcccgtccaactggtggaatcgtagatatggccagtagtaccttccaaggcattcagagggcagcagaatcaactgaggaagtatctagcctccgtccccctcgcctgatccatgaagatggcatcattcgtccttatgacagacaggaatctgagggctctgacttacttgagcaagaactggaaatacaggaataaatgtttcctaaactactacttgatttcatccttaaaaatcaaaacaaactgtggtgttaattgactgtgtgtgaattccattgtcaattttaatgaaattttctttaaaactctcacctccatctgaacttttcatagtagtgggattgactacaaataaaaacttgtggtattcctggtaatactgtccagaaataagagattagtataaaatattaaaggatgcagagaatcagctctcttctgcgtttaatagatgaaagcctttattgagctcagaagcagatactgttactatcatttcgaaaattttatcttatggtgttcatgtgcatttcaggtaaaattgaaaaacaggacaattattatgtccaattaatatgtttatgtttgtgagtcttgatgatggaattacatagctttctgtttcacaaatggctctaaatttgcttaagttacgggactattacctggagcatctgctttaataattgaattgtcagttgctctgagcctgcccttagacctcaagtaataaatagttggcacatgaattttgaggatatgtttcctcttccctctttttcctatttaaccccttggtactgttgctaaataaatgatagccattttataattatgttatatacattttcagcctttagcatttctgcttttcaaaaattgaatctccttgttggttatgcttatttcataattattagttttaattaatgtagatagaagttgaacatgtaattaggcaaattgctgtgtggcacttgaatacatagatttctttattttcaaaaaccaaccttttgcttttaaatccttagagagggtttattatcttagagaaaaaataattataatcattatttttgaaattagtatcctcttaattctcaacataagttatgtttcaatttcttttttttgtaataaatgatggaaatgtttaacaatgtcttatctagcaactttcatgcttctcctcagaaatgaagccaaagtataaacttagatttaatgtgttgtatatttgaagagaatgaaactattaacatataattgttcagttggattatgtattttaaggattgcagttatcaaaataataaattgaatgttttatgtttaaccactttaaagaagaaagactgacatccaaaaaccagcgtgtgctagatatacaaaggaaattacttctgtccttaagggaccaagtataacaaaacatgtaactgttaaaagtagctgacaaacctttcttgtgcctagataatttagcattggcaaaaatgtcaccacatgcagttttctaggagagtcaagcacaaataactaattcaagatgctgacttaaatcatctccaatagttacccttcctgagattctaaagtaacaatttttaattttactggttatattgctgttttactgagacttacttttaagaacccctgtaacttaagattttttcttaattgttttgtttagctctgttattaattttttccttgtgatatctttttataactctctgtcaaaaagcacaaaacttcaagaaacttttaattattttgtctgaacatataatcttgtctgatttcttagtttttattaagatatcagacaacttttaaaactttagtgcattattataattactggaagaaaaagaatgattatacactaatgagaggacttggtagtttttgtcgtggatgtcaagtgtgggcatggataattgaaatatttaggctatttcattctttgcccatcttgctgtgatcagttagttgggtaaaaatatttattgattatttagactgtactggatatacaaaagaagccttctgtccttaagggaccgagtaaaacaaaacatggaaatattaaagagtattagagtataaaagtatatctttttagccctttgtaatatggccaaattctaaataatttatttggggatcttttgatcctcatgttcctttttctcctaagtactactttgtattctttaatatgcagctttgagagttactgaatcatatattatatttccatgagatgtactattctacttatcctctaatcttcatatatatatacacacacacatatatatacacatacatatatacacacgtacatatatgtacacatacagatatacatacacacaaacacatatatacacacatacatatacacacatatatatacacatacaaatatacacatatatacacatacatatatatacacacatacaaatatacccatatgtacacatacatatatacacatacatatatacacacacatatacacacatatatacgcaaacatacacatatttacacatacatatatacatacattatatgtatgtatatatagtcatttaatactcattttggttcacatacttatgatcatgcaacgtttaaaacagcatttcttgctttttagttttagttatatttttccatgttcttagaaatgcctcattaacatttttaattcttgtattgccatctattgaggtgacattacattgtgtttttatctcgtcttaattcatgacattaaattattctactaacagtaataatgctgtaataaacatcattatagattttgcttttttatatcttgtttgctttttcatatttccttagaatttacttgaaaaaattgaattactgggtaaagggcttttgcaaagtattgttaaattcctcgagttgcatttttggaaaggggacgtgaatattttatcaactaatttggtctccctgctgccattagtgactgaatatcttaatctgaatctcagagtgtagtgggtttttagtagtgctgaagacaagttttctaaagtgtattatggtgataaattatattttaaaaactgtcaatggcttgaagcacaatagcctaataactaacgaaaatacatacaagatagaaagtgggtagtatttcttgtacttgcatttcagatctaaatattttaacatatttaaatttcaagctgcagataaatgcattacattattaaattcatttcccattttctctttgaagaaattaaggcaaaagtgttaaaagattttaactaattcgcacaagtgaattgtgaaacaagtagctattgctgtgaaatctgcactcctctctgagactcattctgaagatgagatcccagttctttgtggattcctcttccttattcatggctttttgcaattgtcaaggaatgactaggtaccaagcaactttaaaaaatgtatatttaagcattgaaataatatcaaatgtgatttctctgcttgtggttatattgattatattatccttttaataatattggcattatattcttggtcgtaaaatgtcaaggtcttatttattcagtatatttatgttctgtattttcatatatattatctattttcagccatgcattatatataatgtcagtaatagtatttcattagcattcattataaaaaaactcgtttttaatatttgactaattcaagtcacagtacttttgagatagctgaaaaggaaaataaatgtgttttaatgtgctacta

SEQ ID NO: 198599 - DNA, 11012 bp, Homo sapiens
  Payload ID: 19192
  Gene Name: vacuolar protein sorting 13 homolog C (S. cerevisiae)
  Uniprot ID: Q709C8
  ENST ID: ENST00000395898
  CDS Start-End: 75-10832
tgcagcgctggtcgcagccctcagctgcgccgggcggttccggctcctccctctccttgtgcctcagcgccaccatggtgctggagtcggtggtcgcggacttgctgaaccgcttcctgggggactatgtggagaacctgaacaagtcccagctgaagctgggcatctggggcggaaatgtggctttagataatctacagataaaagaaaatgccctgagtgaattggatgttccttttaaagtcaaggctggccaaattgataaattaactttgaagattccttggaagaacctttatggagaagcagttgttgcgaccctggaaggattatacctgcttgttgtccctggagcaagtattaagtatgatgctgtaaaagaagaaaaatccttgcaggatgttaaacagaaagagctatcccgaattgaagaagcccttcaaaaagcagcagaaaaagataagccaaaagaagccaaaaaggatacatttgtggaaaaattggcaactcaagtaataaaaaatgtacaagtaaaaatcacagatattcacattaaatatgaagatgatgtcactgatccaaagcggcctctttcatttggtgtcacactgggagagcttagtctactgactgcaaatgaacactggactccatgcatattaaatgaagcagacaaaattatatacaagcttatacgacttgatagtcttagcgcctactggaatgtaaattgcagcatgtcttaccagagatcaagggaacagattttggatcagctgaaaaatgaaattcttacaagtggaaatatacccccaaattatcaatacattttccagccaatatcagcctctgcaaaactctacatgaatccttatgcagaatcagagctcaaaacgcccaaactggattgcaacatagaaatacaaaatattgccattgaactgaccaaacctcagtacttaagtatgattgaccttttggagtcagtggattatatggttaggaatgcgccttataggaaatacaagccttatttaccacttcataccaatggtcgacgatggtggaaatatgcaattgattctgttcttgaagttcatataagaaggtatacacagatgtggtcatggagtaacataaaaaagcacaggcagttactcaagagttataaaattgcctacaaaaacaagttaacacagtctaaagtctcagaagaaatacagaaagaaattcaggacttggagaagactctagatgtttttaacataattttagcaaggcaacaagcacaagttgaggtgattcggtctgggcaaaaattaaggaaaaagtctgctgacacaggcgagaaacgtggaggctggtttagtgggttgtggggtaagaaagagtctaagaaaaaggacgaagaatcattgattcctgaaactattgatgaccttatgactccagaggaaaaagataaactcttcactgccattggttatagtgagagtacccacaacctaactttacctaagcagtatgttgcccatattatgaccctgaagttagtaagcacctctgttacgataagagaaaacaagaatattccagaaatactaaaaattcagataattggcctgggcactcaagtatctcagcgaccaggagcacaagcacttaaggtagaagcgaaattagaacactggtatataacaggtttgagacagcaggatattgtgccatcacttgtggcttcaattggtgacactacatcatccttgcttaaaattaaatttgaaaccaatccggaggatagtcctgctgaccagactctgattgttcagtcccagcctgtggaggtcatctatgatgctaaaactgtcaatgcagtggttgaattctttcaatcaaataagggattggatcttgagcaaataacatcagcaacattgatgaagctggaagaaattaaggagagaacagctacaggacttacacatattattgaaactcgaaaagtccttgatttaaggataaatctgaagccttcttatctagtagttccacagacgggtttccaccatgaaaagtcagatcttctgattttagattttggtacatttcagctcaacagtaaagatcaaggtttacagaagactactaattcatctctggaagaaataatggataaggcatatgacaagtttgatgttgaaataaaaaatgtacaactactttttgcaagagcagaggaaacctggaaaaagtgtcgatttcagcatccatcaactatgcatatattgcaacccatggatattcatgttgagttggctaaggccatggtagaaaaagacattagaatggccagatttaaagtgtcaggaggacttcctttgatgcatgtgagaatttctgaccagaagatgaaagatgtgctatatttgatgaacagtatacctttgccacagaaatcatcagcccagtctccagagagacaggtatcctcaattcctattatttcaggtggtacaaaaggtctacttggtacttcactattgctagacactgtggaatcagagtctgatgatgagtattttgatgctgaagatggagaaccacagacttgtaaaagtatgaaaggatcagaacttaaaaaagctgcagaggtcccaaatgaggagctcatcaatcttctactcaagtttgaaattaaagaagtgattttggaatttactaaacagcagaaagaagaagatacaattctagtatttaatgttactcagttaggaacagaggccacaatgagaacatttgacttaactgtggtatcttatttaaagaaaatcagcttggattatcatgaaattgaaggatccaaaaggaagccccttcacttgattagctcttctgacaaacctggattagatcttttgaaagtggagtatattaaggctgataagaatggacctagttttcaaactgcttttggaaaaactgaacaaacagttaaggtggccttttcatctttaaatctgttgctgcaaacacaagctcttgtcgcttctattaattacctcacaaccattattccatctgatgatcaaagcataagtgttgctaaggaggtacaaatttcaactgaaaaacaacaaaaaaattcaactctgccaaaagcgattgtatcctccagagatagtgacattattgatttcaggctatttgccaagttgaatgctttctgtgtcattgtttgcaacgaaaagaacaatatcgccgaaatcaagattcaaggactggattcctccctttctctccagtcaagaaagcagtcactttttgcccgactagaaaatattattgtcacagatgttgatccaaagacagttcataagaaagctgtgtcaataatgggaaatgaagttttccgttttaatttggatttgtatccagatgctactgagggggatttgtatactgacatgtccaaagtggatggtgtgctgtctctgaatgttggctgtattcagattgtctatcttcataaattccttatgtcacttctgaacttcctgaataatttccagacagccaaagagtctctgagtgctgccactgcccaggctgcagaaagggctgccacaagtgtgaaagatcttgcccagaggagttttcgtgtttccatcaatattgatttgaaagcaccggttatagtcatcccacagtcttctatttccaccaatgcagtagtggtagatcttgggttaatcagagttcataatcagttcagtctggtgtctgatgaagactacttaaatcctccagtaattgatagaatggatgtgcagctaacaaagcttacactttataggacagtgatccagccaggcatctaccatcctgatattcagctgttgcacccaattaacttggaatttcttgtaaatcggaatctagctgcatcttggtaccacaaggtgcctgttgtggaaattaaaggacatcttgattcaatgaatgttagtctaaatcaagaagatcttaatcttttatttaggatactaacagaaaatctctgtgagggtactgaagacttggataaagtgaaaccaagagtacaagagacaggtgaaattaaagagccccttgaaatctctatatcacaagatgtacatgattcaaaaaatactttaacaactggagtggaagaaattaggtctgtagacatcattaatatgctgctgaattttgaaattaaagaggttgtggttactttgatgaaaaaatcagaaaagaaaggaaggcctttacatgagctaaatgtcctgcaacttggaatggaagctaaagttaaaacctatgacatgactgctaaagcttatctaaaaaaaattagtatgcagtgctttgatttcactgactctaaaggggaacctcttcacattattaactcttctaatgtgactgacgaaccccttctgaaaatgttactgacaaaggcagacagtgatggaccagaatttaaaactattcatgacagtaccaaacagagactgaaggtttcatttgcatccttagacttagtacttcatttggaagctttactttccttcatggattttttatcatctgctgctccattctctgagccttcctcttctgagaaggaatccgagctgaaaccacttgtgggggagtccagaagtatcgctgtcaaagctgtatccagcaacatttcccaaaaggatgtgtttgatttaaagatcacagctgaattaaatgcatttaatgtctttgtctgtgatcagaagtgtaacattgcagatattaaaatacatggaatggatgcctctatttctgtgaagcctaagcagactgatgtgtttgccagacttaaagatattatagttatgaatgtagatttgcagtccattcacaaaaaggctgtctctattttgggagatgaagtctttaggttccaactgactctttatccagatgccacagaaggagaggcctatgctgatatgtccaaagtagacggcaaacttagttttaaagtgggttgtattcagattgtttatgttcataaattcttcatgtctcttttgaacttcctcaacaatttccaaactgctaaagaagctttgagtacagccacagtccaggctgcagaaagagctgcttccagcatgaaagacttggctcaaaagagtttccgccttttgatggatattaatttgaaagcaccagttattattattcctcagtcttcagtatcacctaatgctgttatagcagatctgggtttaatcagagttgaaaacaagtttagcttggttcctatggaacattattctcttcctccagtcattgataaaatgaacatcgaactcactcagttgaagctgtcaagaactattttgcaggctagcttgccacaaaatgacattgaaattttaaaaccagtcaacatgcttttgtccatacagcgaaacttagcagcagcatggtatgtgcaaattccagggatggagataaaaggaaaactaaaacctatgcaggttgctctcagtgaagatgacttgacagttttaatgaaaattttgctagaaaatcttggagaagcttcctcacaaccaagccctacacagtctgtgcaggagactgtaagagtgagaaaagttgatgtttcaagtgtacctgaccatctcaaagaacaagaagattggacagactcaaagctctctatgaaccagattgtcagtctccaatttgactttcactttgaatctctttccattatcctttataacaatgatatcaaccaggaatctggagttgcatttcataatgacagtttccaacttggtgaactcagactacatcttatggcctcctcagggaagatgtttaaggatggctcaatgaatgtcagcgttaaacttaagacatgcacccttgatgatctcagagaaggaattgagagagcaacatcgagaatgattgacagaaagaatgaccaagataacaacagttctatgattgatataagttacaaacaagacaaaaatggaagtcaaattgatgctgttcttgacaagctgtatgtatgtgccagtgtggaatttctgatgactgtggcagatttctttatcaaagctgtgcctcagagtccagaaaatgtggcaaaagaaacacagattttaccaagacagactgccacagggaaggtcaagatagagaaagatgactctgttagaccaaatatgactttaaaggccatgatcacagatccagaagtggtatttgttgccagcctgacaaaggctgatgctcctgctctgacagcctcgtttcagtgcaacctttctctgtcaacatccaaactcgaacagatgatggaagcttctgtgagagatctgaaagtgctcgcttgcccttttctcagagaaaagagagggaaaaacattaccacagtcttgcagccctgttctttatttatggaaaaatgtacgtgggcttcaggaaagcaaaatataaatattatggttaaagaatttataattaagatttcacccataattcttaatactgtgttgacaatcatggctgcattgtctccaaaaacaaaagaagatggatccaaagatacgtctaaggaaatggaaaatctttggggtatcaaatcgattaatgattataacacttggtttcttggtgttgacacggcaacagaaataacggaaagcttcaaaggcattgaacattcactgatagaggaaaattgtggtgttgttgtagaatccattcaagttaccttagaatgtggccttggacatcgaactgtacctttattattggcagagtctaagttttcaggaaatattaaaaattggacttctctaatggctgctgttgctgacgtgacactacaggtgcactattacaatgagatccatgctgtctgggagccactgattgagagagtggaggggaagagacaatggaatttaaggcttgatgtaaagaagaacccagttcaggataaaagtttgctgccaggagatgattttattcctgagccacaaatggcaattcatatttcttcaggaaatacaatgaatataacaatatccaaaagttgtcttaatgttttcaacaatttagcaaaaggtttttcagagggcactgcttctacttttgactactctttaaaggacagagctccttttacggtaaaaaatgctgtaggtgttcccattaaggtgaagcccaattgtaatctcagagtaatgggcttccctgagaaaagtgatatttttgatgttgatgctggccagaatttggaactggagtatgccagcatggtaccttcaagtcaagggaacctatctatattgagccgtcaagaaagctccttcttcactctgaccattgtacctcatggatatacagaagttgcaaatatccctgtggccagacctggacggcgattgtataatgtacggaatcccaatgccagtcattctgactctgtcttggtacaaattgatgcaactgaagggaataaagtaattacccttcgctctcctctacagatcaaaaaccatttctccattgcatttatcatctataaatttgttaagaatgttaagctattggagcgcattgggatagccagacctgaagaggagttccatgttcctttagattcatatagatgtcaattgtttatccagccagctggaatcttagagcatcagtacaaagaatctaccacttatatttcctggaaggaagaacttcataggagcagggaagtcagatgcatgttgcagtgtccatcagtagaagtcagcttcttacctctcatagtgaatacagttgctctgcctgatgaattgagctacatatgtacacatggggaagactgggatgtagcttacattattcatctttatccttctctcactttgcggaatcttctcccatattccctaagatatttacttgagggaacagcagaaactcatgagctggcagaaggcagtactgctgatgttctgcattcgagaatcagtggtgaaataatggaattagtcctggtgaaataccagggcaaaaactggaatggacatttccgcatacgtgatacactaccagaattctttcctgtgtgtttttcttctgactccacagaagtgacgacagtcgacctgtcagtccacgtcaggagaattggcagccggatggtgctgtctgtctttagtccctattggttaatcaacaagactacccgggttctccagtatcgttcagaagatattcatgtgaaacatccagctgatttcagggatattattttattttctttcaagaagaagaacatttttactaaaaataaggtacaattaaaaatttcaaccagtgcctggtccagtagtttctcattggatacagtgggaagttatgggtgtgtgaagtgtcctgccaacaatatggagtacctggttggtgttagcatcaaaatgagcagtttcaacctttcacgaatagttaccctgactcccttttgtaccattgcaaacaagtcatcattagaactagaagttggcgagattgcatctgatggctcaatgccaactaataaatggaactatattgcttcttcagagtgccttccattttggccagaaagtttgtcaggcaaactttgtgtgagagtggtgggctgtgaaggatcttccaaaccattcttttataaccgacaggataatggcactttattgagcttagaagatctgaatgggggtatcttggtggatgtaaacactgccgaacattcaactgtcataactttttctgattaccatgagggatctgcacctgccttgataatgaaccatacaccatgggacatcctcacatacaaacagagtgggtcaccagaagaaatggtcttgctgccaagacaggctcgactttttgcctgggcagatcctactggtaccagaaaacttacatggacatatgcagcaaatgttggggaacatgatctgttaaaggatggatgtggacagtttccatatgatgcaaacatccagatacactgggtatcatttctggatgggcgccagagagttttgcttttcaccgatgatgttgccttggtttccaaagcactgcaggcagaagaaatggaacaggctgattatgaaataaccttgtctctccacagtcttgggctttcactggttaacaatgaaagcaagcaggaagtttcctatattgggataaccagttctggtgttgtttgggaggtgaaaccaaagcagaaatggaagccatttagtcaaaagcagataatcttattggaacaatcctatcagaaacatcaaatatcaagagaccatggctggattaagctagataataattttgaggtcaattttgataaagatccaatggaaatgcgcctccctattcgtagccctattaaacgagactttttatcaggaattcagattgaatttaagcagtcttctcaccagagaagtttaagggccaggttgtactggcttcaggttgataatcagttaccaggtgcaatgttccctgttgtatttcatcctgttgcccctccaaaatctattgctttagattcagagcccaagcctttcattgatgtgagtgtcatcacaagatttaatgagtacagtaaagtcttacagttcaagtattttatggtcctcattcaggaaatggccttaaaaattgatcaagggtttctaggagctattattgcactgtttaccccaacaacagaccctgaagctgaaagaagacggacaaagttaatccaacaagatattgatgctctaaatgcagaattaatggagacttcaatgactgatatgtcaattcttagtttctttgaacatttccatatttctcctgtgaagttgcatttgagtttgtctttgggttccggaggtgaagaatcagacaaagaaaaacaggaaatgtttgcagttcattctgtcaacttgctgttgaaaagcataggtgctactctgactgatgtggatgaccttatattcaaacttgcttattatgaaattcgatatcagttctacaagagagatcagcttatatggagtgttgttaggcattacagtgaacagttcttgaaacagatgtatgtccttgtattggggttagatgtacttggaaacccatttggattaattagaggtctgtctgaaggagttgaagctttattctatgaacccttccagggtgctgttcaaggccctgaagaatttgcagaggggttagtgattggagtgagaagcctctttggacacacagtaggtggtgcagcaggagttgtatctcgaatcaccggttctgttgggaaaggtttggcagcaattacaatggacaaggaatatcagcaaaaaagaagagaagagttgagtcgacagcccagagattttggagacagcctggccagaggaggaaagggctttctgcgaggagttgttggtggagtgactggaataataacaaaacctgtggaaggtgccaaaaaggaaggagctgctggattctttaaaggaattggaaaagggcttgtgggtgctgtggcccgtccaactggtggaatcgtagatatggccagtagtaccttccaaggcattcagagggcagcagaatcaactgaggaagtatctagcctccgtccccctcgcctgatccatgaagatggcatcattcgtccttatgacagacaggaatctgagggctctgacttacttgagcaagaactggaaatacaggaataaatgtttcctaaactactacttgatttcatccttaaaaatcaaaacaaactgtggtgttaattgactgtgtgtgaattccattgtcaattttaatgaaattttctttaaaactctcacctccatctgaacttttcatagtagtgggattgactacaaataaaaacttgtggtattcctggt

SEQ ID NO: 198600 - DNA, 10969 bp, Homo sapiens
  Payload ID: 19193
  Gene Name: vacuolar protein sorting 13 homolog D (S. cerevisiae)
  ENST ID: ENST00000011700
  CDS Start-End: 1-9632
ttcggacagtgggcatggcaaatagagagaaatatggcagaaaaattgcaactgcaagtataggtggcaccaaagttaatgtctcaatgggtagcacgtttgacatgaatggttctcttggctgtttacagcttatggatttgacacaagataacgttaaaaaccagtatgttgtcagcattgggaattctgtaggctatgaaaatatcatcagtgatattggctactttgaatctgtgtttgtcagaatggaagatgcagccctcactgaagctttgagtttcacgtttgttgagagatctaaacaggagtgttttctcaacctgaagatggcttctttacattataaccactctgctaagtttttgaaggagttgacgttatccatggatgaactggaagaaaattttcgaggtatgctgaaaagcgcagccaccaaagtcaccacagtactagctaccaagactgccgagtatagcgagatggtatcgctctttgaaactccaaggaagactcgggaaccctttatcttagaggaaaatgaaatatatgggtttgacctagcttcgtctcatttggacactgtaaagctaatcttgaacataaacattgaatcaccagttgtttctatccctcggaagccggggagtcctgagttgttggtgggacacttgggacagatattcatccagaattttgtggcgggagatgatgaatccagaagtgaccgtctgcaggtggaaatcaaggacattaaactgtattctttgaattgcacccagttggcaggtagagaagctgttgggtctgaaggaagccggatgttttgcccaccttccgggtctggcagtgccaacagtcaggaggaagctcatttcacacgacatgatttctttgaatctttgcatagaggtcaagcttttcacatcctgaacaacaccaccattcagtttaaactggagaagatccctatagagagagaatctgaattgactttttctcttagcccagatgacctgggaacttctagcatcatgaagattgaaggaaaatttgtcaatccagttcaggtggtgttagcaaagcatgtatatgagcaggttttacaaaccctggacaatctcgtgtacagtgaagatctgaataagtatccagccagtgctacctcctccccttgccctgattctcctctgcctcccctcagtacctgtggagaatcttctgttgaaaggaaggagaatggattgttcagccactccagcctttctaacacctctcagaagtcattgtcagtgaaggaagtcaaatcctttactcagattcaagccaccttttgtatatcagagcttcaggttcagctaagtggagatctgactttgggggcccaaggtcttgtgagcttaaagtttcaggactttgaggtggaattcagtaaagaccatccccagactttatctattcagattgccctgcattctctgctgatggaggacttattggagaagaatccagattctaaatataagaacctgatggtgtctcgaggagcccctaagccatctagtttagcacaaaaagaatacctttctcagtcttgcccctcagtgtccaatgtggaatatcctgatatgcctcggtctctcccttcccacatggaagaagctcctaatgtcttccagttgtatcaaaggcccacctctgcgtcccggaaaaagcaaaaggaagtccaagacaaggactatcccttgaccccacctccttctccaacagtggatgagcccaagatacttgttggaaagagtaaatttgatgattccttagtccacatcaacatattcttggtagataagaaacatccagaattctcttccagttacaatcgagttaaccggagcattgatgttgattttaattgcttggatgtgctgatcacactgcaaacctgggttgtgatattagacttttttggaatcggctccactgcagacaaccacgcaatgaggctgcctcctgagggcattctgcacaacgtgaagttggagccacatgcctccatggagtctggacttcaggatccagtgaacaccaaactggatctcaaggttcattcactttctctagtgctgaataagaccaccagtgagcttgccaaagcaaatgtgtccaaattagtagcacacctggaaatgattgagggagacctggccttacagggcagcattgggagtctgtctctaagtgacctcacatgccatggagagttctacagagaacggttcactaccagtggtgaagaagcactcatcttccagacttttaaatacggacggcctgaccctctgctccggagagaacacgacattcgcgtgagcctccggatggcctctgtgcagtatgtgcatactcagcgtttccaggcagaggtggtggccttcattcagcatttcactcagctgcaggatgtcttagggcgccagcgagctgctattgaggggcagacggtgagagatcaagcccagcgctgttcacgggttctcctggatattgaggctggtgctcccgttctcttgatcccagaaagttccagatcaaataatctgattgtagcaaatttggggaagttgaaagtcaaaaataagtttctgtttgctggttttcctggcaccttttccctacaagataaggaatctgtgccttcagcttccccaacgggtattcccaaacacagtctgaggaaaacgacaagcacggaggagcccaggggaacccattcccaggggcagttcacgatgcctcttgctggaatgagcctaggaagcctgaagagtgagtttgtgcccagtacctccaccaagcagcaagggccgcaacccacactgtctgttggccaagagtccagtagtccagaagaccatgtctgcctgctggattgcgttgtcgtggatctccaggacatggacatctttgctgcagagagacatccgagagaatactcgaaggcaccagaggatagtagtggagatctgatcttcccttcctattttgtgcgacagacaggaggaagcctcttaaccgagccttgtaggctgaaattgcaggtggaaaggaatttggacaaagaaataagtcatactgtgccagacatatctatccatggcaatctctcctcagtccactgctctctggatctgtataaatacaagctgatccgcggcttattagagaacaacctgggagaacccatagaggaatttatgcggccttatgatttacaagatccaagaattcatactgtcctgagtggagaagtgtacacctgtatgtgcttcctcattgatatggtgaatgtaagtctggagcttaaagatccaaaaagaaaagaaggtgctgggtccctagccagatttgacttcaagaaatgcaaactgctctatgaaagtttttccaaccaaaccaagtccattaacttggtttcccattccatgatggcttttgacacccgttatgctgggcagaagaccagccctggcatgacgaatgtgttcagctgtatctttcagcccgctaagaacagcagcaccacccaagggtccattcagattgaactacatttcagatctaccaaggattcctcctgctttacagtagttctcaacaatctccgtgtgtttctcatatttgactggctactgttagtccatgattttctccacactcccagtgatattaagaaacaaaatcatgttactccttctcgccaccgtaactctagcagcgaatctgctatagttcccaaaactgtgaagagtggagtagttaccaagcggtcttcccttcctgtgtccaatgaaaggcacctggaggtcaaggtcaatgtaacaggtacggagtttgtggtcattgaagatgtgtcctgcttcgacaccaatgccattattctgaaaggcaccacagtgctcacctataagccccggtttgttgatcgccccttttcaggaagtttgtttggcattgaggtgttttcatgccgactagggaatgagcatgatacagctctttcaattgtggatcccgtacaaattcaaatggagttggtggggaattcttcttatcaaaatagttcaggattgatggatgcattcaatagtgaagatttcccacctgtcctggagattcagttacaagccctggatatcagactctcctataatgatgttcagctgtttcttgccattgcaaaatccatcccagagcaagctaatgctgcagtgccagactcagtggccctggagtcagactccgttggcacttaccttccaggtgcatctcgcgttggagaggaaatcagagaagggacaagacacaccttagatcctgtcttggagttacagctggctaggctgcaggagctgggattcagcatggatgattgtcgcaaagctcttttggcgtgtcaaggccaattgaaaaaggcagcaagttggttgtttaagaatgcggaacctctgaagtctctttccttggcctccaccagccgagatagcccaggggctgtggcagcgccattgatctctggcgtggagatcaaagctgagagtgtgtgcatctgtttcatcgatgactgcatggattgtgatgttcctctcgctgaactcaccttttcccgtctgaattttcttcagcgtgtaagaactagccctgaaggctatgcccacttcaccctttctggagattattataaccgtgctctttcaggctgggagccatttattgagccttggccatgctctgtatcctggcaacagcaggcagctagtcgtctccatcctcctcgactgaagctagaagccaaggccaaacctcgtttggatatcaatatcacttctgtgctaattgaccagtatgtaagtaccaaggaatcgtggatggcagattactgtaaagatgacaaggacatagagtcagctaaatcagaagactggatgggctcttcggtggatcctccatgttttggacaaagcctcccccttgtctaccttagaactaggagtacagccagtctgactaacctagagcaccagatctatgctagagaggtgaaaacccccaagcgccggcagccatttgtcccctttgctctgaggaaccacacggggtgcactttgtggtttgccaccctgaccaccacacccaccagagctgcactctctcacagtgggagtccaggggtagttccagaagggaacggaacatttctcgatgatactcacaatgttagtgaatggcgagaagtccttacaggtgaagagattccctttgaatttgaagcaagaggaaagttaagacacagacacacccatgacctccggattcatcaactgcaagtgagagtaaatggctgggagcaagtgagcccagtgtctgtggacaaagtcgggaccttttttcgatatgcagcaccagataaaaattcatcttcctctacgattggcagcccaagcagcagaacaaatattatacatccccaggtttatttctcttcactcccaccagtgcgggtggtctttgcagtgactatggaaggcagtgcacggaaagtcatcactgtccggtcagccctcattgtgaggaacagacttgagacaccaatggaactaagactggatagcccatcagctccagacaagccagtggtgcttcctgctatcatgccaggggattcgtttgctgtgcctttacacctcacttcttggcggctacaggcccggcccaaaggattgggtgtatttttctgtaaggctcccattcattggaccaatgtagtgaagactgcagaaattagtagcagtaaacgagagtgccactctatggacacagaaaaaagccgatttttcaggttttgtgtggctataaagaaagagaattatccagattatatgccctcaaacatattttctgacagtgcaaaacagattttcagacagcctgggcataccatatatctcctgccaactgtggtaatctgcaacttgctaccctgtgaacttgatttttatgttaaaggaatgccaattaatgggacgctgaaacctggcaaggaggcagctctccatacagctgatacatcccagaacattgagctgggggtatcactggagaatttccccctctgtaaagaattgctcattccacctggaacccaaaactatatggtgagaatgcgactctatgacgtcaaccgtcggcagctgaacctcaccatccggattgtgtgtcgagcagaaggatccttaaagatcttcatttctgctccatattggctgattaacaaaacagggttgccactgatcttcagacaggacaatgccaagacagatgctgcaggccagtttgaggagcatgagctggcccgtagcctgagtcctctcttattctgctatgctgacaaagagcagccaaacctctgcacgatgagaatcggaagggggattcatccagaaggcatgccgggctggtgtcagggcttctccctggatggtggtagtggtgtccgagctttgaaagtcatccagcaaggaaaccgcccagggctgatctataacattggtattgatgtcaagaaaggccgaggtcgatacattgatacctgcatggtcatctttgccccccgttacctgttagataataaatcatctcacaagcttgcatttgcacagagggaatttgccaggggacagggaacagccaatcccgaaggttacatttccacccttcctggttccagtgtggtgttccactggcctcggaatgactatgatcagctattgtgtgtcagactgatggacgttcccaattgtatttggtctggaggctttgaagtcaacaagaataattccttccatatcaacatgagggataccttgggaaaatgcttcttcctacgagtggaaattactctccgaggagctacgtataggatctcatttagtgacacagatcagttacctcctcctttccgaattgacaacttttctaaggtcccggttgtctttactcagcatggcgtagctgaacccaggctccggactgaagtgaagcccatgacttcattggattatgcctgggacgaacccaccttgccaccttttatcactctgactgttaaaggggcagggtcctctgagatcaactgcaacatgaatgatttccaggataatcggcagctttattatgaaaatttcatttacattgctgctacatatacattctctggcttgcaggagggaacaggcaggcctgtggcttccaacaaggccattacctgtgcggagctcgttttggatgtctcacccaagacacaaagagtcattttaaaaaagaaggaaccaggaaagcgttctcagctgtggaggatgacaggaacaggaatgctggcccatgagggctcctcagttcctcacaatcccaataagccctcagccgcccgctccaccgaggggtctgccatcttagatattgctggtctcgctgcagtgactgacaacagatacgagccactgatgctgagaaagcctgaccgcaggcgaagcacaactcagacgtggagtttccgagaaggaaaactgacctgtgggttacatgggttggtcgtccaggccaaaggaggactttctggtttgtttgatggagctgaagttgttcttggtcctgacacttccatggagcttttggggccagttccacctgaacaacaatttattaatcaaaaaatgagacctggttctggaatgttatccatcagagtcatcccagatggaccaactagagcactccagataacagatttctgccaccggaaaagcagccgttcatatgaagtggatgaacttcctgtcaccgaacaagagctgcagaaattaaagaatccagatacagagcaggaattggaagtgcttgtgaggttagaaggtggaattgggttgtccttaattaataaagtcccagaagaactggtctttgcaagtcttacaggaatcaatgtgcactatacacagctggcaaccagtcacatgcttgaactcagcatacaggatgtacaggtggacaatcagctcattggtaccacgcagcccttcatgctctatgtgactcccctgagcaatgagaatgaggtcatcgagaccggcccagctgtgcaagtcaacgcagtgaagttccccagtaagagtgcactgaccaacatctacaagcatctgatgatcacagctcagagattcacagtgcaaattgaggagaaactgctcctcaagctgctaagtttctttggctacgatcaagcagaatcagaggtggaaaaatatgatgaaaacctccatgaaaagacagctgagcaaggtggaacaccaattcgatactactttgaaaatctcaaaatcagcattcctcagatcaagctaagtgtgttcacctccaacaagctcccattggatcttaaggccctaaaaagcaccttggggtttcctttgatacggtttgaagacgctgtgattaatctagatccattcactcgggtacatccctatgagaccaaggagttcatcatcaatgatatcctcaaacatttccaggaggaactcctcagccaggcagctcgaatcctgggatcagtggattttcttggcaatcctatggggcttttgaatgatgtttctgaaggggttactggactgataaaatatggaaatgtcgggggcctcatcagaaatgttacacacggagtatcaaactctgctgccaagtttgctggaacattatcagatggcttagggaagacgatggacaatcggcatcagtcagagcgggagtacatcaggtaccatgcagccacaagtggtgaacaccttgtagccggcatccatggcctggctcatggtatcattggtggactgaccagtgttataacttcgacagtggaaggtgtgaaaacagaagggggtgtcagcggtttcatatctggccttggaaaagggcttgttggcactgtaaccaagccagtggcaggcgccctggattttgcatcagaaacagcccaggcggtgagagacacagccacactcagcggccccaggactcaagcacagagggttcggaaaccgcgttgctgcacggggccccaggggctgcttccccgatattctgagagccaggcggaaggacaggagcagctcttcaaactcacagacaacatacaggacgaattcttcatcgctgtggagaacattgacagctactgcgtgctcatctcctccaaagctgtttacttcctgaaaagtggagactacgtggatcgagaagccattttcctagaagtcaaatacgatgacctctaccactgccttgtctccaaagaccatgggaaggtgtatgtgcaggtgaccaagaaagccgtgagcacgagcagtggagtgtccatccccggcccctcccaccagaagcccatggtccatgtgaaatctgaggtccttgctgtcaagttgtcacaagaaataaactacgcaaagagcctctactatgaacagcagcttatgttaagactcagcgaaaaccgagagcagctggagctggactcctgaagccccgctgctgagatgggcgctcccgacacagcgcagacccaccaggaggaaagaggcccagctctcagctgacgatggaggcagaaccggagtcgggtttggggaagttgtcaaggaatgagggaaagtaaatcctcatgaggaaaagtacaaatggaaatcgtattaatttgtgaggcagggagttattttagattatgggaaataatttttaaaggtattggttaaataacgtttaaaaacatgtactgagatgaatctaatttttagattgccctgtattttgttaacatgtatatatgtacaacagtgtgtttgtaaatatataggaacgtttctgaacagggtctgtgctatgtgtaaaggtttgttaactgtaaagtaatataaagttatattggatcttctattgcactaattctagatgtctaattcaggatactgtctatagaaaggcattcttaaaagttaaagaatgttacgtcttagttttggagactaaagtattcccagtaaagtgggttgaggtgagggctgtggtcctgaaagggacgcctttgacatcgtggctgtccagttgggctgtgagctgtggcacccaggactggcgctggcccttcagaaggatctaggagaggggcttgggagcccacttttaatttctcacccccattttacaaagagtgcttagattcttacaaattatgatgtaagttatccatttggctttttcctaactagtcttaccaaacttagggggaaacctgtgctccattaccacatgggtgcaagtcagcattgtaagttttctcaggttattattattagagaggttggaaacattggtaaactctgttgattgagaaggaaaaaaaaagtcccattgaactgttgcaacaaatcagaaatccacataaaagtgctctcctgcctgggcagcaacaaccaagaacaaagccccgggactgttttctttttaataaagccacaggcaggcatcgtagctccacagcccgaggggacacaggatggaaaccccaggatgagaagggagcagggagagttccagaaagggggatgaaataggagtattaaaaagctgcgttggtaagtttttcatggaaccaagatttgacaaaggcatctcttatccttggttttaaattcctgctgggagcaaggcctggtatgagcgccctgggtcttgtttttggtgtttcgcttttctgtaaggattaagcagatagggagaagggaaaaggggcctcactttagaatgaatgagtcaccttgtgatttttaaatttttattttaataaagctaatcaatttct

SEQ ID NO: 198601 - DNA, 3838 bp, Homo sapiens
  Payload ID: 19193
  Gene Name: vacuolar protein sorting 13 homolog D (S. cerevisiae)
  ENST ID: ENST00000543766
  CDS Start-End: 681-815
acagatgcagccacacttgaggtgccactgaagctatgtgaagagcctgctacccttcaaacagaccaggcccaagcaaggtgccaagccatgtgagagtgcccagtccactgtgtaaatgtgacggcctttgatggtagtgtttgaaaagatacttagtagaaagttgcagagacccgggagcagccatttcacaaaagaaggcaaaaatacctttgagaagaaaggaatgtctgcctctgcactatgtatttgcttgtttgtttctccaaataccatctgttgcagactggggtgcatgacattttaggactcaagcacagagggttcggaaaccgcgttgctgcacggggccccaggggctgcttccccgatattctgagagccaggcggaaggacaggagcagctcttcaaactcacagacaacatacaggacgaattcttcatcgctgtggagaacattgacagctactgcgtgctcatctcctccaaagctgtttacttcctgaaaagtggagactacgtggatcgagaagccattttcctagaagtcaaatacgatgacctctaccactgccttgtctccaaagaccatgggaaggtgtatgtgcaggtgaccaagaaagccgtgagcacgagcagtggagtgtccatccccggcccctcccaccagaagcccatggtccatgtgaaatctgaggtccttgctgtcaagttgtcacaagaaataaactacgcaaagagcctctactatgaacagcagcttatgttaagactcagcgaaaaccgagagcagctggagctggactcctgaagccccgctgctgagatgggcgctcccgacacagcgcagacccaccaggaggaaagaggcccagctctcagctgacgatggaggcagaaccggagtcgggtttggggaagttgtcaaggaatgagggaaagtaaatcctcatgaggaaaagtacaaatggaaatcgtattaatttgtgaggcagggagttattttagattatgggaaataatttttaaaggtattggttaaataacgtttaaaaacatgtactgagatgaatctaatttttagattgccctgtattttgttaacatgtatatatgtacaacagtgtgtttgtaaatatataggaacgtttctgaacagggtctgtgctatgtgtaaaggtttgttaactgtaaagtaatataaagttatattggatcttctattgcactaattctagatgtctaattcaggatactgtctatagaaaggcattcttaaaagttaaagaatgttacgtcttagttttggagactaaagtattcccagtaaagtgggttgaggtgagggctgtggtcctgaaagggacgcctttgacatcgtggctgtccagttgggctgtgagctgtggcacccaggactggcgctggcccttcagaaggatctaggagaggggcttgggagcccacttttaatttctcacccccattttacaaagagtgcttagattcttacaaattatgatgtaagttatccatttggctttttcctaactagtcttaccaaacttagggggaaacctgtgctccattaccacatgggtgcaagtcagcattgtaagttttctcaggttattattattagagaggttggaaacattggtaaactctgttgattgagaaggaaaaaaaaagtcccattgaactgttgcaacaaatcagaaatccacataaaagtgctctcctgcctgggcagcaacaaccaagaacaaagccccgggactgttttctttttaataaagccacaggcaggcatcgtagctccacagcccgaggggacacaggatggaaaccccaggatgagaagggagcagggagagttccagaaagggggatgaaataggagtattaaaaagctgcgttggtaagtttttcatggaaccaagatttgacaaaggcatctcttatccttggttttaaattcctgctgggagcaaggcctggtatgagcgccctgggtcttgtttttggtgtttcgcttttctgtaaggattaagcagatagggagaagggaaaaggggcctcactttagaatgaatgagtcaccttgtgatttttaaatttttattttaataaagctaatcaatttctacaaccttgtcacatgtagctgagtctgggatgactcagtggatcagtggatgcgtggaaggttttggtgtttataactcatgacccaaatccttccaagacacaaatgaagctaatcttcttcccctccctttcctctcccacttcccctctgtgtctgtgtctgtgtgtgtgtgtgtgtgtgtgtgtgtgtgcgcgcgcgcgcgtgcatgcagagaggaaggaagggagctttagcacaagtagctacatagtgttcaaggatcagctttcttgaactccgaggcttggttgcctttgctgaactccaagttagtggattgcagaatggaaacttggcttttgcggcactgggtgagttttagtttgtgtgtgtcttgctggggggtggtgatgattgtctcagcactcacgcactgcacaagatggcagcaggatacagcactgcacaagatggcagctcctctgcagcttcctcctcagcctccctccttgcacccccacaggtttggcttgtggtttttgtcatcagtaacctactgcctgagatcatgatctcttaaaagatgagactctcggaagggttgattgtatgcgtcagtgagccttctatcaccttctggaacaaagtcacttgaaatctcttgatgagattaaggagtttagtgttactaagaaaatctgctttgggccgcagcagtgctgggtgttctcagacctgactgaggaagttagctgcgggctgccctgtgggctggtgcttcaggaggaatccagagaagtgttcagatgccccccttgggctcctttctaattttaatcagctctttaaatagctgcccatctcctgtgattgcacaaccaagcactttgacatttgcaccttaggagaggcagatgttaaaatggaatccaaagaccacctagggcggggctgggtgggagatgggagggccaactgcgagctgctccacttctcagctctcccctgccctgcagccctgggccagacaaggccagaaggtttcaggggcatttgacatcccctcctggttctcaccaggaaaacatccaaagctttggaggaaacaggccctgcccctggctccttaaatgccccgtctctttgtaaactgatattcagccagcaatgcctaagactttgttaagatcatttctactgcttttctttctgcttcaaacacacagttcgtctctgaggaaagtaaaataaatggaataagagtaaattgggtaaggagatatccaaagctacccagtcccttgacccagcacagttggccgacccgtgtcactccctggctgtcgctgcttctctgtgctcactgaagggtgagccaggccagtgcttccccagcccctgggcctggtcactacacagtggaaaacagacaagcggccccttccccaaatcccaagagtgtcttgctgcttggtgggtgctcatcgcaatgttctgaaggctccagggccactttgtttgtaagtatgatctgggcctcaaaataccatagtagctgcttgataaaattctaaaaatatctggttctctattatgtaaacactattacagtcaccagtgtgtgaagactcttgagtctggttctcatatcagagtcatcatttttcttcctgtggaataaaatgccttgtggacttcccaaa

SEQ ID NO: 198602 - DNA, 377 bp, Homo sapiens
  Payload ID: 19193
  Gene Name: vacuolar protein sorting 13 homolog D (S. cerevisiae)
  ENST ID: ENST00000466732
  CDS Start-End: 1-138
gcactgaccaacatctacaagcatctgatgatcacagctcagagattcacagtgcaaattgaggagaaactgctcctcaagctgctaagtttctttggctacgatcaagcagaatcagatttagaatttaagctttaagagtatttgggatcaagagcaagatcctgtctgtttaatgctgtgttttccactttgggttggaacgccagtgtttatttgtattcagacagccacttgggagcctgcctgccagaggtggaaaaatatgatgaaaacctccatgaaaagacagctgagcaaggtggaacaccaattcgatactactttgaaaatctcaaaatcagcattcctcagatcaagctaagtgtgttcacctc

SEQ ID NO: 198603 - DNA, 16320 bp, Homo sapiens
  Payload ID: 19193
  Gene Name: vacuolar protein sorting 13 homolog D (S. cerevisiae)
  Uniprot ID: Q5THJ4
  ENST ID: ENST00000620676
  CDS Start-End: 131-13297
ggaggaaacgccgcgcagcgccgggctggggcgggcggcccgggacaccgacagatttttctgtgaccatgaaagagagaaataaagaatgatccatgatttctaaacaccttttcctgaggatatagtcatgttggaaggccttgtagcctgggttctcaatacctatttgggaaaatatgtcaataacctgaacactgaccagctctcagttgcacttctcaaaggtgctgttgaattagaaaacttgccattaaagaaagatgccttgaaagaattggaattaccatttgaagtcaaagctggcttcattgggaaagtaacccttcagattcccttttatcgcccccatgtggacccttgggtgatctccatctccagccttcacttaattggagccccagagaaaatacaggatttcaatgatgaaaaggagaagctgttggaaagggaacgtaagaaagcactacttcaagccctggaggagaaatggaagaatgaccgccagcagaaaggggagtcctattggtattcagttaccgcctccgtagttacaaggattgtggagaatattgaattaaaaattcaagatgtccatttacgctttgaagatggtgtcaccaatccctcccatccttttgcttttggcatctgcattaagaatgtgtccatgcaaaatgctgtgaatgagcctgtacagaaactaatgcggaaaaagcaattagacgtagcagaatttagcatctattgggatgtcgattgcactttactgggggatttgcctcagatggagttacaggaggccatggccaggagcatggagagtcgcagccatcactacgtcctggagcctgtgtttgcatctgctcttttgaagagaaactgctccaagaagcccctgcggtctcggcacagtccccgtattgattgtgatattcagctggagaccattcccttgaaactctctcagctgcaataccggcaaatcatggaattcctcaaggagctggaacgaaaggagaggcaggtgaagttccgaaggtggaaacccaaggtggcgatatctaagaactgccgagaatggtggtattttgctttgaatgctaacttgtatgagatcagagagcagaggaaacgttgcacctgggactttatgttgcaccgcgctcgtgatgctgtatcttacactgacaaatatttcaacaagttaaaaggaggcctgctgtccacagatgacaaggaggaaatgtgtcggattgaagaggaacagagctttgaggaattgaagattttgcgtgaactggttcatgatcgatttcacaaacaggaagaactagcagagagtctgcgggagcctcagtttgattctccaggagcctgtccgggagccccagaacccggtggaggcagtgggatgctgcagtatctccagtcctggtttcctggatggggtggctggtacgggcagcagaccccagaagggaatgtggttgagggactgtcagcagagcaacaggagcagtggattcctgaagagatcctgggcactgaggagttttttgaccccactgcagatgcctcgtgtatgaacacgtatacaaagcgagatcatgtctttgccaaactgaatttgcagttgcagcgaggtacagtgactctgttacacaaggagcaaggaactcctcaaatgaatgaaagtgctttcatgcagctcgagttttcagatgtaaaacttctagcagagtctcttcctcgaagaaattcctcgttgctttcagtccggttgggtggactgtttcttcgagacctggctacagaaggaactatgtttcctcttctagtcttccctaatccacaaaaagaagttggcagagtctcacaatcttttggtctacaaactacatctgcagacagaagtgatcattacccagctgcagatccagatggccccgtttttgagatgctgtatgagagaaatccggcgcacagccactttgagaggcggctcaatgtcagcacaaggcccttgaacatcatatacaatccgcaggccattaaaaaagtagcagactttttctacaagggaaaggttcatacctcaggttttggttatcagtctgaacttgagctgagagtggctgaagctgcccgaagacaatataacaagctgaagatgcagaccaaggcagaaatccggcaaactcttgatcgtttgctagtgggtgatttcattgaggagagtaaacgatggaccgtgcggctggatatttctgcccctcaggtgatatttcctgatgatttcaaattcaagaatcctgtgttagttgtcgtggatctaggaagaatgcttttgacgaacacccaagataactccaggaggaaaagtagggatgggtcagcatctgaagagacccagtttagtgatgatgaatataagacccccctggccacacctcctaacaccccacctcccgagtcaagcagcagcaacggagagaaaacacctcccttttctggagttgagttcagtgaagaacagcttcaagcacatttaatgagcacaaagatgtatgagaggtactcgctgtcatttatggacctccagatcatggttggacgagtgaaagacaattggaagcatgtccaggatattgacgtgggaccaacacatgtggtagagaagttcaacgttcacctacagttagagcgtcgattgatttatacttcagatcccaaatatccaggagccgtgctctcaggcaacttaccagacttaaaaatccacattaatgaagataaaatatctgcactaaagaattgctttgctctcctcaccaccccagaaatgaaaacttctgacactcagattaaagaaaagatttttccccaggaggagcagcggggaagtttgcaagactccgtaatgaatttaacccagagcattgtgttgttggagcagcatacccgcgaggttctggtggagtcgcagctcctcctggcggaatttaaagtgaactgtatgcagcttggtgttgagagcaatggccggtacatttctgtgctcaaggtgtttggtaccaatgctcactttgtgaagaggccttatgatgctgaagtctccctaactgttcatggtttgctcctggtggataccatgcagacatatggtgctgattttgaccttttgatggcttcacataagaacttgagctttgatattccaacgggaagccttcgggatagcagggcccagtctcctgtctctggaccgaatgtggcccacttaactgatggagctacactgaacgaccgatcagctactagtgtttcacttgacaaaattcttaccaaagagcaagagtcccttattaagttggaatatcagtttgtgagttcagagtgcccatcgatgaatttagacagtactcttcaggtgatttccctacaggtgaataatttagatattatcctcaatccagagacgattgtggagctaattggttttcttcaaaaatcctttcccaaggaaaaagatgatttaagtcctcaacctttaatgactgattttgaaagaagcttcagagaacaaggaacttaccagtctacatatgaacaaaacactgaggttgcagtggaaatccataggctgaacttactgcttcttcggacagtgggcatggcaaatagagagaaatatggcagaaaaattgcaactgcaagtataggtggcaccaaagttaatgtctcaatgggtagcacgtttgacatgaatggttctcttggctgtttacagcttatggatttgacacaagataacgttaaaaaccagtatgttgtcagcattgggaattctgtaggctatgaaaatatcatcagtgatattggctactttgaatctgtgtttgtcagaatggaagatgcagccctcactgaagctttgagtttcacgtttgttgagagatctaaacaggagtgttttctcaacctgaagatggcttctttacattataaccactctgctaagtttttgaaggagttgacgttatccatggatgaactggaagaaaattttcgaggtatgctgaaaagcgcagccaccaaagtcaccacagtactagctaccaagactgccgagtatagcgagatggtatcgctctttgaaactccaaggaagactcgggaaccctttatcttagaggaaaatgaaatatatgggtttgacctagcttcgtctcatttggacactgtaaagctaatcttgaacataaacattgaatcaccagttgtttctatccctcggaagccggggagtcctgagttgttggtgggacacttgggacagatattcatccagaattttgtggcgggagatgatgaatccagaagtgaccgtctgcaggtggaaatcaaggacattaaactgtattctttgaattgcacccagttggcaggtagagaagctgttgggtctgaaggaagccggatgttttgcccaccttccgggtctggcagtgccaacagtcaggaggaagctcatttcacacgacatgatttctttgaatctttgcatagaggtcaagcttttcacatcctgaacaacaccaccattcagtttaaactggagaagatccctatagagagagaatctgaattgactttttctcttagcccagatgacctgggaacttctagcatcatgaagattgaaggaaaatttgtcaatccagttcaggtggtgttagcaaagcatgtatatgagcaggttttacaaaccctggacaatctcgtgtacagtgaagatctgaataagtatccagccagtgctacctcctccccttgccctgattctcctctgcctcccctcagtacctgtggagaatcttctgttgaaaggaaggagaatggattgttcagccactccagcctttctaacacctctcagaagtcattgtcagtgaaggaagtcaaatcctttactcagattcaagccaccttttgtatatcagagcttcaggttcagctaagtggagatctgactttgggggcccaaggtcttgtgagcttaaagtttcaggactttgaggtggaattcagtaaagaccatccccagactttatctattcagattgccctgcattctctgctgatggaggacttattggagaagaatccagattctaaatataagaacctgatggtgtctcgaggagcccctaagccatctagtttagcacaaaaagaatacctttctcagtcttgcccctcagtgtccaatgtggaatatcctgatatgcctcggtctctcccttcccacatggaagaagctcctaatgtcttccagttgtatcaaaggcccacctctgcgtcccggaaaaagcaaaaggaagtccaagacaaggactatcccttgaccccacctccttctccaacagtggatgagcccaagatacttgttggaaagagtaaatttgatgattccttagtccacatcaacatattcttggtagataagaaacatccagaattctcttccagttacaatcgagttaaccggagcattgatgttgattttaattgcttggatgtgctgatcacactgcaaacctgggttgtgatattagacttttttggaatcggctccactgcagacaaccacgcaatgaggctgcctcctgagggcattctgcacaacgtgaagttggagccacatgcctccatggagtctggacttcaggatccagtgaacaccaaactggatctcaaggttcattcactttctctagtgctgaataagaccaccagtgagcttgccaaagcaaatgtgtccaaattagtagcacacctggaaatgattgagggagacctggccttacagggcagcattgggagtctgtctctaagtgacctcacatgccatggagagttctacagagaacggttcactaccagtggtgaagaagcactcatcttccagacttttaaatacggacggcctgaccctctgctccggagagaacacgacattcgcgtgagcctccggatggcctctgtgcagtatgtgcatactcagcgtttccaggcagaggtggtggccttcattcagcatttcactcagctgcaggatgtcttagggcgccagcgagctgctattgaggggcagacggtgagagatcaagcccagcgctgttcacgggttctcctggatattgaggctggtgctcccgttctcttgatcccagaaagttccagatcaaataatctgattgtagcaaatttggggaagttgaaagtcaaaaataagtttctgtttgctggttttcctggcaccttttccctacaagataaggaatctgtgccttcagcttccccaacgggtattcccaaacacagtctgaggaaaacgacaagcacggaggagcccaggggaacccattcccaggggcagttcacgatgcctcttgctggaatgagcctaggaagcctgaagagtgagtttgtgcccagtacctccaccaagcagcaagggccgcaacccacactgtctgttggccaagagtccagtagtccagaagaccatgtctgcctgctggattgcgttgtcgtggatctccaggacatggacatctttgctgcagagagacatccgagagaatactcgaaggcaccagaggatagtagtggagatctgatcttcccttcctattttgtgcgacagacaggaggaagcctcttaaccgagccttgtaggctgaaattgcaggtggaaaggaatttggacaaagaaataagtcatactgtgccagacatatctatccatggcaatctctcctcagtccactgctctctggatctgtataaatacaagctgatccgcggcttattagagaacaacctgggagaacccatagaggaatttatgcggccttatgatttacaagatccaagaattcatactgtcctgagtggagaagtgtacacctgtatgtgcttcctcattgatatggtgaatgtaagtctggagcttaaagatccaaaaagaaaagaaggtgctgggtccctagccagatttgacttcaagaaatgcaaactgctctatgaaagtttttccaaccaaaccaagtccattaacttggtttcccattccatgatggcttttgacacccgttatgctgggcagaagaccagccctggcatgacgaatgtgttcagctgtatctttcagcccgctaagaacagcagcaccacccaagggtccattcagattgaactacatttcagatctaccaaggattcctcctgctttacagtagttctcaacaatctccgtgtgtttctcatatttgactggctactgttagtccatgattttctccacactcccagtgatattaagaaacaaaatcatgttactccttctcgccaccgtaactctagcagcgaatctgctatagttcccaaaactgtgaagagtggagtagttaccaagcggtcttcccttcctgtgtccaatgaaaggcacctggaggtcaaggtcaatgtaacaggtacggagtttgtggtcattgaagatgtgtcctgcttcgacaccaatgccattattctgaaaggcaccacagtgctcacctataagccccggtttgttgatcgccccttttcaggaagtttgtttggcattgaggtgttttcatgccgactagggaatgagcatgatacagctctttcaattgtggatcccgtacaaattcaaatggagttggtggggaattcttcttatcaaaatagttcaggattgatggatgcattcaatagtgaagatttcccacctgtcctggagattcagttacaagccctggatatcagactctcctataatgatgttcagctgtttcttgccattgcaaaatccatcccagagcaagctaatgctgcagtgccagactcagtggccctggagtcagactccgttggcacttaccttccaggtgcatctcgcgttggagaggaaatcagagaagggacaagacacaccttagatcctgtcttggagttacagctggctaggctgcaggagctgggattcagcatggatgattgtcgcaaagctcttttggcgtgtcaaggccaattgaaaaaggcagcaagttggttgtttaagaatgcggaacctctgaagtctctttccttggcctccaccagccgagatagcccaggggctgtggcagcgccattgatctctggcgtggagatcaaagctgagagtgtgtgcatctgtttcatcgatgactgcatggattgtgatgttcctctcgctgaactcaccttttcccgtctgaattttcttcagcgtgtaagaactagccctgaaggctatgcccacttcaccctttctggagattattataaccgtgctctttcaggctgggagccatttattgagccttggccatgctctgtatcctggcaacagcaggcagctagtcgtctccatcctcctcgactgaagctagaagccaaggccaaacctcgtttggatatcaatatcacttctgtgctaattgaccagtatgtaagtaccaaggaatcgtggatggcagattactgtaaagatgacaaggacatagagtcagctaaatcagaagactggatgggctcttcggtggatcctccatgttttggacaaagcctcccccttgtctaccttagaactaggagtacagccagtctgactaacctagagcaccagatctatgctagagcagaggtgaaaacccccaagcgccggcagccatttgtcccctttgctctgaggaaccacacggggtgcactttgtggtttgccaccctgaccaccacacccaccagagctgcactctctcacagtgggagtccaggggtagttccagaagggaacggaacatttctcgatgatactcacaatgttagtgaatggcgagaagtccttacaggtgaagagattccctttgaatttgaagcaagaggaaagttaagacacagacacacccatgacctccggattcatcaactgcaagtgagagtaaatggctgggagcaagtgagcccagtgtctgtggacaaagtcgggaccttttttcgatatgcagcaccagataaaaattcatcttcctctacgattggcagcccaagcagcagaacaaatattatacatccccaggtttatttctcttcactcccaccagtgcgggtggtctttgcagtgactatggaaggcagtgcacggaaagtcatcactgtccggtcagccctcattgtgaggaacagacttgagacaccaatggaactaagactggatagcccatcagctccagacaagccagtggtgcttcctgctatcatgccaggggattcgtttgctgtgcctttacacctcacttcttggcggctacaggcccggcccaaaggattgggtgtatttttctgtaaggctcccattcattggaccaatgtagtgaagactgcagaaattagtagcagtaaacgagagtgccactctatggacacagaaaaaagccgatttttcaggttttgtgtggctataaagaaagagaattatccagattatatgccctcaaacatattttctgacagtgcaaaacagattttcagacagcctgggcataccatatatctcctgccaactgtggtaatctgcaacttgctaccctgtgaacttgatttttatgttaaaggaatgccaattaatgggacgctgaaacctggcaaggaggcagctctccatacagctgatacatcccagaacattgagctgggggtatcactggagaatttccccctctgtaaagaattgctcattccacctggaacccaaaactatatggtgagaatgcgactctatgacgtcaaccgtcggcagctgaacctcaccatccggattgtgtgtcgagcagaaggatccttaaagatcttcatttctgctccatattggctgattaacaaaacagggttgccactgatcttcagacaggacaatgccaagacagatgctgcaggccagtttgaggagcatgagctggcccgtagcctgagtcctctcttattctgctatgctgacaaagagcagccaaacctctgcacgatgagaatcggaagggggattcatccagaaggcatgccgggctggtgtcagggcttctccctggatggtggtagtggtgtccgagctttgaaagtcatccagcaaggaaaccgcccagggctgatctataacattggtattgatgtcaagaaaggccgaggtcgatacattgatacctgcatggtcatctttgccccccgttacctgttagataataaatcatctcacaagcttgcatttgcacagagggaatttgccaggggacagggaacagccaatcccgaaggttacatttccacccttcctggttccagtgtggtgttccactggcctcggaatgactatgatcagctattgtgtgtcagactgatggacgttcccaattgtatttggtctggaggctttgaagtcaacaagaataattccttccatatcaacatgagggataccttgggaaaatgcttcttcctacgagtggaaattactctccgaggagctacgtataggatctcatttagtgacacagatcagttacctcctcctttccgaattgacaacttttctaaggtcccggttgtctttactcagcatggcgtagctgaacccaggctccggactgaagtgaagcccatgacttcattggattatgcctgggacgaacccaccttgccaccttttatcactctgactgttaaaggggcagggtcctctgagatcaactgcaacatgaatgatttccaggataatcggcagctttattatgaaaatttcatttacattgctgctacatatacattctctggcttgcaggagggaacaggcaggcctgtggcttccaacaaggccattacctgtgcggagctcgttttggatgtctcacccaagacacaaagagtcattttaaaaaagaaggaaccaggaaagcgttctcagctgtggaggatgacaggaacaggaatgctggcccatgagggctcctcagttcctcacaatcccaataagccctcagccgcccgctccaccgaggggtctgccatcttagatattgctggtctcgctgcagtgactgacaacagatacgagccactgatgctgagaaagcctgaccgcaggcgaagcacaactcagacgtggagtttccgagaaggaaaactgacctgtgggttacatgggttggtcgtccaggccaaaggaggactttctggtttgtttgatggagctgaagttgttcttggtcctgacacttccatggagcttttggggccagttccacctgaacaacaatttattaatcaaaaaatgagacctggttctggaatgttatccatcagagtcatcccagatggaccaactagagcactccagataacagatttctgccaccggaaaagcagccgttcatatgaagtggatgaacttcctgtcaccgaacaagagctgcagaaattaaagaatccagatacagagcaggaattggaagtgcttgtgaggttagaaggtggaattgggttgtccttaattaataaagtcccagaagaactggtctttgcaagtcttacaggaatcaatgtgcactatacacagctggcaaccagtcacatgcttgaactcagcatacaggatgtacaggtggacaatcagctcattggtaccacgcagcccttcatgctctatgtgactcccctgagcaatgagaatgaggtcatcgagaccggcccagctgtgcaagtcaacgcagtgaagttccccagtaagagtgcactgaccaacatctacaagcatctgatgatcacagctcagagattcacagtgcaaattgaggagaaactgctcctcaagctgctaagtttctttggctacgatcaagcagaatcagaggtggaaaaatatgatgaaaacctccatgaaaagacagctgagcaaggtggaacaccaattcgatactactttgaaaatctcaaaatcagcattcctcagatcaagctaagtgtgttcacctccaacaagctcccattggatcttaaggccctaaaaagcaccttggggtttcctttgatacggtttgaagacgctgtgattaatctagatccattcactcgggtacatccctatgagaccaaggagttcatcatcaatgatatcctcaaacatttccaggaggaactcctcagccaggcagctcgaatcctgggatcagtggattttcttggcaatcctatggggcttttgaatgatgtttctgaaggggttactggactgataaaatatggaaatgtcgggggcctcatcagaaatgttacacacggagtatcaaactctgctgccaagtttgctggaacattatcagatggcttagggaagacgatggacaatcggcatcagtcagagcgggagtacatcaggtaccatgcagccacaagtggtgaacaccttgtagccggcatccatggcctggctcatggtatcattggtggactgaccagtgttataacttcgacagtggaaggtgtgaaaacagaagggggtgtcagcggtttcatatctggccttggaaaagggcttgttggcactgtaaccaagccagtggcaggcgccctggattttgcatcagaaacagcccaggcggtgagagacacagccacactcagcggccccaggactcaagcacagagggttcggaaaccgcgttgctgcacggggccccaggggctgcttccccgatattctgagagccaggcggaaggacaggagcagctcttcaaactcacagacaacatacaggacgaattcttcatcgctgtggagaacattgacagctactgcgtgctcatctcctccaaagctgtttacttcctgaaaagtggagactacgtggatcgagaagccattttcctagaagtcaaatacgatgacctctaccactgccttgtctccaaagaccatgggaaggtgtatgtgcaggtgaccaagaaagccgtgagcacgagcagtggagtgtccatccccggcccctcccaccagaagcccatggtccatgtgaaatctgaggtccttgctgtcaagttgtcacaagaaataaactacgcaaagagcctctactatgaacagcagcttatgttaagactcagcgaaaaccgagagcagctggagctggactcctgaagccccgctgctgagatgggcgctcccgacacagcgcagacccaccaggaggaaagaggcccagctctcagctgacgatggaggcagaaccggagtcgggtttggggaagttgtcaaggaatgagggaaagtaaatcctcatgaggaaaagtacaaatggaaatcgtattaatttgtgaggcagggagttattttagattatgggaaataatttttaaaggtattggttaaataacgtttaaaaacatgtactgagatgaatctaatttttagattgccctgtattttgttaacatgtatatatgtacaacagtgtgtttgtaaatatataggaacgtttctgaacagggtctgtgctatgtgtaaaggtttgttaactgtaaagtaatataaagttatattggatcttctattgcactaattctagatgtctaattcaggatactgtctatagaaaggcattcttaaaagttaaagaatgttacgtcttagttttggagactaaagtattcccagtaaagtgggttgaggtgagggctgtggtcctgaaagggacgcctttgacatcgtggctgtccagttgggctgtgagctgtggcacccaggactggcgctggcccttcagaaggatctaggagaggggcttgggagcccacttttaatttctcacccccattttacaaagagtgcttagattcttacaaattatgatgtaagttatccatttggctttttcctaactagtcttaccaaacttagggggaaacctgtgctccattaccacatgggtgcaagtcagcattgtaagttttctcaggttattattattagagaggttggaaacattggtaaactctgttgattgagaaggaaaaaaaaagtcccattgaactgttgcaacaaatcagaaatccacataaaagtgctctcctgcctgggcagcaacaaccaagaacaaagccccgggactgttttctttttaataaagccacaggcaggcatcgtagctccacagcccgaggggacacaggatggaaaccccaggatgagaagggagcagggagagttccagaaagggggatgaaataggagtattaaaaagctgcgttggtaagtttttcatggaaccaagatttgacaaaggcatctcttatccttggttttaaattcctgctgggagcaaggcctggtatgagcgccctgggtcttgtttttggtgtttcgcttttctgtaaggattaagcagatagggagaagggaaaaggggcctcactttagaatgaatgagtcaccttgtgatttttaaatttttattttaataaagctaatcaatttctacaaccttgtcacatgtagctgagtctgggatgactcagtggatcagtggatgcgtggaaggttttggtgtttataactcatgacccaaatccttccaagacacaaatgaagctaatcttcttcccctccctttcctctcccacttcccctctgtgtctgtgtctgtgtgtgtgtgtgtgtgtgtgtgtgtgtgcgcgcgcgcgcgtgcatgcagagaggaaggaagggagctttagcacaagtagctacatagtgttcaaggatcagctttcttgaactccgaggcttggttgcctttgctgaactccaagttagtggattgcagaatggaaacttggcttttgcggcactgggtgagttttagtttgtgtgtgtcttgctggggggtggtgatgattgtctcagcactcacgcactgcacaagatggcagcaggatacagcactgcacaagatggcagctcctctgcagcttcctcctcagcctccctccttgcacccccacaggtttggcttgtggtttttgtcatcagtaacctactgcctgagatcatgatctcttaaaagatgagactctcggaagggttgattgtatgcgtcagtgagccttctatcaccttctggaacaaagtcacttgaaatctcttgatgagattaaggagtttagtgttactaagaaaatctgctttgggccgcagcagtgctgggtgttctcagacctgactgaggaagttagctgcgggctgccctgtgggctggtgcttcaggaggaatccagagaagtgttcagatgccccccttgggctcctttctaattttaatcagctctttaaatagctgcccatctcctgtgattgcacaaccaagcactttgacatttgcaccttaggagaggcagatgttaaaatggaatccaaagaccacctagggcggggctgggtgggagatgggagggccaactgcgagctgctccacttctcagctctcccctgccctgcagccctgggccagacaaggccagaaggtttcaggggcatttgacatcccctcctggttctcaccaggaaaacatccaaagctttggaggaaacaggccctgcccctggctccttaaatgccccgtctctttgtaaactgatattcagccagcaatgcctaagactttgttaagatcatttctactgcttttctttctgcttcaaacacacagttcgtctctgaggaaagtaaaataaatggaataagagtaaattgggtaaggagatatccaaagctacccagtcccttgacccagcacagttggccgacccgtgtcactccctggctgtcgctgcttctctgtgctcactgaagggtgagccaggccagtgcttccccagcccctgggcctggtcactacacagtggaaaacagacaagcggccccttccccaaatcccaagagtgtcttgctgcttggtgggtgctcatcgcaatgttctgaaggctccagggccactttgtttgtaagtatgatctgggcctcaaaataccatagtagctgcttgataaaattctaaaaatatctggttctctattatgtaaacactattacagtcaccagtgtgtgaagactcttgagtctggttctcatatcagagtcatcatttttcttcctgtggaataaaatgccttgtggacttcccaaa

SEQ ID NO: 198604 - DNA, 16245 bp, Homo sapiens
  Payload ID: 19193
  Gene Name: vacuolar protein sorting 13 homolog D (S. cerevisiae)
  Uniprot ID: Q5THJ4
  ENST ID: ENST00000613099
  CDS Start-End: 131-13222
ggaggaaacgccgcgcagcgccgggctggggcgggcggcccgggacaccgacagatttttctgtgaccatgaaagagagaaataaagaatgatccatgatttctaaacaccttttcctgaggatatagtcatgttggaaggccttgtagcctgggttctcaatacctatttgggaaaatatgtcaataacctgaacactgaccagctctcagttgcacttctcaaaggtgctgttgaattagaaaacttgccattaaagaaagatgccttgaaagaattggaattaccatttgaagtcaaagctggcttcattgggaaagtaacccttcagattcccttttatcgcccccatgtggacccttgggtgatctccatctccagccttcacttaattggagccccagagaaaatacaggatttcaatgatgaaaaggagaagctgttggaaagggaacgtaagaaagcactacttcaagccctggaggagaaatggaagaatgaccgccagcagaaaggggagtcctattggtattcagttaccgcctccgtagttacaaggattgtggagaatattgaattaaaaattcaagatgtccatttacgctttgaagatggtgtcaccaatccctcccatccttttgcttttggcatctgcattaagaatgtgtccatgcaaaatgctgtgaatgagcctgtacagaaactaatgcggaaaaagcaattagacgtagcagaatttagcatctattgggatgtcgattgcactttactgggggatttgcctcagatggagttacaggaggccatggccaggagcatggagagtcgcagccatcactacgtcctggagcctgtgtttgcatctgctcttttgaagagaaactgctccaagaagcccctgcggtctcggcacagtccccgtattgattgtgatattcagctggagaccattcccttgaaactctctcagctgcaataccggcaaatcatggaattcctcaaggagctggaacgaaaggagaggcaggtgaagttccgaaggtggaaacccaaggtggcgatatctaagaactgccgagaatggtggtattttgctttgaatgctaacttgtatgagatcagagagcagaggaaacgttgcacctgggactttatgttgcaccgcgctcgtgatgctgtatcttacactgacaaatatttcaacaagttaaaaggaggcctgctgtccacagatgacaaggaggaaatgtgtcggattgaagaggaacagagctttgaggaattgaagattttgcgtgaactggttcatgatcgatttcacaaacaggaagaactagcagagagtctgcgggagcctcagtttgattctccaggagcctgtccgggagccccagaacccggtggaggcagtgggatgctgcagtatctccagtcctggtttcctggatggggtggctggtacgggcagcagaccccagaagggaatgtggttgagggactgtcagcagagcaacaggagcagtggattcctgaagagatcctgggcactgaggagttttttgaccccactgcagatgcctcgtgtatgaacacgtatacaaagcgagatcatgtctttgccaaactgaatttgcagttgcagcgaggtacagtgactctgttacacaaggagcaaggaactcctcaaatgaatgaaagtgctttcatgcagctcgagttttcagatgtaaaacttctagcagagtctcttcctcgaagaaattcctcgttgctttcagtccggttgggtggactgtttcttcgagacctggctacagaaggaactatgtttcctcttctagtcttccctaatccacaaaaagaagttggcagagtctcacaatcttttggtctacaaactacatctgcagacagaagtgatcattacccagctgcagatccagatggccccgtttttgagatgctgtatgagagaaatccggcgcacagccactttgagaggcggctcaatgtcagcacaaggcccttgaacatcatatacaatccgcaggccattaaaaaagtagcagactttttctacaagggaaaggttcatacctcaggttttggttatcagtctgaacttgagctgagagtggctgaagctgcccgaagacaatataacaagctgaagatgcagaccaaggcagaaatccggcaaactcttgatcgtttgctagtgggtgatttcattgaggagagtaaacgatggaccgtgcggctggatatttctgcccctcaggtgatatttcctgatgatttcaaattcaagaatcctgtgttagttgtcgtggatctaggaagaatgcttttgacgaacacccaagataactccaggaggaaaagtagggatgggtcagcatctgaagagacccagtttagtgatgatgaatataagacccccctggccacacctcctaacaccccacctcccgagtcaagcagcagcaacggagagaaaacacctcccttttctggagttgagttcagtgaagaacagcttcaagcacatttaatgagcacaaagatgtatgagaggtactcgctgtcatttatggacctccagatcatggttggacgagtgaaagacaattggaagcatgtccaggatattgacgtgggaccaacacatgtggtagagaagttcaacgttcacctacagttagagcgtcgattgatttatacttcagatcccaaatatccaggagccgtgctctcaggcaacttaccagacttaaaaatccacattaatgaagataaaatatctgcactaaagaattgctttgctctcctcaccaccccagaaatgaaaacttctgacactcagattaaagaaaagatttttccccaggaggagcagcggggaagtttgcaagactccgtaatgaatttaacccagagcattgtgttgttggagcagcatacccgcgaggttctggtggagtcgcagctcctcctggcggaatttaaagtgaactgtatgcagcttggtgttgagagcaatggccggtacatttctgtgctcaaggtgtttggtaccaatgctcactttgtgaagaggccttatgatgctgaagtctccctaactgttcatggtttgctcctggtggataccatgcagacatatggtgctgattttgaccttttgatggcttcacataagaacttgagctttgatattccaacgggaagccttcgggatagcagggcccagtctcctgtctctggaccgaatgtggcccacttaactgatggagctacactgaacgaccgatcagctactagtgtttcacttgacaaaattcttaccaaagagcaagagtcccttattaagttggaatatcagtttgtgagttcagagtgcccatcgatgaatttagacagtactcttcaggtgatttccctacaggtgaataatttagatattatcctcaatccagagacgattgtggagctaattggttttcttcaaaaatcctttcccaaggaaaaagatgatttaagtcctcaacctttaatgactgattttgaaagaagcttcagagaacaaggaacttaccagtctacatatgaacaaaacactgaggttgcagtggaaatccataggctgaacttactgcttcttcggacagtgggcatggcaaatagagagaaatatggcagaaaaattgcaactgcaagtataggtggcaccaaagttaatgtctcaatgggtagcacgtttgacatgaatggttctcttggctgtttacagcttatggatttgacacaagataacgttaaaaaccagtatgttgtcagcattgggaattctgtaggctatgaaaatatcatcagtgatattggctactttgaatctgtgtttgtcagaatggaagatgcagccctcactgaagctttgagtttcacgtttgttgagagatctaaacaggagtgttttctcaacctgaagatggcttctttacattataaccactctgctaagtttttgaaggagttgacgttatccatggatgaactggaagaaaattttcgaggtatgctgaaaagcgcagccaccaaagtcaccacagtactagctaccaagactgccgagtatagcgagatggtatcgctctttgaaactccaaggaagactcgggaaccctttatcttagaggaaaatgaaatatatgggtttgacctagcttcgtctcatttggacactgtaaagctaatcttgaacataaacattgaatcaccagttgtttctatccctcggaagccggggagtcctgagttgttggtgggacacttgggacagatattcatccagaattttgtggcgggagatgatgaatccagaagtgaccgtctgcaggtggaaatcaaggacattaaactgtattctttgaattgcacccagttggcaggtagagaagctgttgggtctgaaggaagccggatgttttgcccaccttccgggtctggcagtgccaacagtcaggaggaagctcatttcacacgacatgatttctttgaatctttgcatagaggtcaagcttttcacatcctgaacaacaccaccattcagtttaaactggagaagatccctatagagagagaatctgaattgactttttctcttagcccagatgacctgggaacttctagcatcatgaagattgaaggaaaatttgtcaatccagttcaggtggtgttagcaaagcatgtatatgagcaggttttacaaaccctggacaatctcgtgtacagtgaagatctgaataagtatccagccagtgctacctcctccccttgccctgattctcctctgcctcccctcagtacctgtggagaatcttctgttgaaaggaaggagaatggattgttcagccactccagcctttctaacacctctcagaagtcattgtcagtgaaggaagtcaaatcctttactcagattcaagccaccttttgtatatcagagcttcaggttcagctaagtggagatctgactttgggggcccaaggtcttgtgagcttaaagtttcaggactttgaggtggaattcagtaaagaccatccccagactttatctattcagattgccctgcattctctgctgatggaggacttattggagaagaatccagattctaaatataagaacctgatggtgtctcgaggagcccctaagccatctagtttagcacaaaaagaatacctttctcagtcttgcccctcagtgtccaatgtggaatatcctgatatgcctcggtctctcccttcccacatggaagaagctcctaatgtcttccagttgtatcaaaggcccacctctgcgtcccggaaaaagcaaaaggaagtccaagacaaggactatcccttgaccccacctccttctccaacagtggatgagcccaagatacttgttggaaagagtaaatttgatgattccttagtccacatcaacatattcttggtagataagaaacatccagaattctcttccagttacaatcgagttaaccggagcattgatgttgattttaattgcttggatgtgctgatcacactgcaaacctgggttgtgatattagacttttttggaatcggctccactgcagacaaccacgcaatgaggctgcctcctgagggcattctgcacaacgtgaagttggagccacatgcctccatggagtctggacttcaggatccagtgaacaccaaactggatctcaaggttcattcactttctctagtgctgaataagaccaccagtgagcttgccaaagcaaatgtgtccaaattagtagcacacctggaaatgattgagggagacctggccttacagggcagcattgggagtctgtctctaagtgacctcacatgccatggagagttctacagagaacggttcactaccagtggtgaagaagcactcatcttccagacttttaaatacggacggcctgaccctctgctccggagagaacacgacattcgcgtgagcctccggatggcctctgtgcagtatgtgcatactcagcgtttccaggcagaggtggtggccttcattcagcatttcactcagctgcaggatgtcttagggcgccagcgagctgctattgaggggcagacggtgagagatcaagcccagcgctgttcacgggttctcctggatattgaggctggtgctcccgttctcttgatcccagaaagttccagatcaaataatctgattgtagcaaatttggggaagttgaaagtcaaaaataagtttctgtttgctggttttcctggcaccttttccctacaagataaggaatctgtgccttcagcttccccaacgggtattcccaaacacagtctgaggaaaacgacaagcacggaggagcccaggggaacccattcccaggggcagttcacgatgcctcttgctggaatgagcctaggaagcctgaagagtgagtttgtgcccagtacctccaccaagcagcaagggccgcaacccacactgtctgttggccaagagtccagtagtccagaagaccatgtctgcctgctggattgcgttgtcgtggatctccaggacatggacatctttgctgcagagagacatccgagagaatactcgaaggcaccagaggatagtagtggagatctgatcttcccttcctattttgtgcgacagacaggaggaagcctcttaaccgagccttgtaggctgaaattgcaggtggaaaggaatttggacaaagaaataagtcatactgtgccagacatatctatccatggcaatctctcctcagtccactgctctctggatctgtataaatacaagctgatccgcggcttattagagaacaacctgggagaacccatagaggaatttatgcggccttatgatttacaagatccaagaattcatactgtcctgagtggagaagtgtacacctgtatgtgcttcctcattgatatggtgaatgtaagtctggagcttaaagatccaaaaagaaaagaaggtgctgggtccctagccagatttgacttcaagaaatgcaaactgctctatgaaagtttttccaaccaaaccaagtccattaacttggtttcccattccatgatggcttttgacacccgttatgctgggcagaagaccagccctggcatgacgaatgtgttcagctgtatctttcagcccgctaagaacagcagcaccacccaagggtccattcagattgaactacatttcagatctaccaaggattcctcctgctttacagtagttctcaacaatctccgtgtgtttctcatatttgactggctactgttagtccatgattttctccacactcccagtgatattaagaaacaaaatcatgttactccttctcgccaccgtaactctagcagcgaatctgctatagttcccaaaactgtgaagagtggagtagttaccaagcggtcttcccttcctgtgtccaatgaaaggcacctggaggtcaaggtcaatgtaacaggtacggagtttgtggtcattgaagatgtgtcctgcttcgacaccaatgccattattctgaaaggcaccacagtgctcacctataagccccggtttgttgatcgccccttttcaggaagtttgtttggcattgaggtgttttcatgccgactagggaatgagcatgatacagctctttcaattgtggatcccgtacaaattcaaatggagttggtggggaattcttcttatcaaaatagttcaggattgatggatgcattcaatagtgaagatttcccacctgtcctggagattcagttacaagccctggatatcagactctcctataatgatgttcagctgtttcttgccattgcaaaatccatcccagagcaagctaatgctgcagtgccagactcagtggccctggagtcagactccgttggcacttaccttccaggtgcatctcgcgttggagaggaaatcagagaagggacaagacacaccttagatcctgtcttggagttacagctggctaggctgcaggagctgggattcagcatggatgattgtcgcaaagctcttttggcgtgtcaaggccaattgaaaaaggcagcaagttggttgtttaagaatgcggaacctctgaagtctctttccttggcctccaccagccgagatagcccaggggctgtggcagcgccattgatctctggcgtggagatcaaagctgagagtgtgtgcatctgtttcatcgatgactgcatggattgtgatgttcctctcgctgaactcaccttttcccgtctgaattttcttcagcgtgtaagaactagccctgaaggctatgcccacttcaccctttctggagattattataaccgtgctctttcaggctgggagccatttattgagccttggccatgctctgtatcctggcaacagcaggcagctagtcgtctccatcctcctcgactgaagctagaagccaaggccaaacctcgtttggatatcaatatcacttctgtgctaattgaccagtatgtaagtaccaaggaatcgtggatggcagattactgtaaagatgacaaggacatagagtcagctaaatcagaagactggatgggctcttcggtggatcctccatgttttggacaaacagaggtgaaaacccccaagcgccggcagccatttgtcccctttgctctgaggaaccacacggggtgcactttgtggtttgccaccctgaccaccacacccaccagagctgcactctctcacagtgggagtccaggggtagttccagaagggaacggaacatttctcgatgatactcacaatgttagtgaatggcgagaagtccttacaggtgaagagattccctttgaatttgaagcaagaggaaagttaagacacagacacacccatgacctccggattcatcaactgcaagtgagagtaaatggctgggagcaagtgagcccagtgtctgtggacaaagtcgggaccttttttcgatatgcagcaccagataaaaattcatcttcctctacgattggcagcccaagcagcagaacaaatattatacatccccaggtttatttctcttcactcccaccagtgcgggtggtctttgcagtgactatggaaggcagtgcacggaaagtcatcactgtccggtcagccctcattgtgaggaacagacttgagacaccaatggaactaagactggatagcccatcagctccagacaagccagtggtgcttcctgctatcatgccaggggattcgtttgctgtgcctttacacctcacttcttggcggctacaggcccggcccaaaggattgggtgtatttttctgtaaggctcccattcattggaccaatgtagtgaagactgcagaaattagtagcagtaaacgagagtgccactctatggacacagaaaaaagccgatttttcaggttttgtgtggctataaagaaagagaattatccagattatatgccctcaaacatattttctgacagtgcaaaacagattttcagacagcctgggcataccatatatctcctgccaactgtggtaatctgcaacttgctaccctgtgaacttgatttttatgttaaaggaatgccaattaatgggacgctgaaacctggcaaggaggcagctctccatacagctgatacatcccagaacattgagctgggggtatcactggagaatttccccctctgtaaagaattgctcattccacctggaacccaaaactatatggtgagaatgcgactctatgacgtcaaccgtcggcagctgaacctcaccatccggattgtgtgtcgagcagaaggatccttaaagatcttcatttctgctccatattggctgattaacaaaacagggttgccactgatcttcagacaggacaatgccaagacagatgctgcaggccagtttgaggagcatgagctggcccgtagcctgagtcctctcttattctgctatgctgacaaagagcagccaaacctctgcacgatgagaatcggaagggggattcatccagaaggcatgccgggctggtgtcagggcttctccctggatggtggtagtggtgtccgagctttgaaagtcatccagcaaggaaaccgcccagggctgatctataacattggtattgatgtcaagaaaggccgaggtcgatacattgatacctgcatggtcatctttgccccccgttacctgttagataataaatcatctcacaagcttgcatttgcacagagggaatttgccaggggacagggaacagccaatcccgaaggttacatttccacccttcctggttccagtgtggtgttccactggcctcggaatgactatgatcagctattgtgtgtcagactgatggacgttcccaattgtatttggtctggaggctttgaagtcaacaagaataattccttccatatcaacatgagggataccttgggaaaatgcttcttcctacgagtggaaattactctccgaggagctacgtataggatctcatttagtgacacagatcagttacctcctcctttccgaattgacaacttttctaaggtcccggttgtctttactcagcatggcgtagctgaacccaggctccggactgaagtgaagcccatgacttcattggattatgcctgggacgaacccaccttgccaccttttatcactctgactgttaaaggggcagggtcctctgagatcaactgcaacatgaatgatttccaggataatcggcagctttattatgaaaatttcatttacattgctgctacatatacattctctggcttgcaggagggaacaggcaggcctgtggcttccaacaaggccattacctgtgcggagctcgttttggatgtctcacccaagacacaaagagtcattttaaaaaagaaggaaccaggaaagcgttctcagctgtggaggatgacaggaacaggaatgctggcccatgagggctcctcagttcctcacaatcccaataagccctcagccgcccgctccaccgaggggtctgccatcttagatattgctggtctcgctgcagtgactgacaacagatacgagccactgatgctgagaaagcctgaccgcaggcgaagcacaactcagacgtggagtttccgagaaggaaaactgacctgtgggttacatgggttggtcgtccaggccaaaggaggactttctggtttgtttgatggagctgaagttgttcttggtcctgacacttccatggagcttttggggccagttccacctgaacaacaatttattaatcaaaaaatgagacctggttctggaatgttatccatcagagtcatcccagatggaccaactagagcactccagataacagatttctgccaccggaaaagcagccgttcatatgaagtggatgaacttcctgtcaccgaacaagagctgcagaaattaaagaatccagatacagagcaggaattggaagtgcttgtgaggttagaaggtggaattgggttgtccttaattaataaagtcccagaagaactggtctttgcaagtcttacaggaatcaatgtgcactatacacagctggcaaccagtcacatgcttgaactcagcatacaggatgtacaggtggacaatcagctcattggtaccacgcagcccttcatgctctatgtgactcccctgagcaatgagaatgaggtcatcgagaccggcccagctgtgcaagtcaacgcagtgaagttccccagtaagagtgcactgaccaacatctacaagcatctgatgatcacagctcagagattcacagtgcaaattgaggagaaactgctcctcaagctgctaagtttctttggctacgatcaagcagaatcagaggtggaaaaatatgatgaaaacctccatgaaaagacagctgagcaaggtggaacaccaattcgatactactttgaaaatctcaaaatcagcattcctcagatcaagctaagtgtgttcacctccaacaagctcccattggatcttaaggccctaaaaagcaccttggggtttcctttgatacggtttgaagacgctgtgattaatctagatccattcactcgggtacatccctatgagaccaaggagttcatcatcaatgatatcctcaaacatttccaggaggaactcctcagccaggcagctcgaatcctgggatcagtggattttcttggcaatcctatggggcttttgaatgatgtttctgaaggggttactggactgataaaatatggaaatgtcgggggcctcatcagaaatgttacacacggagtatcaaactctgctgccaagtttgctggaacattatcagatggcttagggaagacgatggacaatcggcatcagtcagagcgggagtacatcaggtaccatgcagccacaagtggtgaacaccttgtagccggcatccatggcctggctcatggtatcattggtggactgaccagtgttataacttcgacagtggaaggtgtgaaaacagaagggggtgtcagcggtttcatatctggccttggaaaagggcttgttggcactgtaaccaagccagtggcaggcgccctggattttgcatcagaaacagcccaggcggtgagagacacagccacactcagcggccccaggactcaagcacagagggttcggaaaccgcgttgctgcacggggccccaggggctgcttccccgatattctgagagccaggcggaaggacaggagcagctcttcaaactcacagacaacatacaggacgaattcttcatcgctgtggagaacattgacagctactgcgtgctcatctcctccaaagctgtttacttcctgaaaagtggagactacgtggatcgagaagccattttcctagaagtcaaatacgatgacctctaccactgccttgtctccaaagaccatgggaaggtgtatgtgcaggtgaccaagaaagccgtgagcacgagcagtggagtgtccatccccggcccctcccaccagaagcccatggtccatgtgaaatctgaggtccttgctgtcaagttgtcacaagaaataaactacgcaaagagcctctactatgaacagcagcttatgttaagactcagcgaaaaccgagagcagctggagctggactcctgaagccccgctgctgagatgggcgctcccgacacagcgcagacccaccaggaggaaagaggcccagctctcagctgacgatggaggcagaaccggagtcgggtttggggaagttgtcaaggaatgagggaaagtaaatcctcatgaggaaaagtacaaatggaaatcgtattaatttgtgaggcagggagttattttagattatgggaaataatttttaaaggtattggttaaataacgtttaaaaacatgtactgagatgaatctaatttttagattgccctgtattttgttaacatgtatatatgtacaacagtgtgtttgtaaatatataggaacgtttctgaacagggtctgtgctatgtgtaaaggtttgttaactgtaaagtaatataaagttatattggatcttctattgcactaattctagatgtctaattcaggatactgtctatagaaaggcattcttaaaagttaaagaatgttacgtcttagttttggagactaaagtattcccagtaaagtgggttgaggtgagggctgtggtcctgaaagggacgcctttgacatcgtggctgtccagttgggctgtgagctgtggcacccaggactggcgctggcccttcagaaggatctaggagaggggcttgggagcccacttttaatttctcacccccattttacaaagagtgcttagattcttacaaattatgatgtaagttatccatttggctttttcctaactagtcttaccaaacttagggggaaacctgtgctccattaccacatgggtgcaagtcagcattgtaagttttctcaggttattattattagagaggttggaaacattggtaaactctgttgattgagaaggaaaaaaaaagtcccattgaactgttgcaacaaatcagaaatccacataaaagtgctctcctgcctgggcagcaacaaccaagaacaaagccccgggactgttttctttttaataaagccacaggcaggcatcgtagctccacagcccgaggggacacaggatggaaaccccaggatgagaagggagcagggagagttccagaaagggggatgaaataggagtattaaaaagctgcgttggtaagtttttcatggaaccaagatttgacaaaggcatctcttatccttggttttaaattcctgctgggagcaaggcctggtatgagcgccctgggtcttgtttttggtgtttcgcttttctgtaaggattaagcagatagggagaagggaaaaggggcctcactttagaatgaatgagtcaccttgtgatttttaaatttttattttaataaagctaatcaatttctacaaccttgtcacatgtagctgagtctgggatgactcagtggatcagtggatgcgtggaaggttttggtgtttataactcatgacccaaatccttccaagacacaaatgaagctaatcttcttcccctccctttcctctcccacttcccctctgtgtctgtgtctgtgtgtgtgtgtgtgtgtgtgtgtgtgtgcgcgcgcgcgcgtgcatgcagagaggaaggaagggagctttagcacaagtagctacatagtgttcaaggatcagctttcttgaactccgaggcttggttgcctttgctgaactccaagttagtggattgcagaatggaaacttggcttttgcggcactgggtgagttttagtttgtgtgtgtcttgctggggggtggtgatgattgtctcagcactcacgcactgcacaagatggcagcaggatacagcactgcacaagatggcagctcctctgcagcttcctcctcagcctccctccttgcacccccacaggtttggcttgtggtttttgtcatcagtaacctactgcctgagatcatgatctcttaaaagatgagactctcggaagggttgattgtatgcgtcagtgagccttctatcaccttctggaacaaagtcacttgaaatctcttgatgagattaaggagtttagtgttactaagaaaatctgctttgggccgcagcagtgctgggtgttctcagacctgactgaggaagttagctgcgggctgccctgtgggctggtgcttcaggaggaatccagagaagtgttcagatgccccccttgggctcctttctaattttaatcagctctttaaatagctgcccatctcctgtgattgcacaaccaagcactttgacatttgcaccttaggagaggcagatgttaaaatggaatccaaagaccacctagggcggggctgggtgggagatgggagggccaactgcgagctgctccacttctcagctctcccctgccctgcagccctgggccagacaaggccagaaggtttcaggggcatttgacatcccctcctggttctcaccaggaaaacatccaaagctttggaggaaacaggccctgcccctggctccttaaatgccccgtctctttgtaaactgatattcagccagcaatgcctaagactttgttaagatcatttctactgcttttctttctgcttcaaacacacagttcgtctctgaggaaagtaaaataaatggaataagagtaaattgggtaaggagatatccaaagctacccagtcccttgacccagcacagttggccgacccgtgtcactccctggctgtcgctgcttctctgtgctcactgaagggtgagccaggccagtgcttccccagcccctgggcctggtcactacacagtggaaaacagacaagcggccccttccccaaatcccaagagtgtcttgctgcttggtgggtgctcatcgcaatgttctgaaggctccagggccactttgtttgtaagtatgatctgggcctcaaaataccatagtagctgcttgataaaattctaaaaatatctggttctctattatgtaaacactattacagtcaccagtgtgtgaagactcttgagtctggttctcatatcagagtcatcatttttcttcctgtggaataaaatgccttgtggacttcccaaa

SEQ ID NO: 198605 - DNA, 2750 bp, Homo sapiens
  Payload ID: 19194
  Gene Name: vacuolar protein sorting 16 homolog (S. cerevisiae)
  Uniprot ID: Q9H269
  ENST ID: ENST00000380445
  CDS Start-End: 73-2592
ggaagtgccggcctggagcccgctctaggtgggtgtcccctcggtgcttcccagctgccgtctgcaccagccatggactgctacacggcgaactggaacccactcggggactctgccttttaccggaaatatgagctgtacagcatggactgggacctgaaggaggaactcagggattgcctggtggctgctgcaccctatgggggccccattgcactgctgaggaacccctggcggaaggagaaagctgctagtgtgaggccagtgctcgatatatactctgcttccggcatgcctctggccagcctgctgtggaagagtggacccgtggtgtccctgggctggtcagctgaggaggagctgctctgtgtgcaggaagatggtgctgtactggtttatgggcttcatggtgacttccggagacacttcagcatgggcaatgaagtgctccagaaccgggttctggatgcccggatctttcacactgagtttggttccggagtggccatcctcacaggggcccaccgcttcaccctcagtgccaatgtgggtgacctcaaactccgccggatgccagaggtgccaggtctgcaaagtgcaccctcctgctggactgtgctgtgccaggaccgagtggcacacattcttctggctgtggggcctgacctttacctcttggaccatgcagcctgctccgcagtgacgccccctggcctggccccaggagtaagcagcttcctacagatggctgtctccttcacctaccgacacctggcactcttcacagacacaggctacatctggatggggacagcatcactcaaggagaagctatgtgagttcaactgcaacatccgggcacctccaaagcagatggtctggtgcagccgtcctcgtagcaaggagagggccgtggtggtggcctgggaaaggcggctgatggtggtgggcgatgcacccgagagcatccagtttgtgctggatgaggactcctacctggtgcctgagctcgatggggtccgcatcttctcccgcagcacccacgagttcctgcatgaggttccagcggccagcgaggaaatcttcaaaattgcctcaatggcccccggggcgctgctcctggaggctcagaaggagtatgagaaagagagccagaaggcggacgagtacctgcgggagatccaggagctgggccagctgacccaggccgtgcagcagtgcattgaggctgcaggacatgagcaccagccagacatgcagaagagtctgctcagggccgcctccttcggaaagtgtttcctggacagatttccacccgacagcttcgtgcacatgtgtcaggacctgcgtgtgctcaatgctgttcgggactatcacatcgggatcccgctcacctatagccaatataagcagctcaccatccaggtgctgctggacaggctcgtgttgcggagactttaccccctggccatccagatatgcgagtacttgcgccttcctgaagtacagggcgtcagcaggatcctggcccactgggcctgctacaaggtgcaacagaaggatgtctcagatgaggatgtggctcgagccattaaccagaagctgggggacacgcctggtgtctcttactccgacattgctgcacgagcctatggttgtggccgcacggagctggccatcaagctgctggagtatgagccacgctcaggggagcaggtaccccttctcctaaagatgaagaggagcaaactggcactaagcaaggccatcgagagcggggacactgacctggtgttcacggtgttgctgcacctgaagaacgagctgaaccgaggagattttttcatgacccttcggaatcagcccatggccctcagtttgtaccgacagttctgtaagcatcaggagctagagacgctgaaggacctttacaatcaggatgacaatcaccaggaattgggcagcttccacatccgagccagctatgctgcagaagagcgtattgaggggcgagtagcagctctgcagacagccgccgatgccttctacaaggccaagaatgagtttgcagccaaggctacagaggatcaaatgcggctcctacggctgcagcggcgcctagaagacgagctggggggccagttcctagacctgtctctacatgacacagttaccaccctcattcttggcggtcacaacaagcgtgcagagcagctggcacgtgacttccgcatccctgacaagaggctctggtggctgaagctgactgccctggcagatttggaagattgggaagagctagagaagttttccaagagcaagaaatcacccattggctacctgccttttgtggagatctgcatgaaacaacataacaaatacgaagccaagaagtatgcttcccgcgtgggtcccgagcagaaggtcaaggctttgcttcttgttggcgatgtggctcaggctgcagatgtggccatcgaacaccggaatgaggctgagctgagcctcgtattgtcccactgcacgggagccacagatggggccacagctgacaagattcaacgggccagggcacaagcccagaagaagtgaggagtccatcctgtacatctcaagcaaggggttcctcccctagcacctgggcttggcagaagggccatagttcatccagctcctcccctagagcaatgctgaggagcgggggcatggtagcagggctgtctggttttaaataaagttggaacacttca

SEQ ID NO: 198606 - DNA, 2318 bp, Homo sapiens
  Payload ID: 19194
  Gene Name: vacuolar protein sorting 16 homolog (S. cerevisiae)
  Uniprot ID: Q9H269
  ENST ID: ENST00000380469
  CDS Start-End: 73-2160
ggaagtgccggcctggagcccgctctaggtgggtgtcccctcggtgcttcccagctgccgtctgcaccagccatggactgctacacggcgaactggaacccactcggggactctgccttttaccggaaatatgagctgtacagcatggactgggacctgaaggaggaactcagggattgcctggtggctgctgcaccctatgggggccccattgcactgctgaggaacccctggcggaaggagaaagctgctagtgtgaggccagtgctcgatatatactctgcttccggcatgcctctggccagcctgctgtggaagagtggacccgtggtgtccctgggctggtcagctgaggaggagctgctctgtgtgcaggaagatggtgctgtactggtttatgggcttcatggtgacttccggagacacttcagcatgggcaatgaagtgctccagaaccgggttctggatgcccggatctttcacactgagtttggttccggagtggccatcctcacaggggcccaccgcttcaccctcagtgccaatgtgggtgacctcaaactccgccggatgccagaggtgccaggtctgcaaagtgcaccctcctgctggactgtgctgtgccaggaccgagtggcacacattcttctggctgtggggcctgacctttacctcttggaccatgcagcctgctccgcagtgacgccccctggcctggccccaggagtaagcagcttcctacagatggctgtctccttcacctaccgacacctggcactcttcacagacacaggctacatctggatggggacagcatcactcaaggagaagctatgtgagttcaactgcaacatccgggcacctccaaagcagatggtctggtgcagccgtcctcgtagcaaggagagggccgtggtggtggcctgggaaaggcggctgatggtggtgggcgatgcacccgagagcatccaatataagcagctcaccatccaggtgctgctggacaggctcgtgttgcggagactttaccccctggccatccagatatgcgagtacttgcgccttcctgaagtacagggcgtcagcaggatcctggcccactgggcctgctacaaggtgcaacagaaggatgtctcagatgaggatgtggctcgagccattaaccagaagctgggggacacgcctggtgtctcttactccgacattgctgcacgagcctatggttgtggccgcacggagctggccatcaagctgctggagtatgagccacgctcaggggagcaggtaccccttctcctaaagatgaagaggagcaaactggcactaagcaaggccatcgagagcggggacactgacctggtgttcacggtgttgctgcacctgaagaacgagctgaaccgaggagattttttcatgacccttcggaatcagcccatggccctcagtttgtaccgacagttctgtaagcatcaggagctagagacgctgaaggacctttacaatcaggatgacaatcaccaggaattgggcagcttccacatccgagccagctatgctgcagaagagcgtattgaggggcgagtagcagctctgcagacagccgccgatgccttctacaaggccaagaatgagtttgcagccaaggctacagaggatcaaatgcggctcctacggctgcagcggcgcctagaagacgagctggggggccagttcctagacctgtctctacatgacacagttaccaccctcattcttggcggtcacaacaagcgtgcagagcagctggcacgtgacttccgcatccctgacaagaggctctggtggctgaagctgactgccctggcagatttggaagattgggaagagctagagaagttttccaagagcaagaaatcacccattggctacctgccttttgtggagatctgcatgaaacaacataacaaatacgaagccaagaagtatgcttcccgcgtgggtcccgagcagaaggtcaaggctttgcttcttgttggcgatgtggctcaggctgcagatgtggccatcgaacaccggaatgaggctgagctgagcctcgtattgtcccactgcacgggagccacagatggggccacagctgacaagattcaacgggccagggcacaagcccagaagaagtgaggagtccatcctgtacatctcaagcaaggggttcctcccctagcacctgggcttggcagaagggccatagttcatccagctcctcccctagagcaatgctgaggagcgggggcatggtagcagggctgtctggttttaaataaagttggaacacttca

SEQ ID NO: 198607 - DNA, 819 bp, Homo sapiens
  Payload ID: 19194
  Gene Name: vacuolar protein sorting 16 homolog (S. cerevisiae)
  ENST ID: ENST00000417508
  CDS Start-End: 140-819
tctgcaccagccatggactgctacacggcgaactggaacccactcggggactctgccttttaccggaaatatgagctgtacagcatggactgggacctgaaggaggaactcagggattgcctggtggctgctgcaccctatgggggccccattggaagtgctccagaaccgggttctggatgcccggatctttcacactgagtttggttccggagtggccatcctcacaggggcccaccgcttcaccctcagtgccaatgtgggtgacctcaaactccgccggatgccagaggtgccaggtctgcaaagtgcaccctcctgctggactgtgctgtgccaggaccgagtggcacacattcttctggctgtggggcctgacctttacctcttggaccatgcagcctgctccgcagtgacgccccctggcctggccccaggagtaagcagcttcctacagatggctgtctccttcacctaccgacacctggcactcttcacagacacaggctacatctggatggggacagcatcactcaaggagaagctatgtgagttcaactgcaacatccgggcacctccaaagcagatggtctggtgcagccgtcctcgtagcaaggagagggccgtggtggtggcctgggaaaggcggctgatggtggtgggcgatgcacccgagagcatccagtttgtgctggatgaggactcctacctggtgcctgagctcgatggggtccgcatcttctcccgcagcacccacgagttcctgcatgaggttccagcggccagcgaggaaatcttcaaaattgcctcaatggcccc

SEQ ID NO: 198608 - DNA, 966 bp, Homo sapiens
  Payload ID: 19194
  Gene Name: vacuolar protein sorting 16 homolog (S. cerevisiae)
  ENST ID: ENST00000453689
  CDS Start-End: 143-966
ccgtctgcaccagccatggactgctacacggcgaactggaacccactcggggactctgccttttaccggaaatatgagctgtacagcatggactgggacctgaaggaggaactcagggattgcctggtggctgctgcaccctatgggggccccattggaagtgctccagaaccgggttctggatgcccggatctttcacactgagtttggttccggagtggccatcctcacaggggcccaccgcttcaccctcagtgccaatgtgggtgacctcaaactccgccggatgccagaggtgccaggtctgcaaagtgcaccctcctgctggactgtgctgtgccaggaccgagtggcacacattcttctggctgtggggcctgacctttacctcttggaccatgcagcctgctccgcagtgacgccccctggcctggccccaggagtaagcagcttcctacagatggctgtctccttcacctaccgacacctggcactcttcacagacacaggctacatctggatggggacagcatcactcaaggagaagctatgtgagttcaactgcaacatccgggcacctccaaagcagatggtctggtgcagccgtcctcgtagcaaggagagggccgtggtggtggcctgggaaaggcggctgatggtggtgggcgatgcacccgagagcatccaatataagcagctcaccatccaggtgctgctggacaggctcgtgttgcggagactttaccccctggccatccagatatgcgagtacttgcgccttcctgaagtacagggcgtcagcaggatcctggcccactgggcctgctacaaggtgcaacagaaggatgtctcagatgaggatgtggctcgagccattaaccagaagctgggggacacgcctggtgtctcttactccgacattgctgcacgagcctatggttgtggccgcacggagctggccatcaa

SEQ ID NO: 198609 - DNA, 3895 bp, Homo sapiens
  Payload ID: 19195
  Gene Name: vacuolar protein sorting 18 homolog (S. cerevisiae)
  Uniprot ID: Q9P253
  ENST ID: ENST00000220509
  CDS Start-End: 340-3261
gcccgcgtcacgggggcgggagtcagctgagctgccggggcgaggttgggatcacctggcaccggctgaagggagcctgtgatttttttgtagcgggggcggggagtaaggtgcaagactgcgccagattcaaggacgagggctgcccgattatctcgctgcataaggcaagagcaagaggatcctcaggattttaaagaggaggcgacggctgcaggttcccaggatctgtcagaggctggggagttacagcttccattctggggcgacggggaccccgggggggtagcccttttgtaatccccaggccccggacaaagagcccagaggccgggcaccatggcgtccatcctggatgagtacgagaactcgctgtcccgctcggccgtcttgcagcccggctgccctagcgtgggcatcccccactcggggtatgtgaatgcccagctggagaaggaagtgcccatcttcacaaagcagcgcattgacttcaccccttccgagcgcattaccagtcttgtcgtctccagcaatcagctgtgcatgagcctgggcaaggatacactgctccgcattgacttgggcaaggcaaatgagcccaaccacgtggagctgggacgtaaggatgacgcaaaagttcacaagatgttccttgaccatactggctctcacctgctgattgccctgagcagcacggaggtcctctacgtgaaccgaaatggacagaaggtacggccactagcacgctggaaggggcagctggtggagagtgtgggttggaacaaggcactgggcacggagagcagcacaggccccatcctggtcgggactgcccaaggccacatctttgaagcagagctctcagccagcgaaggtgggcttttcggccctgctccggatctctacttccgcccattgtacgtgctaaatgaagaagggggtccagcacctgtgtgctcccttgaggccgagcggggccctgatgggcgtagctttgttattgccaccactcggcagcgcctcttccagttcataggccgagcagcagagggggctgaggcccagggtttctcagggctctttgcagcttacacggaccacccacccccattccgtgagtttcccagcaacctgggctacagtgagttggccttctacacccccaagctgcgctccgcaccccgggccttcgcctggatgatgggggatggtgtgttgtatggggcattggactgtgggcgccctgactctctgctgagcgaggagcgagtctgggagtacccagagggggtagggcctggggccagcccacccctagccatcgtcttgacccagttccacttcctgctgctactggcagaccgggtggaggcagtgtgcacactgaccgggcaggtggtgctgcgggatcacttcctggagaaatttgggccgctgaagcacatggtgaaggactcctccacaggccagctgtgggcctacactgagcgggctgtcttccgctaccacgtgcaacgggaggcccgagatgtctggcgcacctatctggacatgaaccgcttcgatctggccaaagagtattgtcgagagcggcccgactgcctggacacggtcctggcccgggaggccgatttctgctttcgccagcgtcgctacctggagagcgcacgctgctatgccctgacccagagctactttgaggagattgccctcaagttcctggaggcccgacaggaggaggctctggctgagttcctgcagcgaaaactggccagtttgaagccagccgaacgtacccaggccacactgctgaccacctggctgacagagctctacctgagccggcttggggctctgcagggcgacccagaggccctgactctctaccgagaaaccaaggaatgctttcgaaccttcctcagcagcccccgccacaaagagtggctctttgccagccgggcctctatccatgagctgctcgccagtcatggggacacagaacacatggtgtactttgcagtgatcatgcaggactatgagcgggtggtggcttaccactgtcagcacgaggcctacgaggaggccctggccgtgctcgcccgccaccgtgacccccagctcttctacaagttctcacccatcctcatccgtcacatcccccgccagcttgtagatgcctggattgagatgggcagccggctggatgctcgtcagctcattcctgccctggtgaactacagccagggtggtgaggtccagcaggtgagccaggccatccgctacatggagttctgcgtgaacgtgctgggggagactgagcaggccatccacaactacctgctgtcactgtatgcccgtggccggccggactcactactggcctatctggagcaggctggggccagcccccaccgggtgcattacgacctcaagtatgcgctgcggctctgcgccgagcatggccaccaccgcgcttgtgtccatgtctacaaggtcctagagctgtatgaggaggccgtggacctggccctgcaggtggatgtggacctggccaagcagtgtgcagacctgcctgaggaggatgaggaattgcgcaagaagctgtggctgaagatcgcacggcacgtggtgcaggaagaggaagatgtacagacagccatggcttgcctggctagctgccccttgctcaagattgaggatgtgctgcccttctttcctgatttcgtcaccatcgaccacttcaaggaggcgatctgcagctcacttaaggcctacaaccaccacatccaggagctgcagcgggagatggaagaggctacagccagtgcccagcgcatccggcgagacctgcaggagctgcggggccgctacggcactgtggagccccaggacaaatgtgccacctgcgacttccccctgctcaaccgccctttttacctcttcctctgtggccatatgttccatgctgactgcctgctgcaggctgtgcgacctggcctgccagcctacaagcaggcccggctggaggagctgcagaggaagctgggggctgctccacccccagccaagggctctgcccgggccaaggaggccgagggtggggctgccacggcagggcccagccgggaacagctcaaggctgacctggatgagttggtggccgctgagtgtgtgtactgtggggagctgatgatccgctctatcgaccggccgttcatcgacccccagcgctacgaggaggagcagctcagttggctgtaggagggtgtcacctttgatggggggtgggcaatggggagcagtggcttgaacccacttgagaaggctgcctcctaggctctgctcagtcatcttgcaattgccacactgtgaccacgttgacgggagtagagtagcgctgttggccaggaggtgtcaggtgtgagtgtattctgccagcttttcatgctgttcttcagagctgcagttatgccagaccatcagcctgcctcccagtagaggcccttcacctggagaagtcagaaatctgacccaattccaccccctgcctctagcacctcttctgtccctgtcattccccacacacgtcctgttcacctcgagagagagagagagagagcacctttcttccgtctgttcactctgcggcctctggaatcccagctcttctctctcagaagaagccttctcttcctcctgcctgtaggtgtcccagaagtgagaaggcagccttcgaagtcctgggcattgggtgagaaagtgatgctagttggggcatgcttttgtgcacactctctggggctccagtgtgaagggtgccctggggctgagggccttgtggaggatggtcggtggtggtgatggaggtggagagcattaaactgtctgcactgca

SEQ ID NO: 198610 - DNA, 1050 bp, Homo sapiens
  Payload ID: 19195
  Gene Name: vacuolar protein sorting 18 homolog (S. cerevisiae)
  ENST ID: ENST00000558855
  CDS Start-End: 318-710
tcagctgagctgccggggcgaggttgggatcacctggcaccggctgaagggagcctgtgatttttttgtagcgggggcggggagtaaggtgcaagactgcgccagattcaaggacgagggctgcccgattatctcgctgcataaggcaagagcaagaggatcctcaggattttaaagaggaggcgacggctgcaggttcccaggatctgtcagaggctggggagttacagcttccattctggggcgacggggaccccgggggggtagcccttttgtaatccccaggccccggacaaagagcccagaggccgggcaccatggcgtccatcctggatgagtacgagaactcgctgtcccgctcggccgtcttgcagcccggctgccctagcgtgggcatcccccactcggggtatgtgaatgcccagctggagaaggaagtgcccatcttcacaaagcagcgcattgacttcaccccttccgagcgcattaccagtcttgtcgtctccagcaatcagctgtgcatgagcctgggcaaggatacactgctccgagatgggatttcgccatgttgcccagtctggtctcaaactcctgagctcaagcaatctacccacctcggactcccaaagtgctgggattacaggctgagccagtgcacctggcctgtattcagcattttatgcatagatgtatatttcagggaacattgacttgggcaaggcaaatgagcccaaccacgtggagctgggacgtaaggatgacgcaaaagttcacaagatgttccttgaccatactggctctcacctgctgattgccctgagcagcacggaggtcctctacgtgaaccgaaatggacagaaggtacggccactagcacgctggaaggggcagctggtggagagtgtgggttggaacaaggcactgggcacggagagcagcacaggccccatcctggtcgggactgcccaaggccacatctttgaagcagagctctcagccagcgaaggtgggcttttcggccctgctccggatctctacttccgcccattg

SEQ ID NO: 198611 - DNA, 873 bp, Homo sapiens
  Payload ID: 19195
  Gene Name: vacuolar protein sorting 18 homolog (S. cerevisiae)
  ENST ID: ENST00000558474
  CDS Start-End: 303-668
gggcgaggttgggatcacctggcaccggctgaagggagcctgtgatttttttgtagcgggggcggggagtaaggtgcaagactgcgccagattcaaggacgagggctgcccgattatctcgctgcataaggcaagagcaagaggatcctcaggattttaaagaggaggcgacggctgcaggttcccaggatctgtcagaggctggggagttacagcttccattctggggcgacggggaccccgggggggtagcccttttgtaatccccaggccccggacaaagagcccagaggccgggcaccatggcgtccatcctggatgagtacgagaactcgctgtcccgctcggccgtcttgcagcccggctgccctagcgtgggcatcccccactcggggtatgtgaatgcccagctggagaaggaagtgcccatcttcacaaagcagcgcattgacttcaccccttccgagcgcattaccagtcttgtcgtctccagcaatcagctgtgcatgagcctgggcaaggatacactgctccgcattgacttgggcaaggcaaatgagcccaaccacgtggagctgggacgtaaggatgacgcaaaagttcacaagatgttccttgaccatactggtggatgtggacctggccaagcagtgtgcagacctgcctgaggaggatgaggaattgcgcaagaagctgtggctgaagatcgcacggcacgtggtgcaggaagaggaagatgtacagacagccatggcttgcctggctagctgccccttgctcaagattgaggatgtgctgcccttctttcctgatttcgtcaccatcgaccacttcaaggaggcgatctgcagctcacttaaggcctacaaccac

SEQ ID NO: 198612 - DNA, 1101 bp, Homo sapiens
  Payload ID: 19196
  Gene Name: vacuolar protein sorting 25 homolog (S. cerevisiae)
  Uniprot ID: Q9BRG1
  ENST ID: ENST00000253794
  CDS Start-End: 41-571
gtccttagccggtagcttccgggtttcctgggctactacgatggcgatgagtttcgagtggccgtggcagtatcgcttcccacccttctttacgttacaaccgaatgtggacactcggcagaagcagctggccgcctggtgctcgctggtcctgtccttctgccgcctgcacaaacagtccagcatgacggtgatggaagctcaggagagcccgctcttcaacaacgtcaagctacagcgaaagcttcctgtggagtcgatccagattgtattagaggaactgaggaagaaagggaacctcgagtggttggataagagcaagtccagcttcctgatcatgtggcggaggccagaagaatgggggaaactcatctatcagtgggtttccaggagtggccagaacaactccgtctttaccctgtatgaactgactaatggggaagacacagaggatgaggagttccacgggctggatgaagccactctactgcgggctctgcaggccctacagcaggagcacaaggccgagatcatcactgtcagcgatggccgaggcgtcaagttcttctagcagggacctgtctccctttacttcttacctcccacctttccagggctttcaaaaggagacagacccagtgtcccccaaagactggatctgtgactccaccagactcaaaaggactccagtcctgaaggctgggacctggggatgggtttctcacaccccatatgtctgtcccttggatagggtgaggctgaagcaccagggagaaaatatgtgcttcttctcgccctacctcctttcccatcctagactgtccttgagccagggtctgtaaacctgacactttatatgtgttcacacatgtaagtacatacacacatgcgcctgcagcacatgcttctgtctcctcctcctcccacccctttagctgctgttgcctcccttctcaggctggtgctggatccttcctaggggatgggggaagccctggctgcaggcagccttccaggcaatatgaagataggaggcccacgggcctggcagtgagaggtgtggccccacaccgatttatgatattaaaatctcaactccca

SEQ ID NO: 198613 - DNA, 639 bp, Homo sapiens
  Payload ID: 19196
  Gene Name: vacuolar protein sorting 25 homolog (S. cerevisiae)
  ENST ID: ENST00000589520
  CDS Start-End: 1-334
tcgcttcccacccttctttacgttacaaccgaatgtggacactcggcagaagcagctggccgcctggtgctcgctggtcctgtccttctgccgcctgcacaaacagtccagcatgacggtgatggaagctcaggagagcccgctcttcaacaacgtcaagctacagcgaaagcttcctgtggagtcgatccagattgtattagaggaactgaggaagaaagagttccacgggctggatgaagccactctactgcgggctctgcaggccctacagcaggagcacaaggccgagatcatcactgtcagcgatggccgaggcgtcaagttcttctagcagggacctgtctccctttacttcttacctcccacctttccagggctttcaaaaggagacagacccagtgtcccccaaagactggatctgtgactccaccagactcaaaaggactccagtcctgaaggctgggacctggggatgggtttctcacaccccatatgtctgtcccttggatagggtgaggctgaagcaccagggagaaaatatgtgcttcttctcgccctacctcctttcccatcctagactgtccttgagccagggtctgtaaacctgacactttatatgtgttcacacatgtaagt

SEQ ID NO: 198614 - DNA, 668 bp, Homo sapiens
  Payload ID: 19196
  Gene Name: vacuolar protein sorting 25 homolog (S. cerevisiae)
  ENST ID: ENST00000590339
  CDS Start-End: 345-668
cgatgagtttcgagtggccgtggcagtatcgcttcccacccttctttacgtgaggctcagaccccaagaagcaccgctgtgcctccctcccctcccccggaccctgggctcagccctgatgcttcatatggggagggggagaaaagacccgtcggccaacaccctcagtcccttactttcttcctgaaatgcgtcccgggcaagtgctgcctcccgccctctaattctgcgccccactcccttcacccggcaggttacaaccgaatgtggacactcggcagaagcagctggccgcctggtgctcgctggtcctgtccttctgccgcctgcacaaacagtccagcatgacggtgatggaagctcaggagagcccgctcttcaacaacgtcaagctacagcgaaagcttcctgtggagtcgatccagattgtattagaggaactgaggaagaaagggaacctcgagtggttggataagagcaagtccagcttcctgatcatgtggcggaggccagaagaatgggggaaactcatctatcagtgggtttccaggagtggccagaacaactccgtctttaccctgtatgaactgactaatggggaagacacagaggatgaggagttccacgggctggatgaagccactctactgcgggctctgcaggcccta

SEQ ID NO: 198615 - DNA, 603 bp, Homo sapiens
  Payload ID: 19196
  Gene Name: vacuolar protein sorting 25 homolog (S. cerevisiae)
  ENST ID: ENST00000589577
  CDS Start-End: 8-307
tactacgatggcgatgagtttcgagtggccgtggcagtatcgcttcccacccttctttacgttacaaccgaatgtggacactcggcagaagcagctggccgcctggtgctcgctggtcctgtccttctgccgcctgcacaaacagtccagcatgacggtgatggaagctcaggagagcccgctcttcaacaacgtcaagctacagcgtatcctccctcaggctcttccacagcccatacacatgcacttctgcgctttcacacatgcccagacgcccccccgcgccagcccccttttacccatgtaagggtcatttgtttttgctgcctgattcatccctaaaatatctgtggagaaaggctgaaggaaggcaacagacagagggaaagcttcctgtggagtcgatccagattgtattagaggaactgaggaagaaagggaacctcgagtggttggataagagcaagtccagcttcctgatcatgtggcggaggccagaagaatgggggaaactcatctatcagtgggtttccaggagtggccagaacaactccgtctttaccctgtatgaactgactaatggggaagacacagaggatgagg

SEQ ID NO: 198616 - DNA, 979 bp, Homo sapiens
  Payload ID: 19197
  Gene Name: vacuolar protein sorting 28 homolog (S. cerevisiae)
  Uniprot ID: Q9UK41
  ENST ID: ENST00000292510
  CDS Start-End: 110-775
tgaggggcgaatgccgagtcgctgaccgagcgcaccccgcccccggcgccatcttcccgaccgcgagccgtccaggtctcagtgctgtgccccccccagagcctagaggatgtttcatgggatcccagccacgccgggcataggagcccctgggaacaagccggagctgtatgaggaagtgaagttgtacaagaacgcccgggagagggagaagtacgacaacatggcagagctgtttgcggtggtgaagacaatgcaagccctggagaaggcctacatcaaggactgtgtctcccccagcgagtacactgcagcctgctcccggctcctggtccaatacaaagctgccttcaggcaggtccagggctcagaaatcagctctattgacgaattctgccgcaagttccgcctggactgcccgctggccatggagcggatcaaggaggaccggcccatcaccatcaaggacgacaagggcaacctcaaccgctgcatcgcagacgtggtctcgctcttcatcacggtcatggacaagctgcgtctggagatccgcgccatggatgagatccagcccgacctgcgagagctgatggagaccatgcaccgcatgagccacctcccacccgactttgagggccgccagacggtcagccagtggctgcagaccctgagcggcatgtcggcgtcagatgagctggacgactcacaggtgcgtcagatgctgttcgacctggagtcagcctacaacgccttcaaccgcttcctgcatgcctgagcccggggcactagcccttgcacagaagggcagagtctgaggcgatggctcctggtcccctgtccgccacacaggccgtggtcatccacacaactcactgtctgcagctgcctgtctggtgtctgtctttggtgtcagaactttgggggccgggcccctccccacaataaagatgctctccgaccttcctgcttgggtggctcc

SEQ ID NO: 198617 - DNA, 1097 bp, Homo sapiens
  Payload ID: 19197
  Gene Name: vacuolar protein sorting 28 homolog (S. cerevisiae)
  Uniprot ID: Q9UK41
  ENST ID: ENST00000377348
  CDS Start-End: 110-811
tgaggggcgaatgccgagtcgctgaccgagcgcaccccgcccccggcgccatcttcccgaccgcgagccgtccaggtctcagtgctgtgccccccccagagcctagaggatgtttcatgggatcccagccacgccgggcataggagcccctgggaacaagccggagctgtatgaggaagtgaagttgtacaagaacgcccgggagagggagaagtacgacaacatggcagagctgtttgcggtggtgaagacaatgcaagccctggagaaggcctacatcaaggactgtgtctcccccagcgagtacactgcagcctgctcccggctcctggtccaatacaaagctgccttcaggcaggtccagggctcagaaatcagctctattgacgaattctgccgcaagttccgcctggactgcccgctggccatggagcggatcaaggaggaccggcccatcaccatcaaggacgacaagggcaacctcaaccgctgcatcgcagacgtggtctcgctcttcatcacggtcatggacaagctgcgtctggagatccgcgccatggatgagatccagcccgacctgcgagagctgatggagaccatgcaccgcatgagccacctcccacccgactttgagggccgccagacggtcagccagtggtgggtgtccctcccagccaggcagagccccgcagtgcccgagaccctcccagccaggcggagccccgcagtgcccctgaggccctcagcccccacatgccctgtgctgcactcccaggctgcagaccctgagcggcatgtcggcgtcagatgagctggacgactcacaggtgcgtcagatgctgttcgacctggagtcagcctacaacgccttcaaccgcttcctgcatgcctgagcccggggcactagcccttgcacagaagggcagagtctgaggcgatggctcctggtcccctgtccgccacacaggccgtggtcatccacacaactcactgtctgcagctgcctgtctggtgtctgtctttggtgtcagaactttgggggccgggcccctccccacaataaagatgctctccgaccttcctgcttgggtggctcc

SEQ ID NO: 198618 - DNA, 650 bp, Homo sapiens
  Payload ID: 19197
  Gene Name: vacuolar protein sorting 28 homolog (S. cerevisiae)
  ENST ID: ENST00000533806
  CDS Start-End: 95-650
gagtcgctgaccgagcgcaccccgcccccggcgccatcttcccgaccgcgagccgtccaggtctcagtgctgtgccccccccagagcctagaggatgtttcatgggatcccagccacgccgggcataggagcccctgggaacaagccggagctgtatgaggaagtgaagttgtacaagaacgcccgggagagggagaagtacgacaacatggcagagctgtttgcggtggtgaagacaatgcaagccctggagaaggcctacatcaaggactgtgtctcccccagcgagcaggtccagggctcagaaatcagctctattgacgaattctgccgcaagttccgcctggactgcccgctggccatggagcggatcaaggaggaccggcccatcaccatcaaggacgacaagggcaacctcaaccgctgcatcgcagacgtggtctcgctcttcatcacggtcatggacaagctgcgtctggagatccgcgccatggatgagatccagcccgacctgcgagagctgatggagaccatgcaccgcatgagccacctcccacccgactttgagggccgccagacggtcagccagtggctgcagaccctgagcggcatgtcggcgtcagatgagctggacgactcacaggtgcgtc

SEQ ID NO: 198619 - DNA, 561 bp, Homo sapiens
  Payload ID: 19197
  Gene Name: vacuolar protein sorting 28 homolog (S. cerevisiae)
  ENST ID: ENST00000530790
  CDS Start-End: 403-561
cgctgaccgagcgcaccccgcccccggcgccatcttcccgaccgcgagccgtccagggtcttgctctgtctcccaggctggagtgcagtggctcggtcttggctcattgaaaccttcacctcctgggttcaagcgattctcctgcctcagcctcctgagtagctgggattacaaccgtatgccacaacgtccggctaattttgtaattttagtagagacagggtttcaccatgttggccaggctggtctcaaactcctgacctcaggtgatccgctcacctcggcctcccaaagtgctgggattacaggtgtgagccagcgcctggcttaggggccatctttgagtcggccctggctctgctccccaggtctcagtgctgtgccccccccagagcctagaggatgtttcatgggatcccagccacgccgggcataggagcccctgggaacaagccggagctgtatgaggaagtgaagttgtacaagaacgcccgggagagggagaagtacgacaacatggcagagctgtttgcggtggtgaagacaatgcaagccctggag

SEQ ID NO: 198620 - DNA, 2120 bp, Homo sapiens
  Payload ID: 19197
  Gene Name: vacuolar protein sorting 28 homolog (S. cerevisiae)
  ENST ID: ENST00000526204
  CDS Start-End: 39-146
ccaggtctcagtgctgtgccccccccagagcctagaggatgtttcatgggatcccagccacgccgggcataggagcccctgggaacaagccggagctgtatgaggaagtgaagttgtacaagaacgcccgggagagggagaagtaagtccaggcgcccaggctgtcccaacacacccatgcgcatctggctgccctggggcagcccctccagacccaccccaaactgaggggtgggaggacgcagggtcagtctggggaactgttcctgaggcactccaggatggagcaagaggtacgacaacatggcagagctgtttgcggtggtgaagacaatgcaagccctggagaaggcctacatcaaggactgtgtctcccccagcgagtaagagcccacgtcctgggaggtctgttcctgccctggggggcttgggtgctccataggcagcaagagcaggcgtctgtcaggctgggaggcacccacttgtgtggggcccacccagcgtgaggagggtgcccctgggtctcagccagggaagtcctgggggctggtgagggaggcgggcagaggcgcagctcctggggtgtcatccggcccactcccccaccctcatcccccagcacaggcaaccttaaaaaacggtcgagaggcttggggatgtcccaggatcttttgggggggctttgttcaatgaagtgacaagaccgtcacaggccaccgcacaggaccatgagctgtggatgcggccatcacaacagagggctggtcgctgtggttcagagggtgggcaggggttgggggccggggtctccacctggagccgagctacaagccccactacgtgctcagggcctcacccccaaaagctactagcagcccctcctccttgctcggcctgcctttgcctgtcgcctggtcctctctggaagctgctttgcctctggaccagccgagggggtaggatgagctgggtggggctggtcccatgcttgggcagcagctgacctctccctaggtacactgcagcctgctcccggctcctggtccaatacaaagctgccttcaggcaggtccagggctcagaaatcagctctattgacgaattctgccgcaagttccgcctggactgcccgctggccatggagcggatcaaggaggaccggcccatcaccatcaaggacgacaagggcaacctcaaccgctgcatcgcagacgtggtctcggtgcgccccagcccccagggcacgtggttaggagagccgaggctgcctgctgcagctgggcacgagcgtagggtcctgggcctccagagctgagcagcactctgacttgctgggcagaagggaacccctttaactaggaatgaggggtgggcagcatgcggggacgcccccaggccacctggactcctgtcggggggatgagcacagggtgcgttctggcggggtcctggcctcgggagagagtgtgggtgtgggcccacccttcagttcccacacagctgtctgggcagccaggacctcgttcacccaggaggcctgcagggtttgggaacagagtacagtgaggaggcccaagtgacagctgtggctgaggaggggttggggcccgtgagccgtggggcctcccgcacccgtggacacgcgagcctcatgtgcacacctgcccccagctcttcatcacggtcatggacaagctgcgtctggagatccgcgccatggatgagatccagcccgacctgcgagagctgatggagaccatgcaccgcatgagccacctcccacccgactttgagggccgccagacggtcagccagtggctgcagaccctgagcggcatgtcggcgtcagatgagctggacgactcacaggtgcgtcagatgctgttcgacctggagtcagcctacaacgccttcaaccgcttcctgcatgcctgagcccggggcactagcccttgcacagaagggcagagtctgaggcgatggctcctggtcccctgtccgccacacaggccgtggtcatccacacaactcactgtctgcagctgcctgtctggtgtctgtctttggtgtcagaactttgggggccgggcccctccccacaataaagatgctctccgacc

SEQ ID NO: 198621 - DNA, 892 bp, Homo sapiens
  Payload ID: 19197
  Gene Name: vacuolar protein sorting 28 homolog (S. cerevisiae)
  Uniprot ID: Q9UK41
  ENST ID: ENST00000526054
  CDS Start-End: 39-704
ccaggtctcagtgctgtgccccccccagagcctagaggatgtttcatgggatcccagccacgccgggcataggagcccctgggaacaagccggagctgtatgaggaagtgaagttgtacaagaacgcccgggagagggagaagtacgacaacatggcagagctgtttgcggtggtgaagacaatgcaagccctggagaaggcctacatcaaggactgtgtctcccccagcgagtacactgcagcctgctcccggctcctggtccaatacaaagctgccttcaggcaggtccagggctcagaaatcagctctattgacgaattctgccgcaagttccgcctggactgcccgctggccatggagcggatcaaggaggaccggcccatcaccatcaaggacgacaagggcaacctcaaccgctgcatcgcagacgtggtctcgctcttcatcacggtcatggacaagctgcgtctggagatccgcgccatggatgagatccagcccgacctgcgagagctgatggagaccatgcaccgcatgagccacctcccacccgactttgagggccgccagacggtcagccagtggctgcagaccctgagcggcatgtcggcgtcagatgagctggacgactcacaggtgcgtcagatgctgttcgacctggagtcagcctacaacgccttcaaccgcttcctgcatgcctgagcccggggcactagcccttgcacagaagggcagagtctgaggcgatggctcctggtcccctgtccgccacacaggccgtggtcatccacacaactcactgtctgcagctgcctgtctggtgtctgtctttggtgtcagaactttgggggccgggcccctccccacaataaagatgctctccgaccttc

SEQ ID NO: 198622 - DNA, 573 bp, Homo sapiens
  Payload ID: 19197
  Gene Name: vacuolar protein sorting 28 homolog (S. cerevisiae)
  ENST ID: ENST00000531032
  CDS Start-End: 90-573
gctgaccgagcgcaccccgcccccggcgccatcttcccgaccgcgagccgtccaggtctcagtgctgtgccccccccagagcctagaggatgtttcatgggatcccagccacgccgggcataggagcccctgggaacaagccggagctgtatgaggaagtgaagttgtacaagaacgcccgggagagggagaagtacgacaacatggcagagctgtttgcggtggtgaagacaatgcaagccctggagaaggcctacatcaaggactgtgtctcccccagcgagtacactgcagcctgctcccggctcctggtccaatacaaagctgccttcaggcaggtccagggctcagaaatcagctctattgacgaattctgccgcaagttccgcctggactgcccgctggccatggagcggatcaaggaggaccggcccatcaccatcaaggacgacaagggcaacctcaaccgctgcatcgcagacgtggtctcgctcttcatcacggtcatggacaagctgcgtctggagatccgcgccatggatgagatccagcccgacctgcgagagctgatgg

SEQ ID NO: 198623 - DNA, 1010 bp, Homo sapiens
  Payload ID: 19197
  Gene Name: vacuolar protein sorting 28 homolog (S. cerevisiae)
  Uniprot ID: Q9UK41
  ENST ID: ENST00000529182
  CDS Start-End: 39-740
ccaggtctcagtgctgtgccccccccagagcctagaggatgtttcatgggatcccagccacgccgggcataggagcccctgggaacaagccggagctgtatgaggaagtgaagttgtacaagaacgcccgggagagggagaagtacgacaacatggcagagctgtttgcggtggtgaagacaatgcaagccctggagaaggcctacatcaaggactgtgtctcccccagcgagtacactgcagcctgctcccggctcctggtccaatacaaagctgccttcaggcaggtccagggctcagaaatcagctctattgacgaattctgccgcaagttccgcctggactgcccgctggccatggagcggatcaaggaggaccggcccatcaccatcaaggacgacaagggcaacctcaaccgctgcatcgcagacgtggtctcgctcttcatcacggtcatggacaagctgcgtctggagatccgcgccatggatgagatccagcccgacctgcgagagctgatggagaccatgcaccgcatgagccacctcccacccgactttgagggccgccagacggtcagccagtggtgggtgtccctcccagccaggcagagccccgcagtgcccgagaccctcccagccaggcggagccccgcagtgcccctgaggccctcagcccccacatgccctgtgctgcactcccaggctgcagaccctgagcggcatgtcggcgtcagatgagctggacgactcacaggtgcgtcagatgctgttcgacctggagtcagcctacaacgccttcaaccgcttcctgcatgcctgagcccggggcactagcccttgcacagaagggcagagtctgaggcgatggctcctggtcccctgtccgccacacaggccgtggtcatccacacaactcactgtctgcagctgcctgtctggtgtctgtctttggtgtcagaactttgggggccgggcccctccccacaataaagatgctctccgaccttc

SEQ ID NO: 198624 - DNA, 1613 bp, Homo sapiens
  Payload ID: 19197
  Gene Name: vacuolar protein sorting 28 homolog (S. cerevisiae)
  ENST ID: ENST00000530836
  CDS Start-End: 39-146
ccaggtctcagtgctgtgccccccccagagcctagaggatgtttcatgggatcccagccacgccgggcataggagcccctgggaacaagccggagctgtatgaggaagtgaagttgtacaagaacgcccgggagagggagaagtaagtccaggcgcccaggctgtcccaacacacccatgcgcatctggctgccctggggcagcccctccagacccaccccaaactgaggggtgggaggacgcagggtacgacaacatggcagagctgtttgcggtggtgaagacaatgcaagccctggagaaggcctacatcaaggactgtgtctcccccagcgagtaagagcccacgtcctgggaggtctgttcctgccctggggggcttgggtgctccataggcagcaagagcaggcgtctgtcaggctgggaggcacccacttgtgtggggcccacccagcgtgaggagggtgcccctgggtctcagccagggaagtcctgggggctggtgagggaggcgggcagaggcgcagctcctggggtgtcatccggcccactcccccaccctcatcccccagcacaggcaaccttaaaaaacggtcgagaggcttggggatgtcccaggatcttttgggggggctttgttcaatgaagtgacaagaccgtcacaggccaccgcacaggaccatgagctgtggatgcggccatcacaacagagggctggtcgctgtggttcagagggtgggcaggggttgggggccggggtctccacctggagccgagctacaagccccactacgtgctcagggcctcacccccaaaagctactagcagcccctcctccttgctcggcctgcctttgcctgtcgcctggtcctctctggaagctgctttgcctctggaccagccgagggggtaggatgagctgggtggggctggtcccatgcttgggcagcagctgacctctccctaggtacactgcagcctgctcccggctcctggtccaatacaaagctgccttcaggcaggtccagggctcagaaatcagctctattgacgaattctgccgcaagttccgcctggactgcccgctggccatggagcggatcaaggaggaccggcccatcaccatcaaggacgacaagggcaacctcaaccgctgcatcgcagacgtggtctcgctcttcatcacggtcatggacaagctgcgtctggagatccgcgccatggatgagatccagcccgacctgcgagagctgatggagaccatgcaccgcatgagccacctcccacccgactttgagggccgccagacggtcagccagtggctgcagaccctgagcggcatgtcggcgtcagatgagctggacgactcacaggtgcgtcagatgctgttcgacctggagtcagcctacaacgccttcaaccgcttcctgcatgcctgagcccggggcactagcccttgcacagaagggcagagtctgaggcgatggctcctggtcccctgtccgccacacaggccgtggtcatccacacaactcactgtctgcagctgcctgtctggtgtctgtctttggtgtcagaactttgggggccgggcccctccccacaataaagat

SEQ ID NO: 198625 - DNA, 4586 bp, Homo sapiens
  Payload ID: 19198
  Gene Name: vacuolar protein sorting 33 homolog A (S. cerevisiae)
  Uniprot ID: Q96AX1
  ENST ID: ENST00000267199
  CDS Start-End: 114-1904
gtgcgctgccgtaccggtcacgtggacgtttggtcacgtgactgcgtccgtggtcctcccgtaggaaccggcggactcggttggcgttgtggggcagggggtggtggagcaagatggcggctcatctgtcctacggccgagtgaacctaaacgtgttgcgcgaggcggtgcgtcgcgagctgcgcgagttcctggacaagtgcgcaggaagcaaggcaatagtttgggatgaatacctaactggaccctttggcctgattgcacagtattcactattgaaggaacatgaagtggaaaaaatgttcacacttaaaggaaatcgtttgccggcagctgatgtgaagaatataattttttttgtcagacccaggctagagttgatggatataatcgctgaaaacgtgctcagtgaagatagacgaggcccaacgagagattttcatattctgtttgtgccacgccgtagcctgttgtgcgaacagcggttgaaggatctgggtgtcttgggatcctttattcacagggaggagtacagcttagatctcattccattcgatggggatctcttatccatggaatcagagggtgcattcaaagagtgctacctggagggtgaccagacgagcctgtaccacgcagccaaggggctgatgaccctgcaagctctgtatggaacgatcccccagatctttgggaaaggagaatgcgctcggcaagtggccaatatgatgatcaggatgaagagagagtttacaggaagccagaattcaatatttcctgtttttgataatctcttgttgcttgatcggaatgtggatttattaacacctcttgccactcagctgacatatgaaggactcattgatgaaatttatggcattcagaacagttatgtgaaattacctccagagaaatttgcacctaagaaacagggcgatggtggtaaggacctccccacggaagcaaagaagctgcagctgaattctgcagaggagctctatgctgagatccgagataagaacttcaacgcagttggctctgtgctcagcaagaaagcaaagatcatctctgcagcattcgaggaaagacacaatgctaagaccgtgggggagatcaagcagtttgtttcccagttgccccacatgcaggcagcaaggggctcgcttgcaaaccatacctcaattgcagaattgatcaaagatgtcactacttctgaagacttttttgataaattaaccgtggaacaggagtttatgtctggaatagacactgataaggtcaacaattacattgaggattgtatcgcccaaaagcactcgttgatcaaggtgttaagactagtttgcctccaatccgtgtgtaatagtgggctcaaacaaaaagttttggattattacaaaagagagattctccagacatacggctatgagcacatattgaccttacacaacctggagaaggccggcctgctgaaaccgcagacggggggcagaaacaattacccaactatacggaaaacattacgcctctggatggatgatgttaatgagcaaaaccccacggacatatcgtatgtgtacagtgggtatgccccgctcagtgtgcggctggcccagctgctttcccggcctggctggcggagcatcgaggaggtcctccgcatcctcccagggccccactttgaggagcggcagccactgcccacaggactgcagaagaaacgtcaaccgggagaaaaccgagtgactctgatatttttccttgggggcgtaaccttcgctgaaattgctgccctgcgatttctctcccagttggaagatggaggtacagaatatgtcattgccaccactaaactaatgaatggaaccagttggatagaggctctgatggaaaaacctttctaggatgttcagaggagacttaacaagtgtactgcagaataaactacctctttgaagaaattgctgaaaggaagtaaaaccccatagaagaaacatgggaatacagaatatattctggggtcagcttcttaaattatactactgtttactgctttctccgtctcttttgtattccctttttttttttcctttgagacggagtcttgctctgtcacccagactagagtgcagtggcacggtctcacctcactgcaacctccacctcctaggttcaagcaattctcctgcctcagcctcctgagtagctgggactacaggcatgcaccaccacacccggctaatttttgtatttttagtagccatggtgtttcaccatgttggccaggctggtctcaaactcctgacctcaggtgatccacctgcctcggcctcccacagtgctgggattacaggcctgagccaccgtgcctggcccctaatctgctgaagaaagaagaatagaagaaaatcaacctgagtaaaagcagcactggttttgagttttctaagctcagggtcttcattagagacctctggaaatacattaaggatggtgggggtagataatccattcagccagacaaacggggccagctcttaaaataagaaagctgagactgaggaggtgaaactgaaaataaaaagagaaagttcatcctctaatccccagtgctgtatttcttcaaggcgcatcaggcctaggacagtggttaagtgttgggagctggagatcattttatcactgagttgagatttctttttcctgcagagtgtgggagattatatttagggtcatcagtcactgtcgcaactgatcactaaggcaagtttgcttccttctacttcttacaaagcaagaggtttaggggagcttcttgcccagaaacaaagtttatgctctatgtgatcagctacatctccttaggttccatacttatcaggggcttttgacatggaagaatgtgataattggggagcaaccttctgagaattcagcctttgaagtaattcaaagacagtttcttagcacacacgttaactccagacacagcagtggtgggtgcctccattgaggtttccgttttctcttctgtccatcaagggcccaacatccaactggtcccacagtgagcaggggcaactcttgcttcttcagcatctggccacttcgtttccatggtaactgccacgtgtacttttctagcagtctgtggccactccgtactcagctgaaaacactgtttcagccccctctctggtgacctcagccttctccaggtgtatctcttgatgatcttggagaccagcagccacagctgctgctactcctgcaggagactgtcaggctgtggtggggggcaggggtgttggaggagaagttgaaaatccgtgtgttctctgcccctctgctcctccatcttagcttctggaggagttaaggcaccaagggcaccaagtcaggttggcagttttgctgcccttgcccaagcctccagcaaaactagctggtcccctgctttgctgggtcccagccaggtgtgattttggttgttgattagtaaccacacattgtttttccccacctttttcattagtggaggtttttgttttgttttgtttttgtttgtttgagacagagtctcacgctcttttcagactggagtgcagtggtgcgatgtcagctcactgcaacctccacttcccgggttcagacgattctcatgcctcagcctcctgagtagctgggattacagatgtgcaccaccacacctggctaatttttgtatttttagtagagatggggtttcaccatattggccaggctggtctcaaactcctgacctcaggcgattggcccacctcggcctcccaaagtgctgggattacaggtgtgaaccaccgtgcccggcccattagtggagttctgatgggcacggtaaatattattaatgaaagagaaattctgtatacttttttaaaaatctctttaatgaaagaatgaagagtggcagagataataattgaaagattagtttctcatggaattaatttggccttgatattcagtatttggaaatgtcttaaagaaaaccattttcattgtagaaaatccttttttaaatacttgttatatcccagggagattagtttataccttccacctcaggcagtcatcagctgctttagagaatggaatccaccctgcccctccattttttggttcctggggctcaattcaagtctggtcaagtctccctggctggggattctgtcctgggaacagatactcagttgtagtctcatgtgtctgcactcacccaagactctatatacttgcttgctcagagcatagttagggcagctcctaaaaatgcattcagcagaagactgaaaaacttcaattgcttcatttgtatgcaaatagaaaatggtagataattatatattatacgcctttgtgtaagttcatttaatacttgaagcagtctttgtctcaaaagagtatgcccttactgagaaaggatatgtgaacggtacatttattgttggggagagtggattgtttacatcatgtctggacttttgtctagttgggtagacagttctacaccagcagcccccttaataaagaagtctacacagaca

SEQ ID NO: 198626 - DNA, 567 bp, Homo sapiens
  Payload ID: 19198
  Gene Name: vacuolar protein sorting 33 homolog A (S. cerevisiae)
  ENST ID: ENST00000536212
  CDS Start-End: 106-567
aatgcactcttccagtttttctccttttttacttttttgattgtctttctggttttagacaaattttaaaatctgcttgttcccaggggggccccacctcatccaatgttttgtttccagcaagtggccaatatgatgatcaggatgaagagagagtttacaggaagccagaattcaatatttcctgtttttgataatctcttgttgcttgatcggaatgtggatttattaacacctcttgccactcagctgacatatgaaggactcattgatgaaatttatggcattcagaacagttatgtgaaattacctccagagaaatttgcacctaagaaacagggcgatggtggtaaggacctccccacggaagcaaagaagctgcagctgaattctgcagaggagctctatgctgagatccgagataagaacttcaacgcagttggctctgtgctcagcaagaaagcaaagatcatctctgcagcattcgaggaaagacacaatgctaagaccgtgggggagatcaagcagtttgtttcccagttgccccacatgcaggcagcaaggggc

SEQ ID NO: 198627 - DNA, 2019 bp, Homo sapiens
  Payload ID: 19198
  Gene Name: vacuolar protein sorting 33 homolog A (S. cerevisiae)
  ENST ID: ENST00000543633
  CDS Start-End: 32-160
ggcgttgtggggcagggggtggtggagcaagatggcggctcatctgtcctacggccgagtgaacctaaacgtgttgcgcgaggcggtgcgtcgcgagctgcgcgagttcctggacaagtgcgcaggaagcaagggtttatcagtcaccctaagttactgacagtacaactgtgaaaagtcgaactggggagcctcagtcttgtagagaacagaaccccaagaggcaatagtttgggatgaatacctaactggaccctttggcctgattgcacagtattcactattgaaggaacatgaagtggaaaaaatgttcacacttaaaggaaatcgtttgccggcagctgatgtgaagaatataattttttttgtcagacccaggctagagttgatggatataatcgctgaaaacgtgctcagtgaagatagacgaggcccaacgagagattttcatattctgtttgtgccacgccgtagcctgttgtgcgaacagcggttgaaggatctgggtgtcttgggatcctttattcacagggaggagtacagcttagatctcattccattcgatggggatctcttatccatggaatcagagggtgcattcaaagagtgctacctggagggtgaccagacgagcctgtaccacgcagccaaggggctgatgaccctgcaagctctgtatggaacgatcccccagatctttgggaaaggagaatgcgctcggcaagtggccaatatgatgatcaggatgaagagagagtttacaggaagccagaattcaatatttcctgtttttgataatctcttgttgcttgatcggaatgtggatttattaacacctcttgccactcagctgacatatgaaggactcattgatgaaatttatggcattcagaacagttatgtgaaattacctccagagaaatttgcacctaagaaacagggcgatggtggtaaggacctccccacggaagcaaagaagctgcagctgaattctgcagaggagctctatgctgagatccgagataagaacttcaacgcagttggctctgtgctcagcaagaaagcaaagatcatctctgcagcattcgaggaaagacacaatgctaagaccgtgggggagatcaagcagtttgtttcccagttgccccacatgcaggcagcaaggggctcgcttgcaaaccatacctcaattgcagaattgatcaaagatgtcactacttctgaagacttttttgataaattaaccgtggaacaggagtttatgtctggaatagacactgataaggtcaacaattacattgaggattgtatcgcccaaaagcactcgttgatcaaggtgttaagactagtttgcctccaatccgtgtgtaatagtgggctcaaacaaaaagttttggattattacaaaagagagattctccagacatacggctatgagcacatattgaccttacacaacctggagaaggccggcctgctgaaaccgcagacggggggcagaaacaattacccaactatacggaaaacattacgcctctggatggatgatgttaatgagcaaaaccccacggacatatcgtatgtgtacagtgggtatgccccgctcagtgtgcggctggcccagctgctttcccggcctggctggcggagcatcgaggaggtcctccgcatcctcccagggccccactttgaggagcggcagccactgcccacaggactgcagaagaaacgtcaaccgggagaaaaccgagtgactctgatatttttccttgggggcgtaaccttcgctgaaattgctgccctgcgatttctctcccagttggaagatggaggtacagaatatgtcattgccaccactaaactaatgaatggaaccagttggatagaggctctgatggaaaaacctttctaggatgttcagaggagacttaacaagtgtactgcagaataaactacctctttgaagaaattgctgaaaggaagtaaaaccccatagaagaaacatgggaatacagaata

SEQ ID NO: 198628 - DNA, 1154 bp, Homo sapiens
  Payload ID: 19198
  Gene Name: vacuolar protein sorting 33 homolog A (S. cerevisiae)
  ENST ID: ENST00000451053
  CDS Start-End: 9-569
ggagcaagatggcggctcatctgtcctacggccgagtgaacctaaacgtgttgcgcgaggcggtgcgtcgcgagctgcgcgagttcctggacaagtgcgcaggaagcaaggcaatagtttgggatgaatacctaactggaccctttggcctgattgcacagtattcactattgaaggaacatgaagtggaaaaaatgttcacacttaaaggaaatcgtttgccggcagctgatgtgaagaatataattttttttgtcagacccaggctagagttgatggatataatcgctgaaaacgtgctcagtgaagatagacgaggcccaacgagagattttcatattctgtttgtgccacgccgtagcctgttgtgcgaacagcggttgaaggatctgggtgtcttgggatcctttattcacagggaggagtacagcttagatctcattccattcgatggggatctcttatccatggaatcagagggtgcattcaaatcttgctctgttgccccggctggagtgcagtggcacaatctcagctcactgcaacctccacctcctgagttcaagtgattctgctgcctcagtcacctgagtagctgggattacaggcacatgccaccacacctggctaatttttgtatttttagtagagaaggggtttcaccattttggtcaggctggtctagaactcccgacctcatgatcctccccgctcagcctcccaaagtgctgggattacaggcgtgagccaccgcacccagccctcaatgtcttttgcccttgaacgttcatctgatctggagttttaagtggttttgccaaaaagcgtgtcttttgacatattctcgatggtctgccatattcagggaaacgttaaaatataccacacttgaaagagtagtccggcgacactctcaataataaccaaacgctccccaccatgtctgccatccttcctccctggggcagagggcctgacaagtgacaaccccgctctctcttcctcaggccctggaccctcagggccccctcagttctggctgtggacagcagggacatgttgggttggtaggggtggagggaattgataaaatgtaccatattgacttatgagtggataatggttgtaaaaaaacctaaataattccaaataaa

SEQ ID NO: 198629 - DNA, 2767 bp, Homo sapiens
  Payload ID: 19199
  Gene Name: vacuolar protein sorting 33 homolog B (yeast)
  Uniprot ID: Q9H267
  ENST ID: ENST00000333371
  CDS Start-End: 355-2208
gagatctaggaagtcgcttctttttctggtagaaggcggggttctcctcgtacgctgcggagtctctgcggggtgtagaccggaatcctgctgacgggcagagtggatcagggagggagggtcgagacacggtggctgcaggtctgagacaaggctgctccgaggtagtagctctcttgcctggaggtggccattcattcctggagtgctgctgaggagcgagggcccatctggggtctctggaagtcggtgcccaggcctgaaggatagccccccttgcgcttccctgggctgcggccggccttctcagaacgaagggcgtccttccaccccgcggcgcaggtgaccgctgccatggcttttccccatcggccggacgcccctgagctgcctgacttctccatgctgaagaggctggctcgagaccagctcatctatctgctggagcagcttcctggaaaaaaggatttattcattgaggcagatctcatgagccctttggatcgaattgccaatgtctccatcctgaagcaacacgaagtagacaagctatacaaggtggagaacaagccagccctcagctccaatgaacaattgtgcttcttggtcagaccccgcatcaagaatatgcgatacattgccagtcttgtcaatgctgacaaattggctggccgaactcgcaaatacaaagtgatcttcagccctcaaaagttctatgcgtgtgagatggtgcttgaggaagagggaatctatggagatgtgagctgtgatgaatgggccttctctttgctgcctcttgatgtggatctgctgagcatggaactaccagaatttttcagggattactttctggaaggagatcagcgttggatcaacactgtagctcaggccttacaccttctcagcactctctatggaccctttccaaactgctatggaattggcaggtgcgccaagatggcatatgaattgtggaggaacctggaggaggaggaggatggcgaaaccaagggccgaaggccagagattggacatatctttctcttggacagagatgtggactttgtgacagcactttgctcccaagtggtttatgagggcctagtagatgacaccttccgcatcaagtgtgggagtgtcgactttggcccagaagtcacatcctctgacaagagcctgaaggtgctactcaatgccgaggacaaggtgtttaatgagattcggaacgagcacttctccaatgtctttggcttcttgagccagaaggcccggaacttgcaggcccagtatgatcgccggagaggcatggacattaagcagatgaagaatttcgtgtcccaggagctcaagggcctgaaacaggagcaccgcctgctgagtctccatattggggcctgtgaatccatcatgaagaagaaaaccaagcaggatttccaggagctaatcaagactgagcatgcactgctagaggggttcaacatccgggagagcaccagctacattgaggaacacatagaccggcaggtgtcgcctatagaaagcctgcgcctcatgtgccttttgtccatcactgagaatggtttgatccccaaggattaccgatctctgaaaacacagtatctgcagagctatggccctgagcacctgctaaccttctccaatctgcgaagagctgggctcctaacggagcaggcccccggggacaccctcacagccgtggagagtaaagtgagcaagctggtgaccgacaaggctgcaggaaagattactgatgccttcagttctctggccaagaggagcaattttcgtgccatcagcaaaaagctgaatttgatcccacgtgtggacggcgagtatgatctgaaagtgccccgagacatggcttacgtcttcggtggtgcttatgtgcccctgagctgccgaatcattgagcaggtgctagagcggcgaagctggcagggccttgatgaggtggtacggctgctcaactgcagtgactttgcattcacagatatgactaaggaagacaaggcttccagtgagtccctgcgcctcatcttggtggtgttcttgggtggttgtacattctctgagatctcagccctccggttcctgggcagagagaaaggctacaggttcattttcctgacgacagcagtcacaaacagcgctcgccttatggaggccatgagtgaggtgaaagcctgatgtttttcccggccagtgttgacatcttccctgaacacattcctcagtgagatgcaggcatctggcacccagctgctataaccaagtgtccaccaactacctgctaagagccgggagcatggaacgtgttgggatttagagaacattatctgagaaaagagttcacttcctgctcccaggatatttctcttttctgtttatgaagtacaacccatgctgctaagatgcgagcaggaagaggcatcctttgctaaatcctgtttgaatgtcattgtaaataaagcctctgctctcagatgtaatacgttggtcgttctggacacgcacttccatctttattagtgaaagcccattggagcttgctacaggggcttcctgtgcttcttggcctggactttgtagtggctccaggcctggtctggttcttccctgtaaaaatcactctaccactctgtacctgagtttcctctaccataaaatgagggagatggctgaggtgaccagcaagcacgtttccagttctaaaatgttgtgattcattacatttttgagaaaatga

SEQ ID NO: 198630 - DNA, 2420 bp, Homo sapiens
  Payload ID: 19199
  Gene Name: vacuolar protein sorting 33 homolog B (yeast)
  ENST ID: ENST00000535906
  CDS Start-End: 348-2120
aggaagtcgcttctttttctggtagaaggcggggttctcctcgtacgctgcggagtctctgcggggtgtagaccggaatcctgctgacgggcagagtggatcagggagggagggtcgagacacggtggctgcaggtctgagacaaggctgctccgaggtagtagctctcttgcctggaggtggccattcattcctggagtgctgctgaggagcgagggcccatctggggtctctggaagtcggtgcccaggcctgaaggatagccccccttgcgcttccctgggctgcggccggccttctcagaacgaagggcgtccttccaccccgcggcgcaggtgaccgctgccatggcttttccccatcggccggacgcccctgagctgcctgacttctccatgctgaagaggctggctcgagaccagctcatctatctgctggagcagcaacacgaagtagacaagctatacaaggtggagaacaagccagccctcagctccaatgaacaattgtgcttcttggtcagaccccgcatcaagaatatgcgatacattgccagtcttgtcaatgctgacaaattggctggccgaactcgcaaatacaaagtgatcttcagccctcaaaagttctatgcgtgtgagatggtgcttgaggaagagggaatctatggagatgtgagctgtgatgaatgggccttctctttgctgcctcttgatgtggatctgctgagcatggaactaccagaatttttcagggattactttctggaaggagatcagcgttggatcaacactgtagctcaggccttacaccttctcagcactctctatggaccctttccaaactgctatggaattggcaggtgcgccaagatggcatatgaattgtggaggaacctggaggaggaggaggatggcgaaaccaagggccgaaggccagagattggacatatctttctcttggacagagatgtggactttgtgacagcactttgctcccaagtggtttatgagggcctagtagatgacaccttccgcatcaagtgtgggagtgtcgactttggcccagaagtcacatcctctgacaagagcctgaaggtgctactcaatgccgaggacaaggtgtttaatgagattcggaacgagcacttctccaatgtctttggcttcttgagccagaaggcccggaacttgcaggcccagtatgatcgccggagaggcatggacattaagcagatgaagaatttcgtgtcccaggagctcaagggcctgaaacaggagcaccgcctgctgagtctccatattggggcctgtgaatccatcatgaagaagaaaaccaagcaggatttccaggagctaatcaagactgagcatgcactgctagaggggttcaacatccgggagagcaccagctacattgaggaacacatagaccggcaggtgtcgcctatagaaagcctgcgcctcatgtgccttttgtccatcactgagaatggtttgatccccaaggattaccgatctctgaaaacacagtatctgcagagctatggccctgagcacctgctaaccttctccaatctgcgaagagctgggctcctaacggagcaggcccccggggacaccctcacagccgtggagagtaaagtgagcaagctggtgaccgacaaggctgcaggaaagattactgatgccttcagttctctggccaagaggagcaattttcgtgccatcagcaaaaagctgaatttgatcccacgtgtggacggcgagtatgatctgaaagtgccccgagacatggcttacgtcttcggtggtgcttatgtgcccctgagctgccgaatcattgagcaggtgctagagcggcgaagctggcagggccttgatgaggtggtacggctgctcaactgcagtgactttgcattcacagatatgactaaggaagacaaggcttccagtgagtccctgcgcctcatcttggtggtgttcttgggtggttgtacattctctgagatctcagccctccggttcctgggcagagagaaaggctacaggttcattttcctgacgacagcagtcacaaacagcgctcgccttatggaggccatgagtgaggtgaaagcctgatgtttttcccggccagtgttgacatcttccctgaacacattcctcagtgagatgcaggcatctggcacccagctgctataaccaagtgtccaccaactacctgctaagagccgggagcatggaacgtgttgggatttagagaacattatctgagaaaagagttcacttcctgctcccaggatatttctcttttctgtttatgaagtacaacccatgctgctaagatgcgagcaggaagaggcatcctttgctaaatcctgtttgaatgtcattgtaaataaagcctctgctctcagatgt

SEQ ID NO: 198631 - DNA, 2356 bp, Homo sapiens
  Payload ID: 19199
  Gene Name: vacuolar protein sorting 33 homolog B (yeast)
  ENST ID: ENST00000574755
  CDS Start-End: 265-507
ctgacgggcagagtggatcagggagggagggtcgagacacggtggctgcaggtctgagacaaggctgctccgaggtagtagctctcttgcctggaggtggccattcattcctggagtgctgctgaggagcgagggcccatctggggtctctggaagtcggtgcccaggcctgaaggatagccccccttgcgcttccctgggctgcggccggccttctcagaacgaagggcgtccttccaccccgcggcgcaggtgaccgctgccatggcttttccccatcggccggacgcccctgagctgcctgacttctccatgctgaagaggctggctcgagaccagctcatctatctgctggagcagcttcctggaaaaaaggatttattcattgaggcagatctcatgagccctttggatcgaattgccaatgtctccatcctgaagattgtgcttcttggtcagaccccgcatcaagaatatgcgatacattgccagtcttgtcaatgctgacaaattggctggccgaactcgcaaatacaaagtgatcttcagccctcaaaagttctatgcgtgtgagatggtgcttgaggaagagggaatctatggagatgtgagctgtgatgaatgggccttctctttgctgcctcttgatgtggatctgctgagcatggaactaccagaatttttcagggattactttctggaaggagatcagcgttggatcaacactgtagctcaggccttacaccttctcagcactctctatggaccctttccaaactgctatggaattggcaggtgcgccaagatggcatatgaattgtggaggaacctggaggaggaggaggatggcgaaaccaagggccgaaggccagagattggacatatctttctcttggacagagatgtggactttgtgacagcactttgctcccaagtggtttatgagggcctagtagatgacaccttccgcatcaagtgtgggagtgtcgactttggcccagaagtcacatcctctgacaagagcctgaaggtgctactcaatgccgaggacaaggtgtttaatgagattcggaacgagcacttctccaatgtctttggcttcttgagccagaaggcccggaacttgcaggcccagtatgatcgccggagaggcatggacattaagcagatgaagaatttcgtgtcccaggagctcaagggcctgaaacaggagcaccgcctgctgagtctccatattggggcctgtgaatccatcatgaagaagaaaaccaagcaggatttccaggagctaatcaagactgagcatgcactgctagaggggttcaacatccgggagagcaccagctacattgaggaacacatagaccggcaggtgtcgcctatagaaagcctgcgcctcatgtgccttttgtccatcactgagaatggtttgatccccaaggattaccgatctctgaaaacacagtatctgcagagctatggccctgagcacctgctaaccttctccaatctgcgaagagctgggctcctaacggagcaggcccccggggacaccctcacagccgtggagagtaaagtgagcaagctggtgaccgacaaggctgcaggaaagattactgatgccttcagttctctggccaagaggagcaattttcgtgccatcagcaaaaagctgaatttgatcccacgtgtggacggcgagtatgatctgaaagtgccccgagacatggcttacgtcttcggtggtgcttatgtgcccctgagctgccgaatcattgagcaggtgctagagcggcgaagctggcagggccttgatgaggtggtacggctgctcaactgcagtgactttgcattcacagatatgactaaggaagacaaggcttccagtgagtccctgcgcctcatcttggtggtgttcttgggtggttgtacattctctgagatctcagccctccggttcctgggcagagagaaaggctacaggttcattttcctgacgacagcagtcacaaacagcgctcgccttatggaggccatgagtgaggtgaaagcctgatgtttttcccggccagtgttgacatcttccctgaacacattcctcagtgagatgcaggcatctggcacccagctgctataaccaagtgtccaccaactacctgctaagagccgggagcatggaacgtgttgggatttagagaacattatctgagaaaagagttcacttcctgctcccaggatatttctcttttctgtttatgaagtacaacccatgctgctaagatgcgagcaggaagaggcatcctttgctaaatcctgtttgaatgtcattgtaaataaagcctctgctctcagatgt

SEQ ID NO: 198632 - DNA, 4417 bp, Homo sapiens
  Payload ID: 19200
  Gene Name: vacuolar protein sorting 36 homolog (S. cerevisiae)
  Uniprot ID: Q86VN1
  ENST ID: ENST00000378060
  CDS Start-End: 29-1189
ggagggccggggctgggtggcagcggccatggaccgcttcgtttggaccagcggcctcctggagatcaacgagaccctggtgatccagcagcgcggggtgcgaatctacgatggcgaggagaagataaaatttgatgctgggactctccttcttagtacacaccgactgatttggagagatcagaaaaatcatgagtgttgcatggccattctcctttcccaaattgtgttcattgaagaacaggcggctggaattgggaagagtgccaaaatagtggttcatcttcacccagctcctcctaacaaagaacctggcccattccagagtagtaagaactcctacatcaaactctccttcaaagaacatggccagattgagttttacaggcgtttatcagaggaaatgacacaaagaagatgggagaatatgccagtttcccagtcattacaaacaaatagaggaccccagccaggaagaataagggctgtaggaattgtaggtattgaaaggaaactggaagaaaaaagaaaagaaactgacaaaaacatttctgaggcctttgaagacctcagcaaactaatgatcaaggctaaggaaatggtggaattatcaaaatcaattgctaataaaattaaagacaaacaaggtgacatcacagaagatgagaccatcaggtttaaatcctacttgctgagcatgggaatagctaacccagttaccagagaaacctacggctcaggcacacagtaccacatgcagctggccaaacaactggctggaatattgcaggtgcctttagaggaacgagggggaataatgtcactcacggaggtgtactgcttagtaaaccgagctcgaggaatggaattgctctcaccagaagatttagtgaatgcgtgcaagatgctggaagcactgaaattacctctcaggctccgtgtgtttgacagtggcgtcatggtaattgagcttcagtctcacaaggaagaggaaatggtggcctcggccctggagacagtttcagaaaagggatccctaacatcagaagagtttgctaagcttgtgggaatgtctgtcctcctagccaaagaaaggttgctgcttgcagagaagatgggccatctttgccgtgatgactcagtggaaggcctgcgtttttacccaaatttatttatgacacagagctaagggttttgtatttaaaatcctttttgtccatatgcttgcgtcatgtagaggttgtatgacattgagctaagagataaaccccgatcaattgagaatttattggaacttcacagtgcaatgtaaatctcttttaatttctcactaaatatggtccaggaaatttatttagtatacgcataggaaaattcagaaaagtgaatgccaatatgaatttaaaatcatgctatagtgcagaaccctcagagtttaacttggaatatagtggattttaacttgatcctcaaatctaatcattttataaagaagggaatttagttttgcagagaataaaaagagaagttgcatgttcagacaggttagattattattttggtgtaactgaaattcactgattgcacatgacaatgttgggacaaaatatactgcagcatgctatatgaggctcctccccagggcttttagaagcagtcatagacatgtcttcaacataccaaataaaatacctttaaaaatgaaataattttatttgacacatatatttatatatattctatctagtttctctttgtttttttaagtgatgatttcatgactggcatttaaagaatgcaactgtgtcattttgtttccaaatgctgtggattttgaaactgaactagagagctgtatagacatgcccagagttatgattacaaatttaggaggtagacggctcaggaattccctgggattgttgtgctggtggaatggcagagggaacttcacaggaaccttagtgttcttttacctcaaagccacagacaggaaatagaaagtggaaaagtaatatctccttttcttttccataaggagtttcaacactgaactttaaaaagtctatcatattccagcaatattttttctttgtcctttatgttgtaagttgtgtggaaaaactacttcggtaagaaatgttactgagataacaacaactggctaatactgcatgtagattgcttaggttttaaagtgactgcctgacttcacatgttattgctacagcctccagtatgttcgcattatctcaaactcagggaccccacaggacaggagacaccctttctgaaactgagttggaagtgaaagggtggtgatggttttggccaagcctgcgggagggaaagtattgtattgggagcacccttgggaccaggaagagggatgcccaggttcacactctgggacccctaagacattgtcagtgggtaaggtggagggccactgccagaggctgctgcagtgccctctgggaagtgccagggaccctcagctgcagacccaggggatcccaatcccttatctctgcctgaaaagtggctattgctgcttcgtatcctccagtgtcacaggaatgctgtgcctgagacatcccactttagtttttgttttccaaacctgtcactgactcttcattgtggtgacagatcctctggttcccccattgctcagcctcaggtttattttgagggtaactcagtgtctgactgcccaagtcttttaggggttagttggaccattgtgtaagcttgtttgtatgtctcacctctttctggttggtacttactgtctcacactgctctggcaaacttgtacacacacacacactctctctctctctcacctggctaaggcttttaaaattatgaagataaataatctgtttcaccagctggagtgagttgcaaggaagattgctggagctactcaatctagcgctaatggtttggattcattactgcaaacctacataatttaacatatttgtttactttagtgtgacaactgatgaaaaaaaatggagcaatctgaattgtataaaataacttaagaaggaagaaaagtgatatataaatatattttgcaaatgtcacattaatttaaaaatgagtatgattgattttatttttaaagtgggcattcttcactgtttcgagacctttgtatgtatttgtgtatttttatctttttttttcaggccattattataaggtgttattttggccctctaatgtagaagttatgtttaaatacaaccaatcaggccctaagtgcaaaaaagttctgtcttggtgcttatcactggtataattattatttttttgttttcctaactttgctcttaggagcatgagcctctttgtagctttatggtaatgcaatatttctggtcatttactgtcaaaaaatttttttacattgtgttagtgaagactgtgttttcagggttaaatgattggtatcaatgtatatagagtaaaattattgcaaaatttaaaaatgatttttcttggcattctttttaaatactctgaaacatatatgcaaatgagaaacctttaatcatactaaagccagttatgttaagaatttttcctttggattttataattaagagttgcttataaatacttatgacattgagctcttactgttttagttgtcttaaaacaatgggacatgtcatgaactggtttctttttttaaaaaattcttgatgtgaattccactgttacctgaccatgtatattcagatgaatgtactctttcttgttccttgttaccagattaatctgagagaatgtggattcatcctgtcatctttctcatactcaaatacttaaaatggttcttttgcccaaaagtctcagagtcttcattttggtacagtggagtcacaacttgtaaggtggttaggttttaaagaccgtgcctaaggacaaaattgagcatgctcagaatggtccttgaaaatctcctaaattaccaataaatttctctttgtagtcttaaagtttaaatccctgtggagtgatatgtaggtatgaatatattatgcttatattaagtacaaaaatacaaactgcatatcaagagattcttatagcattaataatttccatgcatgtgtctttttccagtaggtatggttgaatttatgtaaatttattgctaatcccatcccttacgatctagagtataagctgcgcaagggcagaagtttttatctggtttgttcatggatgtattctaagagctgagaacagggcctggacacaataagcattcaataaatatttactgaatgaatgaactcctacctatattcctatttataatttggctccactttatcctactttagctcccattcaattcaataaaaaaaacatttttttgaacacatagcaa

SEQ ID NO: 198633 - DNA, 4607 bp, Homo sapiens
  Payload ID: 19200
  Gene Name: vacuolar protein sorting 36 homolog (S. cerevisiae)
  Uniprot ID: Q86VN1
  ENST ID: ENST00000611132
  CDS Start-End: 393-1379
gcggccgcttccctccgcccggaatgcttccgggagcgcacagctgcagtgcccgggagaaggagcgctcgccgtctgcgggcgccgggcggcgatccggcagtcgacttccttggcgtggttccagaccccctgacgacaccaacctcggcgtcggcaccggacagccccgtttcgcctttctgtgaggagggcgcggtggccgtacagtccgtgccccagcggaagctttagcttggaccttatgcagtcggagggattagcatatctgggcagaggggtgagggattgcttcgaaaggatttcctaaagagataaaatttgatgctgggactctccttcttagtacacaccgactgatttggagagatcagaaaaatcatgagtgttgcatggccattctcctttcccaaattgtgttcattgaagaacaggcggctggaattgggaagagtgccaaaatagtggttcatcttcacccagctcctcctaacaaagaacctggcccattccagagtagtaagaactcctacatcaaactctccttcaaagaacatggccagattgagttttacaggcgtttatcagaggaaatgacacaaagaagatgggagaatatgccagtttcccagtcattacaaacaaatagaggaccccagccaggaagaataagggctgtaggaattgtaggtattgaaaggaaactggaagaaaaaagaaaagaaactgacaaaaacatttctgaggcctttgaagacctcagcaaactaatgatcaaggctaaggaaatggtggaattatcaaaatcaattgctaataaaattaaagacaaacaaggtgacatcacagaagatgagaccatcaggtttaaatcctacttgctgagcatgggaatagctaacccagttaccagagaaacctacggctcaggcacacagtaccacatgcagctggccaaacaactggctggaatattgcaggtgcctttagaggaacgagggggaataatgtcactcacggaggtgtactgcttagtaaaccgagctcgaggaatggaattgctctcaccagaagatttagtgaatgcgtgcaagatgctggaagcactgaaattacctctcaggctccgtgtgtttgacagtggcgtcatggtaattgagcttcagtctcacaaggaagaggaaatggtggcctcggccctggagacagtttcagaaaagggatccctaacatcagaagagtttgctaagcttgtgggaatgtctgtcctcctagccaaagaaaggttgctgcttgcagagaagatgggccatctttgccgtgatgactcagtggaaggcctgcgtttttacccaaatttatttatgacacagagctaagggttttgtatttaaaatcctttttgtccatatgcttgcgtcatgtagaggttgtatgacattgagctaagagataaaccccgatcaattgagaatttattggaacttcacagtgcaatgtaaatctcttttaatttctcactaaatatggtccaggaaatttatttagtatacgcataggaaaattcagaaaagtgaatgccaatatgaatttaaaatcatgctatagtgcagaaccctcagagtttaacttggaatatagtggattttaacttgatcctcaaatctaatcattttataaagaagggaatttagttttgcagagaataaaaagagaagttgcatgttcagacaggttagattattattttggtgtaactgaaattcactgattgcacatgacaatgttgggacaaaatatactgcagcatgctatatgaggctcctccccagggcttttagaagcagtcatagacatgtcttcaacataccaaataaaatacctttaaaaatgaaataattttatttgacacatatatttatatatattctatctagtttctctttgtttttttaagtgatgatttcatgactggcatttaaagaatgcaactgtgtcattttgtttccaaatgctgtggattttgaaactgaactagagagctgtatagacatgcccagagttatgattacaaatttaggaggtagacggctcaggaattccctgggattgttgtgctggtggaatggcagagggaacttcacaggaaccttagtgttcttttacctcaaagccacagacaggaaatagaaagtggaaaagtaatatctccttttcttttccataaggagtttcaacactgaactttaaaaagtctatcatattccagcaatattttttctttgtcctttatgttgtaagttgtgtggaaaaactacttcggtaagaaatgttactgagataacaacaactggctaatactgcatgtagattgcttaggttttaaagtgactgcctgacttcacatgttattgctacagcctccagtatgttcgcattatctcaaactcagggaccccacaggacaggagacaccctttctgaaactgagttggaagtgaaagggtggtgatggttttggccaagcctgcgggagggaaagtattgtattgggagcacccttgggaccaggaagagggatgcccaggttcacactctgggacccctaagacattgtcagtgggtaaggtggagggccactgccagaggctgctgcagtgccctctgggaagtgccagggaccctcagctgcagacccaggggatcccaatcccttatctctgcctgaaaagtggctattgctgcttcgtatcctccagtgtcacaggaatgctgtgcctgagacatcccactttagtttttgttttccaaacctgtcactgactcttcattgtggtgacagatcctctggttcccccattgctcagcctcaggtttattttgagggtaactcagtgtctgactgcccaagtcttttaggggttagttggaccattgtgtaagcttgtttgtatgtctcacctctttctggttggtacttactgtctcacactgctctggcaaacttgtacacacacacacactctctctctctctcacctggctaaggcttttaaaattatgaagataaataatctgtttcaccagctggagtgagttgcaaggaagattgctggagctactcaatctagcgctaatggtttggattcattactgcaaacctacataatttaacatatttgtttactttagtgtgacaactgatgaaaaaaaatggagcaatctgaattgtataaaataacttaagaaggaagaaaagtgatatataaatatattttgcaaatgtcacattaatttaaaaatgagtatgattgattttatttttaaagtgggcattcttcactgtttcgagacctttgtatgtatttgtgtatttttatctttttttttcaggccattattataaggtgttattttggccctctaatgtagaagttatgtttaaatacaaccaatcaggccctaagtgcaaaaaagttctgtcttggtgcttatcactggtataattattatttttttgttttcctaactttgctcttaggagcatgagcctctttgtagctttatggtaatgcaatatttctggtcatttactgtcaaaaaatttttttacattgtgttagtgaagactgtgttttcagggttaaatgattggtatcaatgtatatagagtaaaattattgcaaaatttaaaaatgatttttcttggcattctttttaaatactctgaaacatatatgcaaatgagaaacctttaatcatactaaagccagttatgttaagaatttttcctttggattttataattaagagttgcttataaatacttatgacattgagctcttactgttttagttgtcttaaaacaatgggacatgtcatgaactggtttctttttttaaaaaattcttgatgtgaattccactgttacctgaccatgtatattcagatgaatgtactctttcttgttccttgttaccagattaatctgagagaatgtggattcatcctgtcatctttctcatactcaaatacttaaaatggttcttttgcccaaaagtctcagagtcttcattttggtacagtggagtcacaacttgtaaggtggttaggttttaaagaccgtgcctaaggacaaaattgagcatgctcagaatggtccttgaaaatctcctaaattaccaataaatttctctttgtagtcttaaagtttaaatccctgtggagtgatatgtaggtatgaatatattatgcttatattaagtacaaaaatacaaactgcatatcaagagattcttatagcattaataatttccatgcatgtgtctttttccagtaggtatggttgaatttatgtaaatttattgctaatcccatcccttacgatctagagtataagctgcgcaagggcagaagtttttatctggtttgttcatggatgtattctaagagctgagaacagggcctggacacaataagcattcaataaatatttactgaatgaatgaactcctacctatattcctatttataatttggctccactttatcctactttagctcccattcaattcaataaaaaaaacatttttttgaacacatagcaa

SEQ ID NO: 198634 - DNA, 4906 bp, Homo sapiens
  Payload ID: 19201
  Gene Name: vacuolar protein sorting 37 homolog A (S. cerevisiae)
  Uniprot ID: Q8NEZ2
  ENST ID: ENST00000324849
  CDS Start-End: 675-1868
agctggcgccatcgcgcaccctctcaggttcatcgtccccgccccctttctacttccctaacccgcccctccccccgtaaggctgcagcggatgcaagatctacttgtgtcgctgagctcgcgctcctcctcctcctcctcgccatagagacagcactcggcggcggtggcggtggcggtggcggtagcggcggcggcagcgggtgccccatagacacctctcgcccagcgaagggaaaggcgagcaggagctgcgccgcaccgtgctgcgccgtcgcttttcgcacgtcctgacgggggcgctagatgatgacgcgacacgcagagggggcggagagcgcccccgggggcggggcacgcaagtgacggcggcgcgggtggtggagcgctgggcggccaggctccctggctggccggtttgggcgtctgggccgtgaaggtgggacctcctgttccgggccgcaagtttccctctccagccgcccgccgttcgtagcatgtcccccagaactcggggagcgcaggcaggacaggcttagagaagacgcggtccccagcgcttgggccacggacgtcccaccccgctcctctgtcgctggagaaccgccgggccgagccactgggagaagcaggccagagccttccagggcctccggcccgtggacccgaggaggatgagctggctttttcccctgaccaagagcgcctcctcctccgcggctgggtcccccggtggcctcaccagcctccagcagcagaagcagcgcctgatcgagtccctccggaactcacactccagtatagccgaaatacagaaagatgtggaatacagattgccattcaccataaacaacctgacaattaacattaatatattgcttcctccacagtttcctcaggaaaaaccagtgatcagtgtttatccaccaatacgacatcacttaatggataaacaaggagtgtatgttacctctccattagtaaacaattttacaatgcactcagatcttggaaaaattattcagagtctgttggatgagttttggaagaatcctccagttttagctcctacttcaacagcatttccttatctatacagtaacccaagtgggatgtctccttatgcttctcagggttttccatttcttcctccatatcctccacaagaagcaaacaggagtatcacttctttatctgttgctgacactgtttcttcttcaacaacaagtcataccacagccaagcctgccgctccttcatttggtgtcctttcaaatctgccattacccattcccacagtggatgcttcaataccgacaagccaaaatggttttgggtacaagatgccagatgtccctgatgcatttccagaactctcagaactaagtgtgtcacaactcacagatatgaatgaacaagaggaggtattactagaacagtttctgactttgcctcaactaaaacaaattattaccgacaaagatgacttagtaaaaagtattgaggaactagcaagaaaaaatctccttttggagcccagcttggaagccaaaagacaaactgttttagataagtatgaattacttacacagatgaagtccactttcgaaaagaagatgcaaaggcagcatgaacttagtgagagctgtagtgcaagtgcccttcaggcaagattgaaagtagctgcacatgaagctgaggaagaatctgataatattgcagaagacttcttggagggaaagatggaaatagatgattttctcagtagcttcatggaaaagagaacaatttgccactgtagaagagccaaggaagagaaacttcagcaggcgatagcaatgcacagccaatttcatgctccactatagattttcctggaaacatgaactgccaagagaggaatgggacacaaaaccaaacactgttttatatttatggtttgcaaactggcatttcatcagtggctaaattcacagatatcctatatagattgtatacagaactgagactgattttgtaccgattagaatgattgctatgatctttgagaaatttttctgcactatttgcactgaaatgtttatttattgttgataaattgtatcatatttaagttccactgctgttcctcttaccttgattaaatgcctatgcatgtacttttagctagtttttaatattttataaaacttcatttaaatttgtatttttaacttgaagttccatttctttatcaaggatggtatttagatttttttcctcttaaccttttttcaaaaactattttcaactgtgaggaaacccttatttttctttctttgtggataaaactttcaaaagcaatttaagatattcatagtgttaggaaacaccaaacctgcctatgtgccatctcacaaaagaaacttttaatacctacaataaatcaaaagaataaaccagctgttcttatatattgtttcatttttaaaactaaagatgcatttaagaagcaatacaagtaaatattttacctaataggaaaaaaaaaagttgcctttcatttaaaccattccaacagaaattcttatgctaatttaaaacatatatatatctggtaggtttgtggttggataggttttctaaattcctaatgttaaaaacaatctttatgttaatatacactaaatctatacacaaaaaaagtcagtgaacttttctgacctttactgtgagttaccttttcctaagaggaaagctatagtaataagtaaaatttaatttttaggcaatcctgatttttaatgaatttaattgagtgttcttgtatactacattgagcagtttgcttctataccgtgtcacaaaattcatgtatttcttgagaagccctaaaagctcataaaggaaaatgccgtgaactatgtagctcaggcttggtaaggtgccatctaaattacaaaacaaactaatgcataattttgcttaaatttcatcccagtatgattgtcttcccaacaccagcatatagtatagattgtctgtcttttttatattttttagttcttcctgtacatgtttttggcaataaagttataggaagaacaaaattattttgttagaattaaaacatgcttaatatttagtctgtttgtggagggcaggtattcacgtggactgagatacaatgttggatacagaaaataactttcattgtcttcctgacactgtgctaaggacatgctgttaaagcttcaaagtgaccagatgaggaaggaataattaattattactcctgatttgtagataactgaggtaagagtgtttcaaatttatgatagtcttttgggtattcagaaacctttccttatactgcactggccaccagagcttaattttcccagcagttacagcaatgggagatagaacagtctcaatcttttgccaaccatcaggttcctagaaaccaggtaggtgtatcccataacaagggaggagcataccacagcccctcatttgattaattcatttgatctatctatgttattaagtacctactaggaataaggcattgtggaaatactatacaaagataaacattgtttagatgcttatctactttccttttcaccagaaaaacagaaaaaaaagaaacattttcttacagagtaaaaatgttctacataatcacatgagtagttcatctcagtgttttttattctttaaagttgaactatcccagtttcattctataccattcattggataaccttgttacaacccagtcatgaaacagagcagtgtgatcagttatctgcatttaacaaatagacaaatcagtttacataaaggttatgtatgtcacccacgatgaaaagaatctgcatttgaatatgcccgtatgaatgtgggttctgtttttgcaacagagattaagtgaccattttttctaattttatggctatatattttcttcataaaaattggtcacatcggagaagcagtgccacaggaaaaatgaaatgcatgtgaaagtttgtattctgattttacaagatgagatagaaatcagaattaaagaggaatacttaggagttactaggctaatcagtgtacgaatttgtcataggtagagatttaaaggttaatatcttaaaatagaagaaaattctaaatcaatcaatcagtgagatataaactaaacagacccacttcaaagttgaaagaaatttctaggcataaattgagactaggaaatttatatcagaatagagggtgcttgacacatatatatgcttaaattgaaggacagctcagattcatttttaggagaagaaagtaaactaatgtgctcttaaagaataaaaatttattctatggtttctgtctctgatcatcaccttccattctataaaaagctcagttactgatttgctgggtcatggtcaaaattcttacctatttatttcatatcaactttaaaaaataaattacttgcattctatatattactaattgggaagtaatatgcctcaaatcagttttatactggattattccctatgctttaaaccactgctctcaataaaacacttcctgattaatgtttgattattagatattttagtcttgttggggatattttagtcttgttgggttagccatgctctgaagaatctgtgaaagtacagtaaagttttaataagcaataaatgtaaccttttatataaatctcagtgctaggttaacttctaataagcagacgaacatgttacataaattataatgtctgtcttgtaaaaaagttgaggggactaaaagtttatgactctgatatggaagttgtcatattaaaaaactacattttaaaacatcaaatatttatactatttgcttttcaaataaaagcatagtgctgtttggcata

SEQ ID NO: 198635 - DNA, 4051 bp, Homo sapiens
  Payload ID: 19201
  Gene Name: vacuolar protein sorting 37 homolog A (S. cerevisiae)
  Uniprot ID: Q8NEZ2
  ENST ID: ENST00000425020
  CDS Start-End: 152-709
ggcaggacaggcttagagaagacgcggtccccagcgcttgggccacggacgtcccaccccgctcctctgtcgctggagaaccgccgggccgagccactgggagaagcaggccagagccttccagggcctccggcccgtggacccgaggaggatgagctggctttttcccctgaccaagagcgcctcctcctccgcggctgggtcccccggtggcctcaccagcctccagcagcagaagcagcgcctgatcgagtccctccggaactcacactccagtatagccgaaatacagaaagatgtggaatacagattgccattcaccataaacaacctgacaattaacattaatatattgcttcctccacagtttcctcaggaaaaaccagtgatcagtgtttatccaccaatacgacatcacttaatggataaacaaggagtgtatgttacctctccattagtaaacaattttacaatgcactcagatcttggaaaaattattcagagtctgttggatgagttttggaagaatcctccagttttagctcctacttcaacagcatttccttaccagctagaaatcaggtggcaccatccgcactgcctggaaatctccttagctagatcatccaattcactagggttttccatttcttcctccatatcctccacaagaagcaaacaggagtatcacttctttatctgttgctgacactgtttcttcttcaacaacaagtcataccacagccaagcctgccgctccttcatttggtgtcctttcaaatctgccattacccattcccacagtggatgcttcaataccgacaagccaaaatggttttgggtacaagatgccagatgtccctgatgcatttccagaactctcagaactaagtgtgtcacaactcacagatatgaatgaacaagaggaggtattactagaacagtttctgactttgcctcaactaaaacaaattattaccgacaaagatgacttagtaaaaagtattgaggaactagcaagaaaaaatctccttttggagcccagcttggaagccaaaagacaaactgttttagataaggtgagttagtgataattttgaagaaatttacataatttaaaaatagaataaaacaaccttttcattttctcttttagtatgaattacttacacagatgaagtccactttcgaaaagaagatgcaaaggcagcatgaacttagtgagagctgtagtgcaagtgcccttcaggcaagattgaaagtagctgcacatgaagctgaggaagaatctgataatattgcagaagacttcttggagggaaagatggaaatagatgattttctcagtagcttcatggaaaagagaacaatttgccactgtagaagagccaaggaagagaaacttcagcaggcgatagcaatgcacagccaatttcatgctccactatagattttcctggaaacatgaactgccaagagaggaatgggacacaaaaccaaacactgttttatatttatggtttgcaaactggcatttcatcagtggctaaattcacagatatcctatatagattgtatacagaactgagactgattttgtaccgattagaatgattgctatgatctttgagaaatttttctgcactatttgcactgaaatgtttatttattgttgataaattgtatcatatttaagttccactgctgttcctcttaccttgattaaatgcctatgcatgtacttttagctagtttttaatattttataaaacttcatttaaatttgtatttttaacttgaagttccatttctttatcaaggatggtatttagatttttttcctcttaaccttttttcaaaaactattttcaactgtgaggaaacccttatttttctttctttgtggataaaactttcaaaagcaatttaagatattcatagtgttaggaaacaccaaacctgcctatgtgccatctcacaaaagaaacttttaatacctacaataaatcaaaagaataaaccagctgttcttatatattgtttcatttttaaaactaaagatgcatttaagaagcaatacaagtaaatattttacctaataggaaaaaaaaaagttgcctttcatttaaaccattccaacagaaattcttatgctaatttaaaacatatatatatctggtaggtttgtggttggataggttttctaaattcctaatgttaaaaacaatctttatgttaatatacactaaatctatacacaaaaaaagtcagtgaacttttctgacctttactgtgagttaccttttcctaagaggaaagctatagtaataagtaaaatttaatttttaggcaatcctgatttttaatgaatttaattgagtgttcttgtatactacattgagcagtttgcttctataccgtgtcacaaaattcatgtatttcttgagaagccctaaaagctcataaaggaaaatgccgtgaactatgtagctcaggcttggtaaggtgccatctaaattacaaaacaaactaatgcataattttgcttaaatttcatcccagtatgattgtcttcccaacaccagcatatagtatagattgtctgtcttttttatattttttagttcttcctgtacatgtttttggcaataaagttataggaagaacaaaattattttgttagaattaaaacatgcttaatatttagtctgtttgtggagggcaggtattcacgtggactgagatacaatgttggatacagaaaataactttcattgtcttcctgacactgtgctaaggacatgctgttaaagcttcaaagtgaccagatgaggaaggaataattaattattactcctgatttgtagataactgaggtaagagtgtttcaaatttatgatagtcttttgggtattcagaaacctttccttatactgcactggccaccagagcttaattttcccagcagttacagcaatgggagatagaacagtctcaatcttttgccaaccatcaggttcctagaaaccaggtaggtgtatcccataacaagggaggagcataccacagcccctcatttgattaattcatttgatctatctatgttattaagtacctactaggaataaggcattgtggaaatactatacaaagataaacattgtttagatgcttatctactttccttttcaccagaaaaacagaaaaaaaagaaacattttcttacagagtaaaaatgttctacataatcacatgagtagttcatctcagtgttttttattctttaaagttgaactatcccagtttcattctataccattcattggataaccttgttacaacccagtcatgaaacagagcagtgtgatcagttatctgcatttaacaaatagacaaatcagtttacataaaggttatgtatgtcacccacgatgaaaagaatctgcatttgaatatgcccgtatgaatgtgggttctgtttttgcaacagagattaagtgaccattttttctaattttatggctatatattttcttcataaaaattggtcacatcggagaagcagtgccacaggaaaaatgaaatgcatgtgaaagtttgtattctgattttacaagatgagatagaaatcagaattaaagaggaatacttaggagttactaggctaatcagtgtacgaatttgtcataggtagagatttaaaggttaatatcttaaaatagaagaaaattctaaatcaatcaatcagtgagatataaactaaacagacccacttcaaagttgaaagaaatttctaggcataaattgagactaggaaatttatatcagaatagagggtgcttgacacatatatatgcttaaattgaaggacagctcagattcatttttaggagaagaaagtaaactaatgtgctcttaaagaataaaaatttattctatggtttctgtctctgatcatcaccttccattctataaaaagctcagttactgatttgctgggtcatggtcaaaattcttacctatttatttcatatcaactttaaaaaataaa

SEQ ID NO: 198636 - DNA, 2102 bp, Homo sapiens
  Payload ID: 19201
  Gene Name: vacuolar protein sorting 37 homolog A (S. cerevisiae)
  ENST ID: ENST00000520140
  CDS Start-End: 312-1265
tgacggcggcgcgggtggtggagcgctgggcggccaggctccctggctggccggtttgggcgtctgggccgtgaaggtgggacctcctgttccgggccgcaagtttccctctccagccgcccgccgttcgtagcatgtcccccagaactcggggagcgcaggcaggacaggcttagagaagacgcggtccccagcgcttgggccacggacgtcccaccccgctcctctgtcgctggagaaccgccgggccgagccactgggagaagcaggccagagccttccagggcctccggcccgtggacccgaggaggatgagctggctttttcccctgaccaagagcgcctcctcctccgcggctgggtcccccggtggcctcaccagcctccagcagcagaagcagcgcctgatcgagtccctccggaactcacactccagtatagccgaaatacagaaagatgtggaatacagattgccattcaccataaacaacctgacaattaacattaatatattgcttcctccacagtttcctcaggaaaaaccagtgatcagtgtttatccaccaatacgacatcacttaatggataaacaaggagtgtatgttacctctccattagtaaacaattttacaatgcactcagatcttggaaaaattattcagagtctgttggatgagttttggaagaatcctccagttttagctcctacttcaacagcatttccttatctatacagtaacccaagtgggatgtctccttatgcttctcagggttttccatttcttcctccatatcctccacaagaagcaaacaggagtatcacttctttatctgttgctgacactgtttcttcttcaacaacaagtcataccacagccaagcctgccgctccttcatttggtgtcctttcaaatctgccattacccattcccacagtggatgcttcaataccgacaagccaaaatggttttgggtacaagatgccagatgtccctgatgcatttccagaactctcagaactaaggtcactgtataactgtgaacacttccccacggttgtgatttttaaagaaagtagatatatcgatatatccattggaccaaaatttacttttacagattctgtcaagaatatattacagactgctctatgttccattgtggttgatgttttatttgattttaaggttaaaactggcagccttaggtgtatatgtaaaaattatttagaaccctatcagttaactaaagctgaaaaattgtaaatagttgtcatggagaaaaactcgatgtctgatatttattgacattttttcttttgtgtttctagtgtgtcacaactcacagatatgaatgaacaagaggaggtattactagaacagtttctgactttgcctcaactaaaacaaattattaccgacaaagatgacttagtaaaaagtattgaggaactagcaagaaaaaatctccttttggagcccagcttggaagccaaaagacaaactgttttagataagtatgaattacttacacagatgaagtccactttcgaaaagaagatgcaaaggcagcatgaacttagtgagagctgtagtgcaagtgcccttcaggcaagattgaaagtagctgcacatgaagctgaggaagaatctgataatattgcagaagacttcttggagggaaagatggaaatagatgattttctcagtagcttcatggaaaagagaacaatttgccactgtagaagagccaaggaagagaaacttcagcaggcgatagcaatgcacagccaatttcatgctccactatagattttcctggaaacatgaactgccaagagaggaatgggacacaaaaccaaacactgttttatatttatggtttgcaaactggcatttcatcagtggctaaattcacagatatcctatatagattgtatacagaactgagactgattttgtaccgattagaatgattgctatgatctttgagaaatttttctgcactatttgcactgaaatgtttatttattgttgataaattgtatcatatttaagttccactgctgttcctcttaccttgattaaatgcctatgcatgta

SEQ ID NO: 198637 - DNA, 575 bp, Homo sapiens
  Payload ID: 19201
  Gene Name: vacuolar protein sorting 37 homolog A (S. cerevisiae)
  ENST ID: ENST00000519381
  CDS Start-End: 315-476
aagtgacggcggcgcgggtggtggagcgctgggcggccaggctccctggctggccggtttgggcgtctgggccgtgaaggtgggacctcctgttccgggccgcaagtttccctctccagccgcccgccgttcgtagcatgtcccccagaactcggggagcgcaggcaggacaggcttagagaagacgcggtccccagcgcttgggccacggacgtcccaccccgctcctctgtcgctggagaaccgccgggccgagccactgggagaagcaggccagagccttccagggcctccggcccgtggacccgaggaggatgagctggctttttcccctgaccaagagcgcctcctcctccgcggctgggtcccccggtggcctcaccagcctccagcagcagaagcagcgcctgatcgagtccctccggaactcacactccagatacaagttatgctggctatccagattctgtgattaaaaataaagtatagccgaaatacagaaagatgtggaatacagattgccattcaccataaacaacctgacaattaacattaatatattgcttcctccacag

SEQ ID NO: 198638 - DNA, 1307 bp, Homo sapiens
  Payload ID: 19201
  Gene Name: vacuolar protein sorting 37 homolog A (S. cerevisiae)
  Uniprot ID: Q8NEZ2
  ENST ID: ENST00000521829
  CDS Start-End: 123-1241
cccagcgcttgggccacggacgtcccaccccgctcctctgtcgctggagaaccgccgggccgagccactgggagaagcaggccagagccttccagggcctccggcccgtggacccgaggaggatgagctggctttttcccctgaccaagagcgcctcctcctccgcggctgggtcccccggtggcctcaccagcctccagcagcagaagcagcgcctgatcgagtccctccggaactcacactccagattgcttcctccacagtttcctcaggaaaaaccagtgatcagtgtttatccaccaatacgacatcacttaatggataaacaaggagtgtatgttacctctccattagtaaacaattttacaatgcactcagatcttggaaaaattattcagagtctgttggatgagttttggaagaatcctccagttttagctcctacttcaacagcatttccttatctatacagtaacccaagtgggatgtctccttatgcttctcagggttttccatttcttcctccatatcctccacaagaagcaaacaggagtatcacttctttatctgttgctgacactgtttcttcttcaacaacaagtcataccacagccaagcctgccgctccttcatttggtgtcctttcaaatctgccattacccattcccacagtggatgcttcaataccgacaagccaaaatggttttgggtacaagatgccagatgtccctgatgcatttccagaactctcagaactaagtgtgtcacaactcacagatatgaatgaacaagaggaggtattactagaacagtttctgactttgcctcaactaaaacaaattattaccgacaaagatgacttagtaaaaagtattgaggaactagcaagaaaaaatctccttttggagcccagcttggaagccaaaagacaaactgttttagataagtatgaattacttacacagatgaagtccactttcgaaaagaagatgcaaaggcagcatgaacttagtgagagctgtagtgcaagtgcccttcaggcaagattgaaagtagctgcacatgaagctgaggaagaatctgataatattgcagaagacttcttggagggaaagatggaaatagatgattttctcagtagcttcatggaaaagagaacaatttgccactgtagaagagccaaggaagagaaacttcagcaggcgatagcaatgcacagccaatttcatgctccactatagattttcctggaaacatgaactgccaagagaggaatgggacacaaaaccaaacactgttttatattt

SEQ ID NO: 198639 - DNA, 697 bp, Homo sapiens
  Payload ID: 19201
  Gene Name: vacuolar protein sorting 37 homolog A (S. cerevisiae)
  ENST ID: ENST00000521976
  CDS Start-End: 1-513
cctgatgcatttccagaactctcagaactaagtgtgtcacaactcacagatatgaatgaacaagaggaggtattactagaacagtttctgactttgcctcaactaaaacaaattattaccgacaaagatgacttagtaaaaagtattgaggaactagcaagaaaaaatctccttttggagcccagcttggaagccaaaagacaaactgttttagataagtatgaattacttacacagatgaagtccactttcgaaaagaagatgcaaaggcagcatgaacttagtgagagctgtagtgcaagtgcccttcaggcaagattgaaagtagctgcacatgaagctgaggaagaatctgataatattgcagaagacttcttggagggaaagatggaaatagatgattttctcagtagcttcatggaaaagagaacaatttgccactgtagaagagccaaggaagagaaacttcagcaggcgatagcaatgcacagccaatttcatgctccactataggtaaattgtatttcaagtttgagtctcaaggtgattgcatcagtgttctttaaatagacatgttgttaacggtgcctgttcatcagccttaagcataattctgtcattatagttactgtgctatgtaacatagaatgctttgtattatataataagcataatataaacatataactagtagaaa

SEQ ID NO: 198640 - DNA, 655 bp, Homo sapiens
  Payload ID: 19201
  Gene Name: vacuolar protein sorting 37 homolog A (S. cerevisiae)
  ENST ID: ENST00000518038
  CDS Start-End: 308-655
ggcggcgcgggtggtggagcgctgggcggccaggctccctggctggccggtttgggcgtctgggccgtgaaggtgggacctcctgttccgggccgcaagtttccctctccagccgcccgccgttcgtagcatgtcccccagaactcggggagcgcaggcaggacaggcttagagaagacgcggtccccagcgcttgggccacggacgtcccaccccgctcctctgtcgctggagaaccgccgggccgagccactgggagaagcaggccagagccttccagggcctccggcccgtggacccgaggaggatgagctggctttttcccctgaccaagagcgcctcctcctccgcggctgggtcccccggtggcctcaccagcctccagcagcagaagcagcgcctgatcgagtccctccggaactcacactccaggctggagcgcagtggcgcgatctcggttcactgcaacctccgtctcccggattcaagcaatcatcctccctcagctccccacacccctccgagtagctgggattacagattgcttcctccacagtttcctcaggaaaaaccagtgatcagtgtttatccaccaatacgacatcacttaatggataaacaaggagtgtatgttacctctccattagtaaacaat

SEQ ID NO: 198641 - DNA, 479 bp, Homo sapiens
  Payload ID: 19201
  Gene Name: vacuolar protein sorting 37 homolog A (S. cerevisiae)
  ENST ID: ENST00000521005
  CDS Start-End: 2-232
gatgagctggctttttcccctgaccaagagcgcctcctcctccgcggctgggtcccccggtggcctcaccagcctccagcagcagaagcagcgcctgatcgagtccctccggaactcacactccagtctatttccagtatcccttgctgcccaggcttcgccactgatctttccctttgcccacctgattgccgcgtcagcagaattgttaaaatacaattgtgaagagtaatctccaggtttcacaaagaatggaaaatagaactgttgcaacatcaaaggaaagggaagccagagttttcatcagtgaatgcttctcgtctgagagtcacttatcacgtagtcagtcttcttgagtctctaagatttaccctgttggagcagtctctccccatctcacagcgaccagtgcatgtacatttctcacttctttcatagtcttgtccccacgctcaagaattactttatgttcatcttga

SEQ ID NO: 198642 - DNA, 3028 bp, Homo sapiens
  Payload ID: 19202
  Gene Name: vacuolar protein sorting 37 homolog B (S. cerevisiae)
  Uniprot ID: Q9H9H4
  ENST ID: ENST00000267202
  CDS Start-End: 383-1240
gggctcacaggctgcgggaacttccttcccactgcctgttttccttggatcgcggtatctctcttcctggaggaaaaaggctcttatgacctcatggcgcgctctcccgagccgcagtgacgtcattaatgcgctcacgcgtcacagcccaatcatagggcccttcccctccctttagaagtcccgactgtccctgacacattccactccaagcgagccgcgacacttacgtcacgtccgcccgcccgcgcggtgatgacgtcacgacccagggctggcgtcacgtgtcccccccgcggggggcggcccttgagggcggcgcttccggtcggcggagcctggtggccgcagcggcggtggcgacgacggccgagacgtggggatggcgggcgccgggagcgaagcccggttcgccgggctgtcgctggtgcagctcaacgagctgctggaggacgagggccagctgacggagatggtgcagaagatggaggagacacagaatgttcagcttaacaaagaaatgacacttgccagcaaccggagcctggcagaaggaaaccttttgtaccagccccagctggacacgttgaaagcacgcttgacccagaaataccaggaactccaggttctctttgaagcctatcagataaagaagaccaaattagacagacagtctagcagtgcttccttggagaccctgttagcacttcttcaggcagaaggggccaagattgaggaagacactgagaacatggcagagaagtttctggatggagaacttcctctggattccttcattgatgtctatcagagcaaacggaaactggcccacatgcgacgggtgaaaatcgagaagctccaggagatggtcctaaaggggcagagactcccacaggccctggccccgctgccccccaggctgcccgaactggcacctaccgccccccttccctaccctgccccagaggccagtgggcctcctgccgttgcacctcggcgcatcccccccccaccacccccggtgcctgcgggacgcttagccaccccgtttactgcggccatgagttcgggacaggccgtgccgtacccaggattacagtgcccgcccctgcccccccgcgtgggcctccccactcagcaaggattctcttcgcagttcgtgtccccatatccgccacctctccctcagagacccccgccccggctccctccacaccagccgggtttcatcctccagtgagcgccggcgcggtccttcccgggagacttcttccacctggcgtgttgtgctctgctcacgggaaggaggctggaggtccgctctgtgccaagggctctggggccctgggccagcgtgtctgtctgattttagaactgtaggtcagtggtgagtagtaggagcccaggctttgggcatcaaggcagttgtgtgtgccgggttacagcctgacacctgtgcgttgcatcggtttgcattatccgtgtgatttctaagtatcttagcgttgatgaactcatgtttgggaagaaataggcctctcccccagtcccatttagaatcgtggtccttctgttgcagctttatttaatgagcatggttcatgatacttattttattttcgaaagacagtcctatgtgtctcacccaccggccactgcagccctggtgagggcgggtgggcgccggccggcctggaagagcgccgtggctgggccaccacctgtggctgcgttgttgctcactgaatctgttggggagaggtcaccatagtcaccgcctgacctggctgctgctcttgcttcagagccacaagcaaagtttgcactgggcccactgccgagtccagaggccggagaacggccactggtgtgggaggggagcgcacgagtgggactttgcacagcaaattgtgtccccagctcctcctctcccgcctgcctggagccggccctgaaggtttctatgaagaaataatcccccaatatttttactacgtgtgtgattttcctgttttatattgaaaaaacttttttgacactcccaagaccattcagggaaattttataaaaaatgcagatactgtcttgagcagatcgaaatgccgatgaagtggatgcaatttccttttgtgcaagcagtgcacggtgcccccccctcgggtgtccgtgctgtgccttagcttccccaggtgccgggactcacacctgctaggggctgggcaaggccccggctctgctttctctgaagggcttgtccaagttcattgccctgttacaggtggtcaagacgtccggccgccttgacccaggctacccttagccaatatcctctgcccctgggtggctggtggctgggcctcagggtgggcaacgttaggggtttggcgaaagcccgccccatgggattgagggacggggctgcactccaaccgtctgcacctgctcttcccccacccctgtgggacctcatcttcacgtgccatgtgtgctgaaggcccagggcccagcagggggcagtggcacctgttgacggaaaaggccgaggtgcttaccagtggaccttctggcccgcccctcccctgtcacttgtcgggcatccagggccccgacctgtgcctagccgccagggtgacagaaggcagaactgaagcggggtctgggccacgggccaggccactgccttttgtcctcagtgaccgtacattcctgctctcggacttgaactctactgtaactgttttcttaaaggaaatgaagctgtacaggacgattcactgccatgccagtcaggcgggcttgccatgttctgtgaatctcgagtgagcggtgccacccgcccccatacctccgccaccggccgctgtcggggatgccacagcctgccacggtcgcagccagacgtgagcttggcattgaagttgcaaagcggcccctggccgggctcgccgtcgctgtccagggccgtgtccggtgctgtggctgtaaagctgtaggaccctttttaataaatagagaattattaataaca

SEQ ID NO: 198643 - DNA, 2088 bp, Homo sapiens
  Payload ID: 19202
  Gene Name: vacuolar protein sorting 37 homolog B (S. cerevisiae)
  ENST ID: ENST00000371248
  CDS Start-End: 1536-2088
aataatatctaccagagggcacagagaataaggaactttgtctacctgctacccagccgaggaagtaaacactgccaaccggcggaaccccccgccttgtgctctgccctcagtgtgctcttccccatgtccactgttgtgaattatttatttctctaagtaggcttttgatggacaaaaatgggggctcaggaggaagtgacacaggcacagaggcaggaaagcagggatgggttgtccgacgagcgagttctcgtctactttggccagatggcatgtacttgtgtgtagagaaatgacaagaaatagggctggtgagggggagtgccagggtgtgcgccccatggtggttaatttaggaggaaacaaggagcttcgtgatgattttggagcagagaagcagtcggatgaaactgctcttttttttttttttttttgagaccgagttttgctcttgtctcccaggctggagtgcaatggcacaatctcggctcaccgcaacctctgcctcccggattcaagcgattctcctgcctcagcctcccaagtagctgggattacaggcacgcgccaccatgctcggctaattttgtatttttagtagagatggggtttctccatgttggtcgggctggtctagaactcctgacctcaggtgatccgtccgcctcggcctcccaaagtgctgggattacaggcgtgagccaccgcgcccggcctgaaactgctctttagggaggttaatctgtcagcaaagcgtgggctggcttggcgtggcaggaccaggttggcggcggaagtggaggttaggaagaaattaggatttgagctagggctctgggagaggtattcggaccagctggcccgactccctttctcacttcccctctcctgctgacctgaagtgctttccccacctctgtcacaggcacgtggtctcttagcttctttgtatacctctcctgtggcacttgacacacattttgtaagtcacttccctgtgtcccccactggcttgggggctgcattttgtcatgtttgtctttttgtccttggcacccagcacagtgcctggcacccaggatgtgcctgggtagtgctgctgagtgagtggtgataaccgggcttcaagtggaagtgagtaggagacagggctctggtgagcggggaggggaggggcagtgggggtgcaggagggagggagtcattgaggccggattaggcagagcatgagggatgggcagggctttgtcccgcaggcagttggagtgtggttctggagctcagggtgaatgctctgcttggagacagaaattcaagccactctcctccaagtgcttgtggaaatcaaggagaatataaaagtttgaaaggccactaggagctattagtgggttgggagaaggaaagagctgccatcgaagggaggggagaaacgagagaaacaagttggatgacctaacatcctgttagagactggctggaagaggaacccagaagtagactgcactgtttgaccctcaccggtcggtcgtatgcagagtggttgtgttcttgagctgaggaatgccggccttgttgcctgtttggctttgattacagtatttgtagcagaatgttgctatggagattcatgccagacacagaatgttcagcttaacaaagaaatgacacttgccagcaaccggagcctggcagaaggaaaccttttgtaccagccccagctggacacgttgaaagcacgcttgacccagaaataccaggaactccaggttctctttgaagcctatcagataaagaagaccaaattagacagacagtctagcagtgcttccttggagaccctgttagcacttcttcaggcagaaggggccaagattgaggaagacactgagaacatggcagagaagtttctggatggagaacttcctctggattccttcattgatgtctatcagagcaaacggaaactggcccacatgcgacgggtgaaaatcgagaagctccaggagatggtcctaaaggggcagagactcccacaggccctggccccgctgccccccaggctgcccgaactggcacctaccg

SEQ ID NO: 198644 - DNA, 879 bp, Homo sapiens
  Payload ID: 19202
  Gene Name: vacuolar protein sorting 37 homolog B (S. cerevisiae)
  ENST ID: ENST00000535765
  CDS Start-End: 66-879
ggcgcttccggtcggcggagcctggtggccgcagcggcggtggcgacgacggccgagacgtggggatggcgggcgccgggagcgaagcccggttcgccgggctgtcgctggtgcagctcaacgagctgctggaggacgagggccagctgacggagatggtgcagaagatggaggagaatgttcagcttaacaaagaaatgacacttgccagcaaccggagcctggcagaaggaaaccttttgtaccagccccagctggacacgttgaaagcacgcttgacccagaaataccaggaactccaggttctctttgaagcctatcagataaagaagaccaaattagacagacagtctagcagtgcttccttggagaccctgttagcacttcttcaggcagaaggggccaagattgaggaagacactgagaacatggcagagaagtttctggatggagaacttcctctggattccttcattgatgtctatcagagcaaacggaaactggcccacatgcgacgggtgaaaatcgagaagctccaggagatggtcctaaaggggcagagactcccacaggccctggccccgctgccccccaggctgcccgaactggcacctaccgccccccttccctaccctgccccagaggccagtgggcctcctgccgttgcacctcggcgcatcccccccccaccacccccggtgcctgcgggacgcttagccaccccgtttactgcggccatgagttcgggacaggccgtgccgtacccaggattacagtgcccgcccctgcccccccgcgtgggcctccccactcagcaaggattctcttcgcagttcgtgtccccatatccgccacctctccctcagagacccccgcccc

SEQ ID NO: 198645 - DNA, 2865 bp, Homo sapiens
  Payload ID: 19203
  Gene Name: vacuolar protein sorting 37 homolog C (S. cerevisiae)
  Uniprot ID: A5D8V6
  ENST ID: ENST00000301765
  CDS Start-End: 234-1301
gtggcccgggcggccgcgagcgtgtgtgtgtggcacgatgtcgtggtaactcagaggcgcgcgaggcggggcggccaacggggtcgcggggcgagcacgcgcgccactggggcgccggacgttgcaagggggtcacatccggtagggggcgggcctggcggaccccggaagtgtgggcgcggctgcggtttaacccgcggtggcggcggcgacggcggccctggcagggaaggatggagacgctgaaggataagaccctgcaggagctggaggagttgcagaatgactcggaggcgattgaccagctggccctggagtcccctgaggtccaggacctacagctggaacgggagatggcactggccaccaaccggagcctggcagagcggaacttggagttccagggtcccctggagatcagccgctcaaacctctcggatagataccaggagctccggaagctcgtggagcggtgccaggagcagaaggcaaagctggagaaattttcttcagcactgcagccagggaccttgttagaccttctgcaggtggaaggcatgaagatcgaagaagagtccgaggccatggctgagaagttcctggagggcgaggtgcccctggaaacgttcctggagaatttttcctccatgaggatgctgtcccacctgcgccgggttcgcgtggaaaagctccaggaagtggtgaggaagcccagggcttcccaggagctggccggcgatgcccctccaccccgtccaccacccccggtgcgcccagtcccccagggaacaccccctgtggttgaagagcagccgcagccaccattagccatgcctccctaccctttgccctacagcccatcccccagcctgcctgtgggccccactgcccatggagccctgccaccggcccctttcccagtagtgtcccagccctccttctacagcgggcctctgggccccacttacccggcagcccagcttggacccaggggtgctgcgggttactcctggtccccacagaggagcatgccaccccggccgggctatcctgggaccccaatgggtgcctctgggcctgggtaccccttgcggggaggcagggcccccagtcctggttatcctcaacagtccccataccccgcaacaggaggaaaacctccctacccaatacagcctcagctccccagctttccaggccagccccagccctcagtgcccctgcagcccccttatccccccgggcccgcccctccctatgggttcccaccaccgccggggcctgcctggcctgggtattagacacactcctggccctcggcccctccctagtcccacccacgctcaacctttggcccagccatcgccgagattcgagggtcaactggaagtggcgttggtgctccctgtggacttgcgtcggcacccagaggccttggagggacaaggcactgggcggtgtgactggtcatggcacttgctggccttctggccagaggtcctcctggaagcccctcctttcagtgcctggctgcagcggtgctagccaggctggagtccagcacctctcgccggtgtctgtgtgagtgagcgcatgtgcgcatttatgagcatctacttgcggctgcactcagggccatttgaacccagtgcagagttatctctatgaggaggccccgggtctccagccccctccatctcccctggggtttggcatatttgacatggagccccatgccaagggatgcagctgttggtgtctgtccagtccattcaaggctagcctgcccatgcactgtggcaggggttggattggagggagagaacagagttgggaaaaacaacaggtttgagtcctataaagccataatttaactccagtagctgatgtcagacaagcttgtcctatgtcctatttgagtggcagcagcgccagcccagcaagaaggctgggggttgtcaaggttgtccccagaccttgcttgcagtggttggagaacccagggggctgccttgggccctctggccagagggaagcgggcagctctagccctggagattgtggtcacattggggcttgtttaggattggagggccaggtcacctccccagccaccctcccttctctcctctggggtccccactttagggcgactttgcccgaggcccacgcatccatccactcctttagtgccttgaatctcattcacaagcagccccctcccttcccctccccttctcactctgttgatgtaatcctcccacccccagtgtccatcctaagacaggcatcaaaagaggccctaactttacttcccaaatggtgctttttaaaaaacaccatcactacattaggggcaattttttcacacctccctgtcttcagaatgtaaagggtggggattatgtctctgtttaatatgcagccccctgcactgtggggtttggggcatgttcagtaataagaatgaatacaatagacaaagggggtgtgatgagtgttaacttggttgttccagaggtaaaccaggtctcagggaagagcctggagctgctattgcttaggaagttgtacgtgccttgaaatgtccactacctgaggacgcagcatctggtgggcccggggctgctggggccaaggagggaccttgaccttctggtgcctgcccctccccggcctatgtgccatccgcgtgacgctaggtcagcgctgccggttctttaccaaatgtgcttgcttctcctaagttatttataaagagaaatcactaatggactctactggtttgagtgcttctgagctggatgaccgaccgcctgtatgtttgtgtaattaattgccataataaactttgatgagtcacat

SEQ ID NO: 198646 - DNA, 506 bp, Homo sapiens
  Payload ID: 19203
  Gene Name: vacuolar protein sorting 37 homolog C (S. cerevisiae)
  ENST ID: ENST00000538036
  CDS Start-End: 63-506
ccccaccactcaccgccaccctcctttctgcgtctctgcaggccctcgtcccatatggaaggatggagacgctgaaggataagaccctgcaggagctggaggagttgcagaatgactcggaggcgattgaccagctggccctggagtcccctgaggtccaggacctacagctggaacgggagatggcactggccaccaaccggagcctggcagagcggaacttggagttccagggtcccctggagatcagccgctcaaacctctcggatagataccaggagctccggaagctcgtggagcggtgccaggagcagaaggcaaagctggagaaattttcttcagcactgcagccagggaccttgttagaccttctgcaggtggaaggcatgaagatcgaagaagagtccgaggccatggctgagaagttcctggagggcgaggtgcccctggaaacgttcctggagaatttttcctccatgaggatgctgtcccacctgcgccgggtt

SEQ ID NO: 198647 - DNA, 1624 bp, Homo sapiens
  Payload ID: 19204
  Gene Name: vacuolar protein sorting 37 homolog D (S. cerevisiae)
  Uniprot ID: Q86XT2
  ENST ID: ENST00000324941
  CDS Start-End: 135-890
ggcggcggagcggtgcgtgcggccggagccggagcggatcctggagccggagcggagcggagcggagcggagccggggcggagcgggccgagcgggccgagccagcagccgagctgggggcgcgggcgggcggcatgtaccgggcccgggcggcgcgggcggggccggagcccggcagcccggggcgctttgggatcctcagcaccgggcagctccgggacctgcttcaggatgagcccaagctggaccggatcgtgcggctcagcaggaagttccagggcctgcagctggagcgtgaggcctgcctggcctccaactacgcgctggccaaggagaacctggccctgcggccccgcctggagatgggccgggctgccctggccatcaaataccaggagcttcgtgaggtggccgagaactgcgcggacaagctgcagcgactggaggaaagcatgcatcgctggagtccccactgcgcgctgggctggctgcaggctgagctagaagaggcggagcaggaggcagaggagcagatggagcagctgctgctcggggagcaaagcctggaggccttcctgcctgccttccagcgtggccgcgccctggcccacctgaggcggacgcaggcagagaagctgcaggagctgctgcggcgtcgggagcgttctgcccagccggcccccacctcggctgctgatccccccaaatccttcccggctgcagctgtcctgcccactggggccgcccgggggccaccagcagtgccccggagcctgccccccttggactcccgcccagtgcccccactgaagggctcccccgggtgccccctcggcccggcccccctgctgagccctcggccctcgcagccagagcccccccaccggtaggatccacggtgcggccccccagttggggggcctagacaaacttgatgcgtggctcctcctcctcccccactgcctgggtggggggaggggcaggcccctccccctggcctcaggcaggccctggccctggaggctgagctggggaggagggtcccctggaagaggcccgagagggggctgggggtgggtgggcagggctttatgcctctggcgctgaagacaccctgccttttttgtttccgtgccccggggcctctagggtgatggaccagccccgttaaagaacttgactcaactacaggggcctgggaagatgcctgggtcccctaggggccttgccaaggggacctgtcgcaccccaccactccactgggctcgcacaacgccaaggccgccaggagtgttttacatcatgtcctgagcctacctttcccccaaattctggggcccacagcctaggagccaggtgatcaggcctcggctgtggggccagggacaccatggccctggggctactacgtgtccacacatgctccagaccctggggcaaggtaggccaggggcttctgacctgtgcaggtgagagtgggccatacccaggaaagaccattctgtatttttctgtccctgtctccttagaatggaagctttttgagggcaggtccttgtctttgtacgttctgtccccagccccgcctcttaggggccgtcaataaatgtgatgatgaggatga

SEQ ID NO: 198648 - DNA, 1303 bp, Homo sapiens
  Payload ID: 19204
  Gene Name: vacuolar protein sorting 37 homolog D (S. cerevisiae)
  ENST ID: ENST00000451519
  CDS Start-End: 67-567
ggagccggggcggagcgggccgagcgggccgagccagcagccgagctgggggcgcgggcgggcggcatgtaccgggcccgggcggcgcgggcggggccggagcccggcagcccggggcgctttgggatcctcagcaccgggcagctccgggacctgcttcaggatgagcccaagctggaccggatcgtgcggctcagcaggaaggagcagatggagcagctgctgctcggggagcaaagcctggaggccttcctgcctgccttccagcgtggccgcgccctggcccacctgaggcggacgcaggcagagaagctgcaggagctgctgcggcgtcgggagcgttctgcccagccggcccccacctcggctgctgatccccccaaatccttcccggctgcagctgtcctgcccactggggccgcccgggggccaccagcagtgccccggagcctgccccccttggactcccgcccagtgcccccactgaagggctcccccgggtgccccctcggcccggcccccctgctgagccctcggccctcgcagccagagcccccccaccggtaggatccacggtgcggccccccagttggggggcctagacaaacttgatgcgtggctcctcctcctcccccactgcctgggtggggggaggggcaggcccctccccctggcctcaggcaggccctggccctggaggctgagctggggaggagggtcccctggaagaggcccgagagggggctgggggtgggtgggcagggctttatgcctctggcgctgaagacaccctgccttttttgtttccgtgccccggggcctctagggtgatggaccagccccgttaaagaacttgactcaactacaggggcctgggaagatgcctgggtcccctaggggccttgccaaggggacctgtcgcaccccaccactccactgggctcgcacaacgccaaggccgccaggagtgttttacatcatgtcctgagcctacctttcccccaaattctggggcccacagcctaggagccaggtgatcaggcctcggctgtggggccagggacaccatggccctggggctactacgtgtccacacatgctccagaccctggggcaaggtaggccaggggcttctgacctgtgcaggtgagagtgggccatacccaggaaagaccattctgtatttttctgtccctgtctccttagaatggaagctttttgagggcaggtccttgtctttgtacgttctgtccccagccccgcctcttaggggccgtcaataaatgtgatgatgaggatgacg

SEQ ID NO: 198649 - DNA, 4844 bp, Homo sapiens
  Payload ID: 19205
  Gene Name: vacuolar protein sorting 39 homolog (S. cerevisiae)
  Uniprot ID: Q96JC1
  ENST ID: ENST00000318006
  CDS Start-End: 164-2791
agcaggaagtccggggttgacgatggctgtgttgttgaagggcctgtagccggggggttcctggccggatcccggtctacccttagcccagactcgttccggaccccagcccggcccggaacactctgggcgagacggcggtggcaactctccccttgccgccatgcacgacgctttcgagccagtgccgatcctagaaaagctgcctctgcaaatcgactgtctggctgcctgggaggaatggcttcttgtgggaaccaaacaaggacatcttcttctctataggattcggaaggacgttggttgcaacagatttgaagtgacactagagaaatccaataagaacttctccaaaaagattcagcagatccatgtggtttcccagtttaagattctggtcagcttgttagaaaataacatttatgtccatgacctattgacatttcaacaaatcactacggtttcaaaggcaaagggagcatcactgtttacttgtgacctccagcacacagagaccggtgaggaggtgttacggatgtgtgtggcagtaaaaaagaagctgcagctctatttctggaaggacagggaatttcatgaattgcagggggactttagtgtgccagatgtgcccaagtccatggcgtggtgtgaaaattctatctgtgtgggtttcaagagagactactacctaataagggtggatggaaaggggtccatcaaagagctctttccaacaggaaaacagctggagcccttagttgcacctctggcagatggaaaagtggctgtgggccaggatgatctcaccgtggtactcaatgaggaagggatctgcacacagaaatgtgccctgaactggacggacataccagtggccatggagcaccagcctccctacatcattgcagtgttgcctcgatatgttgagatccgaacatttgaaccgaggcttctggtccaaagcattgaattgcaaaggccccgtttcattacctcaggaggatcaaacattatctatgtggccagcaatcattttgtttggagactcatccctgtccccatggcaacccaaatccaacaacttctccaggacaagcagtttgaattggctctgcagctcgcagaaatgaaagatgattctgacagtgaaaagcagcaacaaattcatcacatcaagaacttgtatgccttcaacctcttctgccagaagcgttttgatgagtccatgcaggtctttgctaaacttggcacagatcccacccatgtgatgggcctgtaccctgacctgctgcccacagactacagaaagcagttgcagtatcccaacccattgcctgtgctctccggggctgaattggagaaggctcacttagctctgattgactacctgacacagaaacgaagtcaattggtaaagaagctgaatgactctgatcaccagtcaagcacctcaccgctcatggaaggcactcccaccatcaaatccaagaagaagctgctacaaatcatcgacaccaccctgctcaagtgctatctccatacaaatgtggccctggtggcccccttgctacgcctggagaacaatcactgccacatcgaggagagcgagcacgtgctaaagaaggctcacaagtacagtgagcttatcatcctgtatgagaagaaggggctccacgagaaagctctgcaggtgctcgtggaccagtccaagaaagccaactcccctctgaaaggccacgagaggacagtgcagtatctgcagcatctgggcacagaaaacctgcatttgattttctcctactcagtgtgggtgctgagagacttcccagaagatggcctgaagatatttactgaagatctcccggaagtggagtctctgccacgtgatcgagtcctcggcttcttaatagagaattttaagggtctggctattccttatctggaacacatcatccatgtttgggaggagacaggctctcggttccacaactgcctgatccagctatactgtgagaaggtgcaaggtctgatgaaggagtatctcctgtccttccctgcaggcaaaaccccagtcccagctggagaggaagagggtgagctgggagaataccggcaaaagctcctcatgttcttggagatttccagctactatgatccaggccggctcatctgtgattttccctttgatggcctcttagaagaacgagctctcctgttggggcgcatggggaaacatgaacaagctcttttcatttatgtccacatcttgaaggatacaaggatggctgaggagtactgccacaaacactatgaccgaaacaaagatggcaacaaagatgtgtatctgtccctgcttcggatgtacctgtcgccccccagcattcactgcctggggccaatcaagctggaactactggagccaaaagccaacctccaggccgctctgcaggtcctcgagctacaccacagcaaactggacaccaccaaggccctcaaccttctgccagcaaacactcagatcaatgacatacgcatcttcctggaaaaggtcttggaagaaaatgcacaaaagaaacggttcaatcaagtgctcaagaaccttctccatgcagaattcctgagggtccaggaagagcggattttacaccagcaggtgaagtgcatcatcacagaggagaaggtgtgcatggtgtgtaagaagaagattgggaacagtgcatttgcaagataccccaatggagtggtcgtccattacttctgttccaaagaggtaaacccagctgacacttgagcccagcatcctggggatccagcggatggacagcttggctctcccagagaggtgaaggagcacctggccttaggaatcctggctgccaccaccacaaggctccccatttggacattactggctatcttgtgccctggaacaactctgaattaattagactcatggtctggcattgccagctttttaatgggaaaagagattagttataccttataccattatgttgtgggcaattccagagaattcagtacctgcttggtcaggaggatgtgcaccatcttgcctttgcacaccagtcacctgaacaaggaaacttgtcacaagtgtttgtaaccatggggttgttcatcaagggcttttctattaagtacatgacttcacaaggaccgctcagcatggctcactggagagttccatgagagaacagcactcaagcttctggccgcatggacccgatggctcgcattctgtgtagtgttttacgtctccatggtaactgtgccctgcacccctcggtagccgccctgttagttttcagtctccttttctttctcaccatttatcacttccctcactgccctacccaggctttctctcccacttccctgactctgggaataactaatatttaagcaaggtaagatgagaagcaaggggtctcagttctaggaatacagtgctagttgattgtcaggtatgttgtaaatagaccctctttggccatacactccatgcctagatgcctcggagagcatcattctctgcctaggcaaggccctgcatcccttgcctcaggccgggctgagtgtgactgcagctcctgaggatgggcctgccctgtctggggtatgcgtgatccctagatacatgttcccacagaggtgcctgctccgtcttcgctcaccagacactcaggcaggctggcttagtctttgtgcgtggcgattttgtgctctgggccctttctctttttccagccagtttccattcacttgccttacagcctgccctggccgtcactccccagctttgttcagcaatggtgtggttggagagttgtgctgggatagcgcaggaaggtgggtcccggcaacacgcaggggatgagtggacctggaactgacaatggcgtgctgccaagtgttcctgagaggtgtttaggcacagcagaggggacgcggggggcaagaacagcaggacgctggtttaaaaataactcaccgccaaacctgtggagcagtgtggggcatcctgccagaggtgcacaggctggagtttcaggcactgcaggctgatgacacacagggagagtggccctgcctcctgtcctccccggggtttttgcagactcgaagtctcactgcaccagtgtctttgatggtggtgagggtgggtgatggtgcccagcaccaacagttttagtggcctgtccttgacctgccgtggtcctttgtaaactatggctccatgctgtgtgacagatcaacgtgctgatggtaagtagactaggcttccccaggcatgccgtccgtgggggcctgaagagacagtgagtgccattggccccattcgcagatgtgggagactctgctcaggcctgtgaggctgggcagcccttcaccagagttcggaggagcagtgtgtggcgccacgtcccgactggccatacccacacagaagcagtgctgcccggggcctcatctgggccagcttggactctgcttcctccaggagcagcagggaagctctgggccacctccctggatagcaggaacttgacctgccatgtgtgccctgccttcctggccagctgtgcttgttatcttccattctcacaaactgtctttgaagcaatagaataaagaatgtgtgttttctttcctggtatacatacatgatcccatgctcccaagctccattcttccttccctcaactctctgccctccacagagctatggagaaggctggagatgaaagctttgtagtgaggactgataaagatctcatcactgctccttataataaacctaataaagcaagaaaccaagccta

SEQ ID NO: 198650 - DNA, 2661 bp, Homo sapiens
  Payload ID: 19205
  Gene Name: vacuolar protein sorting 39 homolog (S. cerevisiae)
  Uniprot ID: Q96JC1
  ENST ID: ENST00000348544
  CDS Start-End: 1-2661
atgcacgacgctttcgagccagtgccgatcctagaaaagctgcctctgcaaatcgactgtctggctgcctgggaggaatggcttcttgtgggaaccaaacaaggacatcttcttctctataggattcggaaggacgttgtgccagcagatgtagcatcacctgaaagcggcagttgcaacagatttgaagtgacactagagaaatccaataagaacttctccaaaaagattcagcagatccatgtggtttcccagtttaagattctggtcagcttgttagaaaataacatttatgtccatgacctattgacatttcaacaaatcactacggtttcaaaggcaaagggagcatcactgtttacttgtgacctccagcacacagagaccggtgaggaggtgttacggatgtgtgtggcagtaaaaaagaagctgcagctctatttctggaaggacagggaatttcatgaattgcagggggactttagtgtgccagatgtgcccaagtccatggcgtggtgtgaaaattctatctgtgtgggtttcaagagagactactacctaataagggtggatggaaaggggtccatcaaagagctctttccaacaggaaaacagctggagcccttagttgcacctctggcagatggaaaagtggctgtgggccaggatgatctcaccgtggtactcaatgaggaagggatctgcacacagaaatgtgccctgaactggacggacataccagtggccatggagcaccagcctccctacatcattgcagtgttgcctcgatatgttgagatccgaacatttgaaccgaggcttctggtccaaagcattgaattgcaaaggccccgtttcattacctcaggaggatcaaacattatctatgtggccagcaatcattttgtttggagactcatccctgtccccatggcaacccaaatccaacaacttctccaggacaagcagtttgaattggctctgcagctcgcagaaatgaaagatgattctgacagtgaaaagcagcaacaaattcatcacatcaagaacttgtatgccttcaacctcttctgccagaagcgttttgatgagtccatgcaggtctttgctaaacttggcacagatcccacccatgtgatgggcctgtaccctgacctgctgcccacagactacagaaagcagttgcagtatcccaacccattgcctgtgctctccggggctgaattggagaaggctcacttagctctgattgactacctgacacagaaacgaagtcaattggtaaagaagctgaatgactctgatcaccagtcaagcacctcaccgctcatggaaggcactcccaccatcaaatccaagaagaagctgctacaaatcatcgacaccaccctgctcaagtgctatctccatacaaatgtggccctggtggcccccttgctacgcctggagaacaatcactgccacatcgaggagagcgagcacgtgctaaagaaggctcacaagtacagtgagcttatcatcctgtatgagaagaaggggctccacgagaaagctctgcaggtgctcgtggaccagtccaagaaagccaactcccctctgaaaggccacgagaggacagtgcagtatctgcagcatctgggcacagaaaacctgcatttgattttctcctactcagtgtgggtgctgagagacttcccagaagatggcctgaagatatttactgaagatctcccggaagtggagtctctgccacgtgatcgagtcctcggcttcttaatagagaattttaagggtctggctattccttatctggaacacatcatccatgtttgggaggagacaggctctcggttccacaactgcctgatccagctatactgtgagaaggtgcaaggtctgatgaaggagtatctcctgtccttccctgcaggcaaaaccccagtcccagctggagaggaagagggtgagctgggagaataccggcaaaagctcctcatgttcttggagatttccagctactatgatccaggccggctcatctgtgattttccctttgatggcctcttagaagaacgagctctcctgttggggcgcatggggaaacatgaacaagctcttttcatttatgtccacatcttgaaggatacaaggatggctgaggagtactgccacaaacactatgaccgaaacaaagatggcaacaaagatgtgtatctgtccctgcttcggatgtacctgtcgccccccagcattcactgcctggggccaatcaagctggaactactggagccaaaagccaacctccaggccgctctgcaggtcctcgagctacaccacagcaaactggacaccaccaaggccctcaaccttctgccagcaaacactcagatcaatgacatacgcatcttcctggaaaaggtcttggaagaaaatgcacaaaagaaacggttcaatcaagtgctcaagaaccttctccatgcagaattcctgagggtccaggaagagcggattttacaccagcaggtgaagtgcatcatcacagaggagaaggtgtgcatggtgtgtaagaagaagattgggaacagtgcatttgcaagataccccaatggagtggtcgtccattacttctgttccaaagaggtaaacccagctgacacttga

SEQ ID NO: 198651 - DNA, 629 bp, Homo sapiens
  Payload ID: 19205
  Gene Name: vacuolar protein sorting 39 homolog (S. cerevisiae)
  ENST ID: ENST00000564994
  CDS Start-End: 1-144
ctccatgcagaattcctgagggtccaggaagagcggattttacaccagcaggtgaagtgcatcatcacagaggagaaggtgtgcatggtgtgtaagaagaagattgggaacagagaaggagaacatggctgctggctgtcctgacaacttttagttcttgagccttcagagagcagcctgttctatctgttgggagtgggcttcgagaatttaaagacctgcaatgtatgtgcatttgcaagataccccaatggagtggtcgtccattacttctgttccaaagaggtaaacccagctgacacttgagcccagcatcctggggatccagcggatggacagcttggctctcccagagaggtgaaggagcacctggccttaggaatcctggctgccaccaccacaaggctccccatttggacattactggctatcttgtgccctggaacaactctgaattaattagactcatggtctggcattgccagctttttaatgggaaaagagattagttataccttataccattatgttgtgggcaattccagagaattcagtacctgcttggtcaggaggatgtgcaccatcttgcctttgcacaccagtcacctgaacaaggaaacttgtcacaa

SEQ ID NO: 198652 - DNA, 4100 bp, Homo sapiens
  Payload ID: 19206
  Gene Name: vacuolar protein sorting 4 homolog A (S. cerevisiae)
  Uniprot ID: Q9UN37
  ENST ID: ENST00000254950
  CDS Start-End: 157-1470
ggactcggctcccgctgcgagcggccgccctgcccgcgcaccgcgctcagcgcccaccgccgggcttcccgcgccggacccagtacctcggctccccggggccggaccgaggccgcaagcagcgccgcggggtgtggggcggacccaggagatgaaatgacaacgtcaaccctccagaaagccattgatctggtgacgaaagccacagaggaggacaaagccaagaactacgaggaggcgctgcggctgtaccagcatgcggtggagtacttcctccacgctatcaagtatgaggcccacagcgacaaggccaaggagagcattcgagccaagtgcgtgcagtacctagaccgggccgagaagctgaaggattatttacgaagcaaagagaaacacggcaagaagccagtcaaagagaaccagagtgagggcaagggcagtgacagtgacagtgaaggggataatccggagaaaaagaaactgcaagaacagctgatgggtgccgtcgtgatggagaagcccaacatacggtggaacgacgtggccgggctggagggggccaaggaggccctcaaagaagctgtcattttgccaatcaaattcccacacttgttcacaggcaagcgcaccccctggcgggggattctgctgttcggaccccctggcacagggaaatcctacctggccaaagccgtggcaacagaggccaacaactccaccttcttctctgtgtcctcctcagatctgatgtccaagtggctgggggagagtgaaaagctggtcaagaacctgtttgagctggccaggcagcacaagccctccatcatcttcatcgatgaggtggattccctctgcgggtcccgaaatgaaaatgagagtgaggccgcccggaggatcaaaacggagttcttggtccagatgcagggggtggggaataacaatgatgggactctggttcttggagccacaaacatcccatgggtgttggattcggccatcaggaggaggtttgaaaaacgaatttatatccccttgccggaggaagctgcccgcgcccagatgttccggttgcatctcgggagcactccccacaacctcacggatgcaaacatccacgagctggcccggaagacggaaggctactcgggcgcggacatcagcatcatcgtgcgggactctctcatgcagcccgtgaggaaggtgcagtcggccacacacttcaaaaaggtctgtggcccctctcgcaccaaccccagcatgatgattgatgacctcctgactccatgctcaccaggggacccaggagccatggagatgacttggatggatgtccctggggacaaactcttagagcctgtggtttgcatgtcggacatgctgcggtctctggccaccacccggcccacggtgaatgcagacgacctcctgaaagtgaagaaattctcagaggactttgggcaagagagttaaaagctgcttcacttgggcaatggtgaaggtgggaggttgattggggcaaatccaggcactccccatgtcaacagccagacagggctccagggcttgtcccagtcaatacagagttccctctgctgtctggccgtctgccagggagccagaaggaagggccttgcagccacagagacactccactgccctggggcacacagtggacactgctcttcctacttcctcctctcctggatgctcatcagctccttctgcctcccccccttttttttccatcttttgttcccctaaattaatgctgcttggattttcatcttatttataaagataaaatcacctggaagtgtcaaggagtggggcggggtggcgggggagaagcagccgtgctgccaggtcacccagacctccagacagccggctagccccactgcccgttccttttacgcccaagttttgctccttgagagcagattggctgatgcccctgcaaccccagcccaagctctgcctcaaagaccgagtgacataagccattcccaccctcctaggttcacatccagggctgtgtcttccttgggggaggagatggtgtcgtttagatcagggtaaggcagtcaggcgggtgttcaccactgccttttcttcctctgagcgtgagaacactgaacccagccactgcccctgggtccctgtcctggaaatggtctaataaatccttttcccttcttgagctacccaagtgatctcatctttccttgactcttaactgagactctgaagggccacccttgcttccaattaaaagaccctctggttttctgtctcctctcttttctaaagcagagcaggaaacagaacactgcagttcttaggcctgttctccagtcaggtgtgcaaggcctcctccccttaaggcctcagaagtttggctggggatgtttgtgggatccagacagttcttgccgttgttcggcctacagatcagagactgcaaagtgggagccctgcgtaccagacccgtcctgcagctgtgtttgtttggtttggtctgccgctaacatttaaaagtcgagagttgctgggcgcggtggctcacgcctgtaatcccagcactttgggccgctaacatttaaaagtcgagagttgctgggcgcggtggctcacgcctgtaatcccagcactttgggaggccgacgcgggcggatcacaaggtcaggaaatcgagaacatcctggctaacacagtgaaaccccgtctcactaaaaataaaaaaattagccgggcgtggtggtgggcgcctgcagtcccagctacttgggaggctgaggcaggagaatggcgtgaacccgggggacggagcttgcagtgagccgagatcgcgccactgcactccagcctgggcgacagagcaagactctgtctcaaaaaaaaaaaaaaagtcgagagttgacataaaaattcagaattctgacttctagaagattaaattaggtaatgttgggcctgcgtcctcatggggcagcctgtcagcggccactaagtagaggctgctctgtacagaaggggtcccccatccccactcatctgtgttgcctgcccagatagccccatggccatttcagtttgcgacccccaacagaccaaggacccagagctggcagccctggacccacgtccggcaggcagtgaagctgcagaggctgtcccacgtttaccccatgcatataaacagaccaaagtcaaagcacattcacacagaaagacctggcctagtaaatgaagcttatagcctgcaaagggctttgttccaaccttccctctccaaaacccagtactgctcctctacctttcaaacctggttgggccagaactgattacatggccaactcttggctcacactgggcttgcactgggccatttctttgctctggttcagagcctctgcagaagtgagctaactttggatcagtagctccaacacttggctccagtgctggcaggttacccctcaaccatagcagctgggatctttgtggcttgggggtgcttgtgtaagttcttggttatgtgccctcagccaccaggatatgaaccgtgtctgcagagcttcactttagtgagcttacaagtttttaaatttttacttctagttacatttacttgaatcagaacgttgtttcctcattcctactgcttaaacaccttgacaagtcctaggggttaacaaaggttagcatggctatggtccatccctgtgctctagttagagcgtgaagacacctgactttccagttgtctctctccatgaccagcaacaggaaccactgacgctgaactttggacagtggcctcagactctggctgccagcacacaacctgccatcatcgatgttaaacatgctgacatgtgcagaggagtttcctccctgaaatgctctgaaattcacttctctgcctggggattctgttataaaccttctgcctacattggctttcactgtggaagttgatttctaaaactctgatgagctcacaacgttgacatgtatatgcgttttttgtgagtgcttcctgctcaaagtgggagagattttactggaaatgcaataaagtttgcattttattgcta

SEQ ID NO: 198653 - DNA, 3324 bp, Homo sapiens
  Payload ID: 19207
  Gene Name: vacuolar protein sorting 4 homolog B (S. cerevisiae)
  Uniprot ID: O75351
  ENST ID: ENST00000238497
  CDS Start-End: 205-1539
attgcggaagtttggtggggagggtcggagctctggtggagagagtgttgtctaaaacaagttccggaagggaggctgcccttcgcggtccgagaaccaccggcctccccagtttgagggctgttaccccgtgcgcgcttcgacgttgctgctgttggctctcctcgcccctcgttcccttgggaaccgcctgggaactccgccatgtcatccacttcgcccaacctccagaaagcgatagatctggctagcaaagcagcgcaagaagacaaggctgggaactacgaagaagcccttcagctctatcagcatgctgtgcagtattttcttcatgtcgttaaatatgaagcacagggtgataaagccaagcaaagtatcagggcaaagtgtacagaatatcttgatagagcagaaaaactaaaggagtacctgaaaaataaagagaaaaaagcacagaagccagtgaaagaaggacagccgagtccagcagatgagaaggggaatgacagtgatggggaaggagaatctgatgatcctgaaaaaaagaaactacagaatcaacttcaaggtgccattgttatagaacgaccaaatgtgaaatggagtgacgttgctggacttgaaggagccaaagaagcactgaaagaggctgtgatactgcctattaaatttcctcatctttttacaggcaagagaacaccttggaggggaatcctattatttgggccgcctggaacaggaaagtcctacttagccaaagctgtagcaacagaagccaacaactcaacatttttttcaatatcttcctctgatcttgtttctaagtggctaggtgaaagtgaaaaactggttaagaatttattccaacttgccagagagaacaagccctccattatcttcattgatgaaattgattctctctgtggttcaagaagtgaaaatgaaagtgaagccgcacgtagaattaagacggagttcctagtgcaaatgcaaggggttggtgtagacaatgatggaattttggttctgggagctacaaatataccctgggttctggattctgccattaggcgaagatttgagaaacgaatttatattcccttgccggaaccccatgcccgagcagcaatgtttaaactgcacctagggaccactcagaacagtctcacggaagcagactttcgggaacttgggaggaaaacagatggttattcaggggcagatataagtatcattgtacgtgatgcccttatgcagcctgttaggaaagtacagtcagctactcattttaaaaaggttcgcggaccttcccgagctgatcctaaccatcttgtagatgatctgctaacaccttgctctccaggtgaccctggtgccattgaaatgacatggatggatgtccctggagataaacttttggagccagttgtttccatgtcggatatgttgcggtcactatctaacacaaaacctacagtcaatgaacatgacttgttgaaattaaagaagtttacagaagattttggtcaagaaggctaagccaaagacaaggaagatgcttaccatatgtattctttctttcatagatatttttgtctatttggatcgcattaattgtttccagtaaaactcttttaccacagggaaatacacatctcacttcagagttccattaggttttatattgtacttttcctccattacttattaaatactcctattaacaaaaggtacaaaataacaggttatgaggaaatgagcgatatatgaacggcataaaaacagaaattacccagtaaaaaggatgtcagaaattgacatacaaatatttacaatttttatgaatggtggtctttgcaaagagcatttatattttcttttttttttactaaaatgatatagggtttattttatattttcaaaaaaattgttaaacatcattcttatcaatgtaaaatttacgttattaaaaaattacaaatgatagaatctttactcagggatgggcaataaaacagcaaagagctttgtgattgggtttgaaagattttgaattatagacagtgctcttaatagtttttaataagttgatatttttttctgtgtagatttaaataatttctttaaaagcgtaagctttggctgggcatggtggcttatgcctgtaatcccagcactttgggaggctacgatgggtggatcacctgaggtcaggagttcaagaccagtctggccaacatggtgaaatgccgtctctactaaaaatacaaaaattagctgggcatgatggcgagtgtctgtaatcccagctactcaggaggctgaggcgggagaatcacttgaacctgggaggcagaggttgcagtgagctgagatcgcgctactgcattccagcctgggcgccgagatagcgccattgcactccagcctgggcgactgaataaaactctgtctcaaaaaaaaacaaaaacggtaagcttttatatttaattaactgatacctttcactgtgcaatctcaagaggaagattttctaaattagacattgtctttaccttaaagaagaaaattgtctatttcagtgtcttttttagcaagattgaccaaaacaggtggtaggtgtgtaatttttaactgtcatgaaatactgtaatgcgcacctttgctaataaggaaatggtctccctttgaattatgggaagtttcttgtctgtgatatggggtgtctgtgtacatatatgtatatttccttttttaatacaggataataatatggggtcttgtccttcaccttttaagttcagggaacagtttgtcctgaccacacatatgttatcagtgtaatgctttatgaagctttagaaatgagctcatgactcattaaaaaataataaacgatgctattttaatattttcaaataaataatctgaggatgtgtttcatactttagcatcaacgctgagttgtgccttgtagaattgcattgtctatacatgcaaaagactattaagttaggatgaactagattccctaattacagtgaaattctatcttgcaaatgctatagaataacttgcattttaaagtgtatttgcacattttacatatgctatgtggttgcctttgggttttctgtacagattgtttttgttattaaatggaaaaggcctgaattatgctcttatgtgaagtaaattgatataacctattgactgtattctgtgtattattctttattttgggaccttctgtgtaaaagaaaatattacctaaattggttagatacaaagaaatcattaaaattattaatgtatatatgaaaa

SEQ ID NO: 198654 - DNA, 551 bp, Homo sapiens
  Payload ID: 19207
  Gene Name: vacuolar protein sorting 4 homolog B (S. cerevisiae)
  ENST ID: ENST00000591519
  CDS Start-End: 132-518
ggctgcccttcgcggtccgagaaccaccggcctccccagtttgagggctgttaccccgtgcgcgcttcgacgttgctgctgttggctctcctcgcccctcgttcccttgggaaccgcctgggaactccgccatgtcatccacttcgcccaacctccagaaagcgatagatctggctagcaaagcagcgcaagaagacaaggctgggaactacgaagaagcccttcagctctatcagcatgctgtgcagtattttcttcatgtcgttaaatatgaagcacagggtgataaagccaagcaaagtatcagggcaaagtgtacagaatatcttgatagagcagaaaaactaaaggagtacctgaaaaataaagagaaaaaagcacagaagccagtgaaagaaggacagccgagtccagcagatgagaaggggaatgacagtgatggggaaggagaatctgatgatcctgaaaaaaagaaactacagaatcaacttcaaggttgctttagatttcatttttaaatttactatcctattaaaaagactcaaagtgaa

SEQ ID NO: 198655 - DNA, 1252 bp, Homo sapiens
  Payload ID: 19207
  Gene Name: vacuolar protein sorting 4 homolog B (S. cerevisiae)
  ENST ID: ENST00000588059
  CDS Start-End: 205-540
attgcggaagtttggtggggagggtcggagctctggtggagagagtgttgtctaaaacaagttccggaagggaggctgcccttcgcggtccgagaaccaccggcctccccagtttgagggctgttaccccgtgcgcgcttcgacgttgctgctgttggctctcctcgcccctcgttcccttgggaaccgcctgggaactccgccatgtcatccacttcgcccaacctccagaaagcgatagatctggctagcaaagcagcgcaagaagacaaggctgggaactacgaagaagcccttcagctctatcagcatgctgtgcagtattttcttcatgtcgttaaatatgaagcacagggtgataaagccaagcaaagtatcagggcaaagtgtacagaatatcttgatagagcagaaaaactaaaggagtacctgaaaaataaagagaaaaaagcacagaagccagtgaaagaaggacagccgagtccagcagatgagaaggggtgccattgttatagaacgaccaaatgtgaaatggagtgacgttgctggacttgaaggagccaaagaagcactgaaagaggctgtgatactgcctattaaatttcctcatctttttacaggcaagagaacaccttggaggggaatcctattatttgggccgcctggaacaggaaagtcctacttagccaaagctgtagcaacagaagccaacaactcaacatttttttcaatatcttcctctgatcttgtttctaagtggctaggtgaaagtgaaaaactggttaagaatttattccaacttgccagagagaacaagccctccattatcttcattgatgaaattgattctctctgtggttcaagaagtgaaaatgaaagtgaagccgcacgtagaattaagacggagttcctagtgcaaatgcaagatttgagaaacgaatttatattcccttgccggaaccccatgcccgagcagcaatgtttaaactgcacctagggaccactcagaacagtctcacggaagcagactttcgggaacttgggaggaaaacagatggttattcaggggcagatataagtatcattgtacgtgatgcccttatgcagcctgttaggaaagtacagtcagctactcattttaaaaaggttcgcggaccttcccgagctgatcctaaccatcttgtagatgatctgctaacaccttgctctccaggtgaccctggtgccattgaaatgacatggatggatgtcc

SEQ ID NO: 198656 - DNA, 769 bp, Homo sapiens
  Payload ID: 19208
  Gene Name: vacuolar protein sorting 41 homolog (S. cerevisiae)
  ENST ID: ENST00000265745
  CDS Start-End: 18-647
gactctcccgtggcgccatggcggaagcagaggagcaggaaactgggtcccttgaagaatctacagatgagtctgaggaagaagagagcgaagaggaacccaagctgaagtatgaaaggctttccaatggggtaactgaaatacttcagaaggatgcagctagctgcatgacagtccatgacaagtttttggcattgggcacacattatggcaaggtttatttacttgatgtccaggggaacatcactcagaagtttgatgtaagtcctgtgaagataaatcagattagcttggatgaaagtggagagcacatgggtgtgtgttcagaggatggcaaggtgcaggtatttggactgtattctggagaagaatttcacgagacttttgactgtcccattaaaattattgctgtgcacccacatttcgtgagatccagttgcaagcagtttgtgaccggagggaagaagctgctactgtttgaacggtcttggatgaacagatggaagtctgctgttctgcatgaaggggaagggaacataaggagtgtgaagtggagaggccatctgattgcttgggccaataatatgagtaagaaacctgaggcatggagagtagccaagaaaatgaaaagctatcttaataattgaaggactgcattgggaatgggtcttgaaaatatcatttgcctgttggccaaagggtgtgaagatttttgacatcatctcaaagcaaagaatcaccaatgtgccccgggatgatataagtcttc

SEQ ID NO: 198657 - DNA, 5903 bp, Homo sapiens
  Payload ID: 19208
  Gene Name: vacuolar protein sorting 41 homolog (S. cerevisiae)
  Uniprot ID: P49754
  ENST ID: ENST00000310301
  CDS Start-End: 56-2620
aagtgtgtggtttcctcttatttccgggtctgtcaggtgactctcccgtggcgccatggcggaagcagaggagcaggaaactgggtcccttgaagaatctacagatgagtctgaggaagaagagagcgaagaggaacccaagctgaagtatgaaaggctttccaatggggtaactgaaatacttcagaaggatgcagctagctgcatgacagtccatgacaagtttttggcattgggcacacattatggcaaggtttatttacttgatgtccaggggaacatcactcagaagtttgatgtaagtcctgtgaagataaatcagattagcttggatgaaagtggagagcacatgggtgtgtgttcagaggatggcaaggtgcaggtatttggactgtattctggagaagaatttcacgagacttttgactgtcccattaaaattattgctgtgcacccacatttcgtgagatccagttgcaagcagtttgtgaccggagggaagaagctgctactgtttgaacggtcttggatgaacagatggaagtctgctgttctgcatgaaggggaagggaacataaggagtgtgaagtggagaggccatctgattgcttgggccaataatatgggtgtgaagatttttgacatcatctcaaagcaaagaatcaccaatgtgccccgggatgatataagtcttcgcccagacatgtatccctgcagcctctgctggaaggacaatgtgacactgattattggctgggggacttctgtcaaggtgtgctcagtgaaggaacggcatgccagtgaaatgagggatttgccaagtcgatatgttgaaatagtgtctcagtttgaaactgaattctacatcagtggacttgcacctctctgtgatcagcttgttgtactttcgtatgtaaaggagatttcagaaaaaacggaaagagaatactgtgccaggcctagactggacatcatccagccactttctgagacttgtgaagagatctcttctgatgctttgacagtcagaggctttcaggagaatgaatgtagagattatcatttagaatactctgaaggggaatcacttttttacatcgtgagtccgagagatgttgtagtggccaaggaacgagaccaagatgatcacattgactggctccttgaaaagaagaaatatgaagaagcattgatggcagctgaaattagccaaaaaaatattaaaagacataagattctggatattggcttggcatatataaatcacctggtggagagaggagactatgacatagcagcacgcaaatgccagaaaattcttgggaaaaatgcagcactctgggaatatgaagtttataaatttaaagaaattggacagcttaaggctattagtccttatttgccaagaggtgatccagttctgaaaccactcatctatgaaatgatcttacatgaatttttggagagtgattatgagggttttgccacattgatccgagaatggcctggagatctgtataataattcagtcatagttcaagcagttcgggatcatttgaagaaagatagtcagaacaagactttacttaaaaccctggcagaattgtacacctatgacaagaactatggcaatgctctggaaatatacttaacattaagacataaagacgtttttcagttgatccacaagcataatcttttcagttctatcaaggataaaattgttttattaatggattttgattcagagaaagctgttgacatgcttttggacaatgaagataaaatttcaattaaaaaggtagtggaagaattggaagacagaccagagctacagcatgtgtatttgcataagcttttcaagagagaccaccataaggggcagcgttaccatgaaaaacagatcagtctttatgctgaatatgatcgaccaaacttacttccctttctccgagacagtacccattgcccacttgaaaaggctcttgagatctgtcaacagagaaactttgtagaagagacagtttatcttctgagccgaatgggtaatagccgaagtgccctgaagatgattatggaggaattacatgatgttgataaagcaatcgaatttgccaaggagcaagatgatggagagctgtgggaagatttgattttatattccattgacaaaccaccatttattactggcttgttaaacaacattggcacacatgttgacccaattctactgattcaccgtattaaggaaggaatggagatccccaatttgagagattccttggttaaaattctgcaagactacaatttgcaaattctgcttcgtgaaggctgcaagaagattctcgtagctgactctttgtccttactgaagaaaatgcaccgaactcaaatgaaaggtgttcttgttgatgaggagaacatctgtgagtcgtgcctttcccctattcttccatcagatgcagctaagcccttcagcgtggtggtcttccattgccggcacatgttccacaaggagtgcctgcccatgcccagcatgaactctgctgcacagttctgcaacatctgcagtgctaagaaccgtggaccaggaagtgcaattttggagatgaaaaaatagctcatttctccttgtcagtctccttgtcaccactctttttgagactgtttttgcaacaacaaaagcatttgttgacactcgtgctgttaagagatttgtttatgtttatattatactcaaaaacaatttcttcatctattcctgtactaatggtttctctttgcagttcacagagaatttggggctctcttcatgccttgaaattttggggtccatagtgaatattttgttatttatttgtttggctcattctttatatagtaatggaaacataagtctaggagttagaaatgaattttttagaccttagtaaaaccatttaaccataaaatggacaactgagaattctcccagctgcctgaaagcgtcgccaactgtggttatcctgcaagctgctacctgcaacttggacgttgtttccacgtgctctgctggctacgattcttgcattctgggtttggcttttttctgtgtcatcaactatggttatcctctaaataggcatttaatgaaacattgtacaaattgtcactcatttgatgacacctgggaataacattagcaggctgatgtcctgcaccattatgtttactaatcacatgttctgtgtgctgtgacgactgtcaaagagtatctggccatggcggacactcagcatttgttgattgaataaatgttagctcttctcattgtgaaggactcacttttactgggataaacaaatgcagttaagaattctggcacccttgtaaggaagaaaagagagttcaacaccttcgagtctgagcgcttgtggctagagtttgccaggagggaggaaaccagtgaccctgaaaactgagggtgcctcaggagcagtgggaccacctgatgctgaaggacggactaatgatgtttcctcttgccttctctggtgcctccattgccctcatggaacagagcatatcatagagggagaaaagtcaaacttgtaattgtgtcttacagttactggcttcatcttccttgggatatatggtcatcctctaatgagtgtaaaagtgcgcaaaacacatccttattgttcctgatctcttagtcccataaatgggaacaaatacagctttctgcttctttctttttggggaaaggacagggtgctagtgagtactgacagcatgccagctaccgaagtcacccagccattcccatgagcagcagttcatttaattgtcacagcgtcgccaggaagaagatctgataaacctaggtttacagataaagaaagcaaaatgtagagatgttgttgaggtcacagaggtgactgcctaacttcagagcagggcttctgatccctttaagaaattacagggccagccgggcatggtggctcacgcccgtaatcccagggctttgggaggccttggcaggtggatcacctgagatcgcacgttcgagaccagcctgaccaacatggagaaaccccatctctactaaaaacacaaattagccaggcgtggtggtacatgcctgtaatcccagctactcaggaggctgaggcaggagaatcacttgaccccaggagacgtaggttgtggtgagctgagatcgcgccattgcactccagcctgggcaacaagagcaaaactccgtctcaaaaaagaaaagaaaagaaaagaaatcatagggccaagttcaaaggaaatgcacagaacatatcttcacattagagttaagaattctctagcaaacaacagatttttttgttgttgttagtcacaaatacttagaactggaaggctctttgttattattgaatgtacccctcagccttctcagcatttccttatcccaagactagtgtgctttctgctacactgctagttttcagttttgttcttacccaattgttttttcttttcaacattaccaatttacagattcagtttattacatttacattaatcctcacttatgatttgagcaagctcatttccagaaaagtttactttaagatcatcaataggatttgctaatttcagtgaagtcattttgcttcaggggtaaattatcctagttaccaagtcctatttggacataaagaaaatcctacttatagaaaaggagaaaataattaaacagtcttcatttttaagtaactgatttaaaaggaaaataataaaatatgttcgtttatcatttcagaaattgctgtaacacactggaaaattcctgaacaatatagattttatcgttaataaaaaacactagctttcgttccttagaatgtcttttcttttgaataaacagtattgggtgatttattaaaggatattcaatcctttttacttttcatcaacctataagggcttaaatatggcaaaataatccaagtgttagtcaattatttttcatgtgtgactagcccaatttaaaatataggtaaaaaggaaacccattcccctcgttttggggaagaacatagttgcaaagtacacacttcataagctattctttttttttttttttttttttttttttttgagatggagtctcgttctgttgccttggctggagtgcagtgacatgatcttggctcactgcaacctccgcctcccaggttcaagtgattctcccgtctcagcttccggagtaggtgggagtacaggcacgcaccaccatgcccagctaattttttgtactttggtagagatgaggtttcaccatgttgcccaagctggtctcgaactcctgagctcaggaatccgcccacctcggccttccgaagtgttaggattacaggcgtaagtcaccatgcccagccaagaaagctattcttgaagtgtaaaacagccaggtgcaaaattattttggagtactttagtttgcttttgtttttagccaaagggatttcatactggtttaattatgttcatccttgagaatttttgagaagtttccaacagatttgtagttcattttgctgttgttacaatgtaaagctatatatagttgacccttgaacaacacaggttggaactgcaaggatccacttatacatggattttcttctgcctctgccacccttgagacggcaagaccaggccctccccttcctcctccttctcagcctactcagtatgaagacgacagagatgaaacacttatgatgatccacttctacttaatgagtagtaaatatattttcttttccttatgattttcttactattttctttagcttgctttattataagaatatagcatataatataaataaaatataaaatatgtgttaatggtc

SEQ ID NO: 198658 - DNA, 3181 bp, Homo sapiens
  Payload ID: 19208
  Gene Name: vacuolar protein sorting 41 homolog (S. cerevisiae)
  Uniprot ID: P49754
  ENST ID: ENST00000395969
  CDS Start-End: 1-2490
atggcggaagcagaggagcaggaaactgggtcccttgaagaatctacagatgagtctgaggaagaagagagcgaagaggaacccaagctgaagtatgaaaggctttccaatggggtaactgaaatacttcagaaggatgcagctagctgcatgacagtccatgacaagtttttggcattgggcacacattatggcaaggtttatttacttgatgtccaggggaacatcactcagaagtttgatgtagtgcaggtatttggactgtattctggagaagaatttcacgagacttttgactgtcccattaaaattattgctgtgcacccacatttcgtgagatccagttgcaagcagtttgtgaccggagggaagaagctgctactgtttgaacggtcttggatgaacagatggaagtctgctgttctgcatgaaggggaagggaacataaggagtgtgaagtggagaggccatctgattgcttgggccaataatatgggtgtgaagatttttgacatcatctcaaagcaaagaatcaccaatgtgccccgggatgatataagtcttcgcccagacatgtatccctgcagcctctgctggaaggacaatgtgacactgattattggctgggggacttctgtcaaggtgtgctcagtgaaggaacggcatgccagtgaaatgagggatttgccaagtcgatatgttgaaatagtgtctcagtttgaaactgaattctacatcagtggacttgcacctctctgtgatcagcttgttgtactttcgtatgtaaaggagatttcagaaaaaacggaaagagaatactgtgccaggcctagactggacatcatccagccactttctgagacttgtgaagagatctcttctgatgctttgacagtcagaggctttcaggagaatgaatgtagagattatcatttagaatactctgaaggggaatcacttttttacatcgtgagtccgagagatgttgtagtggccaaggaacgagaccaagatgatcacattgactggctccttgaaaagaagaaatatgaagaagcattgatggcagctgaaattagccaaaaaaatattaaaagacataagattctggatattggcttggcatatataaatcacctggtggagagaggagactatgacatagcagcacgcaaatgccagaaaattcttgggaaaaatgcagcactctgggaatatgaagtttataaatttaaagaaattggacagcttaaggctattagtccttatttgccaagaggtgatccagttctgaaaccactcatctatgaaatgatcttacatgaatttttggagagtgattatgagggttttgccacattgatccgagaatggcctggagatctgtataataattcagtcatagttcaagcagttcgggatcatttgaagaaagatagtcagaacaagactttacttaaaaccctggcagaattgtacacctatgacaagaactatggcaatgctctggaaatatacttaacattaagacataaagacgtttttcagttgatccacaagcataatcttttcagttctatcaaggataaaattgttttattaatggattttgattcagagaaagctgttgacatgcttttggacaatgaagataaaatttcaattaaaaaggtagtggaagaattggaagacagaccagagctacagcatgtgtatttgcataagcttttcaagagagaccaccataaggggcagcgttaccatgaaaaacagatcagtctttatgctgaatatgatcgaccaaacttacttccctttctccgagacagtacccattgcccacttgaaaaggctcttgagatctgtcaacagagaaactttgtagaagagacagtttatcttctgagccgaatgggtaatagccgaagtgccctgaagatgattatggaggaattacatgatgttgataaagcaatcgaatttgccaaggagcaagatgatggagagctgtgggaagatttgattttatattccattgacaaaccaccatttattactggcttgttaaacaacattggcacacatgttgacccaattctactgattcaccgtattaaggaaggaatggagatccccaatttgagagattccttggttaaaattctgcaagactacaatttgcaaattctgcttcgtgaaggctgcaagaagattctcgtagctgactctttgtccttactgaagaaaatgcaccgaactcaaatgaaaggtgttcttgttgatgaggagaacatctgtgagtcgtgcctttcccctattcttccatcagatgcagctaagcccttcagcgtggtggtcttccattgccggcacatgttccacaaggagtgcctgcccatgcccagcatgaactctgctgcacagttctgcaacatctgcagtgctaagaaccgtggaccaggaagtgcaattttggagatgaaaaaatagctcatttctccttgtcagtctccttgtcaccactctttttgagactgtttttgcaacaacaaaagcatttgttgacactcgtgctgttaagagatttgtttatgtttatattatactcaaaaacaatttcttcatctattcctgtactaatggtttctctttgcagttcacagagaatttggggctctcttcatgccttgaaattttggggtccatagtgaatattttgttatttatttgtttggctcattctttatatagtaatggaaacataagtctaggagttagaaatgaattttttagaccttagtaaaaccatttaaccataaaatggacaactgagaattctcccagctgcctgaaagcgtcgccaactgtggttatcctgcaagctgctacctgcaacttggacgttgtttccacgtgctctgctggctacgattcttgcattctgggtttggcttttttctgtgtcatcaactatggttatcctctaaataggcatttaatgaaacattgtacaaattgtcactcatttgatgacacctgggaataacattagcaggctgatgtcctgcaccattatgtttactaatcacatgttctgtgtgctgtgacgactgtcaaagagtatctggccatggcggacactcagcatttgttgattgaataaatgttagctcttctcatt

SEQ ID NO: 198659 - DNA, 711 bp, Homo sapiens
  Payload ID: 19208
  Gene Name: vacuolar protein sorting 41 homolog (S. cerevisiae)
  ENST ID: ENST00000448833
  CDS Start-End: 1-451
agaagagacagtttatcttctgagccgaatgggtaatagccgaagtgccctgaagatgattatggaggaattacatgatgttgataaagcaatcgaatttgccaaggagcaagatgatggagagctgtgggaagatttgattttatattccattgacaaaccaccatttattactggcttgttaaacaacattggcacacatgttgacccaattctactgattcaccgtattaaggaaggaatggagatccccaatttgagagattccttggttaaaattctgcaagactacaatttgcaaattctgcttcgtgaaggctgcaagaagattctcgtagctgactctttgtccttactgaagaaaatgcaccgaactcaaatgaaaggtgttcttgttgatgaggagaacatctgtgagtcgtgcctttcccctattcttccatcagaataacccagtggagagaagtgttgtggcttccatcctgctcagtggaatgctggtgctgccattgcttagagctgaggttctcaagctctaggatgcagctaagcccttcagcgtggtggtcttccattgccggcacatgttccacaaggagtgcctgcccatgcccagcatgaactctgctgcacagttctgcaacatctgcagtgctaagaaccgtggaccaggaagtgcaattttggagatgaaaaaatagctcatttctc

SEQ ID NO: 198660 - DNA, 354 bp, Homo sapiens
  Payload ID: 19208
  Gene Name: vacuolar protein sorting 41 homolog (S. cerevisiae)
  ENST ID: ENST00000439468
  CDS Start-End: 1-330
ctgagccgaatgggtaatagccgaagtgccctgaagatgattatggaggaattacatgatgttgataaagcaatcgaatttgccaaggagcaagatgatggagagctgtgggaagatttgattttatattccattgacaaaccaccatttattactggcttgttaaacaacattggcacacatgttgacccaattctactgattcaccgtattaaggaaggaatggagatccccaatttgagagattccttggttaaaattctgcaagactacaatttgcaagtaacaattactatttttcaggatgctggtaacttctatagaacttgaattaaaacatttccttaaaaattc

SEQ ID NO: 198661 - DNA, 465 bp, Homo sapiens
  Payload ID: 19208
  Gene Name: vacuolar protein sorting 41 homolog (S. cerevisiae)
  ENST ID: ENST00000457055
  CDS Start-End: 247-465
acatttgcttttgctaagggcacacttggctttttaggttgtgcctttcctctattctacttaagtcaagcactaagaaatctactgtaaattctggactttccaccatgttttcaggaaactgggtcccttgaagaatctacagatgagtctgaggaagaagagagcgaagaggaacccaagctgaagtatgaaaggctttccaatggggtaactgaaatacttcagaaggatgcagctagctgcatgacagtccatgacaagtttttggcattgggcacacattatggcaaggtttatttacttgatgtccaggggaacatcactcagaagtttgatgtaagtcctgtgaagataaatcagattagcttggatgaaagtggagagcacatgggtgtgtgttcagaggatggcaaggtgcaggtatttggactgtattctggagaagaatttcacgagactttt

SEQ ID NO: 198662 - DNA, 532 bp, Homo sapiens
  Payload ID: 19208
  Gene Name: vacuolar protein sorting 41 homolog (S. cerevisiae)
  ENST ID: ENST00000418457
  CDS Start-End: 219-532
acttagtggcgtggagctgaactgaagagattaggatttgacgtctgacgtagtcactctgtagctccataatcaagggctgtccaagggaaactgggtcccttgaagaatctacagatgagtctgaggaagaagagagcgaagaggaacccaagctgaagtatgaaaggctttccaatggggtaactgaaatacttcagaaggatgcagctagctgcatgacagtccatgacaagtttttggcattgggcacacattatggcaaggtttatttacttgatgtccaggggaacatcactcagaagtttgatgtaagtcctgtgaagataaatcagattagcttggatgaaagtggagagcacatgggtgtgtgttcagaggatggcaaggtgcaggtatttggactgtattctggagaagaatttcacgagacttttgactgtcccattaaaattattgctgtgcacccacatttcgtgagatccagttgcaagcagtttgtgaccggagggaagaaggtaagtgctgtgtg

SEQ ID NO: 198663 - DNA, 548 bp, Homo sapiens
  Payload ID: 19208
  Gene Name: vacuolar protein sorting 41 homolog (S. cerevisiae)
  ENST ID: ENST00000414632
  CDS Start-End: 18-548
gactctcccgtggcgccatggcggaagcagaggagcaggaagaagagagcgaagaggaacccaagctgaagtatgaaaggctttccaatggggtaactgaaatacttcagaaggatgcagctagctgcatgacagtccatgacaagtttttggcattgggcacacattatggcaaggtttatttacttgatgtccaggggaacatcactcagaagtttgatgtaagtcctgtgaagataaatcagattagcttggatgaaagtggagagcacatgggtgtgtgttcagaggatggcaaggtgcaggtatttggactgtattctggagaagaatttcacgagacttttgactgtcccattaaaattattgctgtgcacccacatttcgtgagatccagttgcaagcagtttgtgaccggagggaagaagctgctactgtttgaacggtcttggatgaacagatggaagtctgctgttctgcatgaaggggaagggaacataaggagtgtgaagtggagaggccatctgattgcttgggccaataatatg

SEQ ID NO: 198664 - DNA, 575 bp, Homo sapiens
  Payload ID: 19208
  Gene Name: vacuolar protein sorting 41 homolog (S. cerevisiae)
  ENST ID: ENST00000413141
  CDS Start-End: 108-575
aatttaactttcagttttaaaggctgcatgtggacagtaccatattggacaggaaacctaggctgcacacacttactaaattataatttgaggcagcttacaaccagatgccaaagaaattacaatcagagagtcctgtgaagataaatcagattagcttggatgaaagtggagagcacatgggtgtgtgttcagaggatggcaaggtgcaggtatttggactgtattctggagaagaatttcacgagacttttgactgtcccattaaaattattgctgtgcacccacatttcgtgagatccagttgcaagcagtttgtgaccggagggaagaagctgctactgtttgaacggtcttggatgaacagatggaagtctgctgttctgcatgaaggggaagggaacataaggagtgtgaagtggagaggccatctgattgcttgggccaataatatgggtgtgaagatttttgacatcatctcaaagcaaagaatcaccaatgtgccccgggatgatataagtcttcgcccagacatgtatccctgcagcctctgctggaaggacaatgtgacactg

SEQ ID NO: 198665 - DNA, 2224 bp, Homo sapiens
  Payload ID: 19209
  Gene Name: vacuolar protein sorting 45 homolog (S. cerevisiae)
  Uniprot ID: Q9NRW7
  ENST ID: ENST00000369128
  CDS Start-End: 241-1857
atgccacctcccttgccctcatctctcactgccatgcaagaaagcgttaatggcaaatagggcacgtagccacactccgtcgttcctgcttccaagcaaaccttgtgccaggttcctcatttcgcgaggctccactctcttgggcttcaggctgccgctgggcctccagcaccaaagggcaataggggtctgagagtccgggcctcaggcatcttcaggccgcagactggcatagtgagtatggtatacacacaatcggagattctacagaaggaagtgtacctctttgaacgcattgattctcaaaatcgagagatcatgaaacacctgaaggcaatttgttttcttcgacctacaaaggagaatgtggattatattattcaggagctccgaagacccaaatacactatatatttcatttatttcagtaatgtgatcagcaagagtgacgtgaagtcattggctgaagctgatgaacaggaagttgtggctgaggttcagcaagtgataactaaagaatatgaactgtttgaattccgtcggacagaggttcctccattgctccttattttagatcgctgtgatgatgccatcaccccattgctaaaccagtggacatatcaggccatggtccacgaactactaggcataaacaacaatcggattgatctttccagagtgccgggaatcagtaaagacttaagagaagtggtcctatctgctgaaaatgatgaattctatgctaataatatgtacctgaactttgctgagattggtagcaatataaagaatctcatggaagattttcagaagaagaaaccaaaagaacagcaaaaactagaatcaatagcagacatgaaggcgtttgttgagaattatccacagttcaagaaaatgtctgggactgtttcaaagcatgtgacagtggttggagaactgtctcgattggtcagtgaacggaatctgctggaggtttcagaggttgagcaagaactggcctgtcaaaatgaccattctagtgctctccagaatataaaaaggcttctgcagaaccccaaagtgacagagtttgatgctgcccgcctggtgatgctttatgctttacattatgagcgacacagcagcaatagcctgccaggactaatgatggacctcaggaataaaggtgtttctgagaagtatcgaaagctcgtgtctgcagttgttgaatatggtggtaaacgagtcagaggaagtgacctcttcagccccaaagatgctgtggctatcaccaaacaattcctcaaaggactgaagggagtagaaaatgtatatacacagcatcaacctttcctacatgaaaccctggatcatctcatcaaaggaaggcttaaggaaaacctatatccttatttaggccccagcacactcagagacagacctcaggatatcattgtgtttgtaattggaggagccacctatgaagaggctctaacagtttataacctgaaccgcaccactcctggagtgaggattgtcctgggaggcaccacagtgcacaacacgaaaagagatggggtttcactatgttcccctgcctggtttcgaactcctgggctcaagcgatccacccgcctcagcctcccaaagtgctgggattacagctttcctagaggaagttctggcttctggactgcacagccgaagcaaggagagctctcaagtcacatcaaggtcagcgagcagaagatgaaacggtggttgggggaagggcacagcttcctctcttgtccccactacaggttttccctactaaacaaaggtgttggagagcagctttgggttctgtgctggttgttagaactcatctccaggtagcccacggatacgtggttggcacagacacaagactcccagagttgtcctaacaataagtctgagcccatctcaacccacttttctccggtagtctttatgtatctgttagcacaatcacttcagttactgatgaattttgttgggatctgacttggggaaagggttatcagagcctagaggggcttaaaaagtaatcatttgatgtacataccacactccttggcttcctttctcttcccttaaccctttctgcttttcattaaccacattcctgcacaactcatttctgaaaacctaccatgtttctttacagagccatccaaaaattttttgtccctacatagcaattttctgtggcactgagaaa

SEQ ID NO: 198666 - DNA, 2790 bp, Homo sapiens
  Payload ID: 19209
  Gene Name: vacuolar protein sorting 45 homolog (S. cerevisiae)
  Uniprot ID: Q9NRW7
  ENST ID: ENST00000369130
  CDS Start-End: 547-2259
actgtttcgcaaataccgcgtgtgatttattaaatgccgtctctccgagtcccaagcggccgggagcattatgccacctcccttgccctcatctctcactgccatgcaagaaagcgttaatggcaaatagggcacgtagccacactccgtcgttcctgcttccaagcaaaccttgtgccaggttcctcatttcgcgaggctccactctcttgggcttcaggctgccgctgggcctccagcaccaaagggcaataggggtctgagagtccgggcctcaggcatcttcaggccgcaggtgggtggagaataacgcccgcgcgtggcagcggcccaggccgtctcagccggatttttccatccccggggtaggcttggtcccctgtacactccagcggaactacaactcccagcaccgtggctgcccggactcccggaagccgaatcccggctgggaggaagcagctgagacccggccaacagactgggggttaatttagccagaaaagggggcgggaagggctgtagggtacttgtcaattcgccgccatgaacgtggtttttgctgtgaagcagtacatttccaaaatgatagaggacagcgggcctggtatgaaagtacttctcatggataaagagacgactggcatagtgagtatggtatacacacaatcggagattctacagaaggaagtgtacctctttgaacgcattgattctcaaaatcgagagatcatgaaacacctgaaggcaatttgttttcttcgacctacaaaggagaatgtggattatattattcaggagctccgaagacccaaatacactatatatttcatttatttcagtaatgtgatcagcaagagtgacgtgaagtcattggctgaagctgatgaacaggaagttgtggctgaggttcaggaattttatggtgattacattgctgtgaacccacatttgttttccctcaatattttgggttgctgccagggtcgaaattgggatccagcccagctatctagaacaactcaagggcttacagctctccttttatctctgaagaagtgtcccatgattcgttatcagctctcatcagaggcagcaaagagacttgcagagtgcgttaagcaagtgataactaaagaatatgaactgtttgaattccgtcggacagaggttcctccattgctccttattttagatcgctgtgatgatgccatcaccccattgctaaaccagtggacatatcaggccatggtccacgaactactaggcataaacaacaatcggattgatctttccagagtgccgggaatcagtaaagacttaagagaagtggtcctatctgctgaaaatgatgaattctatgctaataatatgtacctgaactttgctgagattggtagcaatataaagaatctcatggaagattttcagaagaagaaaccaaaagaacagcaaaaactagaatcaatagcagacatgaaggcgtttgttgagaattatccacagttcaagaaaatgtctgggactgtttcaaagcatgtgacagtggttggagaactgtctcgattggtcagtgaacggaatctgctggaggtttcagaggttgagcaagaactggcctgtcaaaatgaccattctagtgctctccagaatataaaaaggcttctgcagaaccccaaagtgacagagtttgatgctgcccgcctggtgatgctttatgctttacattatgagcgacacagcagcaatagcctgccaggactaatgatggacctcaggaataaaggtgtttctgagaagtatcgaaagctcgtgtctgcagttgttgaatatggtggtaaacgagtcagaggaagtgacctcttcagccccaaagatgctgtggctatcaccaaacaattcctcaaaggactgaagggagtagaaaatgtatatacacagcatcaacctttcctacatgaaaccctggatcatctcatcaaaggaaggcttaaggaaaacctatatccttatttaggccccagcacactcagagacagacctcaggatatcattgtgtttgtaattggaggagccacctatgaagaggctctaacagtttataacctgaaccgcaccactcctggagtgaggattgtcctgggaggcaccacagtgcacaacacgaaaagtttcctagaggaagttctggcttctggactgcacagccgaagcaaggagagctctcaagtcacatcaaggtcagcgagcagaagatgaaacggtggttgggggaagggcacagcttcctctcttgtccccactacaggttttccctactaaacaaaggtgttggagagcagctttgggttctgtgctggttgttagaactcatctccaggtagcccacggatacgtggttggcacagacacaagactcccagagttgtcctaacaataagtctgagcccatctcaacccacttttctccggtagtctttatgtatctgttagcacaatcacttcagttactgatgaattttgttgggatctgacttggggaaagggttatcagagcctagaggggcttaaaaagtaatcatttgatgtacataccacactccttggcttcctttctcttcccttaaccctttctgcttttcattaaccacattcctgcacaactcatttctgaaaacctaccatgtttctttacagagccatccaaaaattttttgtccctacatagcaattttctgtggcactgagaaaccatgtatgaccacaataaaaatccattttgtgaaagga

SEQ ID NO: 198667 - DNA, 977 bp, Homo sapiens
  Payload ID: 19209
  Gene Name: vacuolar protein sorting 45 homolog (S. cerevisiae)
  ENST ID: ENST00000419023
  CDS Start-End: 31-977
gggctgtagggtacttgtcaattcgccgccatgaacgtggtttttgctgtgaagcagtacatttccaaaatgatagaggacagcgggcctggtatgaaagtacttctcatggataaagagacgactggcatagtgagtatggtatacacacaatcggagattctacagaaggaagtgtacctctttgaacgcattgattctcaaaatcgagagatcatgaaacacctgaaggcaatttgttttcttcgacctacaaaggagaatgtggattatattattcaggagctccgaagacccaaatacactatatatttcatttatttcagtaatgtgatcagcaagagtgacgtgaagtcattggctgaagctgatgaacaggaagttgtggctgaggttcagcaagtgataactaaagaatatgaactgtttgaattccgtcggacagaggttcctccattgctccttattttagatcgctgtgatgatgccatcaccccattgctaaaccagtggacatatcaggccatggtccacgaactactaggcataaacaacaatcggattgatctttccagagtgccgggaatcagtaaagacttaagagaagtggtcctatctgctgaaaatgatgaattctatgctaataatatgtacctgaactttgctgagattggtagcaatataaagaatctcatggaagattttcagaagaagaaaccaaaagaacagcaaaaactagaatcaatagcagacatgaaggcgtttgttgagaattatccacagttcaagaaaatgtctgggactgtttcaaagcatgtgacagtggttggagaactgtctcgattggtcagtgaacggaatctgctggaggtttcagaggttgagcaagaactggcctgtcaaaatgaccattctagtgctctccagaatataaaaaggcttctgcagaaccccaaagtgacagagtttgatgctgc

SEQ ID NO: 198668 - DNA, 2695 bp, Homo sapiens
  Payload ID: 19209
  Gene Name: vacuolar protein sorting 45 homolog (S. cerevisiae)
  Uniprot ID: Q9NRW7
  ENST ID: ENST00000535106
  CDS Start-End: 674-2290
gggaagacgaatctcgaccactgtttcgcaaataccgcgtgtgatttattaaatgccgtctctccgagtcccaagcggccgggagcattatgccacctcccttgccctcatctctcactgccatgcaagaaagcgttaatggcaaatagggcacgtagccacactccgtcgttcctgcttccaagcaaaccttgtgccaggttcctcatttcgcgaggctccactctcttgggcttcaggctgccgctgggcctccagcaccaaagggcaataggggtctgagagtccgggcctcaggcatcttcaggccgcaggtgggtggagaataacgcccgcgcgtggcagcggcccaggccgtctcagccggatttttccatccccggggtaggcttggtcccctgtacactccagcggaactacaactcccagcaccgtggctgcccggactcccggaagccgaatcccggctgggaggaagcagctgagacccggccaacagactgggggttaatttagccagaaaagggggcgggaagggctgtagggtacttgtcaattcgccgccatgaacgtggtttttgctgtgaagcagtacatttccaaaatgatagaggacagcgggcctggtatgaaagtacttctcatggataaagagacgactggcatagtgagtatggtatacacacaatcggagattctacagaaggaagtgtacctctttgaacgcattgattctcaaaatcgagagatcatgaaacacctgaaggcaatttgttttcttcgacctacaaaggagaatgtggattatattattcaggagctccgaagacccaaatacactatatatttcatttatttcagtaatgtgatcagcaagagtgacgtgaagtcattggctgaagctgatgaacaggaagttgtggctgaggttcagcaagtgataactaaagaatatgaactgtttgaattccgtcggacagaggttcctccattgctccttattttagatcgctgtgatgatgccatcaccccattgctaaaccagtggacatatcaggccatggtccacgaactactaggcataaacaacaatcggattgatctttccagagtgccgggaatcagtaaagacttaagagaagtggtcctatctgctgaaaatgatgaattctatgctaataatatgtacctgaactttgctgagattggtagcaatataaagaatctcatggaagattttcagaagaagaaaccaaaagaacagcaaaaactagaatcaatagcagacatgaaggcgtttgttgagaattatccacagttcaagaaaatgtctgggactgtttcaaagcatgtgacagtggttggagaactgtctcgattggtcagtgaacggaatctgctggaggtttcagaggttgagcaagaactggcctgtcaaaatgaccattctagtgctctccagaatataaaaaggcttctgcagaaccccaaagtgacagagtttgatgctgcccgcctggtgatgctttatgctttacattatgagcgacacagcagcaatagcctgccaggactaatgatggacctcaggaataaaggtgtttctgagaagtatcgaaagctcgtgtctgcagttgttgaatatggtggtaaacgagtcagaggaagtgacctcttcagccccaaagatgctgtggctatcaccaaacaattcctcaaaggactgaagggagtagaaaatgtatatacacagcatcaacctttcctacatgaaaccctggatcatctcatcaaaggaaggcttaaggaaaacctatatccttatttaggccccagcacactcagagacagacctcaggatatcattgtgtttgtaattggaggagccacctatgaagaggctctaacagtttataacctgaaccgcaccactcctggagtgaggattgtcctgggaggcaccacagtgcacaacacgaaaagagatggggtttcactatgttcccctgcctggtttcgaactcctgggctcaagcgatccacccgcctcagcctcccaaagtgctgggattacagctttcctagaggaagttctggcttctggactgcacagccgaagcaaggagagctctcaagtcacatcaaggtcagcgagcagaagatgaaacggtggttgggggaagggcacagcttcctctcttgtccccactacaggttttccctactaaacaaaggtgttggagagcagctttgggttctgtgctggttgttagaactcatctccaggtagcccacggatacgtggttggcacagacacaagactcccagagttgtcctaacaataagtctgagcccatctcaacccacttttctccggtagtctttatgtatctgttagcacaatcacttcagttactgatgaattttgttgggatctgacttggggaaagggttatcagagcctagaggggcttaaaaagtaatcatttgatgtacataccacactccttggcttcctttctcttcccttaaccctttctgcttttcattaaccacattcctgcacaactcatttctgaaaacctaccatgtttctttacagagccatccaaaaattttttgtccctacatagcaattttctgtggcactgagaaaccatgtatgaccacaataaaaatccattttgtgaaagg

SEQ ID NO: 198669 - DNA, 2064 bp, Homo sapiens
  Payload ID: 19209
  Gene Name: vacuolar protein sorting 45 homolog (S. cerevisiae)
  ENST ID: ENST00000611412
  CDS Start-End: 191-1534
atccccggggtaggcttggtcccctgtacactccagcggaactacaactcccagcaccgtggctgcccggactcccggaagccgaatcccggctgggaggaagcagctgagacccggccaacagactgggggttaatttagccagaaaagggggcgggaagggctgtagggtacttgtcaattcgccgccatgaacgtggtttttgctgtgaagcagtacccacatttgttttccctcaatattttgggttgctgccagggtcgaaattgggatccagcccagctatctagaacaactcaagggcttacagctctccttttatctctgaagaagtgtcccatgattcgttatcagctctcatcagaggcagcaaagagacttgcagagtgcgttaagcaagtgataactaaagaatatgaactgtttgaattccgtcggacagaggttcctccattgctccttattttagatcgctgtgatgatgccatcaccccattgctaaaccagtggacatatcaggccatggtccacgaactactaggcataaacaacaatcggattgatctttccagagtgccgggaatcagtaaagacttaagagaagtggtcctatctgctgaaaatgatgaattctatgctaataatatgtacctgaactttgctgagattggtagcaatataaagaatctcatggaagattttcagaagaagaaaccaaaagaacagcaaaaactagaatcaatagcagacatgaaggcgtttgttgagaattatccacagttcaagaaaatgtctgggactgtttcaaagcatgtgacagtggttggagaactgtctcgattggtcagtgaacggaatctgctggaggtttcagaggttgagcaagaactggcctgtcaaaatgaccattctagtgctctccagaatataaaaaggcttctgcagaaccccaaagtgacagagtttgatgctgcccgcctggtgatgctttatgctttacattatgagcgacacagcagcaatagcctgccaggactaatgatggacctcaggaataaaggtgtttctgagaagtatcgaaagctcgtgtctgcagttgttgaatatggtggtaaacgagtcagaggaagtgacctcttcagccccaaagatgctgtggctatcaccaaacaattcctcaaaggactgaagggagtagaaaatgtatatacacagcatcaacctttcctacatgaaaccctggatcatctcatcaaaggaaggcttaaggaaaacctatatccttatttaggccccagcacactcagagacagacctcaggatatcattgtgtttgtaattggaggagccacctatgaagaggctctaacagtttataacctgaaccgcaccactcctggagtgaggattgtcctgggaggcaccacagtgcacaacacgaaaagtttcctagaggaagttctggcttctggactgcacagccgaagcaaggagagctctcaagtcacatcaaggtcagcgagcagaagatgaaacggtggttgggggaagggcacagcttcctctcttgtccccactacaggttttccctactaaacaaaggtgttggagagcagctttgggttctgtgctggttgttagaactcatctccaggtagcccacggatacgtggttggcacagacacaagactcccagagttgtcctaacaataagtctgagcccatctcaacccacttttctccggtagtctttatgtatctgttagcacaatcacttcagttactgatgaattttgttgggatctgacttggggaaagggttatcagagcctagaggggcttaaaaagtaatcatttgatgtacataccacactccttggcttcctttctcttcccttaaccctttctgcttttcattaaccacattcctgcacaactcatttctgaaaacctaccatgtttctttacagagccatccaaaaattttttgtccctacatagcaattttctgtggcactgagaaaccatgtatgaccacaataaaaatccattttgtgaaagg

SEQ ID NO: 198670 - DNA, 966 bp, Homo sapiens
  Payload ID: 19209
  Gene Name: vacuolar protein sorting 45 homolog (S. cerevisiae)
  ENST ID: ENST00000462852
  CDS Start-End: 275-871
ccgtctctccgagtcccaagcggccgggagcattatgccacctcccttgccctcatctctcactgccatgcaagaaagcgttaatggcaaatagggcacgtagccacactccgtcgttcctgcttccaagcaaaccttgtgccaggttcctcatttcgcgaggctccactctcttgggcttcaggctgccgctgggcctccagcaccaaagggcaataggggtctgagagtccgggcctcaggcatcttcaggccgcagactggcatagtgagtatggtatacacacaatcggagattctacagaaggaagtgtacctctttgaacgcattgattctcaaaatcgagagatcatgaaacacctgaaggcaatttgttttcttcgacctacaaaggagaatgtggattatattattcaggagctccgaagacccaaatacactatatatttcatttatttcagtaatgtgatcagcaagagtgacgtgaagtcattggctgaagctgatgaacaggaagttgtggctgaggttcaggaattttatggtgattacattgctgtgaacccacatttgttttccctcaatattttgggttgctgccagggtcgaaattgggatccagcccagctatctagaacaactcaagggcttacagctctccttttatctctgaagaagtgtcccatgattcgttatcagctctcatcagaggcagcaaagagacttgcagagtgcgttaagcaagtgataactaaagaatatgaactgtttgaattccgtcggacagaggttcctccattgctccttattttagatcgctgtgatgatgccatcaccccattgctaaaccagagtgccgggaatcagtaaagacttaagagaagtggtcctatctgctgaaaatgatgaattctatgctaataatatgtacctgaactttgctgagattggtagcaatataaaga

SEQ ID NO: 198671 - DNA, 2714 bp, Homo sapiens
  Payload ID: 19210
  Gene Name: vacuolar protein sorting 51 homolog (S. cerevisiae)
  Uniprot ID: Q9UID3
  ENST ID: ENST00000279281
  CDS Start-End: 93-2441
ctcgtttcaacaacaactttatggctcccggaagtgcctcctccccgtccccttcctttccagcctcacgcccgtgggctgcagttggaacgatggcggcggcagctgccgccgggcctagcccggggtctggacctggggactccccagaagggcccgagggggaggctccggagcgtcggcggaaggcgcacgggatgctgaagctttactacggcctctcggaaggggaggcggcgggacgccccgcggggcccgaccccctggacccgactgatctgaacggggcgcacttcgacccggaagtttacctagacaagctgcgtagagagtgccctctggcccagttgatggacagtgagacggacatggtgcggcagatccgggctctagacagcgacatgcagaccctggtctatgagaactacaacaagttcatctcagccacagacaccatccggaagatgaagaacgatttccggaagatggaggatgagatggaccggctggccaccaacatggcagtgatcaccgacttcagcgctcgcatcagcgccacgctgcaggaccgccacgagcgcatcaccaagctggcaggggtccacgcgctgctgcggaagctgcagttcctctttgagctgccctcgcgcctcaccaagtgcgtggaactgggcgcctatgggcaggcggtgcgctaccagggccgcgcgcaggccgtgctgcagcagtaccaacacctgccctcgttccgcgccatccaggacgactgccaggtcatcacggcccgcctggcccagcagctgcggcagcgctttagggagggcggctcaggcgccccggagcaggcagagtgcgtggagctgctgctggccctgggcgagcctgcggaggagctgtgcgaggagttcctggcgcacgcccgcggccggctggagaaggagctgagaaacctggaggccgagctggggccctcacctccggctcccgacgtgttagagttcaccgaccatggaggcagtggcttcgtgggcggcctctgccaggtggcggcggcctaccaggagctgtttgcggcccagggcccagcaggtgccgagaagctggcggccttcgcccggcagctgggcagccgctattttgcgctggtggagcggcggctggcgcaggagcagggtggtggtgacaactcactgctggtgcgggcgctggaccgcttccaccggcgcttgcgggctcccggggccctgctggccgctgccgggctcgcagacgctgccacggagatcgtggaacgagtggcccgcgagcgcctgggccaccacctgcagggtctccgggcggccttcctgggctgcctgacagacgtccgccaggcgctggcagcacctcgcgtggctgggaaggagggccctggcctggccgagttgctggccaatgtggccagctccatcctgagccacattaaggcctctctggcagcagtgcaccttttcaccgccaaagaggtgtccttctccaacaagccctacttccggggtgagttctgcagtcagggtgtccgtgagggcctcatcgtgggcttcgtccactctatgtgccagacggctcagagcttctgcgacagccctggggagaaggggggtgccacaccacctgccctgctcctgctgctctcccgcctctgcctggactacgagacggccaccatctcctacatcctcactctcactgatgaacagtttctggtgcaggatcagttcccagtgacgcccgtgagcacgctgtgtgcagaggccagggaaacggcgcggcggctgctgacccactacgtgaaggtgcagggcctggtcatatcacagatgctgcgcaagagcgtggagactcgcgactggctcagcactctggagccccggaatgtgcgggccgtcatgaagcgggtggtggaggataccaccgccatcgacgtgcaggtggggctcctgtacgaagagggtgttcgcaaggcccagagcagcgactccagcaagaggactttctccgtgtacagcagctctcggcagcagggccgctacgcccccagctatacccccagtgccccgatggacaccaacctcttgagcaatatccagaagctattctctgaacgtattgatgtgttcagccctgtggagttcaacaaggtgtcggtgctgaccggcatcatcaagatcagcctgaagacgctgctggagtgtgtgcggctgcgcacctttgggcgcttcgggctgcagcaggtgcaagtggactgccactttctgcagctctacctgtggcgttttgtggccgacgaagaactcgtgcacttgctgctggacgaagtggtggcctctgctgccctgcgctgcccagaccctgtgcccatggagcccagtgtggttgaggtcatctgcgagcgcggctaggcgcagccgctgccatgcaccggtctgtccctgcaccccatggcacccaggatctggtctcggtggtccttccccgcaggcaggtgtcaggaccggcctaataaacatgtgtggcctcctcctctcgcttgctgggcgggcctttccgggggcggggttttgaagctgaggcttctgaggcgcccgcgtcgggtccgcccccgagcgccgattggctggtgtgctgggcccagcatgggcagggggcggttccacttaaaaaccctgggacga

SEQ ID NO: 198672 - DNA, 534 bp, Homo sapiens
  Payload ID: 19210
  Gene Name: vacuolar protein sorting 51 homolog (S. cerevisiae)
  ENST ID: ENST00000526578
  CDS Start-End: 205-534
gtgtgtgcgcacggggagtgggggggtgcggggaggggggaagggaaccaggcccctgctatattgctcccccagatcatgcctccgactttttgtgaggttcaggagagcaggtgttcataagaggacgaacctcggccagggagtacgagcagctgaggcgtctgaggggatctgcgtagagagtgccctctggcccagttgatggacagtgagacggacatggtgcggcagatccgggctctagacagcgacatgcagaccctggtctatgagaactacaacaagttcatctcagccacagacaccatccggaagatgaagaacgatttccggaagatggaggatgagatggaccggctggccaccaacatggcagtgatcaccgacttcagcgctcgcatcagcgccacgctgcaggaccgccacgagcgcatcaccaagctggcaggggtccacgcgctgctgcggaagctgcagttcctctttgagctgccctcgcgcctcaccaagtgcgtggaactgggcgcctat

SEQ ID NO: 198673 - DNA, 633 bp, Homo sapiens
  Payload ID: 19210
  Gene Name: vacuolar protein sorting 51 homolog (S. cerevisiae)
  ENST ID: ENST00000530673
  CDS Start-End: 1-300
gtggggctcctgtacgaagagggtgttcgcaaggcccagagcagcgactccagcaagaggactttctccgtgtacagcagctctcggcagcagggccgctacgcccccagctatacccccagtgccccgatggacaccaacctcttgagcaatatccagaagctattctctgaacgtattgatgtgttcagccctgtggagttcaacaagatgacggcgctaatattgtatccctcccttcttatctggccccggagactttctgcctcatcccagctacttccatcgtgtcggtgctgaccggcatcatcaagatcagcctgaagacgctgctggagtgtgtgcggctgcgcacctttgggcgcttcgggctgcagcaggtgcaagtggactgccactttctgcagctctacctgtggcgttttgtggccgacgaagaactcgtgcacttgctgctggacgaagtggtggcctctgctgccctgcgctgcccagaccctgtgcccatggagcccagtgtggttgaggtcatctgcgagcgcggctaggcgcagccgctgccatgcaccggtctgtccctgcaccccatggcacccaggatctggtctcggtggtccttccccgcaggcaggt

SEQ ID NO: 198674 - DNA, 600 bp, Homo sapiens
  Payload ID: 19210
  Gene Name: vacuolar protein sorting 51 homolog (S. cerevisiae)
  ENST ID: ENST00000533487
  CDS Start-End: 8-253
tggaacgatggcggcggcagctgccgccgggcctagcccggggtctggacctggggactccccagaagggcccgagggggaggctccggagcgtcggcggaaggcgcacgggatgctgaagctttactacggcctctcggaaggggaggcggcgggacgccccgcggggcccgaccccctggacccgactgatctgaacggggcgcacttcgacccggaagtttacctagacaagacaccatccggaagatgaagaacgatttccggaagatggaggatgagatggaccggctggccaccaacatggcagtgatcaccgacttcagcgctcgcatcagcgccacgctgcaggaccgccacgagcgcatcaccaagctggcaggggtccacgcgctgctgcggaagctgcagttcctctttgagctgccctcgcgcctcaccaagtgcgtggaactgggcgcctatgggcaggcggtgcgctaccagggccgcgcgcaggccgtgctgcagcagtaccaacacctgccctcgttccgcgccatccaggacgactgccaggtcatcacggcccgcctggcccagcagctgcggcagcgcttt

SEQ ID NO: 198675 - DNA, 837 bp, Homo sapiens
  Payload ID: 19210
  Gene Name: vacuolar protein sorting 51 homolog (S. cerevisiae)
  ENST ID: ENST00000530773
  CDS Start-End: 137-837
gaaggacctagggctgcagggggacgtttcacctgaaggactgcctcgtttcaacaacaactttatggctcccggaagtgcctcctccccgtccccttcctttccagcctcacgcccgtgggctgcagttggaacgatggcggcggcagctgccgccgggcctagcccggggtctggacctggggactccccagaagggcccgagggggaggctccggagcgtcggcggaaggcgcacgggatgctgaagctttactacggcctctcggaaggggaggcggcgggacgccccgcggggcccgaccccctggacccgactgatctgaacggggcgcacttcgacccggaagtttacctagacaagctgcgtagagagtgccctctggcccagttgatggacagtgagacggacatggtgcggcagatccgggctctagacagcgacatgcagaccctggtctatgagaactacaacaagttcatctcagccacaggggtccacgcgctgctgcggaagctgcagttcctctttgagctgccctcgcgcctcaccaagtgcgtggaactgggcgcctatgggcaggcggtgcgctaccagggccgcgcgcaggccgtgctgcagcagtaccaacacctgccctcgttccgcgccatccaggacgactgccaggtcatcacggcccgcctggcccagcagctgcggcagcgctttagggagggcggctcaggcgccccggagcaggcagagtgcgtggagctgctgctggccctgggcgagcctgcggaggagctgtgcgaggagttcctggcgcacgcccgcggccggctggagaagga

SEQ ID NO: 198676 - DNA, 1078 bp, Homo sapiens
  Payload ID: 19210
  Gene Name: vacuolar protein sorting 51 homolog (S. cerevisiae)
  ENST ID: ENST00000533827
  CDS Start-End: 1-217
cagtcagggtgtccgtgagggcctcatcgtgggcttcgtccactctatgtgccagacggctcagagcttctgcgacagccctggggagaaggggggtgccacaccacctgccctgctcctgctgctctcccgcctctgcctggactacgagacggccaccatctcctacatcctcactctcactgatgaacagtttctggtgcaggtgaagcactagctcctagccgggcagggaatggtgttgctgggaatgcagatggctggacagtgccctcatggccagaccccagaccagctgcctgatcagttcccagtgacgcccgtgagcacgctgtgtgcagaggccagggaaacggcgcggcggctgctgacccactacgtgaaggtgcagggcctggtcatatcacagatgctgcgcaagagcgtggagactcgcgactggctcagcactctggagccccggaatgtgcgggccgtcatgaagcgggtggtggaggataccaccgccatcgacgtgcaggtggggctcctgtacgaagagggtgttcgcaaggcccagagcagcgactccagcaagaggactttctccgtgtacagcagctctcggcagcagggccgctacgcccccagctatacccccagtgccccgatggacaccaacctcttgagcaatatccagaagctattctctgaacgtattgatgtgttcagccctgtggagttcaacaaggtgtcggtgctgaccggcatcatcaagatcagcctgaagacgctgctggagtgtgtgcggctgcgcacctttgggcgcttcgggctgcagcaggtgcaagtggactgccactttctgcagctctacctgtggcgttttgtggccgacgaagaactcgtgcacttgctgctggacgaagtggtggcctctgctgccctgcgctgcccagaccctgtgcccatggagcccagtgtggttgaggtcatctgcgagcgcggctaggcgcagccgctgccatgcaccggtctgtccctgcaccccatggcacccaggatctggtctcggtggtccttccccgcaggcaggtgt

SEQ ID NO: 198677 - DNA, 1027 bp, Homo sapiens
  Payload ID: 19210
  Gene Name: vacuolar protein sorting 51 homolog (S. cerevisiae)
  ENST ID: ENST00000529180
  CDS Start-End: 25-1027
cgcccgtgggctgcagttggaacgatggcggcggcagctgccgccgggcctagcccggggtctggacctggggactccccagaagggcccgagggggaggctccggagcgtcggcggaaggcgcacgggatgctgaagctttactacggcctctcggaaggggaggcggcgggacgccccgcggggcccgaccccctggacccgactgatctgaacggggcgcacttcgacccggaagtttacctagacaagctgcgtagagagtgccctctggcccagttgatggacagtgagacggacatggtgcggcagatccgggctctagacagcgacatgcagaccctggtctatgagaactacaacaagttcatctcagccacagacaccatccggaagatgaagaacgatttccggaagatggaggatgagatggaccggctggccaccaacatggcagtgatcaccgacttcagcgctcgcatcagcgccacgctgcaggaccgccacgagcgcatcaccaagctggcaggtgggcgctgccgggcagggcctgcagtgggcctttcctggggctctggggctaacgtcaccctccgtcccccaggggtccacgcgctgctgcggaagctgcagttcctctttgagctgccctcgcgcctcaccaagtgcgtggaactgggcgcctatgggcaggcggtgcgctaccagggccgcgcgcaggccgtgctgcagcagtaccaacacctgccctcgttccgcgccatccaggacgactgccaggtcatcacggcccgcctggcccagcagctgcggcagcgctttagggagggcggctcaggcgccccggagcaggcagagtgcgtggagctgctgctggccctgggcgagcctgcggaggagctgtgcgaggagttcctggcgcacgcccgcggccggctggagaaggagctgagaaacctggaggccgagctggggccctcacctccggctcccgacgtgttagagttcaccgaccatggaggcagtg

SEQ ID NO: 198678 - DNA, 691 bp, Homo sapiens
  Payload ID: 19210
  Gene Name: vacuolar protein sorting 51 homolog (S. cerevisiae)
  ENST ID: ENST00000526856
  CDS Start-End: 1-599
agacggctcagagcttctgcgacagccctggggagaaggggggtgccacaccacctgccctgctcctgctgctctcccgcctctgcctggactacgagacggccaccatctcctacatcctcactctcactgatgaacagtttctggtgcaggatcagttcccagtgacgcccgtgagcacgctgtgtgcagaggccagggaaacggcgcggcggctgctgacccactacgtgaaggtgcagggcctggtcatatcacagatgctgcgcaagagcgtggagactcgcgactggctcagcactctggagccccggaatgtgcgggccgtcatgaagcgggtggtggaggataccaccgccatcgacgtgcaggtggggctcctgtacgaagagggtgttcgcaaggcccagagcagcgactccagcaagaggactttctccgtgtacagcagctctcggcagcagggccgctacgcccccagctatacccccagtgccccgatggacaccaacctcttgagcaatatccagaagctattctctgaacgtattgatgtgttcagccctgtggagttcaacaaggtccgacttccaacgtgactcagacttccagggatcccggggagggttggctggagcagccccacacctgcccaaggagccccaggactctgtgaccaactgggggtgac

SEQ ID NO: 198679 - DNA, 854 bp, Homo sapiens
  Payload ID: 19210
  Gene Name: vacuolar protein sorting 51 homolog (S. cerevisiae)
  ENST ID: ENST00000534557
  CDS Start-End: 90-854
cgcggggctgggcttaggccgagccccaggatttcaaatgctgacaaacaccaaacacgctgcgtagagagtgccctctggcccagttgatggacagtgagacggacatggtgcggcagatccgggctctagacagcgacatgcagaccctggtctatgagaactacaacaagttcatctcagccacagacaccatccggaagatgaagaacgatttccggaagatggaggatgagatggaccggctggccaccaacatggcagtgatcaccgacttcagcgctcgcatcagcgccacgctgcaggaccgccacgagcgcatcaccaagctggcaggggtccacgcgctgctgcggaagctgcagttcctctttgagctgccctcgcgcctcaccaagtgcgtggaactgggcgcctatgggcaggcggtgcgctaccagggccgcgcgcaggccgtgctgcagcagtaccaacacctgccctcgttccgcgccatccaggacgactgccaggtcatcacggcccgcctggcccagcagctgcggcagcgctttagggagggcggctcaggcgccccggagcaggcagagtgcgtggagctgctgctggccctgggcgagcctgcggaggagctgtgcgaggagttcctggcgcacgcccgcggccggctggagaaggagctgagaaacctggaggccgagctggggccctcacctccggctcccgacgtgttagagttcaccgaccatggaggcagtggcttcgtgggcggcctctgccaggtggcggcggcctaccaggagctgtttgcggcccagggcccagcaggtgccgagaagctggcggccttcgcc

SEQ ID NO: 198680 - DNA, 723 bp, Homo sapiens
  Payload ID: 19210
  Gene Name: vacuolar protein sorting 51 homolog (S. cerevisiae)
  ENST ID: ENST00000528588
  CDS Start-End: 228-723
atgcatgtctcaagtttcccaaaacggaggcagtgtgaacacagtctacagatgaagaactggggctcagaaaagttgaggggcgtggtctagatttacagcaagtcttaggcagatgagagatgaggacccagctgcatagctggaaggcattcccagtcccagctactcaggaggctgagatgggaggattgctggaccccaggagtcccaggctgcagtgaactatgatcatgccactgtactccaagctgggtgacagagaaaaaaagaaaagaaaagaaaaagcctcacgcccgtgggctgcagttggaacgatggcggcggcagctgccgccgggcctagcccggggtctggacctggggactccccagaagggcccgagggggaggctccggagcgtcggcggaaggcgcacgggatgctgaagctttactacggcctctcggaaggggaggcggcgggacgccccgcggggcccgaccccctggacccgactgatctgaacggggcgcacttcgacccggaagtttacctagacaagctgcgtagagagtgccctctggcccagttgatggacagtgagacggacatggtgcggcagatccgggctctagacagcgacatgcagaccctggtctatgagaactacaacaagttcatctcagccacagacaccatccggaagatgaagaacgatttccggaagatggaggatgaga

SEQ ID NO: 198681 - DNA, 1089 bp, Homo sapiens
  Payload ID: 19210
  Gene Name: vacuolar protein sorting 51 homolog (S. cerevisiae)
  ENST ID: ENST00000534124
  CDS Start-End: 25-516
cgcccgtgggctgcagttggaacgatggcggcggcagctgccgccgggcctagcccggggtctggacctggggactccccagaagggcccgagggggaggctccggagcgtcggcggaaggcgcacgggatgctgaagctttactacggcctctcggaaggggaggcggcgggacgccccgcggggcccgaccccctggacccgactgatctgaacggggcgcacttcgacccggaagtttacctagacaagctgcgtagagagtgccctctggcccagttgatggacagtgagacggacatggtgcggcagatccgggctctagacagcgacatgcagaccctggtctatgagaactacaacaagttcatctcagccacaggcagtgcgctggacacgcagatgcgcttgggagccagcggtccctgccttggctgcttgtggtctgatggagcagttgaggcacagtggtggcagctggctaagcacctgcggcctgcttcggatctggactaattctgagggccggctctcctgggcaccagggttagggggttacggggagtatacaccatccggaagatgaagaacgatttccggaagatggaggatgagatggaccggctggccaccaacatggcagtgatcaccgacttcagcgctcgcatcagcgccacgctgcaggaccgccacgagcgcatcaccaagctggcaggggtccacgcgctgctgcggaagctgcagttcctctttgagctgccctcgcgcctcaccaagtgcgtggaactgggcgcctatgggcaggcggtgcgctaccagggccgcgcgcaggccgtgctgcagcagtaccaacacctgccctcgttccgcgccatccaggacgactgccaggtcatcacggcccgcctggcccagcagctgcggcagcgctttagggagggcggctcaggcgccccggagcaggcagagtgcgtggagctgctgctggccctgggcgagcctgcggaggagctgtgcgaggagttcctggcgcacgcccgcggccggctggagaaggagctgagaaacctggaggccgagctggggccc

SEQ ID NO: 198682 - DNA, 2960 bp, Homo sapiens
  Payload ID: 19211
  Gene Name: vacuolar protein sorting 52 homolog (S. cerevisiae)
  Uniprot ID: Q8N1B4
  ENST ID: ENST00000383210
  CDS Start-End: 220-2391
agcgaaggttccggggctagtttgtgtttcagacttccatatttccatttgcagttgggtgaagtggttagagctgaaaggggacagctggagtcaaacaacttaactcaaatatctgggaacgatttcgcgctgaggaagaccctttgggacttgtagctccactccggggaacggactcgccgggactgacagttgccggaagtgaggctgcggggaatggccgccgctgcgaccatggcggctgcggcccgggaactggtgttgcgggctgggacctcagatatggaggaggaagagggcccgctggcgggtggtcctgggctccaggaaccactgcaacttggggagttggatatcacttctgatgaattcatcctggatgaagtggatgttcacattcaggcaaatctggaggatgagttagtaaaggaagctcttaaaacgggtgtagatctccgtcactattcaaagcaagttgagctggagctacagcagattgaacagaaatccattcgggattatattcaagagagtgagaatatagcatctctacacaaccagatcacagcctgtgatgctgtcctggagcgaatggagcagatgttgggagcttttcagagtgacctcagctccatcagctctgagatccggacactgcaggaacagtcaggagccatgaacattcgacttcgaaatcgccaggcagttcgggggaaacttggggagcttgttgatggtctggtggtgccttctgctctggtcacggcaattctggaggctccagtgacagagcccaggttcttggagcagctacaggagctggatgccaaggcagccgcagtcagagagcaggaagctagaggcacagcagcctgcgcagatgtcagaggcgtgctcgatcggctccgggtcaaggcagtgacgaagatccgagagtttatcctccagaagatttattccttcaggaaacccatgaccaactatcagatcccccagacggccctgctgaagtacaggttcttctatcagtttctgctgggcaatgaacgagcaacagcaaaggagatcagggatgaatatgtggagacgctgagcaagatttacctgtcttactaccgctcttacctggggcggctcatgaaggtgcagtatgaggaagtcgctgagaaagatgatctaatgggtgtggaagatacagcaaagaaaggattcttctcaaagccatcgctccgcagcaggaacaccattttcaccctaggaacccgcggctctgtcatctcccccactgaacttgaggcccccatcctggtgcctcacacagcgcagcgcggagagcagaggtatccatttgaggccctcttccgcagccagcactacgccctcctagacaattcctgccgcgaataccttttcatctgtgaattttttgttgtgtctggcccagctgcacacgacctgttccatgctgtcatgggccgtacactcagcatgaccctgaaacacctggattcttatctagctgactgctacgatgccattgctgtttttctctgtatccacattgttctccggttccgtaacattgcagcaaagagggatgttcctgccctggacaggtactgggaacaggtgcttgccttgctatggccacggtttgaactgatcctggagatgaatgttcagagcgtccgaagcactgacccccagcgcctaggggggttggatactcggccccactatatcacacgccgctatgcagagttctcctccgctcttgtcagtatcaaccagacaattcctaatgaacggaccatgcaattgctgggacagctgcaggtggaggtggagaattttgtcctccgagtggcagctgagttctcctcaaggaaggagcagcttgtgtttctgatcaacaactatgacatgatgctgggtgtgctgatggagcgggctgcagatgacagcaaagaggttgagagcttccagcagctgctcaatgctcggacacaggaattcattgaagagttgctgtctcccccttttgggggtttagtggcatttgtgaaggaggctgaggctttgattgagcgtggacaggctgagcgacttcgaggggaagaagcccgggtaactcagctgatccgtggctttggtagttcctggaaatcatcagtggaatctctgagtcaggatgtaatgcggagtttcaccaacttcagaaatggcaccagtatcattcagggagcgctgacccagctgatccagctctatcatcgcttccaccgggtgctgtcccagccgcagctccgagccctccctgcccgggctgagctcatcaacattcaccaccttatggtggagctcaagaagcataagcccaacttctgatgtgccagaaaccgccctgagatctgccggtcatctccatggacttctgcaccccattccatacccttcttcacctggggtaccccttccagttttccccttgcttcccaggcccttgacatggcttacctgccttcactcccagcaccttgcccaacaggataagctggatccccttggccttctgaatatcccagtgtcttcaggtttcccaagaccacttccctgtgggcttccaaaatggcctttatcatttctccagtctgtcaccctcctttcctgctcccatacacccaaggcttgtttcttcccctgtaaaaaccactgcctcaatctctggttcactcaactagtcaccatgtcctgaggcatgaagcctcctcagctcttggaattgctggcaaggggtgactgcctctgagtcattgtgtttttcagagtgatttcttttctgtagctttttgacctaagatctcagcaatttgaacactaacctctcccctcctggctcaagaattactccgaagtcagtctgcagaaaataaatatttagtatgacatgacactta

SEQ ID NO: 198683 - DNA, 2960 bp, Homo sapiens
  Payload ID: 19211
  Gene Name: vacuolar protein sorting 52 homolog (S. cerevisiae)
  Uniprot ID: Q8N1B4
  ENST ID: ENST00000441058
  CDS Start-End: 220-2391
agcgaaggttccggggctagtttgtgtttcagacttccatatttccatttgcagttgggtgaagtggttagagctgaaaggggacagctggagtcaaacaacttaactcaaatatctgggaacgatttcgcgctgaggaagaccctttgggacttgtagctccactccggggaacggactcgccgggactgacagttgccggaagtgaggctgcggggaatggccgccgctgcgaccatggcggctgcggcccgggaactggtgttgcgggctgggacctcagatatggaggaggaagagggcccgctggcgggtggtcctgggctccaggaaccactgcaacttggggagttggatatcacttctgatgaattcatcctggatgaagtggatgttcacattcaggcaaatctggaggatgagttagtaaaggaagctcttaaaacgggtgtagatctccgtcactattcaaagcaagttgagctggagctacagcagattgaacagaaatccattcgggattatattcaagagagtgagaatatagcatctctacacaaccagatcacagcctgtgatgctgtcctggagcgaatggagcagatgttgggagcttttcagagtgacctcagctccatcagctctgagatccggacactgcaggaacagtcaggagccatgaacattcgacttcgaaatcgccaggcagttcgggggaaacttggggagcttgttgatggtctggtggtgccttctgctctggtcacggcaattctggaggctccagtgacagagcccaggttcttggagcagctacaggagctggatgccaaggcagccgcagtcagagagcaggaagctagaggcacagcagcctgcgcagatgtcagaggcgtgctcgatcggctccgggtcaaggcagtgacgaagatccgagagtttatcctccagaagatttattccttcaggaaacccatgaccaactatcagatcccccagacggccctgctgaagtacaggttcttctatcagtttctgctgggcaatgaacgagcaacagcaaaggagatcagggatgaatatgtggagacgctgagcaagatttacctgtcttactaccgctcttacctggggcggctcatgaaggtgcagtatgaggaagtcgctgagaaagatgatctaatgggtgtggaagatacagcaaagaaaggattcttctcaaagccatcgctccgcagcaggaacaccattttcaccctaggaacccgcggctctgtcatctcccccactgaacttgaggcccccatcctggtgcctcacacagcgcagcgcggagagcagaggtatccatttgaggccctcttccgcagccagcactacgccctcctagacaattcctgccgcgaataccttttcatctgtgaattttttgttgtgtctggcccagctgcacacgacctgttccatgctgtcatgggccgtacactcagcatgaccctgaaacacctggattcttatctagctgactgctacgatgccattgctgtttttctctgtatccacattgttctccggttccgtaacattgcagcaaagagggatgttcctgccctggacaggtactgggaacaggtgcttgccttgctatggccacggtttgaactgatcctggagatgaatgttcagagcgtccgaagcactgacccccagcgcctaggggggttggatactcggccccactatatcacacgccgctatgcagagttctcctccgctcttgtcagtatcaaccagacaattcctaatgaacggaccatgcaattgctgggacagctgcaggtggaggtggagaattttgtcctccgagtggcagctgagttctcctcaaggaaggagcagcttgtgtttctgatcaacaactatgacatgatgctgggtgtgctgatggagcgggctgcagatgacagcaaagaggttgagagcttccagcagctgctcaatgctcggacacaggaattcattgaagagttgctgtctcccccttttgggggtttagtggcatttgtgaaggaggctgaggctttgattgagcgtggacaggctgagcgacttcgaggggaagaagcccgggtaactcagctgatccgtggctttggtagttcctggaaatcatcagtggaatctctgagtcaggatgtaatgcggagtttcaccaacttcagaaatggcaccagtatcattcagggagcgctgacccagctgatccagctctatcatcgcttccaccgggtgctgtcccagccgcagctccgagccctccctgcccgggctgagctcatcaacattcaccaccttatggtggagctcaagaagcataagcccaacttctgatgtgccagaaaccgccctgagatctgccggtcatctccatggacttctgcaccccattccatacccttcttcacctggggtaccccttccagttttccccttgcttcccaggcccttgacatggcttacctgccttcactcccagcaccttgcccaacaggataagctggatccccttggccttctgaatatcccagtgtcttcaggtttcccaagaccacttccctgtgggcttccaaaatggcctttatcatttctccagtctgtcaccctcctttcctgctcccatacacccaaggcttgtttcttcccctgtaaaaaccactgcctcaatctctggttcactcaactagtcaccatgtcctgaggcatgaagcctcctcagctcttggaattgctggcaaggggtgactgcctctgagtcattgtgtttttcaaagtgatttcttttctgtagctttttgacctaagatctcagcaatttgaacactaacctctcccctcctggctcaagaattactccgaagtcagtctgcagaaaataaatatttagtatgacatgacactta

SEQ ID NO: 198684 - DNA, 2960 bp, Homo sapiens; identical to SEQ ID NO: 198683
  Payload ID: 19211
  Gene Name: vacuolar protein sorting 52 homolog (S. cerevisiae)
  Uniprot ID: Q8N1B4
  ENST ID: ENST00000448042
  CDS Start-End: 220-2391

SEQ ID NO: 198685 - DNA, 947 bp, Homo sapiens
  Payload ID: 19211
  Gene Name: vacuolar protein sorting 52 homolog (S. cerevisiae)
  ENST ID: ENST00000421357
  CDS Start-End: 1-378
gaattcattgaagagttgctgtctcccccttttgggggtttagtggcatttgtgaaggaggctgaggctttgattgagcgtggacaggctgagcgacttcgaggggaagaagcccgggtaactcagctgatccgtggctttggtagttcctggaaatcatcagtggaatctctgagtcaggatgtaatgcggagtttcaccaacttcagaaatggcaccagtatcattcagggagcgctgacccagctgatccagctctatcatcgcttccaccgggtgctgtcccagccgcagctccgagccctccctgcccgggctgagctcatcaacattcaccaccttatggtggagctcaagaagcataagcccaacttctgatgtgccagaaaccgccctgagatctgccggtcatctccatggacttctgcaccccattccatacccttcttcacctggggtaccccttccagttttccccttgcttcccaggcccttgacatggcttacctgccttcactcccagcaccttgcccaacaggataagctggatccccttggccttctgaatatcccagtgtcttcaggtttcccaagaccacttccctgtgggcttccaaaatggcctttatcatttctccagtctgtcaccctcctttcctgctcccatacacccaaggcttgtttcttcccctgtaaaaaccactgcctcaatctctggttcactcaactagtcaccatgtcctgaggcatgaagcctcctcagctcttggaattgctggcaaggggtgactgcctctgagtcattgtgtttttcaaagtgatttcttttctgtagctttttgacctaagatctcagcaatttgaacactaacctctcccctcctggctcaagaattactccgaagtcagtctgcagaaaataaatatttagtatgacatgacactta

SEQ ID NO: 198686 - DNA, 2960 bp, Homo sapiens
  Payload ID: 19211
  Gene Name: vacuolar protein sorting 52 homolog (S. cerevisiae)
  Uniprot ID: Q8N1B4
  ENST ID: ENST00000443860
  CDS Start-End: 220-2391
agcgaaggttccggggctagtttgtgtttcagacttccatatttccatttgcagttgggtgaagtggttagagctgaaaggggacagctggagtcaaacaacttaactcaaatatctgggaacgatttcgcgctgaggaagaccctttgggacttgtagctccactccggggaacggactcgccgggactgacagttgccggaagtgaggctgcggggaatggccgccgctgcgaccatggcggctgcggcccgggaactggtgttgcgggctgggacctcagatatggaggaggaagagggcccgctggcgggtggtcctgggctccaggaaccactgcaacttggggagttggatatcacttctgatgaattcatcctggatgaagtggatgttcacattcaggcaaatctggaggatgagttagtaaaggaagctcttaaaacgggtgtagatctccgtcactattcaaagcaagttgagctggagctacagcagattgaacagaaatccattcgggattatattcaagagagtgagaatatagcatctctacacaaccagatcacagcctgtgatgctgtcctggagcgaatggagcagatgttgggagcttttcagagtgacctcagctccatcagctctgagatccggacactgcaggaacagtcaggagccatgaacattcgacttcgaaatcgccaggcagttcgggggaaacttggggagcttgttgatggtctggtggtgccttctgctctggtcacggcaattctggaggctccagtgacagagcccaggttcttggagcagctacaggagctggatgccaaggcagccgcagtcagagagcaggaagctagaggcacagcagcctgcgcagatgtcagaggcgtgctcgatcggctccgggtcaaggcagtgacgaagatccgagagtttatcctccagaagatttattccttcaggaaacccatgaccaactatcagatcccccagacggccctgctgaagtacaggttcttctatcagtttctgttgggcaatgaacgagcaacagcaaaggagatcagggatgaatatgtggagacgctgagcaagatttacctgtcttactaccgctcttacctggggcggctcatgaaggtgcagtatgaggaagtcgctgagaaagatgatctaatgggtgtggaagatacagcaaagaaaggattcttctcaaagccatcgctccgcagcaggaacaccattttcaccctaggaacccgcggctctgtcatctcccccactgaacttgaggcccccatcctggtgcctcacacagcgcagcgcggagagcagaggtatccatttgaggccctcttccgcagccagcactacgccctcctagacaattcctgccgcgaataccttttcatctgtgaattttttgttgtgtctggcccagctgcacacgacctgttccatgctgtcatgggccgtacactcagcatgaccctgaaacacctggattcttatctagctgactgctacgatgccattgctgtttttctctgtatccacattgttctccggttccgtaacattgcagcaaagagggatgttcctgccctggacaggtactgggaacaggtgcttgccttgctatggccacggtttgaactgatcctggagatgaatgttcagagcgtccgaagcactgacccccagcgcctaggggggttggatactcggccccactatatcacacgccgctatgcagagttctcctccgctcttgtcagtatcaaccagacaattcctaatgaacggaccatgcaattgctgggacagctgcaggtggaggtggagaattttgtcctccgagtggcagctgagttctcctcaaggaaggagcagcttgtgtttctgatcaacaactatgacatgatgctgggtgtgctgatggagcgggctgcagatgacagcaaagaggttgagagcttccagcagctgctcaatgctcggacacaggaattcattgaagagttgctgtctcccccttttgggggtttagtggcatttgtgaaggaggctgaggctttgattgagcgtggacaggctgagcgacttcgaggggaagaagcccgggtaactcagctgatccgtggctttggtagttcctggaaatcatcagtggaatctctgagtcaggatgtaatgcggagtttcaccaacttcagaaatggcaccagtatcattcagggagcgctgacccagctgatccagctctatcatcgcttccaccgggtgctgtcccagccgcagctccgagccctccctgcccgggctgagctcatcaacattcaccaccttatggtggagctcaagaagcataagcccaacttctgatgtgccagaaaccgccctgagatctgccggtcatctccatggacttctgcaccccattccatacccttcttcacctggggtaccccttccagttttccccttgcttcccaggcccttgacatggcttacctgccttcactcccagcaccttgcccaacaggataagctggatccccttggccttctgaatatcccagtgtcttcaggtttcccaagaccacttccctgtgggcttccaaaatggcctttatcatttctccagtctgtcaccctcctttcctgctcccatacacccaaggcttgtttcttcccctgtaaaaaccactgcctcaatctctggttcactcaactagtcaccatgtcctgaggcatgaagcctcctcagctcttggaattgctggcaaggggtgactgcctctgagtcattgtgtttttcaaagtgatttcttttctgtagctttttgacctaagatctcagcaatttgaacactaacctctcccctcctggctcaagaattactccgaagtcagtctgcagaaaataaatatttagtatgacatgacactta

SEQ ID NO: 198687 - DNA, 2960 bp, Homo sapiens; identical to SEQ ID NO: 198686
  Payload ID: 19211
  Gene Name: vacuolar protein sorting 52 homolog (S. cerevisiae)
  Uniprot ID: Q8N1B4
  ENST ID: ENST00000428608
  CDS Start-End: 220-2391

SEQ ID NO: 198688 - DNA, 2960 bp, Homo sapiens; identical to SEQ ID NO: 198683
  Payload ID: 19211
  Gene Name: vacuolar protein sorting 52 homolog (S. cerevisiae)
  Uniprot ID: Q8N1B4
  ENST ID: ENST00000445902
  CDS Start-End: 220-2391

SEQ ID NO: 198689 - DNA, 3331 bp, Homo sapiens
  Payload ID: 19211
  Gene Name: vacuolar protein sorting 52 homolog (S. cerevisiae)
  ENST ID: ENST00000476725
  CDS Start-End: 202-468
agtttgtgtttcagacttccatatttccatttgcagttgggtgaagtggttagagctgaaaggggacagctggagtcaaacaacttaactcaaatatctgggaacgatttcgcgctgaggaagaccctttgggacttgtagctccactccggggaacggactcgccgggactgacagttgccggaagtgaggctgcggggaatggccgccgctgcgaccatggcggctgcggcccgggaactggtgttgcgggctgggacctcagatatggaggaggaagagggcccgctggtgagagcgcggagctgtttctcctccgtagttccggtgctcctagcttcagaaagacctgagctgggtttaggcacaagggtgggaacttggctgctacccgtgatattacctgtttggctccccgtacccttccctgtgatcagacccgaccctgagcgggaccctagtggctgaaactcatgttctggggcacaaaatttcaacttcactccacattttggggtagagtcacgaagtagtatagtgtaaaggttaagaacatggcctctgaagccagactgcctgagttctatctctgccacttacacgctgtgtgcccttgggcaagttaaccagcttctctgtgccatcatttctcacacctttaaggtgaggaagatagaacctattgtatacatcgtcgttaggattagatgaatatgtgtaagattgcacctggcatgcaggcgggtggtcctgggctccaggaaccactgcaacttggggagttggatatcacttctgatgaattcatcctggatgaagtggatgggtgtagatctccgtcactattcaaagcaagttgagctggagctacagcagattgaacagaaatccattcgggattatattcaagagagtgagaatatagcatctctacacaaccagatcacagcctgtgatgctgtcctggagcgaatggagcagatgttgggagcttttcagagtgacctcagctccatcagctctgagatccggacactgcaggaacagtcaggagccatgaacattcgacttcgaaatcgccaggcagttcgggggaaacttggggagcttgttgatggtctggtggtgccttctgctctggtcacggcaattctggaggctccagtgacagagcccaggttcttggagcagctacaggagctggatgccaaggcagccgcagtcagagagcaggaagctagaggcacagcagcctgcgcagatgtcagaggcgtgctcgatcggctccgggtcaaggcagtgacgaagatccgagagtttatcctccagaagatttattccttcaggaaacccatgaccaactatcagatcccccagacggccctgctgaagtacaggttcttctatcagtttctgttgggcaatgaacgagcaacagcaaaggagatcagggatgaatatgtggagacgctgagcaagatttacctgtcttactaccgctcttacctggggcggctcatgaaggtgcagtatgaggaagtcgctgagaaagatgatctaatgggtgtggaagatacagcaaagaaaggattcttctcaaagccatcgctccgcagcaggaacaccattttcaccctaggaacccgcggctctgtcatctcccccactgaacttgaggcccccatcctggtgcctcacacagcgcagcgcggagagcagaggtatccatttgaggccctcttccgcagccagcactacgccctcctagacaattcctgccgcgaataccttttcatctgtgaattttttgttgtgtctggcccagctgcacacgacctgttccatgctgtcatgggccgtacactcagcatgaccctgaaacacctggattcttatctagctgactgctacgatgccattgctgtttttctctgtatccacattgttctccggttccgtaacattgcagcaaagagggatgttcctgccctggacaggtactgggaacaggtgcttgccttgctatggccacggtttgaactgatcctggagatgaatgttcagagcgtccgaagcactgacccccagcgcctaggggggttggatactcggccccactatatcacacgccgctatgcagagttctcctccgctcttgtcagtatcaaccagacaattcctaatgaacggaccatgcaattgctgggacagctgcaggtggaggtggagaattttgtcctccgagtggcagctgagttctcctcaaggaaggagcagcttgtgtttctgatcaacaactatgacatgatgctgggtgtgctgatggagcgggctgcagatgacagcaaagaggttgagagcttccagcagctgctcaatgctcggacacaggaattcattgaagagttgctgtctcccccttttgggggtttagtggcatttgtgaaggaggctgaggctttgattgagcgtggacaggctgagcgacttcgaggggaagaagcccgggtaactcagctgatccgtggctttggtagttcctggaaatcatcagtggaatctctgagtcaggatgtaatgcggagtttcaccaacttcagaaatggcaccagtatcattcagggagcgctgacccagctgatccagctctatcatcgcttccaccgggtgctgtcccagccgcagctccgagccctccctgcccgggctgagctcatcaacattcaccaccttatggtggagctcaagaagcataagcccaacttctgatgtgccagaaaccgccctgagatctgccggtcatctccatggacttctgcaccccattccatacccttcttcacctggggtaccccttccagttttccccttgcttcccaggcccttgacatggcttacctgccttcactcccagcaccttgcccaacaggataagctggatccccttggccttctgaatatcccagtgtcttcaggtttcccaagaccacttccctgtgggcttccaaaatggcctttatcatttctccagtctgtcaccctcctttcctgctcccatacacccaaggcttgtttcttcccctgtaaaaaccactgcctcaatctctggttcactcaactagtcaccatgtcctgaggcatgaagcctcctcagctcttggaattgctggcaaggggtgactgcctctgagtcattgtgtttttcaaagtgatttcttttctgtagctttttgacctaagatctcagcaatttgaacactaacctctcccctcctggctcaagaattactccgaagtcagtctgcagaaaataaatatttagtatgacatg

SEQ ID NO: 198690 - DNA, 3338 bp, Homo sapiens
  Payload ID: 19211
  Gene Name: vacuolar protein sorting 52 homolog (S. cerevisiae)
  ENST ID: ENST00000478392
  CDS Start-End: 202-468
agtttgtgtttcagacttccatatttccatttgcagttgggtgaagtggttagagctgaaaggggacagctggagtcaaacaacttaactcaaatatctgggaacgatttcgcgctgaggaagaccctttgggacttgtagctccactccggggaacggactcgccgggactgacagttgccggaagtgaggctgcggggaatggccgccgctgcgaccatggcggctgcggcccgggaactggtgttgcgggctgggacctcagatatggaggaggaagagggcccgctggtgagagcgcggagctgtttctcctccgtagttccggtgctcctagcttcagaaagacctgagctgggtttaggcacaagggtgggaacttggctgctacccgtgatattacctgtttggctccccgtacccttccctgtgatcagacccgaccctgagcgggaccctagtggctgaaactcatgttctggggcacaaaatttcaacttcactccacattttggggtagagtcacgaagtagtatagtgtaaaggttaagaacatggcctctgaagccagactgcctgagttctatctctgccacttacacgctgtgtgcccttgggcaagttaaccagcttctctgtgccatcatttctcacacctttaaggtgaggaagatagaacctattgtatacatcgtcgttaggattagatgaatatgtgtaagattgcacctggcatgcaggcgggtggtcctgggctccaggaaccactgcaacttggggagttggatatcacttctgatgaattcatcctggatgaagtggatgggtgtagatctccgtcactattcaaagcaagttgagctggagctacagcagattgaacagaaatccattcgggattatattcaagagagtgagaatatagcatctctacacaaccagatcacagcctgtgatgctgtcctggagcgaatggagcagatgttgggagcttttcagagtgacctcagctccatcagctctgagatccggacactgcaggaacagtcaggagccatgaacattcgacttcgaaatcgccaggcagttcgggggaaacttggggagcttgttgatggtctggtggtgccttctgctctggtcacggcaattctggaggctccagtgacagagcccaggttcttggagcagctacaggagctggatgccaaggcagccgcagtcagagagcaggaagctagaggcacagcagcctgcgcagatgtcagaggcgtgctcgatcggctccgggtcaaggcagtgacgaagatccgagagtttatcctccagaagatttattccttcaggaaacccatgaccaactatcagatcccccagacggccctgctgaagtacaggttcttctatcagtttctgttgggcaatgaacgagcaacagcaaaggagatcagggatgaatatgtggagacgctgagcaagatttacctgtcttactaccgctcttacctggggcggctcatgaaggtgcagtatgaggaagtcgctgagaaagatgatctaatgggtgtggaagatacagcaaagaaaggattcttctcaaagccatcgctccgcagcaggaacaccattttcaccctaggaacccgcggctctgtcatctcccccactgaacttgaggcccccatcctggtgcctcacacagcgcagcgcggagagcagaggtatccatttgaggccctcttccgcagccagcactacgccctcctagacaattcctgccgcgaataccttttcatctgtgaattttttgttgtgtctggcccagctgcacacgacctgttccatgctgtcatgggccgtacactcagcatgaccctgaaacacctggattcttatctagctgactgctacgatgccattgctgtttttctctgtatccacattgttctccggttccgtaacattgcagcaaagagggatgttcctgccctggacaggtactgggaacaggtgcttgccttgctatggccacggtttgaactgatcctggagatgaatgttcagagcgtccgaagcactgacccccagcgcctaggggggttggatactcggccccactatatcacacgccgctatgcagagttctcctccgctcttgtcagtatcaaccagacaattcctaatgaacggaccatgcaattgctgggacagctgcaggtggaggtggagaattttgtcctccgagtggcagctgagttctcctcaaggaaggagcagcttgtgtttctgatcaacaactatgacatgatgctgggtgtgctgatggagcgggctgcagatgacagcaaagaggttgagagcttccagcagctgctcaatgctcggacacaggaattcattgaagagttgctgtctcccccttttgggggtttagtggcatttgtgaaggaggctgaggctttgattgagcgtggacaggctgagcgacttcgaggggaagaagcccgggtaactcagctgatccgtggctttggtagttcctggaaatcatcagtggaatctctgagtcaggatgtaatgcggagtttcaccaacttcagaaatggcaccagtatcattcagggagcgctgacccagctgatccagctctatcatcgcttccaccgggtgctgtcccagccgcagctccgagccctccctgcccgggctgagctcatcaacattcaccaccttatggtggagctcaagaagcataagcccaacttctgatgtgccagaaaccgccctgagatctgccggtcatctccatggacttctgcaccccattccatacccttcttcacctggggtaccccttccagttttccccttgcttcccaggcccttgacatggcttacctgccttcactcccagcaccttgcccaacaggataagctggatccccttggccttctgaatatcccagtgtcttcaggtttcccaagaccacttccctgtgggcttccaaaatggcctttatcatttctccagtctgtcaccctcctttcctgctcccatacacccaaggcttgtttcttcccctgtaaaaaccactgcctcaatctctggttcactcaactagtcaccatgtcctgaggcatgaagcctcctcagctcttggaattgctggcaaggggtgactgcctctgagtcattgtgtttttcaaagtgatttcttttctgtagctttttgacctaagatctcagcaatttgaacactaacctctcccctcctggctcaagaattactccgaagtcagtctgcagaaaataaatatttagtatgacatgacactta

SEQ ID NO: 198691 - DNA, 3338 bp, Homo sapiens
  Payload ID: 19211
  Gene Name: vacuolar protein sorting 52 homolog (S. cerevisiae)
  ENST ID: ENST00000497240
  CDS Start-End: 202-468
agtttgtgtttcagacttccatatttccatttgcagttgggtgaagtggttagagctgaaaggggacagctggagtcaaacaacttaactcaaatatctgggaacgatttcgcgctgaggaagaccctttgggacttgtagctccactccggggaacggactcgccgggactgacagttgccggaagtgaggctgcggggaatggccgccgctgcgaccatggcggctgcggcccgggaactggtgttgcgggctgggacctcagatatggaggaggaagagggcccgctggtgagagcgcggagctgtttctcctccgtagttccggtgctcctagcttcagaaagacctgagctgggtttaggcacaagggtgggaacttggctgctacccgtgatattacctgtttggctccccgtacccttccctgtgatcagacccgaccctgagcgggaccctagtggctgaaactcatgttctggggcacaaaatttcaacttcactccacattttggggtagagtcacgaagtagtatagtgtaaaggttaagaacatggcctctgaagccagactgcctgagttctatctctgccacttacacgctgtgtgcccttgggcaagttaaccagcttctctgtgccatcatttctcacacctttaaggtgaggaagatagaacctattgtatacaacgtcgttaggattagatgaatatgtgtaagattgcacctggcatgcaggcgggtggtcctgggctccaggaaccactgcaacttggggagttggatatcacttctgatgaattcatcctggatgaagtggatgggtgtagatctccgtcactattcaaagcaagttgagctggagctacagcagattgaacagaaatccattcgggattatattcaagagagtgagaatatagcatctctacacaaccagatcacagcctgtgatgctgtcctggagcgaatggagcagatgttgggagcttttcagagtgacctcagctccatcagctctgagatccggacactgcaggaacagtcaggagccatgaacattcgacttcgaaatcgccaggcagttcgggggaaacttggggagcttgttgatggtctggtggtgccttctgctctggtcacggcaattctggaggctccagtgacagagcccaggttcttggagcagctacaggagctggatgccaaggcagccgcagtcagagagcaggaagctagaggcacagcagcctgcgcagatgtcagaggcgtgctcgatcggctccgggtcaaggcagtgacgaagatccgagagtttatcctccagaagatttattccttcaggaaacccatgaccaactatcagatcccccagacggccctgctgaagtacaggttcttctatcagtttctgctgggcaatgaacgagcaacagcaaaggagatcagggatgaatatgtggagacgctgagcaagatttacctgtcttactaccgctcttacctggggcggctcatgaaggtgcagtatgaggaagtcgctgagaaagatgatctaatgggtgtggaagatacagcaaagaaaggattcttctcaaagccatcgctccgcagcaggaacaccattttcaccctaggaacccgcggctctgtcatctcccccactgaacttgaggcccccatcctggtgcctcacacagcgcagcgcggagagcagaggtatccatttgaggccctcttccgcagccagcactacgccctcctagacaattcctgccgcgaataccttttcatctgtgaattttttgttgtgtctggcccagctgcacacgacctgttccatgctgtcatgggccgtacactcagcatgaccctgaaacacctggattcttatctagctgactgctacgatgccattgctgtttttctctgtatccacattgttctccggttccgtaacattgcagcaaagagggatgttcctgccctggacaggtactgggaacaggtgcttgccttgctatggccacggtttgaactgatcctggagatgaatgttcagagcgtccgaagcactgacccccagcgcctaggggggttggatactcggccccactatatcacacgccgctatgcagagttctcctccgctcttgtcagtatcaaccagacaattcctaatgaacggaccatgcaattgctgggacagctgcaggtggaggtggagaattttgtcctccgagtggcagctgagttctcctcaaggaaggagcagcttgtgtttctgatcaacaactatgacatgatgctgggtgtgctgatggagcgggctgcagatgacagcaaagaggttgagagcttccagcagctgctcaatgctcggacacaggaattcattgaagagttgctgtctcccccttttgggggtttagtggcatttgtgaaggaggctgaggctttgattgagcgtggacaggctgagcgacttcgaggggaagaagcccgggtaactcagctgatccgtggctttggtagttcctggaaatcatcagtggaatctctgagtcaggatgtaatgcggagtttcaccaacttcagaaatggcaccagtatcattcagggagcgctgacccagctgatccagctctatcatcgcttccaccgggtgctgtcccagccgcagctccgagccctccctgcccgggctgagctcatcaacattcaccaccttatggtggagctcaagaagcataagcccaacttctgatgtgccagaaaccgccctgagatctgccggtcatctccatggacttctgcaccccattccatacccttcttcacctggggtaccccttccagttttccccttgcttcccaggcccttgacatggcttacctgccttcactcccagcaccttgcccaacaggataagctggatccccttggccttctgaatatcccagtgtcttcaggtttcccaagaccacttccctgtgggcttccaaaatggcctttatcatttctccagtctgtcaccctcctttcctgctcccatacacccaaggcttgtttcttcccctgtaaaaaccactgcctcaatctctggttcactcaactagtcaccatgtcctgaggcatgaagcctcctcagctcttggaattgctggcaaggggtgactgcctctgagtcattgtgtttttcagagtgatttcttttctgtagctttttgacctaagatctcagcaatttgaacactaacctctcccctcctggctcaagaattactccgaagtcagtctgcagaaaataaatatttagtatgacatgacactta

SEQ ID NO: 198692 - DNA, 947 bp, Homo sapiens; identical to SEQ ID NO: 198685
  Payload ID: 19211
  Gene Name: vacuolar protein sorting 52 homolog (S. cerevisiae)
  ENST ID: ENST00000462479
  CDS Start-End: 1-378

SEQ ID NO: 198693 - DNA, 3338 bp, Homo sapiens
  Payload ID: 19211
  Gene Name: vacuolar protein sorting 52 homolog (S. cerevisiae)
  ENST ID: ENST00000461476
  CDS Start-End: 202-468
agtttgtgtttcagacttccatatttccatttgcagttgggtgaagtggttagagctgaaaggggacagctggagtcaaacaacttaactcaaatatctgggaacgatttcgcgctgaggaagaccctttgggacttgtagctccactccggggaacggactcgccgggactgacagttgccggaagtgaggctgcggggaatggccgccgctgcgaccatggcggctgcggcccgggaactggtgttgcgggctgggacctcagatatggaggaggaagagggcccgctggtgagagcgcggagctgtttctcctccgtagttccggtgctcctagcttcagaaagacctgagctgggtttaggcacaagggtgggaacttggctgctacccgtgatattacctgtttggctccccgtacccttccctgtgatcagacccgaccctgagcgggaccctagtggctgaaactcatgttctggggcacaaaatttcaacttcactccacattttggggtagagtcacgaagtagtatagtgtaaaggttaagaacatggcctctgaagccagactgcctgagttctatctctgccacttacacgctgtgtgcccttgggcaagttaaccagcttctctgtgccatcatttctcacacctttaaggtgaggaagatagaacctattgtatacatcgtcgttaggattagatgaatatgtgtaagattgcacctggcatgcaggcgggtggtcctgggctccaggaaccactgcaacttggggagttggatatcacttctgatgaattcatcctggatgaagtggatgggtgtagatctccgtcactattcaaagcaagttgagctggagctacagcagattgaacagaaatccattcgggattatattcaagagagtgagaatatagcatctctacacaaccagatcacagcctgtgatgctgtcctggagcgaatggagcagatgttgggagcttttcagagtgacctcagctccatcagctctgagatccggacactgcaggaacagtcaggagccatgaacattcgacttcgaaatcgccaggcagttcgggggaaacttggggagcttgttgatggtctggtggtgccttctgctctggtcacggcaattctggaggctccagtgacagagcccaggttcttggagcagctacaggagctggatgccaaggcagccgcagtcagagagcaggaagctagaggcacagcagcctgcgcagatgtcagaggcgtgctcgatcggctccgggtcaaggcagtgacgaagatccgagagtttatcctccagaagatttattccttcaggaaacccatgaccaactatcagatcccccagacggccctgctgaagtacaggttcttctatcagtttctgctgggcaatgaacgagcaacagcaaaggagatcagggatgaatatgtggagacgctgagcaagatttacctgtcttactaccgctcttacctggggcggctcatgaaggtgcagtatgaggaagtcgctgagaaagatgatctaatgggtgtggaagatacagcaaagaaaggattcttctcaaagccatcgctccgcagcaggaacaccattttcaccctaggaacccgcggctctgtcatctcccccactgaacttgaggcccccatcctggtgcctcacacagcgcagcgcggagagcagaggtatccatttgaggccctcttccgcagccagcactacgccctcctagacaattcctgccgcgaataccttttcatctgtgaattttttgttgtgtctggcccagctgcacacgacctgttccatgctgtcatgggccgtacactcagcatgaccctgaaacacctggattcttatctagctgactgctacgatgccattgctgtttttctctgtatccacattgttctccggttccgtaacattgcagcaaagagggatgttcctgccctggacaggtactgggaacaggtgcttgccttgctatggccacggtttgaactgatcctggagatgaatgttcagagcgtccgaagcactgacccccagcgcctaggggggttggatactcggccccactatatcacacgccgctatgcagagttctcctccgctcttgtcagtatcaaccagacaattcctaatgaacggaccatgcaattgctgggacagctgcaggtggaggtggagaattttgtcctccgagtggcagctgagttctcctcaaggaaggagcagcttgtgtttctgatcaacaactatgacatgatgctgggtgtgctgatggagcgggctgcagatgacagcaaagaggttgagagcttccagcagctgctcaatgctcggacacaggaattcattgaagagttgctgtctcccccttttgggggtttagtggcatttgtgaaggaggctgaggctttgattgagcgtggacaggctgagcgacttcgaggggaagaagcccgggtaactcagctgatccgtggctttggtagttcctggaaatcatcagtggaatctctgagtcaggatgtaatgcggagtttcaccaacttcagaaatggcaccagtatcattcagggagcgctgacccagctgatccagctctatcatcgcttccaccgggtgctgtcccagccgcagctccgagccctccctgcccgggctgagctcatcaacattcaccaccttatggtggagctcaagaagcataagcccaacttctgatgtgccagaaaccgccctgagatctgccggtcatctccatggacttctgcaccccattccatacccttcttcacctggggtaccccttccagttttccccttgcttcccaggcccttgacatggcttacctgccttcactcccagcaccttgcccaacaggataagctggatccccttggccttctgaatatcccagtgtcttcaggtttcccaagaccacttccctgtgggcttccaaaatggcctttatcatttctccagtctgtcaccctcctttcctgctcccatacacccaaggcttgtttcttcccctgtaaaaaccactgcctcaatctctggttcactcaactagtcaccatgtcctgaggcatgaagcctcctcagctcttggaattgctggcaaggggtgactgcctctgagtcattgtgtttttcaaagtgatttcttttctgtagctttttgacctaagatctcagcaatttgaacactaacctctcccctcctggctcaagaattactccgaagtcagtctgcagaaaataaatatttagtatgacatgacactta

SEQ ID NO: 198694 - DNA, 3338 bp, Homo sapiens; identical to SEQ ID NO: 198693
  Payload ID: 19211
  Gene Name: vacuolar protein sorting 52 homolog (S. cerevisiae)
  ENST ID: ENST00000482399
  CDS Start-End: 202-468

SEQ ID NO: 198695 - DNA, 2656 bp, Homo sapiens
  Payload ID: 19212
  Gene Name: vacuolar protein sorting 53 homolog (S. cerevisiae)
  Uniprot ID: Q5VIR6
  ENST ID: ENST00000291074
  CDS Start-End: 135-2147
ggctgacagagcggctgacggagccgggctcaccaggtcgctgccgcgagggagttgctgtgctggggcctgggtggcggctggaggcctgagttgggctcgcggcgggggtcggcagggggccgggtggcggaatgatggaggaggaggaactggagttcgtggaggagctggaagccgtgctgcagctcacgcccgaggtgcagctggccatcgagcaggtgtttccaagccaggaccctctagatcgagcagatttcaatgctgttgagtatatcaataccctgttcccaaccgagcaatctctggcgaacatagacgaagtcgtgaacaaaattaggctgaaaataaggagactggatgacaatattcgaactgttgtaagaggtcagacgaacgtggggcaggatggacggcaagtgaaagaaatcacccgtgatattaagcaattagatcacgccaaacgccacctgaccacctcaatcaccacactgaaccacctgcacatgctggcaggaggtgtcgactccctcgaagccatgaccaggcgaagacaatacggagaagttgctaatctccttcagggtgtgatgaatgtcctggagcacttccacaagtatatggggattccgcagatccggcagctttccgaaagagtgaaggctgcacagactgagttaggacagcaaatcctggcagattttgaagaagcgtttccttcccagggcaccaagagaccaggaggacccagcaatgttctacgagatgcatgtctggttgctaatattctagatcccaggatcaaacaggaaatcatcaaaaagtttattaaacagcatctgtcagagtatctggtactttttcaagaaaaccaagatgttgcctggctggacaaaatcgacagacgctatgcctggataaaacgccagcttgtggactatgaggagaaatacggccgcatgtttccacgtgagtggtgcatggctgagaggattgcggtggaattttgccatgtgacaagggcagaacttgccaagattatgcgtaccagagcgaaggaaattgaagtgaaattgcttctttttgctattcaaagaacaactaactttgaggggtttcttgcaaaacgcttctccggctgcaccctgaccgatgggaccctgaaaaagcttgagtctccacccccatctaccaatcccttcctggaagatgagccaacaccagagatggaggaactggcaacggagaaaggagatttagatcaaccaaagaagcctaaagccccagacaatccatttcatggcattgtttccaagtgttttgagcctcatctctacgtgtatatcgaatcccaagacaagaacctcggagagctgatagatcggtttgtggctgatttcaaagcccaggggccacctaagcccaacactgatgaagggggtgccgtgctccccagctgcgccgacctctttgtctactacaagaagtgcatggtgcaatgctctcagctcagtactggggagcccatgatcgccctgaccaccattttccagaagtacctccgagaatacgcctggaaaatcctctctggcaacctgcccaaaaccacaaccagcagtggaggactgactatcagcagcctcctcaaggaaaaggagggctcagaagtagccaagttcactctggaggagctctgcctcatctgtaacatcctgagcacggcagagtactgtctggccaccacccagcagctagaagaaaaactcaaagaaaaagtggatgtaagtctgattgaacgaatcaatctgactggagagatggacacgttcagcaccgtcatctccagcagtattcagctgctggttcaggatctggatgctgcctgtgatcctgccctgactgccatgagcaagatgcagtggcagaacgtggagcacgttggtgaccagagcccctacgtcacctctgtcattctgcacatcaagcagaacgtccccatcatccgtgacaacctggcttccacacgcaagtacttcactcagttctgcgttaaatttgcaaactccttcattcccaaattcatcacccacctcttcaagtgcaagccaattagcatggtgggagcagaacaggtgagatggacgtagtatcaggcatttgcctggcagcttttgttgtagatcaagcacatattcttctagtccagatctacttggcaggaataaaattgatgatgtcccctgtttggggacagtataatgactcacccggaaggtttcttaattcgttcttccatttatttttaaaaattttgtttgaacgcctactaagttctgggtgcagggtataacacagcaagcaccatggaaaggtccctgctcctagtgctcacactccaataagaagaagtggctgggccgggcacagcggctcacgctgtaaccccagcatttcgggaggcctgggcaggcagatcacctggggtaaggaatttgagagcagcctggccaacatggtgaaatcccatctctactaaaaatacaaaaattagctgggcatgggggcaggctactggggaggctgaggcaggagaatcacttgaacccgggaggtggaggttgcagtgagccgatatcacaccactgcactccagcct

SEQ ID NO: 198696 - DNA, 1903 bp, Homo sapiens
  Payload ID: 19212
  Gene Name: vacuolar protein sorting 53 homolog (S. cerevisiae)
  ENST ID: ENST00000389040
  CDS Start-End: 1-1644
atgatggaggaggaggaactggagttcgtggaggagctggaagccgtgctgcagctcacgcccgaggtgcagctggccatcgagcaggtgtttccaagccaggaccctctagatcgagcagatttcaatgctgttgagtatatcaataccctgttcccaaccgagcaatctctggcgaacatagacgaagtcgtgaacaaaattaggctgaaaataaggagactggatgacaatattcgaactgttgtaagaggtcagacgaacgtggggcaggatggacggcaagcgcttgaagaggctcagaaagctatccaacaactctttggcaaaatcaaagatatcaaagacaaagctgaaaaatcagagcaaatggtgaaagaaatcacccgtgatattaagcaattagatcacgccaaacgccacctgaccacctcaatcaccacactgaaccacctgcacatgctggcaggaggtgtcgactccctcgaagccatgaccaggcgaagacaatacggagaagttgctaatctccttcagggtgtgatgaatgtcctggagcacttccacaagtatatggggattccgcagatccggcagctttccgaaagagtgaaggctgcacagactgagttaggacagcaaatcctggcagattttgaagaagcgtttccttcccagggcaccaaggttgcctggctggacaaaatcgacagacgctatgcctggataaaacgccagcttgtggactatgaggagaaatacggccgcatgtttccacgtgagtggtgcatggctgagaggattgcggtggaattttgccatgtgacaagggcagaacttgccaagattatgcgtaccagagcgaaggaaattgaagtgaaattgcttctttttgctattcaaagaacaactaactttgaggggtttcttgcaaaacgcttctccggctgcaccctgaccgatgggaccctgaaaaagcttgagtctccacccccatctaccaatcccttcctggaagatgagccaacaccagagatggaggaactggcaacggagaaaggagatttagatcaaccaaagaagcctaaagccccagacaatccatttcatggcattgtttccaagtgttttgagcctcatctctacgtgtatatcgaatcccaagacaagaacctcggagagctgatagatcggtttgtggctgatttcaaagcccaggggccacctaagcccaacactgatgaagggggtgccgtgctccccagctgcgccgacctctttgtctactacaagaagtgcatggtgcaatgctctcagctcagtactggggagcccatgatcgccctgaccaccattttccagaagtacctccgagaatacgcctggaaaatcctctctggcaacctgcccaaaaccacaaccagcagtggaggactgactatcagcagcctcctcaaggaaaaggagggctcagaagtagccaagttcactctggaggagctctgcctcatctgtaacatcctgagcacggcagagtactgtctggccaccacccagcagctagaagaaaaactcaaagaaaaagtggatcgtcatctccagcagtattcagctgctggttcaggatctggatgctgcctgtgatcctgccctgactgccatgagcaagatgcagtggcagaacgtggagcacgttggtgaccagagcccctacgtcacctctgtcattctgcacatcaagcagaacgtccccatcatccgtgacaacctggcttccacacgcaagtacttcactcagttctgcgttaaatttgcaaactccttcattcccaaattcatcacccacctcttcaagtgcaagccaattagcatggtgggagcagaacaggtgagatggacgtag

SEQ ID NO: 198697 - DNA, 1269 bp, Homo sapiens
  Payload ID: 19212
  Gene Name: vacuolar protein sorting 53 homolog (S. cerevisiae)
  ENST ID: ENST00000401468
  CDS Start-End: 1-1269
atgatggaggaggaggaactggagttcgtggaggagctggaagccgtgctgcagctcacgcccgaggtgcagctggccatcgagcaggtgtttccaagccaggaccctctagatcgagcagatttcaatgctgttgagtatatcaataccctgttcccaaccgagcaatctctggcgaacatagacgaagtcgtgaacaaaattaggctgaaaataaggagactggatgacaatattcgaactgttgtaagaggtcagacgaacgtggggcaggatggacggcaaaaaaagcttgagtctccacccccatctaccaatcccttcctggaagatgagccaacaccagagatggaggaactggcaacggagaaaggagatttagatcaaccaaagaagcctaaagccccagacaatccatttcatggcattgtttccaagtgttttgagcctcatctctacgtgtatatcgaatcccaagacaagaacctcggagagctgatagatcggtttgtggctgatttcaaagcccaggggccacctaagcccaacactgatgaagggggtgccgtgctccccagctgcgccgacctctttgtctactacaagaagtgcatggtgcaatgctctcagctcagtactggggagcccatgatcgccctgaccaccattttccagaagtacctccgagaatacgcctggaaaatcctctctggcaacctgcccaaaaccacaaccagcagtggaggactgactatcagcagcctcctcaaggaaaaggagggctcagaagtagccaagttcactctggaggagctctgcctcatctgtaacatcctgagcacggcagagtactgtctggccaccacccagcagctagaagaaaaactcaaagaaaaagtggatgtaagtctgattgaacgaatcaatctgactggagagatggacacgttcagcaccgtcatctccagcagtattcagctgctggttcaggatctggatgctgcctgtgatcctgccctgactgccatgagcaagatgcagtggcagaacgtggagcacgttggtgaccagagcccctacgtcacctctgtcattctgcacatcaagcagaacgtccccatcatccgtgacaacctggcttccacacgcaagtacttcactcagttctgcgttaaatttgcaaactccttcattcccaaattcatcacccacctcttcaagtgcaagccaattagcatggtgggagcagaacaggtgagatggacgtag

SEQ ID NO: 198698 - DNA, 13106 bp, Homo sapiens
  Payload ID: 19212
  Gene Name: vacuolar protein sorting 53 homolog (S. cerevisiae)
  Uniprot ID: Q5VIR6
  ENST ID: ENST00000437048
  CDS Start-End: 148-2646
gaagtgccggagcggctgacagagcggctgacggagccgggctcaccaggtcgctgccgcgagggagttgctgtgctggggcctgggtggcggctggaggcctgagttgggctcgcggcgggggtcggcagggggccgggtggcggaatgatggaggaggaggaactggagttcgtggaggagctggaagccgtgctgcagctcacgcccgaggtgcagctggccatcgagcaggtgtttccaagccaggaccctctagatcgagcagatttcaatgctgttgagtatatcaataccctgttcccaaccgagcaatctctggcgaacatagacgaagtcgtgaacaaaattaggctgaaaataaggagactggatgacaatattcgaactgttgtaagaggtcagacgaacgtggggcaggatggacggcaagcgcttgaagaggctcagaaagctatccaacaactctttggcaaaatcaaagatatcaaagacaaagctgaaaaatcagagcaaatggtgaaagaaatcacccgtgatattaagcaattagatcacgccaaacgccacctgaccacctcaatcaccacactgaaccacctgcacatgctggcaggaggtgtcgactccctcgaagccatgaccaggcgaagacaatacggagaagttgctaatctccttcagggtgtgatgaatgtcctggagcacttccacaagtatatggggattccgcagatccggcagctttccgaaagagtgaaggctgcacagactgagttaggacagcaaatcctggcagattttgaagaagcgtttccttcccagggcaccaagagaccaggaggacccagcaatgttctacgagatgcatgtctggttgctaatattctagatcccaggatcaaacaggaaatcatcaaaaagtttattaaacagcatctgtcagagtatctggtactttttcaagaaaaccaagatgttgcctggctggacaaaatcgacagacgctatgcctggataaaacgccagcttgtggactatgaggagaaatacggccgcatgtttccacgtgagtggtgcatggctgagaggattgcggtggaattttgccatgtgacaagggcagaacttgccaagattatgcgtaccagagcgaaggaaattgaagtgaaattgcttctttttgctattcaaagaacaactaactttgaggggtttcttgcaaaacgcttctccggctgcaccctgaccgatgggaccctgaaaaagcttgagtctccacccccatctaccaatcccttcctggaagatgagccaacaccagagatggaggaactggcaacggagaaaggagatttagatcaaccaaagaagcctaaagccccagacaatccatttcatggcattgtttccaagtgttttgagcctcatctctacgtgtatatcgaatcccaagacaagaacctcggagagctgatagatcggtttgtggctgatttcaaagcccaggggccacctaagcccaacactgatgaagggggtgccgtgctccccagctgcgccgacctctttgtctactacaagaagtgcatggtgcaatgctctcagctcagtactggggagcccatgatcgccctgaccaccattttccagaagtacctccgagaatacgcctggaaaatcctctctggcaacctgcccaaaaccacaaccagcagtggaggactgactatcagcagcctcctcaaggaaaaggagggctcagaagtagccaagttcactctggaggagctctgcctcatctgtaacatcctgagcacggcagagtactgtctggccaccacccagcagctagaagaaaaactcaaagaaaaagtggatgtaagtctgattgaacgaatcaatctgactggagagatggacacgttcagcaccgtcatctccagcagtattcagctgctggttcaggatctggatgctgcctgtgatcctgccctgactgccatgagcaagatgcagtggcagaacgtggagcacgttggtgaccagagcccctacgtcacctctgtcattctgcacatcaagcagaacgtccccatcatccgtgacaacctggcttccacacgcaagtacttcactcagttctgcgttaaatttgcaaactccttcattcccaaattcatcacccacctcttcaagtgcaagccaattagcatggtgggagcagaacagctgctgctggacacccactcgctgaagatggtcctgctcgatctcccctccatcagctcgcaggtggtgaggaaggcacccgccagctacaccaagatcgttgtcaaaggcatgacccgggctgagatgatcctcaaggtagtgatggcccctcatgaaccgttggtggtgtttgttgacaactacatcaaacttctcacagactgcaacacagaaacctttcagaagatactggacatgaaggggctgaagaggagtgagcagagcagcatgctggaactcctgcgccagcggctccccgcaccgccctcgggggcagaaagctccggctcactgtccctgacggcgccaacaccagagcaagagtcgtcacgcatccgcaagctcgagaaactcattaaaaagagactgtagcagcagcaaggggccctttgctcctggctggagaccctcagcgcccgttccccagaagcccccaacctctcctgtgctccccggcactctcacatcgtcggtcttcaaacttcctgggacatgtgggttgttactgagtctctcccatgccctgtcttacttcctgccctaatcggagacgctgagtaagggctgggctctaagagggcgatttaggtgatctctggttcgtgaagcagaggcagcagtggaggataggtccctgagctgcccttgactcatgtagcctccccatggcagtcacaccctcttgacacgtgggccccacccgtcctttttttttttttttttttttttttttgagacagagtctcgctctgtcacccaggctggagtgcagtggcgtgatctcggctcactgcaacctccgcctcccaggttcaagcaattctcctgcctcagcctcctgagtatcggattacaggcgtgagccaccgagcccagccccttcctccatttctttactcccaccctgctcctggtttctagggaagggaaaccaggaagttcacttggaagacgtttcctaggttttctcatcagatgaagccatgggaacgcccaggaagtccatactctcaaacccctttctgcccactcaccttcaggtccacagcactttccagcgtcatctgaaatagcaaaggtgatgtgcagcatcccagtgatgtgttcctgtgttatgagaaggagtctggggttctggatgcctcaggaacagaatatggaccttaaagaccaggctgagagcctggcctggcacgcagcctgcccgccccccccgcccttcctgtccaccgcgggctctctgcagcagggcttgccgaagagactgctcccgacctctcatgtcatcctgcatccagagaatggcagcatatcaagccgttaaccctgattcactcggttcccttgaaaccaggcctcagttaaccatgaccacagctacaggcaaaccgctgctgttgctgcctgcttttgctgaagaatgatatcttgccaggcacggcggctcatgcctgtagtcgcaacactttgggagaccaaggcaggaggatcacttgagtccaggagtttgagaccagcctgggcaacatacagatgtctacaaaaataaaaatttgcaaggtgtggtggcatgcacctgtagtcccaactgctagggaggctgaggtgggcagattgcttgagctcaggagtttgagaccagtctgggcaacctggcaaaaccaaaaatacaaaaaattggctgggtgtggtggctcatgcctgtaatcacagcactttgggaggctgaggcaggtggatcacctgaggtcaggaattcgagaccagcctgcccaacatggcgaaaccctgtctcaactaaaaataaaaaaaattagccgggtgtcatggcgagtgcctgtaatcccagctactggggaggctgaggcaggagaatcacttaaacccgggaggtggaggctgcagtgagccaagatttcaccactgcactccagcctgggtgacagagcaagaccccttctcaaaaagttttcaggatagaggaaatttccttaaaatccataaaacttgtaacagccgtacagtaggaataaggtttggaaatctgcctggaaacctgatttcctcatccccaccttgtttcccaacataaccactgctctgtgcccctgccctctctgccaggctttctccccgatgccgtccagctctgatcctgagtgtcatttcttcatcggcttccaggctgtccttgctagctggtttgactctcacgcatcaagcgtctcaaatttgagaatgcggaggagaaaagaagtgttgcgagaaggagatgcggccttcagttgaggtctattaggaaaagattccaaataagacaagggcggggggcggcagtcgggagagcccccaggaagccctgtagatgcccccaccccagcccatggagttgctatggttaagcagcctgagccgtacagttgaaaaggggcggtggggcccatctccaaatagcacagccagttcagccgtctgtcctcaacccaggagagctgggaaagccagtggactcctgcacctggttcttgtcactcctggcgtttgtgtacagatcaccacttctctttttggttcattgttgaggagtcgttttccggacggctccatcacagcattgagctatcaagctgctgttttccacagttggtggtcacagccagggaagttgctgtcttgatttgttacattgtcagtaatccccaaggaaccaatggatgtcagtaggagtttctgttaaatgtctccttgatggggactcagtactgtgtagagacgctgtgtttctcttctgggggtgtgcatcagaaccactggggccttttaaaatctacagatgccggccgggcgccgtggctcacgcctggaatcccagcacttggggaggctgaggcgggcggatcacaagcgcaggaaattgagaccatccttgccaatatggtgaaaccccatctctacaaaaaatacaaaaattaccggggtgtggtggcgtgcacacctcccagctacttgggaggctgaggcaggagaatcgcttgaacccgggaggcaaagattgcagtgagccgagatcacgccactgcactccagcctggcgacagagtgagactctatctcaaaacaaacaaaaaaacagatgcccggagattttgagtcagtaagtttggatggggcctggcatacaggtttaaaagttccataggtagttataacgtttacaccttgttaagaaccactgcaacagagagatttgctttatggaagggctcctgccacgcattttcatacatgtctatttttctgactctaagctaaaagtgcgccgacactacacttgagctggtgccaacgtggtgaagattctctactgataacagctttcattttaaacttgtgttgggtcaggcgcggtggctcacgcctgtaatcccagcactttgggaggccgaggtgggcggatcacatgaggtcacgagtttgagaccagcctggccaacatggcaaaatcccatctctactaaaaatacaaaaaaaaaaaaaaaaaaagcaggcaggtggcgggtgcctgtaatcccagctacttgggaggctgaggcaggggaatcagttgaatccgggaggcggaggttgcagtgagccgaggtcccgccactgcactccagcctgggagacagagtgagactcagttaaaaaaaaaagacttttggtggtggtggggaccatgcccaggattgggctctctccatactgatgaggattcttcttgttttgatgaccaacccccaagcagaagctttatttattaacatcacttcaaaaataacgtatcaaaggggcaccctaggccgggtactgtggcatcacacctgtaatgccagtgctttgagaggctgaggtgggaagattgcttgagcccaggacttcaagacaagcctgggcaacagagtgagaccccatctctattaaaaaataggccgggcatggtggctcacactggtaatcccagcactttgggaggccgaggcaggtggatcatgtgaggtcaggagttcgagaccagcctggccgacatggtgaaaccctgtctttactaaaaatacaaaattagccaggcgtggtggtgggcgcctgtaatcccagctactcaggaggctgaagcaggaggatcgcttgaacccaggaggcagaggctgcagtgagccgagatcatgccattgcactcctgcctgggtgacggagcaagactctctaaaaaataataaggtaaaaggagtacctgtggatgaaagcagcagctaacagctctgtgattcagctagacctagatattgtgcccattccttcccctcagtccattttctgtagcccctttaaaaaccaaaaaacaactttgaagtcactttgggtttaaaataaatagtggtaatttgtataatcaataaagagttcactctgctcttactgaggggacttgtctgaaagctggcttagcggtgtccaggccagagaacatcctgtgtggactcttaacaatgaaacaggagccgcaatggacaaggtgttctgatctccaaacccagctcagggattgaagctaactaccgccactccttcctctctcgaagaacaaagagccagtacccagggctctgcccacccccgagaaggggtgcctgatttcttatgtctagggtggctcctctgtgcagatcagacaggactgagagcagacaagctgagaccagcatgaccagtacagggcacgcagagcgtgggggcaggtccgaggctgctgctcgatgcagggtatgacaccaacccttcctgaattgccatcggatgaggagacctggttccctgttgaaagaatgccaggggaaatgctgcatgtgcacagctggaaatggggttccttctctaggaagagcactcggaataacctgctggaaatggggttccttccctaggaagagcactcagaataacctgctggaaatgggattccttggctaggaagagcactcagaataacctgctggaaatgggattccttggctaggaagagcactcagaataacctgctggaaatgggattccttacctaggaagagcactcggaataacctgctggaaatgggattccttacctaggaagagcactcggaataacctgctggaaatggggttccttccctaggaagagcactcggaataacctgctggaaatggggttccttccctaggaagagcactcggaataacctgctggaaatggggttccttcgctaggaagagcactcggaataacctgctggaaatgggattccttcgctaggaagagcactcggaataacctgctggaaatgggattccttcgctaggaagagcactcggaataacctgctggaaatgagattccttccctaggaagagcactcggaataacctgctggaaatgggattccttcgctaggaagagcactcggaataacctgctggaaatgagattccttcgctaggaagagcactcggaataacctgctggaaatgggattccttcgctaggaagagcactcggaataacctgctggaaatgagattccttcgctaggaagagcactcggaataacctgctggaaatgggattccttcgctaggaagagcactcggaataacctgctggaaatgggattccttcgctaggaagagcactcggaataacctgctggaaatgggattccttccctaggaagagcactcggaataacctgctggaaatgagattccttccctaggaagagcactcggaataacctgctggaaatgggattccttcgctaggaagagcactcggaataacctgctggaaatgggattccttcgctaggaagagcactcagaacaacctgcctgcttgagggtgacagcaagtgtctcacacttctcgtctactccaagtcagattcctaaaaataaaatagagctccaatgggcaatttaagcaaaagccttagaaacatggacacctgaaatgctggcctacatgaagggtacgatgacattttatatattaaataaaaattcccagtcctgttttagtattcatcagaatagcctcttggaccctcgaagttctacacctttgggagatataaatttccttaaaataaagggattgcttctttgtgtaaatagctttcattttctccatctggaagtgatttctgcctgcatgttggagcacaaaatactgcagttaattaaagcattactggatgtcatttgctagaatgtatttccttactgctgacagaaaacagaacagactctaggaaagaagtagcaagtccgtgaccctggccgctcctggtggctgcccttctcccttccctgacagtctaaggaagcaacgcgtgggagcagaatgtggccgactgagcccagtcctgacctgcccagttgcagtggagcctgtctgtaatgttgtgtaaagtgttttgcttctgacttggaaccctacttgccctgtgaatttctatcctgtgaaccttcccttctctgtccttaccgttcccatcacagcctgctcttccagtgacggccaagtgatttctctcctgcacgcatgagtccatcctgtttccttagtagctggatggacgttttgccatgaaaactctttgggaagtcttgtgtcctttagtgatttctctcctgcacgcatgagtccatcctgtttccttagtagctggttggacgtttttgccatgaaaactcttcgggaagtcctgtgtcctttcaacaggggaaaactggctgcggcccttccattaggctccaggatcattacctcgtttccattctttcttttcaacagctccccactttactagggaagccaagggatcaacctaatgagaaaagaaccttccctgtagcccacctggaagggcattgcctgccagctccttccttctcacctatgtgaacaggagggaagatgccggcgatccatggatctgtgggacatgaaggacgtgtccatcagaaatgaaagcagcctgggattggaagcatccacagaagacttgatctgcaggtcttgatttggacctggcactttgacaccaggcgagtcactgatcccctgagcatccattttcaatattggtgagaggggattataatgaatattggctgtgaaggtcacacaagaccgggctatatgcacttgctctgccataaggcagtgtgaagtgtgttcgtgatcacttgtgggcgggagcctgtggctgtcttgcctggactggcttttttaaacatggatgagtggtgacaaatcctgcggccgtgtgcaggctacatccgcagcgagctccgcatatctggtctttgcctttttaggtcatgactgtaatatcaagcttacacgagagttttaaaagactgagcagtatccccttcccctggcagctgctgcttccgtagcatttagggataaacctgcagacactgagaagagagcttcctccctcctggggctggtggcgaggctgcctgttgtggaaaatagggcatgtctcctgtgaatgcgaattgcgagggttgccaaagcctcccttccaagaaacttgcttaggtgtctggtgtccacagaccagactcttctcccgacagggacaaaaattcttgcctgcctttctttttcttttttttccttttacttattcttgccttttttcttcttcttcttctttaggtatgatgccccccaaaaaactaagcaagattaacttgggacaggcagttctaactgggaagcctgagctcacaggctgtttggattactttccaattgtgtttcaaagatgtttagacttttcccaaggccagctgaatccttataatcagcccaaaagttcctttctgtttctgtctgtcccctttgagggtgttgactcagagaacctggggcaatatgagatgttaaaataaaaatagcgtccaacgtcccgcctcctgggaatgctgctcacttcatccgagggttctgggagcttctgctcagtcatcaaatggaatttgcacaattgtcttgcctcctgttttgggtaatttttcaacaagtgagaaattaagaacagcttctcaacaaacttccctctacttccagggccaagaaaagtatttgcagtgtgggctgcagctttcaggggtctcaggtgaaatggtggcaagaaaccccagctcccttcatgtgtttgccttgcgctgatggaaaaggaaggcacttctcagctgccagagaccacattccacagggttcttcacaaaatcaagcactgcagtggaccaactggagcagccactggagggctttagaaggcaaatggaatacatatcaaatgctatataaagaaaacatctgtttacacagagtcccccacagcctcatacctacacccaatatcaaatgctgtataaagaaacatcagtttacacacagagccccccacaacctcatacccacaccgaatatcaaatgctatacaaagaaacatcagtttacacacagagtcccccacagcctcatacccatgcctgtcacatctttgcacagccctaaaggatccagagctttggatcagcagctggctagctcggaggccagaggagggtgctgaggggagtggaggtcagttggggtagccctgggccctggctgcacagtccagctgctgtgtggcctgcatgtggtatcttaggtcatgagagggcctgggcaattcagtgctatctgtacatgttggtggggtgggaaggaaaaggtaactgtgtatttactgtgtcctggatacattatctcatcggatgaaattcctgctaagttaagctccgtttagtggacgggacttggaggctcaaagagggtaagtgacaggcccaaggatatgtgcctagtgaggggtgagccaggattcgatgtgtgactagtaaggggtcagccaggattcaatatgtgactagtaaggggtcagccaggatttcatatgggactagtaaggggtcggccaggatttgatacgtgactagcaaggggacaagccaggatttgatatgtgactagtgaggggcgagccaggattcgatatgtgactagtaaggggtcagccaagatttgatatgtgactagtgaggggcgagacaggatttgatatgtgactagtgaggggcgagccaggatttgatatgtgactggtgaggggcgagccaggatttgatatgtgactggtgaggggcgagccaggatttgatatgtgactggtgaggggcgagccaggatttgatatgtgactggtgaggggcgagccaggatttgatatgtgactggtgaggggcgagccaggatttgatatgtgactggtgaggggcgagccaggatttgatatgtgactggtgaggggcgagccaggatttgatatgtgactggtgaggggcgagccaggatttgatatgtgactggtgaggggcgagccaggatttgatatgtgactggtgaggggcgagccaggatttgatatgtgactggtgaggggcgagccaggatttgatatgtgactggtgaggggtggagccagtcaggatttgatatgtggttagtgaggggttagccagtcaggatttgatatgtggctagtgaggggcgagccaggatttgatatgtgactagtaagggggtgagccaggattcaatacgtgacaagtgaggggtgagccaggattcaatacgtgaccagtgaggggcgagccaggattcgatacgtgaccagtgaggggcgagccaggatgcgatacgtgaccagtgaggggcgagccaggattccatacgtgactagtgaggggtgagccaggattcgatatgtgagtagtgaggagtgagccaggatttgatatgtggctactgaggggcgagccaggatttgatatgtgactagtaaggggtcagccaggatttgatacgtgactagtcagggggtcagccaggattcgatacgtgactagtaaggggtcagccaggatttgatatgtgactagtgaggggtgagccaggatttgacatgtgactagtgaggggtgagccaggattcaatatgtgactagtgaggggtgagccaggattcgatatgtacctagtgaggggtcagccaggatttgatatgtggctagtaaggggtgagccagccaggatttgatatgtgactagtgacgagtgagccaggatttgatatgtgactagtaagggggtgaggcaggatttgatatgtgactagtaagggggtgaggcaggatttgatatgtgactggtgaggggtgagacaggatttgatatgtgactagtgaggggtgagccaggatttgctatgtgactagtaagggggcgagccaggatttggctccagccttcattccaacatccatgccttttgtacttcaccagcagttttcaaatttatgggacaaaattttacattggattccctctatacaaaatagataaaagtattttatgaatacattttatgagttcaaatatttttcagaagaaatcagtaaaagcattgaaaactattccagcaaataggaagcactttaaaccaaggttatggatgaaaatgtgtgtgtatcaaccccagtttacttctgggttgcacagaatagagaaatcttgatttaatccagctaagaattttcaaatagtatccattttgttttgttttaaacagctcttcttgcaatggtagaggctcttcaattaaacagagatggtaacaggc

SEQ ID NO: 198699 - DNA, 3204 bp, Homo sapiens
  Payload ID: 19212
  Gene Name: vacuolar protein sorting 53 homolog (S. cerevisiae)
  ENST ID: ENST00000573028
  CDS Start-End: 148-798
gaagtgccggagcggctgacagagcggctgacggagccgggctcaccaggtcgctgccgcgagggagttgctgtgctggggcctgggtggcggctggaggcctgagttgggctcgcggcgggggtcggcagggggccgggtggcggaatgatggaggaggaggaactggagttcgtggaggagctggaagccgtgctgcagctcacgcccgaggtgcagctggccatcgagcaggtgtttccaagccaggaccctctagatcgagcagatttcaatgctgttgagtatatcaataccctgttcccaaccgagcaatctctggcgaacatagacgaagtcgtgaacaaaattaggctgaaaataaggagactggatgacaatattcgaactgttgtaagaggtcagacgaacgtggggcaggatggacggcaagcgcttgaagaggctcagaaagctatccaacaactctttggcaaaatcaaagatatcaaagacaaagctgaaaaatcagagcaaatggtgaaagaaatcacccgtgatattaagcaattagatcacgccaaacgccacctgaccacctcaatcaccacactgaaccacctgcacatgctggcaggaggtgtcgactccctcgaagccatgaccaggcgaagacaatacggagaagttgctaatctccttcagggtgtgatgaatgtcctggagcacttccacaagtatatggggattccgcagatccggcagctttccgaaaggaaacccaaaacactgcagctgcatggattgaactggacgtgatgtgaaatgaaataagccagacacgggaagacagattcctcatgttctcactcatagtgaaggctgcacagactgagttaggacagcaaatcctggcagattttgaagaagcgtttccttcccagggcaccaagagaccaggaggacccagcaatgttctacgagatgcatgtctggttgctaatattctagatcccaggatcaaacaggaaatcatcaaaaagtttattaaacagcatctgtcagagtatctggtactttttcaagaaaaccaagatgttgcctggctggacaaaatcgacagacgctatgcctggataaaacgccagcttgtggactatgaggagaaatacggccgcatgtttccacgtgagtggtgcatggctgagaggattgcggtggaattttgccatgtgacaagggcagaacttgccaagattatgcgtaccagagcgaaggaaattgaagtgaaattgcttctttttgctattcaaagaacaactaactttgaggggtttcttgcaaaacgcttctccggctgcaccctgaccgatgggaccctgaaaaagcttgagtctccacccccatctaccaatcccttcctggaagatgagccaacaccagagatggaggaactggcaacggagaaaggagatttagatcaaccaaagaagcctaaagccccagacaatccatttcatggcattgtttccaagtgttttgagcctcatctctacgtgtatatcgaatcccaagacaagaacctcggagagctgatagatcggtttgtggctgatttcaaagcccaggggccacctaagcccaacactgatgaagggggtgccgtgctccccagctgcgccgacctctttgtctactacaagaagtgcatggtgcaatgctctcagctcagtactggggagcccatgatcgccctgaccaccattttccagaagtacctccgagaatacgcctggaaaatcctctctggcaacctgcccaaaaccacaaccagcagtggaggactgactatcagcagcctcctcaaggaaaaggagggctcagaagtagccaagttcactctggaggagctctgcctcatctgtaacatcctgagcacggcagagtactgtctggccaccacccagcagctagaagaaaaactcaaagaaaaagtggatgtaagtctgattgaacgaatcaatctgactggagagatggacacgttcagcaccgtcatctccagcagtattcagctgctggttcaggatctggatgctgcctgtgatcctgccctgactgccatgagcaagatgcagtggcagaacgtggagcacgttggtgaccagagcccctacgtcacctctgtcattctgcacatcaagcagaacgtccccatcatccgtgacaacctggcttccacacgcaagtacttcactcagttctgcgttaaatttgcaaactccttcattcccaaattcatcacccacctcttcaagtgcaagccaattagcatggtgggagcagaacaggtgagatggacgtagtatcaggcatttgcctggcagcttttgttgtagatcaagcacatattcttctagtccagatctacttggcaggaataaaattgatgatgtcccctgtttggggacagtataatgactcacccggaaggtttcttaattcgttcttccatttatttttaaaaattttgtttgaacgcctactaagttctgggtgcagggtataacacagcaagcaccatggaaaggtccctgctcctagtgctcacactccaataagaagaagtggctgggccgggcacagcggctcacgctgtaaccccagcatttcgggaggcctgggcaggcagatcacctggggtaaggaatttgagagcagcctggccaacatggtgaaatcccatctctactaaaaatacaaaaattagctgggcatgggggcaggctactggggaggctgaggcaggagaatcacttgaacccgggaggtggaggttgcagtgagccgatatcacaccactgcactccagcctgggtgacaaagtgagactccatctcaaaaaaacaaacaaacaaaaaaactagcaaaaaacttggaatattggccgggcatggtggctcacgtctgtaatcctagcactttgggaggcccaggcaggcggatcatctgaggtcaggagttcgagaccagcctggctaacatggtgaaccctgtctctactaataatacaaaaaattagccgggcgtgatggtgggcgcctgtaatcccagctactcgggaggctgaggcagaattgcttcaacccaggaggtggaggttgcagtgagctgagatcacaccactgtactccagcctgggcaacaagagcgaaactccatctc

SEQ ID NO: 198700 - DNA, 729 bp, Homo sapiens
  Payload ID: 19212
  Gene Name: vacuolar protein sorting 53 homolog (S. cerevisiae)
  ENST ID: ENST00000570650
  CDS Start-End: 1-714
agaccaggaggacccagcaatgttctacgagatgcatgtctggttgctaatattctagatcccaggatcaaacaggaaatcatcaaaaagtttattaaacagcatctgtcagagtatctggtactttttcaagaaaaccaagatgttgcctggctggacaaaatcgacagacgctatgcctggataaaacgccagcttgtggactatgaggagaaatacggccgcatgtttccacgtgagtggtgcatggctgagaggattgcggtggaattttgccatgtgacaagggcagaacttgccaagattatgcgtaccagagcgaaggaaattgaagtgaaattgcttctttttgctattcaaagaacaactaactttgaggggtttcttgcaaaacgcttctccggctgcaccctgaccgatgggaccctgaaaaagcttgagtctccacccccatctaccaatcccttcctggaagatgagccaacaccagagatggaggaactggcaacggagaaaggagatttagatcaaacaccaccaaaagggaggctggctgggaggaccagctctgagaaacctgtaaccatgtactttgcagctagccctgcattcattctttcccagcaccacaagggcaggagccaagagagcagagcttccaggagcagttctgaaatgatgcaatcaaatgtgtctggtcccttgattaaatgattgtaatagaatgga

SEQ ID NO: 198701 - DNA, 585 bp, Homo sapiens
  Payload ID: 19212
  Gene Name: vacuolar protein sorting 53 homolog (S. cerevisiae)
  ENST ID: ENST00000574029
  CDS Start-End: 122-559
gctgacggagccgggctcaccaggtcgctgccgcgagggagttgctgtgctggggcctgggtggcggctggaggcctgagttgggctcgcggcgggggtcggcagggggccgggtggcggaatgatggaggaggaggaactggagttcgtggaggagctggaagccgtgctgcagctcacgcccgaggtgcagctggccatcgagcaggtgtttccaagccaggaccctctagatcgagcagatttcaatgctgttgagtatatcaataccctgttcccaaccgagcaatctctggcgaacatagacgaagtcgtgaacaaaattaggctgaggcaggagaatcacttaaacccgggaggtggaggctgcagtgagccaagatttcaccactgcactccagcctgggtgacagagcaagaccccttctcaaaaagttttcaggatagaggaaatttccttaaaatccataaaacttgtaacagccgtacagtaggaataaggtttggaaatctgcctggaaacctgatttcctcatccccaccttgtttcccaacataaccactgctctgtgcccctgccctctc

SEQ ID NO: 198702 - DNA, 2356 bp, Homo sapiens
  Payload ID: 19212
  Gene Name: vacuolar protein sorting 53 homolog (S. cerevisiae)
  Uniprot ID: Q5VIR6
  ENST ID: ENST00000571805
  CDS Start-End: 138-2237
agcggctgacagagcggctgacggagccgggctcaccaggtcgctgccgcgagggagttgctgtgctggggcctgggtggcggctggaggcctgagttgggctcgcggcgggggtcggcagggggccgggtggcggaatgatggaggaggaggaactggagttcgtggaggagctggaagccgtgctgcagctcacgcccgaggtgcagctggccatcgagcaggtgtttccaagccaggaccctctagatcgagcagatttcaatgctgttgagtatatcaataccctgttcccaaccgagcaatctctggcgaacatagacgaagtcgtgaacaaaattaggctgaaaataaggagactggatgacaatattcgaactgttgtaagaggtcagacgaacgtggggcaggatggacggcaagcgcttgaagaggctcagaaagctatccaacaactctttggcaaaatcaaagatatcaaagacaaagctgaaaaatcagagcaaatggtgaaagaaatcacccgtgatattaagcaattagatcacgccaaacgccacctgaccacctcaatcaccacactgaaccacctgcacatgctggcaggaggtgtcgactccctcgaagccatgaccaggcgaagacaatacggagaagttgctaatctccttcagggtgtgatgaatgtcctggagcacttccacaagtatatggggattccgcagatccggcagctttccgaaagagtgaaggctgcacagactgagttaggacagcaaatcctggcagattttgaagaagcgtttccttcccagggcaccaagagaccaggaggacccagcaatgttctacgagatgcatgtctggttgctaatattctagatcccaggatcaaacaggaaatcatcaaaaagtttattaaacagcatctgtcagagtatctggtactttttcaagaaaaccaagatgttgcctggctggacaaaatcgacagacgctatgcctggataaaacgccagcttgtggactatgaggagaaatacggccgcatgtttccacgtgagtggtgcatggctgagaggattgcggtggaattttgccatgtgacaagggcagaacttgccaagattatgcgtaccagagcgaaggaaattgaagtgaaattgcttctttttgctattcaaagaacaactaactttgaggggtttcttgcaaaacgcttctccggctgcaccctgaccgatgggaccctgaaaaagcttgagtctccacccccatctaccaatcccttcctggaagatgagccaacaccagagatggaggaactggcaacggagaaaggagatttagatcaaccaaagaagcctaaagccccagacaatccatttcatggcattgtttccaagtgttttgagcctcatctctacgtgtatatcgaatcccaagacaagaacctcggagagctgatagatcggtttgtggctgatttcaaagcccaggggccacctaagcccaacactgatgaagggggtgccgtgctccccagctgcgccgacctctttgtctactacaagaagtgcatggtgcaatgctctcagctcagtactggggagcccatgatcgccctgaccaccattttccagaagtacctccgagaatacgcctggaaaatcctctctggcaacctgcccaaaaccacaaccagcagtggaggactgactatcagcagcctcctcaaggaaaaggagggctcagaagtagccaagttcactctggaggagctctgcctcatctgtaacatcctgagcacggcagagtactgtctggccaccacccagcagctagaagaaaaactcaaagaaaaagtggatgtaagtctgattgaacgaatcaatctgactggagagatggacacgttcagcaccgtcatctccagcagtattcagctgctggttcaggatctggatgctgcctgtgatcctgccctgactgccatgagcaagatgcagtggcagaacgtggagcacgttggtgaccagagcccctacgtcacctctgtcattctgcacatcaagcagaacgtccccatcatccgtgacaacctggcttccacacgcaagtacttcactcagttctgcgttaaatttgcaaactccttcattcccaaattcatcacccacctcttcaagtgcaagccaattagcatggtgggagcagaacaggtgagatggacgtagtatcaggcatttgcctggcagcttttgttgtagatcaagcacatattcttctagtccagatctacttggcaggaataaaattgatgatgtcccctgtttggggacagtataatgactca

SEQ ID NO: 198703 - DNA, 613 bp, Homo sapiens
  Payload ID: 19212
  Gene Name: vacuolar protein sorting 53 homolog (S. cerevisiae)
  ENST ID: ENST00000576019
  CDS Start-End: 410-613
gaaacagtccataaagaagcaccaagagaacattttgagctgatttcaaggggaaattataccctattcctccactacaagttggcctgggaccttgtgccacccagagtgacgataggatctaaaggtgtttccaagccaggaccctctagatcgagcagatttcaatgctgttgagtatatcaataccctgttcccaaccgagcaatctctggcgaacatagacgaagtcgtgaacaaaattaggctgaaaataaggagactggatgacaatattcgaactgttgtaagaggtcagacgaacgtggggcaggatggacggcaagcgcttgaagaggctcagaaagctatccaacaactctttggcaaaatcaaagatatcaaagacaaagctgaaaaatcagagcaaatggtgaaagaaatcacccgtgatattaagcaattagatcacgccaaacgccacctgaccacctcaatcaccacactgaaccacctgcacatgctggcaggaggtgtcgactccctcgaagccatgaccaggcgaagacaatacggagaagttgctaatctccttcagggtgtgatgaatgtcctggagcacttccacaagtat

SEQ ID NO: 198704 - DNA, 3463 bp, Homo sapiens
  Payload ID: 19213
  Gene Name: vacuolar protein sorting 54 homolog (S. cerevisiae)
  Uniprot ID: Q9P1Q0
  ENST ID: ENST00000272322
  CDS Start-End: 156-3089
gggaacccgggctcgggcccggccgggcgccgggcggcggcggccgtggagcagcagcctcggtgcgacgtggagggctggaggcggcggcgatgcactaggcctcgctcagggcggctgccccgggacccgcagttgagtggtgattttatgcaatggcttcaagccacagttcttcaccagtgcctcaaggaagcagcagtgatgttttctttaaaatagaggtagatccgtcaaaacacattcgacctgtgccatcactgccagatgtgtgtcccaaggaacccacaggtgattcacatagtttatatgttgccccatctctagttacagatcaacatagatggactgtatatcattccaaagtaaatctcccagcagcattaaacgatcctagattagcaaaaagagaatctgacttcttcacaaaaacatggggattggactttgtggacactgaagtcataccttcattctacctcccacagatcagcaaggaacattttacagtatatcaacaggaaatctctcagagagagaagattcatgagagatgcaagaatatttgtcctcctaaagataccttcgaaaggactcttttacatactcatgataaatccaggacagatctggagcaagtacctaagatttttatgaaaccagattttgccttggatgattccttaacttttaattcagttttaccatggtctcattttaatactgctggtggaaaaggaaatcgtgatgcagcttcctcaaagttgcttcaagaaaagctgagccattatctggatattgtggaagtaaacattgctcaccagatctctctacgttcagaagcattttttcatgcaatgacctctcaacacgagttgcaggactacctcaggaaaacttcccaggctgtaaaaatgcttcgagataaaattgcacagattgataaagtaatgtgtgaaggatcactccacattttaagactggcacttaccagaaataattgtgttaaagtatacaataagctgaagttaatggccactgtacaccagactcagcctacagtacaggtgttattatctacttctgaatttgttggagcattggacttaatagcaacaacacaagaggttctacagcaggaacttcagggcattcacagtttccggcatttgggatcacagctttgtgaattagaaaaactgatagataaaatgatgattgcagaattttctacttattctcacagtgacttaaatagaccactggaagatgactgtcaagttttagaagaggaaagactaatatctcttgtatttggacttttaaaacaaagaaagcttaattttttagaaatctatggtgaaaaaatggttattacagcaaagaatatcattaaacagtgtgtgattaataaagtttcacaaacagaagaaatagacacagatgttgttgtgaagcttgcagatcagatgagaatgttgaattttccccagtggtttgatctgctcaaggatattttctctaagtttacaattttcctacagagagtgaaggcaacattaaatatcattcacagtgttgttctctcagttcttgacaaaaaccaaaggactagagaattggaagagatttcacaacagaagaatgctgcaaaagataattcactggacacagaggtggcttatttaatccatgaaggcatgtttataagtgatgcattcggtgagggtgagctaacacctatagcagttgacactacctctcaaagaaatgcatctccaaatagtgagccctgcagcagtgattctgtatccgagccagaatgtactactgattcttcatccagcaaagagcacacatcatcatctgctattccaggaggtgtggatattatggtcagtgaagatatgaaattaactgactcagagctaggaaagctggcaaataatatccaggaattattatatagtgcctcagatatatgccatgatcgagctgtcaaatttctcatgtcaagagcaaaggatggttttcttgagaagctaaattccatggaattcataacactttctagattaatggaaacattcattttagacaccgaacagatctgtggaagaaaaagcacgtcattacttggagcacttcagagccaagctattaagtttgtaaataggtttcatgaagagagaaaaaccaagctcagcctcctcttagacaatgagcgctggaagcaagcagatgttcctgcagaatttcaggatcttgttgattctctgtcagatgggaagattgctttacctgaaaaaaaatcaggagccacagaagaaaggaaaccagctgaagttcttattgtcgagggacaacagtatgcagttgttggaaccgtattgctgttaataagaattatccttgaatattgccagtgtgtggataacatcccatctgttactactgacatgcttactcgtctgtcagatttattgaagtacttcaattcaagaagttgccagttagttcttggagctggtgcactgcaagttgttggactaaaaacgataactacaaaaaatttggctctttcttcacgatgtttgcagttaattgtgcactacattcctgtgatccgggctcattttgaagctcgactaccacctaagcaatatagcatgcttaggcattttgatcatatcactaaggactaccatgatcacatagctgaaatatcagctaagcttgtagcgataatggatagcttatttgacaagctgttatctaagtatgaagtgaaggctcctgttccttctgcctgtttcaggaatatttgtaagcaaatgacaaaaatgcacgaagctatatttgatctccttccagaagaacaaacacagatgttatttttaagaattaatgcaagttataaactccacttgaaaaagcagttatctcacttaaatgtgataaatgatggaggacctcaaaatgggttggtcacagcagatgtagctttttacactggaaatcttcaagccttaaaaggccttaaagatttggacctaaatatggccgaaatttgggagcagaagaggtgatgtcatcctggaaaactgggtagttcatctgaccatgggatgtgtttgttatgaagaaaatctggatgcctgtgattcgagaattgaacctgaaacccaaagtgaactggggtgggggaagggaaaaaggaaagtatcaagtgttgggaaactggattcagtgggatctacaaggaatgtcatttttgtgcatcctacagtgaggagtaactgatcaggtgtctataacatttttcattctctctggaaacagactcaggtttctttggaccaaatccaaaagaacacatagctgtaacacagctgtagttgactagaatgctctgtatactttatattaaaaaatgctttgcatttcttccagtgcaatgaaa

SEQ ID NO: 198705 - DNA, 3594 bp, Homo sapiens
  Payload ID: 19213
  Gene Name: vacuolar protein sorting 54 homolog (S. cerevisiae)
  Uniprot ID: Q9P1Q0
  ENST ID: ENST00000354504
  CDS Start-End: 591-3065
tcagttcctgggtggggccaacaagatcaaatgaggcagtttattgatctgggtggtaccagctgatccgtcgagtacagggtctgcaaaatatctcaagcatggatcttaggagcagtttagggggagggtcagaatcttgtagtctccagttgcatgactcgactcctaaaccgtaatttctaatcttgtggctaatttgttagtccaacaaaggtagtctagcccccaggcaagaaggtggtttgttttgggaaaggactgttatcatctttgttttaaactataagctaagttcctcccaaagttagttcaccctatgcccaagaatggacaagaacagcttggaggttagaagcaagatggagttggttaggtcagatctctttcactgtctcagttataattttgcaatggggatttcagctacttgggaggctgaggcatgagaatcacttggacccaggaggtggaggttgcagtgaaccaagatcacgccactgcactacagattgggtgacagagtgagactctgtctcaaaaaagaaaaaaaaaatctacaaaaactctgtagctaatggggaaactagatgcttcccactaagaacaggatcaagagagagaagattcatgagagatgcaagaatatttgtcctcctaaagataccttcgaaaggactcttttacatactcatgataaatccaggacagatctggagcaagtacctaagatttttatgaaaccagattttgccttggatgattccttaacttttaattcagttttaccatggtctcattttaatactgctggtggaaaaggaaatcgtgatgcagcttcctcaaagttgcttcaagaaaagctgagccattatctggatattgtggaagtaaacattgctcaccagatctctctacgttcagaagcattttttcatgcaatgacctctcaacacgagttgcaggactacctcaggaaaacttcccaggctgtaaaaatgcttcgagataaaattgcacagattgataaagtaatgtgtgaaggatcactccacattttaagactggcacttaccagaaataattgtgttaaagtatacaataagctgaagttaatggccactgtacaccagactcagcctacagtacaggtgttattatctacttctgaatttgttggagcattggacttaatagcaacaacacaagaggttctacagcaggaacttcagggcattcacagtttccggcatttgggatcacagctttgtgaattagaaaaactgatagataaaatgatgattgcagaattttctacttattctcacagtgacttaaatagaccactggaagatgactgtcaagttttagaagagtgtgtgattaataaagtttcacaaacagaagaaatagacacagatgttgttgtgaagcttgcagatcagatgagaatgttgaattttccccagtggtttgatctgctcaaggatattttctctaagtttacaattttcctacagagagtgaaggcaacattaaatatcattcacagtgttgttctctcagttcttgacaaaaaccaaaggactagagaattggaagagatttcacaacagaagaatgctgcaaaagataattcactggacacagaggtggcttatttaatccatgaaggcatgtttataagtgatgcattcggtgagggtgagctaacacctatagcagttgacactacctctcaaagaaatgcatctccaaatagtgagccctgcagcagtgattctgtatccgagccagaatgtactactgattcttcatccagcaaagagcacacatcatcatctgctattccaggaggtgtggatattatggtcagtgaagatatgaaattaactgactcagagctaggaaagctggcaaataatatccaggaattattatatagtgcctcagatatatgccatgatcgagctgtcaaatttctcatgtcaagagcaaaggatggttttcttgagaagctaaattccatggaattcataacactttctagattaatggaaacattcattttagacaccgaacagatctgtggaagaaaaagcacgtcattacttggagcacttcagagccaagctattaagtttgtaaataggtttcatgaagagagaaaaaccaagctcagcctcctcttagacaatgagcgctggaagcaagcagatgttcctgcagaatttcaggatcttgttgattctctgtcagatgggaagattgctttacctgaaaaaaaatcaggagccacagaagaaaggaaaccagctgaagttcttattgtcgagggacaacagtatgcagttgttggaaccgtattgctgttaataagaattatccttgaatattgccagtgtgtggataacatcccatctgttactactgacatgcttactcgtctgtcagatttattgaagtacttcaattcaagaagttgccagttagttcttggagctggtgcactgcaagttgttggactaaaaacgataactacaaaaaatttggctctttcttcacgatgtttgcagttaattgtgcactacattcctgtgatccgggctcattttgaagctcgactaccacctaagcaatatagcatgcttaggcattttgatcatatcactaaggactaccatgatcacatagctgaaatatcagctaagcttgtagcgataatggatagcttatttgacaagctgttatctaagtatgaagtgaaggctcctgttccttctgcctgtttcaggaatatttgtaagcaaatgacaaaaatgcacgaagctatatttgatctccttccagaagaacaaacacagatgttatttttaagaattaatgcaagttataaactccacttgaaaaagcagttatctcacttaaatgtgataaatgatggaggacctcaaaatgggttggtcacagcagatgtagctttttacactggaaatcttcaagccttaaaaggccttaaagatttggacctaaatatggccgaaatttgggagcagaagaggtgatgtcatcctggaaaactgggtagttcatctgaccatgggatgtgtttgttatgaagaaaatctggatgcctgtgattcgagaattgaacctgaaacccaaagtgaactggggtgggggaagggaaaaaggaaagtatcaagtgttgggaaactggattcagtgggatctacaaggaatgtcatttttgtgcatcctacagtgaggagtaactgatcaggtgtctataacatttttcattctctctggaaacagactcaggtttctttggaccaaatccaaaagaacacatagctgtaacacagctgtagttgactagaatgctctgtatactttatattaaaaaatgctttgcatttcttccagtgcaatgaaattcatatggtgtcccaccttatttaatgatggtacaatttaaaatcttagtcaacttctgtagaaagttttctctatgaaagtaaagctgtttgaaaaattattatttttttacagatctttctataaaaaataaacatcttttgattgcttgga

SEQ ID NO: 198706 - DNA, 4337 bp, Homo sapiens
  Payload ID: 19213
  Gene Name: vacuolar protein sorting 54 homolog (S. cerevisiae)
  Uniprot ID: Q9P1Q0
  ENST ID: ENST00000409558
  CDS Start-End: 156-3053
gggaacccgggctcgggcccggccgggcgccgggcggcggcggccgtggagcagcagcctcggtgcgacgtggagggctggaggcggcggcgatgcactaggcctcgctcagggcggctgccccgggacccgcagttgagtggtgattttatgcaatggcttcaagccacagttcttcaccagtgcctcaaggaagcagcagtgatgttttctttaaaatagaggtagatccgtcaaaacacattcgacctgtgccatcactgccagatgtgtgtcccaaggaacccacagttacagatcaacatagatggactgtatatcattccaaagtaaatctcccagcagcattaaacgatcctagattagcaaaaagagaatctgacttcttcacaaaaacatggggattggactttgtggacactgaagtcataccttcattctacctcccacagatcagcaaggaacattttacagtatatcaacaggaaatctctcagagagagaagattcatgagagatgcaagaatatttgtcctcctaaagataccttcgaaaggactcttttacatactcatgataaatccaggacagatctggagcaagtacctaagatttttatgaaaccagattttgccttggatgattccttaacttttaattcagttttaccatggtctcattttaatactgctggtggaaaaggaaatcgtgatgcagcttcctcaaagttgcttcaagaaaagctgagccattatctggatattgtggaagtaaacattgctcaccagatctctctacgttcagaagcattttttcatgcaatgacctctcaacacgagttgcaggactacctcaggaaaacttcccaggctgtaaaaatgcttcgagataaaattgcacagattgataaagtaatgtgtgaaggatcactccacattttaagactggcacttaccagaaataattgtgttaaagtatacaataagctgaagttaatggccactgtacaccagactcagcctacagtacaggtgttattatctacttctgaatttgttggagcattggacttaatagcaacaacacaagaggttctacagcaggaacttcagggcattcacagtttccggcatttgggatcacagctttgtgaattagaaaaactgatagataaaatgatgattgcagaattttctacttattctcacagtgacttaaatagaccactggaagatgactgtcaagttttagaagaggaaagactaatatctcttgtatttggacttttaaaacaaagaaagcttaattttttagaaatctatggtgaaaaaatggttattacagcaaagaatatcattaaacagtgtgtgattaataaagtttcacaaacagaagaaatagacacagatgttgttgtgaagcttgcagatcagatgagaatgttgaattttccccagtggtttgatctgctcaaggatattttctctaagtttacaattttcctacagagagtgaaggcaacattaaatatcattcacagtgttgttctctcagttcttgacaaaaaccaaaggactagagaattggaagagatttcacaacagaagaatgctgcaaaagataattcactggacacagaggtggcttatttaatccatgaaggcatgtttataagtgatgcattcggtgagggtgagctaacacctatagcagttgacactacctctcaaagaaatgcatctccaaatagtgagccctgcagcagtgattctgtatccgagccagaatgtactactgattcttcatccagcaaagagcacacatcatcatctgctattccaggaggtgtggatattatggtcagtgaagatatgaaattaactgactcagagctaggaaagctggcaaataatatccaggaattattatatagtgcctcagatatatgccatgatcgagctgtcaaatttctcatgtcaagagcaaaggatggttttcttgagaagctaaattccatggaattcataacactttctagattaatggaaacattcattttagacaccgaacagatctgtggaagaaaaagcacgtcattacttggagcacttcagagccaagctattaagtttgtaaataggtttcatgaagagagaaaaaccaagctcagcctcctcttagacaatgagcgctggaagcaagcagatgttcctgcagaatttcaggatcttgttgattctctgtcagatgggaagattgctttacctgaaaaaaaatcaggagccacagaagaaaggaaaccagctgaagttcttattgtcgagggacaacagtatgcagttgttggaaccgtattgctgttaataagaattatccttgaatattgccagtgtgtggataacatcccatctgttactactgacatgcttactcgtctgtcagatttattgaagtacttcaattcaagaagttgccagttagttcttggagctggtgcactgcaagttgttggactaaaaacgataactacaaaaaatttggctctttcttcacgatgtttgcagttaattgtgcactacattcctgtgatccgggctcattttgaagctcgactaccacctaagcaatatagcatgcttaggcattttgatcatatcactaaggactaccatgatcacatagctgaaatatcagctaagcttgtagcgataatggatagcttatttgacaagctgttatctaagtatgaagtgaaggctcctgttccttctgcctgtttcaggaatatttgtaagcaaatgacaaaaatgcacgaagctatatttgatctccttccagaagaacaaacacagatgttatttttaagaattaatgcaagttataaactccacttgaaaaagcagttatctcacttaaatgtgataaatgatggaggacctcaaaatgggttggtcacagcagatgtagctttttacactggaaatcttcaagccttaaaaggccttaaagatttggacctaaatatggccgaaatttgggagcagaagaggtgatgtcatcctggaaaactgggtagttcatctgaccatgggatgtgtttgttatgaagaaaatctggatgcctgtgattcgagaattgaacctgaaacccaaagtgaactggggtgggggaagggaaaaaggaaagtatcaagtgttgggaaactggattcagtgggatctacaaggaatgtcatttttgtgcatcctacagtgaggagtaactgatcaggtgtctataacatttttcattctctctggaaacagactcaggtttctttggaccaaatccaaaagaacacatagctgtaacacagctgtagttgactagaatgctctgtatactttatattaaaaaatgctttgcatttcttccagtgcaatgaaattcatatggtgtcccaccttatttaatgatggtacaatttaaaatcttagtcaacttctgtagaaagttttctctatgaaagtaaagctgtttgaaaaattattatttttttacagatctttctataaaaaataaacatcttttgattgcttggatttaggaattcaatttttgtttcagtgaccaatgtcaagttgcaggctttgtgtgttgcatatttaatatttctactaccaccgtatgtcaactgggtaaagccttccagagctctctaaatacctgaaagacttaagcctttttttaagtaattaatacttaaaaaaaaagatcctggcatctatttatgcaactaaatacttttcagaaatggtatataaaaggctacagtttaatatctgtatttttataaaagtatgatgaagggtttggggtgtttttatttgtagcagaggtaagaatatgtattcatataatctgcctacttttgagttctcatattaacatttagataacatatgaagtatggcccccttggatccttgtttttaagttactttcgatgtgtatacgaacaaagaccagggagaaacagaacttttaaaactataggctgctgtgttggggccagaaataaggtgacaagtaaagacttttataatacctaccttcaaaattagaatcagcagcactgtacaaataaagtgcctgtgcttcacctcacaccaagaatcttgcctaaccctgtcagagtgcctaatatcctgtggtgattatgtataatgaaacagtcttattttgtgctctttggtttcttaaaaggaaagcttgttttctttcctttatcattacagaggtatgtctttggttcttaaactatctgtctaaaataaagctgtaaaaaattaacaga

SEQ ID NO: 198707 - DNA, 1277 bp, Homo sapiens
  Payload ID: 19213
  Gene Name: vacuolar protein sorting 54 homolog (S. cerevisiae)
  ENST ID: ENST00000416400
  CDS Start-End: 1-245
attctctgtcagatgggaagattgctttacctgaaaaaaaatcaggagccacagaagaaaggaaaccagctgaagttcttattgtcgagggacaacagtatgcagttgttggaaccgtattgctgttaataagaattatccttgaatattgccagtgtgtggataacatcccatctgttactactgacatgcttactcgtctgtcagatttattgaaggtgctgaacatgactgaggccacttaggtcaaaaaacctggactggcttcaaatgtgcatggaaggaattcactgaactttacaaaattcatctcactaagtacttcaattcaagaagttgccagttagttcttggagctggtgcactgcaagttgttggactaaaaacgataactacaaaaaatttggctctttcttcacgatgtttgcagttaattgtgcactacattcctgtgatccgggctcattttgaagctcgactaccacctaagcaatatagcatgcttaggcattttgatcatatcactaaggactaccatgatcacatagctgaaatatcagctaagcttgtagcgataatggatagcttatttgacaagctgttatctaagtatgaagtgaaggctcctgttccttctgcctgtttcaggaatatttgtaagcaaatgacaaaaatgcacgaagctatatttgatctccttccagaagaacaaacacagatgttatttttaagaattaatgcaagttataaactccacttgaaaaagcagttatctcacttaaatgtgataaatgatggaggacctcaaaatgggttggtcacagcagatgtagctttttacactggaaatcttcaagccttaaaaggccttaaagatttggacctaaatatggccgaaatttgggagcagaagaggtgatgtcatcctggaaaactgggtagttcatctgaccatgggatgtgtttgttatgaagaaaatctggatgcctgtgattcgagaattgaacctgaaacccaaagtgaactggggtgggggaagggaaaaaggaaagtatcaagtgttgggaaactggattcagtgggatctacaaggaatgtcatttttgtgcatcctacagtgaggagtaactgatcaggtgtctataacatttttcattctctctggaaacagactcaggtttctttggaccaaatccaaaagaacacatagctgtaacacagctgtagttgactagaatgctctgtatactttatattaaaaaatgctttgcatttc

SEQ ID NO: 198708 - DNA, 1347 bp, Homo sapiens
  Payload ID: 19214
  Gene Name: vacuolar protein sorting 72 homolog (S. cerevisiae)
  Uniprot ID: Q15906
  ENST ID: ENST00000354473
  CDS Start-End: 38-1165
aggggctgcaggtggcggcgcagtctcggtaggcggtatgagtttggctgggggccgggcaccccggaagaccgctgggaaccggctttctgggcttttggaggcagaggaggaagatgagttctaccagacgacttatgggggtttcacagaggaatccggagatgatgagtatcaaggggaccagtcagacacagaggacgaagtggactctgactttgacattgatgaaggggatgaaccatccagtgatggagaagcagaagagccaagaaggaagcgccgagtagtcaccaaggcctataaggaacctctcaagagcttaaggcctcgaaaggtcaacaccccggctggtagctctcagaaggcgcgagaagagaaggcactactgccattagaactacaagatgacggctctgacagtcggaagtctatgcgtcagtctacagctgagcatacacgacaaacgttccttcgggtacaggagaggcagggccagtcaagacggcgaaaggggccccactgtgagcggccactaacccaggaggaactgctccgggaggccaagatcacagaagagcttaatttacggtcactggagacatatgagcggctcgaggctgataaaaagaagcaggttcataagaagcggaagtgccccgggcccataatcacctatcattcagtgacagtgccacttgttggggagccaggccccaaggaagagaacgttgacatagaaggctctttgtgtttttccttgtcttttgtcctcagacttgatcctgctccctcggtgtctgcattgactcctcatgctgggactggacccgtcaacccccctgctcgctgctcacgtaccttcatcacttttagtgatgatgcaactttcgaggaatggttcccccaagggcggcccccaaaagtccctgttcgtgaggtctgtccagtgacccatcgtccagccctataccgggaccctgttacagacataccctatgccactgctcgagccttcaagatcattcgtgaggcttacaagaagtacattactgcccatggactgccgcccactgcctcagccctgggccccggcccgccacctcctgagcccctccctggctctgggccccgagccttgcgccagaaaattgtcattaaatgaagagatgtctagtcctcagaaacttctttcctgccctgattggggctcttgctgttccgtttcttctccctgcttctcccctttgtcatctctgatctttgcctaatctgtttctttttccttttcccctagttcttacaggtttcgttgtgttttttaatctaataaaatagaaagatccc

SEQ ID NO: 198709 - DNA, 1527 bp, Homo sapiens
  Payload ID: 19214
  Gene Name: vacuolar protein sorting 72 homolog (S. cerevisiae)
  Uniprot ID: Q15906
  ENST ID: ENST00000368892
  CDS Start-End: 93-1187
gtggccacccgcaggtagtgatgtcgagcgtcgagctcccaaaaccgagctggtgaggggctgcaggtggcggcgcagtctcggtaggcggtatgagtttggctgggggccgggcaccccggaagaccgctgggaaccggctttctgggcttttggaggcagaggaggaagatgagttctaccagacgacttatgggggtttcacagaggaatccggagatgatgagtatcaaggggaccagtcagacacagaggacgaagtggactctgactttgacattgatgaaggggatgaaccatccagtgatggagaagcagaagagccaagaaggaagcgccgagtagtcaccaaggcctataaggaacctctcaagagcttaaggcctcgaaaggtcaacaccccggctggtagctctcagaaggcgcgagaagagaaggcactactgccattagaactacaagatgacggctctgacagtcggaagtctatgcgtcagtctacagctgagcatacacgacaaacgttccttcgggtacaggagaggcagggccagtcaagacggcgaaaggggccccactgtgagcggccactaacccaggaggaactgctccgggaggccaagatcacagaagagcttaatttacggtcactggagacatatgagcggctcgaggctgataaaaagaagcaggttcataagaagcggaagtgccccgggcccataatcacctatcattcagtgacagtgccacttgttggggagccaggccccaaggaagagaacgttgacatagaaggacttgatcctgctccctcggtgtctgcattgactcctcatgctgggactggacccgtcaacccccctgctcgctgctcacgtaccttcatcacttttagtgatgatgcaactttcgaggaatggttcccccaagggcggcccccaaaagtccctgttcgtgaggtctgtccagtgacccatcgtccagccctataccgggaccctgttacagacataccctatgccactgctcgagccttcaagatcattcgtgaggcttacaagaagtacattactgcccatggactgccgcccactgcctcagccctgggccccggcccgccacctcctgagcccctccctggctctgggccccgagccttgcgccagaaaattgtcattaaatgaagagatgtctagtcctcagaaacttctttcctgccctgattggggctcttgctgttccgtttcttctccctgcttctcccctttgtcatctctgatctttgcctaatctgtttctttttccttttcccctagttcttacaggtttcgttgtgttttttaatctaataaaatagaaagatcccttttgtctggtgtccagtctagggttgggagcaagaagtatttgaatacctgcatatatttgggtctttattcgatagcatttattatgagctgtcctttctaaattgtattcattcctccaactaaattataaacatctgaaaattgcacaccaaaa

SEQ ID NO: 198710 - DNA, 5047 bp, Homo sapiens
  Payload ID: 19215
  Gene Name: vacuolar protein sorting 8 homolog (S. cerevisiae)
  ENST ID: ENST00000287546
  CDS Start-End: 172-4458
aggtagtgcgcgtgcgtgaggctagagcagtgggtgcggtcacgtgggccggcggtccacggccggaatggcagcaagctcagagataatcattcaggtcttcgtgagctaaggccaaacaaacaaaaaacacttgctttgatggactgaatactgttattagaagtaaatatggaaaatgaaccagaccatgaaaatgtggaacagagcctctgtgccaagacgagcgaagaagagctgaataagtctttcaatctagaagcttcactttcaaaattctcttacatagatatggacaaggaactggagttcaaaaatgatctgattgatgacaaggagtttgatattcctcaagttgatactcctccaacactggaaagcatactaaatgagactgatgatgaagatgagtcttttattcttgaggatcctacattgttaaacattgatactattgattctcactcctatgatacttcatctgtggcaagctcagatagtggtgacaggaccaacttaaaaaggaagaagaaattacctgattctttttcacttcatggatcagttatgcgccattcacttttgaagggaatttctgcccagatagtgtctgcagctgacaaagtagatgctggcttgcctacagcaattgcagtatccagtctgatagcagtgggtacatctcatggattggctttaatatttggtaaatatcagaatcaagctttgcgactctgtctgggtagcactagtgttggaggtcagtatggcgctatctctgccctcagtatcaacaatgattgctcaagacttctttgtggctttgctaaaggacagatcaccatgtgggatttggccagtggaaaacttctaagatcaataacagatgctcatcctccaggaacagcaatattgcatatcaagtttacagatgatccaactcttgcaatttgcaacgacagcggaggctctgtttttgaattgacatttaagagagtgatgggagtgagaacctgtgaatctagatgtctgttcagtggttccaagggtgaagtctgctgtattgagcctctgcattctaagcctgagttgaaagatcatcccatcacacagttttcattattggccatggcatccttgacaaaaatactggtcattggattgaaaccatccttgaaagtatggatgacttttccctatggccggatggatccttccagtgtgccactgctggcctggcactttgtagcagtacaaaattacgtgaatcccatgcttgccttctgcagaggagatgttgttcattttctattggtaaagagagatgaatctggagcaatacatgttactaagcaaaagcatcttcacctatactatgacctcatcaactttacctggataaattcacgcacagttgtgctcttagacagcgtagagaagttgcatgtgattgatcggcaaacacaagaggaattggagacagtggagatctcagaagttcagctggtctacaatagcagccatttcaaatcactagccactggaggaaatgttagccaggcactggctttggttggagagaaggcttgttatcaatccatcagtagctatggtggtcagatcttttatttggggacaaaatctgtttatgtgatgatgctgaggagctggagagagagagtggatcatctcctgaaacaagattgtcttacagaagcgttggctcttgcgtggtctttccatgaaggaaaagcaaaagcagtagtgggattatcaggggatgccagtaagcgaaaggctattgttgcagaccggatggtagaaatcctattccattatgcagatcgagctctgaaaaagtgcccagaccaaggaaaaatccaagtgatggagcagcattttcaggatatggtgcctgtcatagttgattactgccttctgctgcagcgaaaggatcttttatttagtcagatgtatgataaattaagtgagaattcagtggccaaaggagtatttttggagtgccttgagccatatattttaagtgataaattggtgggaatcacaccccaagtaatgaaagacttgattgttcatttccaagataaaaaattaatggaaaatgtggaagcgctcattgtacatatggatatcaccagcctagatattcagcaggtagttctcatgtgttgggaaaatcgtttatatgatgctatgatctatgtctacaacagaggcatgaatgaatttattagtccaatggagaaacttttcagagtcattgctcctcctctgaatgcaggaaaaacactaacagatgaacaagttgttatgggcaataagctccttgtatatattagctgttgtctagcaggtcgtgcctatccccttggtgacatccctgaagatctggttcccttggttaaaaaccaggtttttgaatttctaattcgcctgcattcagcagaggcttctcctgaggaagaaatctatccttacattcggactttgctacattttgacacaagagaatttctaaatgtattggcactgacttttgaagattttaaaaatgacaagcaagctgtggaatatcaacagcgaattgtggatattttgttgaaagttatggtggagaattcagactttaccccctcacaagtaggatgtctctttaccttccttgctcggcagcttgcaaagcctgacaacaccttgtttgtaaacagaacactttttgatcaggtccttgaattcctttgtagtcctgacgatgactcccgacactctgaaagacagcaggtccttttagaattgctgcaggctggaggcatagttcaatttgaagagagtcgactcatccggatggcagaaaaagctgagttctatcaaatttgtgaatttatgtatgaaagagaacaccaatatgataaaattattgattgctacttacgtgaccctctgcgagaggaagaagtctttaattacattcacaatatcttatccattcccggacacagtgcagaggagaagcagtctgtatggcagaaagcaatggatcatattgaggaactcgtgtccctgaagccttgtaaagctgcggagctggttgccacccacttttctggacatattgaaacggtcattaaaaaacttcagaaccaggttttgcttttcaaatttttgaggagtcttcttgacccaagggaaggtattcatgtaaatcaagaattactgcaaatatctccttgtatcacagagcagttcattgagctgttgtgtcagttcaacccaacccaagttatagagactctgcaagtccttgagtgctaccgtctggaagaaactattcagattactcagaagtatcaacttcatgaagtcaccgcttatctattggaaaagaaaggagatattcatggtgccttcctaataatgttagagagactacaaagcaaacttcaagaggtaacacatcaaggtgaaaataccaaagaggatccctcattgaaggatgttgaagatactatggtggagaccattgctctttgccagagaaattcacataatttgaaccagcagcaacgtgaggcactttggtttccgttattggaggcaatgatggcccctcagaagctgtccagttcagccattcctcatctacactctgaagctctgaagtctttgaccatgcaagttttaaatagcatggcagcatttattgcccttccatcaatcttgcaaagaatcttacaggatccagtttatggaaaaggaaaacttggagaaatccagggacttatcttgggaatgttagatacctttaactatgaacaaaccctgctggaaacaacaaccagccttctaaaccaagatctccattggtcattgtgtaacctgagagcttcggtcaccagaggactgaatcccaaacaagattactgctctatatgtttgcagcagtacaagagacgccaagaaatggctgatgaaataattgtctttagctgtggccatttgtatcactcattctgcctacaaaacaaagaatgcactgtggaatttgagggccaaacaagatggacatgctacaaatgcagttcaagtaacaaagtaggaaaactcagtgaaaattcatctgaaattaaaaagggaaggataaccccatcacaggtaaaaatgtctccatcgtatcatcagtccaaaggggatcccactgctaaaaagggaacctcagaacctgttctggatccacagcaaatccaagcatttgatcagctttgccgtctctaccgaggaagctccaggctggctctcctcacggaactctcccagaatcgcagcagcgagagctataggccattcagtggctcgcagagtgctcctgctttcaacagcatcttccagaatgagaacttccagctgcagctcattcctccacctgtgactgaggattgatgactccatggagcctggcccaggagaaccagagatgatcccgaggcagctggggagaggccccgcctctggtgggcttggcctccaccacctcccacgcttctgagaagaggttccaaattgggcttctgtgcccagagcgtccacagcaccattcccagtgtagactcccagtcttctccacattgctgtcatggcgtcagttcaccagactcattgattttgttttgcttgttaagcaaaggaatgtcacatacctctgtccagctttttaggaaatacatttcgcctattgcgactttttccatttaccctgaagcctagaaagtaggtggaactcacacaaatggcattccagagtctgccatactccgtctcctccagctgctggataatacagaggaacttcaacttctacagggaacagtggttggccaggctgcagtataactgaagcatgccttggagagagcagacactgtgggggccagggccatctccctttaatgtgttcatgttaaaacctatttgagtgtaagacttgccctttctaacaataaatgctccgtgtttaagttctgcaggtctc

SEQ ID NO: 198711 - DNA, 2359 bp, Homo sapiens
  Payload ID: 19215
  Gene Name: vacuolar protein sorting 8 homolog (S. cerevisiae)
  ENST ID: ENST00000424463
  CDS Start-End: 89-583
agataatcattcaggtcttcgtgagctaaggccaaacaaacaaaaaacacttgctttgatggactgaatactgttattagaagtaaatatggaaaatgaaccagaccatgaaaatgtggaacagagcctctgtgccaagacgagcgaagaagagctgaataagtctttcaatctagaagcttcactttcaaaattctcttacatagatatggacaaggaactggagttcaaaaatgatctgattgatgacaaggagtttgatattcctcaagttgatactcctccaacactggaaagcatactaaatgagactgatgatgaagatgagtcttttattcttgaggatcctacattgttaaacattgatactattgattctcactcctatgatacttcatctgtggcaagctcagatagtggtgacaggaccaacttaaaaaggaagaagaaattacctgattctttttcacttcatggatcagttatgcgccattcacttttgaagggaatttctgcccagatagtgtctgcagctgacaaagtagatgctggcttgcctacagcaattgtaagtatactttaactttttaaaggtaagttttctatttgattgggttttcttagatttatcattacattgttcaaaatactacataagttgttatggtaataaattcacaagtcattttactgccagtaatcaggtttaacatttatccatgttgaatgctttcttttttcctaattttttgttactttttaggcttttgtttgagaagcagataatggagtaatattagccttctccaggtttatttgtttgtagtactaccctgcccaagtaaatttgcttcttctgtgatttggctccccttccacaaggaatggaaagcatcatttgataggatcactttgtggaaaatagtacatttaacagctctggattccattgtcaggcttgccaaatagaactctgttgcagtattgtagagaactaggggatattgaaagcacgctggtactctctcttcttgtcttcctccagtgcctttttagcattccttttagtcagtctttggtaaggaagtgggtgagttttgaacactttggatggctttaggcccctgcggataaactagagaagtgtgttctcatctcttccccatgcctcgtaggaagctctaggttgggtagcataagtgcctcttactttgcctggatccctgattttttatttgaaagttgctttagaggaagctaagtggcatgttattgcctataatgttgaacatatgatattttgatagtgttactcctagagtaaatttagagggattctcagaaataaaatgtcctgagtttcatttcccgttttgcctcctggatgaaattcttcttatttacaatagtttgtatgtcatctggtgcctagaggaaggcaggccaacaaattcaactctgattatttcaagattcttaatgtaatgtcttaaaacgtaatcttcccttttgttttcaggcagtatccagtctgatagcagtgggtacatctcatggattggctttaatatttggtaaatttttaagtgctttcctgcttttaaatattaagtgtccttttgggttttataatgtcctttaatcacagtttatatagtgtacttgattttcttgaacaaaaccagaaaaacttgaaaagtagcagtcagtatttttatagctaaaaattatttgcctcacagctttgttttgctgcttattgcaagtttattttcttcttcatgaatttataagctatcatatctattgatctctctgcaaacctagacaaaaagaataaagttgaagggaaccttgggttatcatcttgtctgcctccggttgttggtggtggggatttttgattctgaatcaccttccagtaatgggtattctaaaagatcttcaggaaaacaggctttctcagtaattttcaggagctctcactgacaataagcttttttaaaaaatttccattgtaaatcactctaaaccgaattttttttggcctgtaatcacattgctttcttggttgaaagagaactagttttatttgtatagtagaagatagttgtattttctcatttttttctacatgagactaaatgactatagtttcattaaaccttctttgcttttgaattcaatgtatgagtagaatattttgttctttttaaatttaaaaactgttagatttttgtggccgggcatggtggctcacgcctgtaatcctagcactttgggaggccgaggcaggtggatcacctgagttgaggagtttgagaccagcctggccaacatggtgaaaccccgtctctac

SEQ ID NO: 198712 - DNA, 392 bp, Homo sapiens
  Payload ID: 19215
  Gene Name: vacuolar protein sorting 8 homolog (S. cerevisiae)
  ENST ID: ENST00000452140
  CDS Start-End: 1-173
cagcagaggcttctcctgaggaagaaatctatccttacattcggactttgctacattttgacacaagagaatttctaaatgtattggcactgacttttgaagattttaaaaatgacaagcaagctgtggaatatcaacagcgaattgtggatattttgttgaaacatgcctagaacagatccagcacaatgcctgtaacccagtagatgtcagataaatgttatggtggagaattcagactttaccccctcacaagtaggatgtctctttaccttccttgctcggcagcttgcaaagcctgacaacaccttgtttgtaaacagaacactttttgatcaggtccttgaattcctttgtagtcctgacgatgactcccgacactctgaaagaca

SEQ ID NO: 198713 - DNA, 661 bp, Homo sapiens
  Payload ID: 19215
  Gene Name: vacuolar protein sorting 8 homolog (S. cerevisiae)
  ENST ID: ENST00000453056
  CDS Start-End: 440-661
gtgtcgtacgttggcccggaactgggtcgggcaatttccacttactggttccaaatgaatgtgaaaattcaaatgggcttaagtaaaaagggatttattggctccaaacctggaaggggctgaggtatcactaaatccagtgactccggtgatgtatttgtgtatctctccctttctgcaaagggccagtaacccctcagttccctatctactttgcgactataattgcaagcctcattctgtcctgttacagtcgtgcggcaattaggctgagggactggcgcgcccgctcccccgactgtgagcctaggcggcgggtgtcatgcccctccccactcccgggcggaacagagataatcattcaggtcttcgtgagctaaggccaaacaaacaaaaaacacttgctttgatggactgaatactgttattagaagtaaatatggaaaatgaaccagaccatgaaaatgtggaacagagcctctgtgccaagacgagcgaagaagagctgaataagtctttcaatctagaagcttcactttcaaaattctcttacatagatatggacaaggaactggagttcaaaaatgatctgattgatgacaaggagtttgatattcctcaagttgatactcctccaacactggaaagcatactaaatgag

SEQ ID NO: 198714 - DNA, 653 bp, Homo sapiens
  Payload ID: 19215
  Gene Name: vacuolar protein sorting 8 homolog (S. cerevisiae)
  ENST ID: ENST00000424721
  CDS Start-End: 89-295
agataatcattcaggtcttcgtgagctaaggccaaacaaacaaaaaacacttgctttgatggactgaatactgttattagaagtaaatatggaaaatgaaccagaccatgaaaatgtggaacagagcctctgtgccaagacgagcgaagaagagctgaataagtctttcaatctagaagcttcactttcaaaattctcttacatagatatggacaaggaactggagttcaaaaatgatctgggtctcactctgttgtccaggttggagtacagtggtgcaaacatggctcactgaagcttcaacctcctgggctcaagtgatcctcctacctcagcctcccaagtagctgggaccacagattgatgacaaggagtttgatattcctcaagttgatactcctccaacactggaaagcatactaaatgagactgatgatgaagatgagtcttttattcttgaggatcctacattgttaaacattgatactattgattctcactcctatgatacttcatctgtggcaagctcagatagtggtgacaggaccaacttaaaaaggaagaagaaattacctgattctttttcacttcatggatcagttatgcgccattcacttttgaagggaatttctgcccagatagtgtctgcagct

SEQ ID NO: 198715 - DNA, 552 bp, Homo sapiens
  Payload ID: 19215
  Gene Name: vacuolar protein sorting 8 homolog (S. cerevisiae)
  ENST ID: ENST00000421069
  CDS Start-End: 1-180
gaccggatggtagaaatcctattccattatgcagatcgagctctgaaaaagtgcccagaccaaggaaaaatccaagtgatggagcagcattttcaggctattggcatggcatatcgtaatgattggtttttgaatattgaaccagtcttgcatcctggaataaacctcacttggtcatgaggatatggtgcctgtcatagttgattactgccttctgctgcagcgaaaggatcttttatttagtcagatgtatgataaattaagtgagaattcagtggccaaaggagtatttttggagtgccttgagccatatattttaagtgataaattggtgggaatcacaccccaagtaatgaaagacttgattgttcatttccaagataaaaaattaatggaaaatgtggaagcgctcattgtacatatggatatcaccagcctagatattcagcaggtagttctcatgtgttgggaaaatcgtttatatgatgctatgatctatgtctacaacagaggcatgaatgaatttattagtccaatggagaaacttttcag

SEQ ID NO: 198716 - DNA, 5011 bp, Homo sapiens
  Payload ID: 19215
  Gene Name: vacuolar protein sorting 8 homolog (S. cerevisiae)
  Uniprot ID: Q8N3P4
  ENST ID: ENST00000436792
  CDS Start-End: 144-4424
agtgggtgcggtcacgtgggccggcggtccacggccggaatggcagcaagctcagagataatcattcaggtcttcgtgagctaaggccaaacaaacaaaaaacacttgctttgatggactgaatactgttattagaagtaaatatggaaaatgaaccagaccatgaaaatgtggaacagagcctctgtgccaagacgagcgaagaagagctgaataagtctttcaatctagaagcttcactttcaaaattctcttacatagatatggacaaggaactggagttcaaaaatgatctgattgatgacaaggagtttgatattcctcaagttgatactcctccaacactggaaagcatactaaatgagactgatgatgaagatgagtcttttattcttgaggatcctacattgttaaacattgatactattgattctcactcctatgatacttcatctgtggcaagctcagatagtggtgacaggaccaacttaaaaaggaagaagaaattacctgattctttttcacttcatggatcagttatgcgccattcacttttgaagggaatttctgcccagatagtgtctgcagctgacaaagtagatgctggcttgcctacagcaattgcagtatccagtctgatagcagtgggtacatctcatggattggctttaatatttgatcagaatcaagctttgcgactctgtctgggtagcactagtgttggaggtcagtatggcgctatctctgccctcagtatcaacaatgattgctcaagacttctttgtggctttgctaaaggacagatcaccatgtgggatttggccagtggaaaacttctaagatcaataacagatgctcatcctccaggaacagcaatattgcatatcaagtttacagatgatccaactcttgcaatttgcaacgacagcggaggctctgtttttgaattgacatttaagagagtgatgggagtgagaacctgtgaatctagatgtctgttcagtggttccaagggtgaagtctgctgtattgagcctctgcattctaagcctgagttgaaagatcatcccatcacacagttttcattattggccatggcatccttgacaaaaatactggtcattggattgaaaccatccttgaaagtatggatgacttttccctatggccggatggatccttccagtgtgccactgctggcctggcactttgtagcagtacaaaattacgtgaatcccatgcttgccttctgcagaggagatgttgttcattttctattggtaaagagagatgaatctggagcaatacatgttactaagcaaaagcatcttcacctatactatgacctcatcaactttacctggataaattcacgcacagttgtgctcttagacagcgtagagaagttgcatgtgattgatcggcaaacacaagaggaattggagacagtggagatctcagaagttcagctggtctacaatagcagccatttcaaatcactagccactggaggaaatgttagccaggcactggctttggttggagagaaggcttgttatcaatccatcagtagctatggtggtcagatcttttatttggggacaaaatctgtttatgtgatgatgctgaggagctggagagagagagtggatcatctcctgaaacaagattgtcttacagaagcgttggctcttgcgtggtctttccatgaaggaaaagcaaaagcagtagtgggattatcaggggatgccagtaagcgaaaggctattgttgcagaccggatggtagaaatcctattccattatgcagatcgagctctgaaaaagtgcccagaccaaggaaaaatccaagtgatggagcagcattttcaggatatggtgcctgtcatagttgattactgccttctgctgcagcgaaaggatcttttatttagtcagatgtatgataaattaagtgagaattcagtggccaaaggagtatttttggagtgccttgagccatatattttaagtgataaattggtgggaatcacaccccaagtaatgaaagacttgattgttcatttccaagataaaaaattaatggaaaatgtggaagcgctcattgtacatatggatatcaccagcctagatattcagcaggtagttctcatgtgttgggaaaatcgtttatatgatgctatgatctatgtctacaacagaggcatgaatgaatttattagtccaatggagaaacttttcagagtcattgctcctcctctgaatgcaggaaaaacactaacagatgaacaagttgttatgggcaataagctccttgtatatattagctgttgtctagcaggtcgtgcctatccccttggtgacatccctgaagatctggttcccttggttaaaaaccaggtttttgaatttctaattcgcctgcattcagcagaggcttctcctgaggaagaaatctatccttacattcggactttgctacattttgacacaagagaatttctaaatgtattggcactgacttttgaagattttaaaaatgacaagcaagctgtggaatatcaacagcgaattgtggatattttgttgaaagttatggtggagaattcagactttaccccctcacaagtaggatgtctctttaccttccttgctcggcagcttgcaaagcctgacaacaccttgtttgtaaacagaacactttttgatcaggtccttgaattcctttgtagtcctgacgatgactcccgacactctgaaagacagcaggtccttttagaattgctgcaggctggaggcatagttcaatttgaagagagtcgactcatccggatggcagaaaaagctgagttctatcaaatttgtgaatttatgtatgaaagagaacaccaatatgataaaattattgattgctacttacgtgaccctctgcgagaggaagaagtctttaattacattcacaatatcttatccattcccggacacagtgcagaggagaagcagtctgtatggcagaaagcaatggatcatattgaggaactcgtgtccctgaagccttgtaaagctgcggagctggttgccacccacttttctggacatattgaaacggtcattaaaaaacttcagaaccaggttttgcttttcaaatttttgaggagtcttcttgacccaagggaaggtattcatgtaaatcaagaattactgcaaatatctccttgtatcacagagcagttcattgagctgttgtgtcagttcaacccaacccaagttatagagactctgcaagtccttgagtgctaccgtctggaagaaactattcagattactcagaagtatcaacttcatgaagtcaccgcttatctattggaaaagaaaggagatattcatggtgccttcctaataatgttagagagactacaaagcaaacttcaagaggtaacacatcaaggtgaaaataccaaagaggatccctcattgaaggatgttgaagatactatggtggagaccattgctctttgccagagaaattcacataatttgaaccagcagcaacgtgaggcactttggtttccgttattggaggcaatgatggcccctcagaagctgtccagttcagccattcctcatctacactctgaagctctgaagtctttgaccatgcaagttttaaatagcatggcagcatttattgcccttccatcaatcttgcaaagaatcttacaggatccagtttatggaaaaggaaaacttggagaaatccagggacttatcttgggaatgttagatacctttaactatgaacaaaccctgctggaaacaacaaccagccttctaaaccaagatctccattggtcattgtgtaacctgagagcttcggtcaccagaggactgaatcccaaacaagattactgctctatatgtttgcagcagtacaagagacgccaagaaatggctgatgaaataattgtctttagctgtggccatttgtatcactcattctgcctacaaaacaaagaatgcactgtggaatttgagggccaaacaagatggacatgctacaaatgcagttcaagtaacaaagtaggaaaactcagtgaaaattcatctgaaattaaaaagggaaggataaccccatcacaggtaaaaatgtctccatcgtatcatcagtccaaaggggatcccactgctaaaaagggaacctcagaacctgttctggatccacagcaaatccaagcatttgatcagctttgccgtctctaccgaggaagctccaggctggctctcctcacggaactctcccagaatcgcagcagcgagagctataggccattcagtggctcgcagagtgctcctgctttcaacagcatcttccagaatgagaacttccagctgcagctcattcctccacctgtgactgaggattgatgactccatggagcctggcccaggagaaccagagatgatcccgaggcagctggggagaggccccgcctctggtgggcttggcctccaccacctcccacgcttctgagaagaggttccaaattgggcttctgtgcccagagcgtccacagcaccattcccagtgtagactcccagtcttctccacattgctgtcatggcgtcagttcaccagactcattgattttgttttgcttgttaagcaaaggaatgtcacatacctctgtccagctttttaggaaatacatttcgcctattgcgactttttccatttaccctgaagcctagaaagtaggtggaactcacacaaatggcattccagagtctgccatactccgtctcctccagctgctggataatacagaggaacttcaacttctacagggaacagtggttggccaggctgcagtataactgaagcatgccttggagagagcagacactgtgggggccagggccatctccctttaatgtgttcatgttaaaacctatttgagtgtaagacttgccctttctaacaataaatgctccgtgtttaagttctgcaggtc

SEQ ID NO: 198717 - DNA, 4721 bp, Homo sapiens
  Payload ID: 19215
  Gene Name: vacuolar protein sorting 8 homolog (S. cerevisiae)
  Uniprot ID: Q8N3P4
  ENST ID: ENST00000446204
  CDS Start-End: 132-4142
cacgtgggccggcggtccacggccggaatggcagcaagctcagagataatcattcaggtcttcgtgagctaaggccaaacaaacaaaaaacacttgctttgatggactgaatactgttattagaagtaaatatggaaaatgaaccagaccatgaaaatgtggaacagagcctctgtgccaagacgagcgaagaagagctgaataagtctttcaatctagaagcttcactttcaaaattctcttacatagatatggacaaggaactggagttcaaaaatgatctgattgatgacaaggagtttgatattcctcaagttgatactcctccaacactggaaagcatactaaatgagactgatgatgaagatgagtcttttattcttgaggatcctacattgttaaacattgatactattgattctcactcctatgatacttcatctgtggcaagctcagatagtggtgacaggaccaacttaaaaaggaagaagaaattacctgattctttttcacttcatggatcagttatgcgccattcacttttgaagggaatttctgcccagatagtgtctgcagctgacaaagtagatgctggcttgcctacagcaattgcagtatccagtctgatagcagtgggtacatctcatggattggctttaatatttgatcagaatcaagctttgcgactctgtctgggtagcactagtgttggaggtcagtatggcgctatctctgccctcagtatcaacaatgattgctcaagacttctttgtggctttgctaaaggacagatcaccatgtgggatttggccagtggaaaacttctaagatcaataacagatgctcatcctccaggaacagcaatattgcatatcaagtttacagatgatccaactcttgcaatttgcaacgacagcggaggctctgtttttgaattgacatttaagagagtgatgggagtgagaacctgtgaatctagatgtctgttcagtggttccaagggtgaagtctgctgtattgagcctctgcattctaagcctgagttgaaagatcatcccatcacacagttttcattattggccatggcatccttgacaaaaatactggtcattggattgaaaccatccttgaaagtatggatgacttttccctatggccggatggatccttccagtgtgccactgctggcctggcactttgtagcagtacaaaattacgtgaatcccatgcttgccttctgcagaggagatgttgttcattttctattggtaaagagagatgaatctggagcaatacatgttactaagcaaaagcatcttcacctatactatgacctcatcaactttacctggataaattcacgcacagttgtgctcttagacagcgtagagaagttgcatgtgattgatcggcaaacacaagaggaattggagacagtggagatctcagaagttcagctggtctacaatagcagccatttcaaatcactagccactggaggaaatgttagccaggcactggctttggttggagagaaggcttgttatcaatccatcagtagctatggtggtcagatcttttatttggggacaaaatctgtttatgtgatgatgctgaggagctggagagagagagtggatcatctcctgaaacaagattgtcttacagaagcgttggctcttgcgtggtctttccatgaaggaaaagcaaaagcagtagtgggattatcaggggatgccagtaagcgaaaggctattgttgcagaccggatggtagaaatcctattccattatgcagatcgagctctgaaaaagtgcccagaccaaggaaaaatccaagtgatggagcagcattttcaggtagttctcatgtgttgggaaaatcgtttatatgatgctatgatctatgtctacaacagaggcatgaatgaatttattagtccaatggagaaacttttcagagtcattgctcctcctctgaatgcaggaaaaacactaacagatgaacaagttgttatgggcaataagctccttgtatatattagctgttgtctagcaggtcgtgcctatccccttggtgacatccctgaagatctggttcccttggttaaaaaccaggtttttgaatttctaattcgcctgcattcagcagaggcttctcctgaggaagaaatctatccttacattcggactttgctacattttgacacaagagaatttctaaatgtattggcactgacttttgaagattttaaaaatgacaagcaagctgtggaatatcaacagcgaattgtggatattttgttgaaagttatggtggagaattcagactttaccccctcacaagtaggatgtctctttaccttccttgctcggcagcttgcaaagcctgacaacaccttgtttgtaaacagaacactttttgatcaggtccttgaattcctttgtagtcctgacgatgactcccgacactctgaaagacagcaggtccttttagaattgctgcaggctggaggcatagttcaatttgaagagagtcgactcatccggatggcagaaaaagctgagttctatcaaatttgtgaatttatgtatgaaagagaacaccaatatgataaaattattgattgctacttacgtgaccctctgcgagaggaagaagtctttaattacattcacaatatcttatccattcccggacacagtgcagaggagaagcagtctgtatggcagaaagcaatggatcatattgaggaactcgtgtccctgaagccttgtaaagctgcggagctggttgccacccacttttctggacatattgaaacggtcattaaaaaacttcagaaccaggttttgcttttcaaatttttgaggagtcttcttgacccaagggaaggtattcatgtaaatcaagaattactgcaaatatctccttgtatcacagagcagttcattgagctgttgtgtcagttcaacccaacccaagttatagagactctgcaagtccttgagtgctaccgtctggaagaaactattcagattactcagaagtatcaacttcatgaagtcaccgcttatctattggaaaagaaaggagatattcatggtgccttcctaataatgttagagagactacaaagcaaacttcaagaggtaacacatcaaggtgaaaataccaaagaggatccctcattgaaggatgttgaagatactatggtggagaccattgctctttgccagagaaattcacataatttgaaccagcagcaacgtgaggcactttggtttccgttattggaggcaatgatggcccctcagaagctgtccagttcagccattcctcatctacactctgaagctctgaagtctttgaccatgcaagttttaaatagcatggcagcatttattgcccttccatcaatcttgcaaagaatcttacaggatccagtttatggaaaaggaaaacttggagaaatccagggacttatcttgggaatgttagatacctttaactatgaacaaaccctgctggaaacaacaaccagccttctaaaccaagatctccattggtcattgtgtaacctgagagcttcggtcaccagaggactgaatcccaaacaagattactgctctatatgtttgcagcagtacaagagacgccaagaaatggctgatgaaataattgtctttagctgtggccatttgtatcactcattctgcctacaaaacaaagaatgcactgtggaatttgagggccaaacaagatggacatgctacaaatgcagttcaagtaacaaagtaggaaaactcagtgaaaattcatctgaaattaaaaagggaaggataaccccatcacaggtaaaaatgtctccatcgtatcatcagtccaaaggggatcccactgctaaaaagggaacctcagaacctgttctggatccacagcaaatccaagcatttgatcagctttgccgtctctaccgaggaagctccaggctggctctcctcacggaactctcccagaatcgcagcagcgagagctataggccattcagtggctcgcagagtgctcctgctttcaacagcatcttccagaatgagaacttccagctgcagctcattcctccacctgtgactgaggattgatgactccatggagcctggcccaggagaaccagagatgatcccgaggcagctggggagaggccccgcctctggtgggcttggcctccaccacctcccacgcttctgagaagaggttccaaattgggcttctgtgcccagagcgtccacagcaccattcccagtgtagactcccagtcttctccacattgctgtcatggcgtcagttcaccagactcattgattttgttttgcttgttaagcaaaggaatgtcacatacctctgtccagctttttaggaaatacatttcgcctattgcgactttttccatttaccctgaagcctagaaagtaggtggaactcacacaaatggcattccagagtctgccatactccgtctcctccagctgctggataatacagaggaacttcaacttctacagggaacagtggttggccaggctgcagtataactgaagcatgccttggagagagcagacactgtgggggccagggccatctccctttaatgtgttcatgttaaaacctatttgagtgtaagacttgccctttctaacaataaatgctccgtgtttaagttc

SEQ ID NO: 198718 - DNA, 946 bp, Homo sapiens
  Payload ID: 19215
  Gene Name: vacuolar protein sorting 8 homolog (S. cerevisiae)
  ENST ID: ENST00000458721
  CDS Start-End: 1-326
tggctcttgcgtggtctttccatgaaggaaaagcaaaagcagtagtgggattatcaggggatgccagtaagcgaaaggctattgttgcagaccggatggtagaaatcctattccattatgcagatcgagctctgaaaaagtgcccagaccaaggaaaaatccaagtgatggagcagcattttcaggatatggtgcctgtcatagttgattactgccttctgctgcagcgaaagacttcagatgagtcaaaaccccatcctagtcctttcaggagcttccttgatgtttttgtggaacttgtcatgaaagaccatacctgtgaataaataaaccatttaccactttctacaattgacatgatatacatataaagaaattacacatttaggaaaaagtaaataatctcaacagggatcttttatttagtcagatgtatgataaattaagtgagaattcagtggccaaaggagtatttttggagtgccttgagccatatattttaagtgataaattggtgggaatcacaccccaagtaatgaaagacttgattgttcatttccaagataaaaaattaatggaaaatgtggaagcgctcattgtacatatggatatcaccagcctagatattcagcaggtagttctcatgtgttgggaaaatcgtttatatgatgctatgatctatgtctacaacagaggcatgaatgaatttattagtccaatggagaaacttttcagagtcattgctcctcctctgaatgcaggaaaaacactaacagatgaacaagttgttatgggcaataagctccttgtatatattagctgttgtctagcaggtcgtgcctatccccttggtgacatccctgaagatctggttcccttggttaaaaaccaggtttttgaatttctaattcgcctgcattcagcagaggcttctcctgaggaagaa

SEQ ID NO: 198719 - DNA, 549 bp, Homo sapiens
  Payload ID: 19215
  Gene Name: vacuolar protein sorting 8 homolog (S. cerevisiae)
  ENST ID: ENST00000441141
  CDS Start-End: 128-549
atttgagattctggaagccagtgatgcagtcttgcttggagataatcattcaggtcttcgtgagctaaggccaaacaaacaaaaaacacttgctttgatggactgaatactgttattagaagtaaatatggaaaatgaaccagaccatgaaaatgtggaacagagcctctgtgccaagacgagcgaagaagagctgaataagtctttcaatctagaagcttcactttcaaaattctcttacatagatatggacaaggaactggagttcaaaaatgatctgattgatgacaaggagtttgatattcctcaagttgatactcctccaacactggaaagcatactaaatgagactgatgatgaagatgagtcttttattcttgaggatcctacattgttaaacattgatactattgattctcactcctatgatacttcatctgtggcaagctcagatagtggtgacaggaccaacttaaaaaggaagaagaaattacctgattctttttcacttcatggatcagttatgcgccattcacttttgaagggaat

SEQ ID NO: 198720 - DNA, 811 bp, Homo sapiens
  Payload ID: 19215
  Gene Name: vacuolar protein sorting 8 homolog (S. cerevisiae)
  ENST ID: ENST00000422105
  CDS Start-End: 206-811
cggtccacggccggaatggcagcaagctcaggggaactggagcactaccctggggtttggaatgtaaagaaggcattaattgcagcttttggcaccgatttacccttatgctgttagagataatcattcaggtcttcgtgagctaaggccaaacaaacaaaaaacacttgctttgatggactgaatactgttattagaagtaaatatggaaaatgaaccagaccatgaaaatgtggaacagagcctctgtgccaagacgagcgaagaagagctgaataagtctttcaatctagaagcttcactttcaaaattctcttacatagatatggacaaggaactggagttcaaaaatgatctgattgatgacaaggagtttgatattcctcaagttgatactcctccaacactggaaagcatactaaatgagactgatgatgaagatgagtcttttattcttgaggatcctacattgttaaacattgatactattgattctcactcctatgatacttcatctgtggcaagctcagatagtggtgacaggaccaacttaaaaaggaagaagaaattacctgattctttttcacttcatggatcagttatgcgccattcacttttgaagggaatttctgcccagatagtgtctgcagctgacaaagtagatgctggcttgcctacagcaattgcagtatccagtctgatagcagtgggtacatctcatggattggctttaatatttgatcagaatcaagctttgcgactctgtctgggtagcactagtgttggaggtcagtatggcgctatctctgcc

SEQ ID NO: 198721 - DNA, 185 bp, Homo sapiens
  Payload ID: 19215
  Gene Name: vacuolar protein sorting 8 homolog (S. cerevisiae)
  ENST ID: ENST00000426319
  CDS Start-End: 1-185
cacttcatggatcagttatgcgccattcacttttgaagggaatttctgcccagatagtgtctgcagctgtggagagtaactcatatttgctagaatgggaaccacctgttgaggattacatttccatgacgttttctgaatttaatccttatgacaaagtagatgctggcttgcctacagcaatt

SEQ ID NO: 198722 - DNA, 592 bp, Homo sapiens
  Payload ID: 19215
  Gene Name: vacuolar protein sorting 8 homolog (S. cerevisiae)
  ENST ID: ENST00000445089
  CDS Start-End: 228-592
gatcagctgctgtgtcatatcggcacggggaatagaatggtgaacaaggcagatctggtctttgctctctcatggaacctgcattccaactgggggcaaggaatggtggtttagacaatgaggaaatcattacaatgtgagataatcattcaggtcttcgtgagctaaggccaaacaaacaaaaaacacttgctttgatggactgaatactgttattagaagtaaatatggaaaatgaaccagaccatgaaaatgtggaacagagcctctgtgccaagacgagcgaagaagagctgaataagtctttcaatctagaagcttcactttcaaaattctcttacatagatatggacaaggaactggagttcaaaaatgatctgattgatgacaaggagtttgatattcctcaagttgatactcctccaacactggaaagcatactaaatgagactgatgatgaagatgagtcttttattcttgaggatcctacattgttaaacattgatactattgattctcactcctatgatacttcatctgtggcaagctcagatagtggtgacaggaccaacttaaaaaggaagaagaaatt

SEQ ID NO: 198723 - DNA, 207 bp, Homo sapiens
  Payload ID: 19215
  Gene Name: vacuolar protein sorting 8 homolog (S. cerevisiae)
  ENST ID: ENST00000628962
  CDS Start-End: 1-207
atggaaaatgaaccagaccatgaaaatgtggaacagagcctctgtgccaagacgagcgaagaagagctgaataagtctttcaatctagaagcttcactttcaaaattctcttacatagatatggacaaggaactggagttcaaaaatgatctgggtctcactctgttgtccaggttggagtacagtggtgcaaacatggctcactga

SEQ ID NO: 198724 - DNA, 4969 bp, Homo sapiens
  Payload ID: 19215
  Gene Name: vacuolar protein sorting 8 homolog (S. cerevisiae)
  Uniprot ID: Q8N3P4
  ENST ID: ENST00000625842
  CDS Start-End: 108-4394
ggaatggcagcaagctcagagataatcattcaggtcttcgtgagctaaggccaaacaaacaaaaaacacttgctttgatggactgaatactgttattagaagtaaatatggaaaatgaaccagaccatgaaaatgtggaacagagcctctgtgccaagacgagcgaagaagagctgaataagtctttcaatctagaagcttcactttcaaaattctcttacatagatatggacaaggaactggagttcaaaaatgatctgattgatgacaaggagtttgatattcctcaagttgatactcctccaacactggaaagcatactaaatgagactgatgatgaagatgagtcttttattcttgaggatcctacattgttaaacattgatactattgattctcactcctatgatacttcatctgtggcaagctcagatagtggtgacaggaccaacttaaaaaggaagaagaaattacctgattctttttcacttcatggatcagttatgcgccattcacttttgaagggaatttctgcccagatagtgtctgcagctgacaaagtagatgctggcttgcctacagcaattgcagtatccagtctgatagcagtgggtacatctcatggattggctttaatatttggaaaagatcagaatcaagctttgcgactctgtctgggtagcactagtgttggaggtcagtatggcgctatctctgccctcagtatcaacaatgattgctcaagacttctttgtggctttgctaaaggacagatcaccatgtgggatttggccagtggaaaacttctaagatcaataacagatgctcatcctccaggaacagcaatattgcatatcaagtttacagatgatccaactcttgcaatttgcaacgacagcggaggctctgtttttgaattgacatttaagagagtgatgggagtgagaacctgtgaatctagatgtctgttcagtggttccaagggtgaagtctgctgtattgagcctctgcattctaagcctgagttgaaagatcatcccatcacacagttttcattattggccatggcatccttgacaaaaatactggtcattggattgaaaccatccttgaaagtatggatgacttttccctatggccggatggatccttccagtgtgccactgctggcctggcactttgtagcagtacaaaattacgtgaatcccatgcttgccttctgcagaggagatgttgttcattttctattggtaaagagagatgaatctggagcaatacatgttactaagcaaaagcatcttcacctatactatgacctcatcaactttacctggataaattcacgcacagttgtgctcttagacagcgtagagaagttgcatgtgattgatcggcaaacacaagaggaattggagacagtggagatctcagaagttcagctggtctacaatagcagccatttcaaatcactagccactggaggaaatgttagccaggcactggctttggttggagagaaggcttgttatcaatccatcagtagctatggtggtcagatcttttatttggggacaaaatctgtttatgtgatgatgctgaggagctggagagagagagtggatcatctcctgaaacaagattgtcttacagaagcgttggctcttgcgtggtctttccatgaaggaaaagcaaaagcagtagtgggattatcaggggatgccagtaagcgaaaggctattgttgcagaccggatggtagaaatcctattccattatgcagatcgagctctgaaaaagtgcccagaccaaggaaaaatccaagtgatggagcagcattttcaggatatggtgcctgtcatagttgattactgccttctgctgcagcgaaaggatcttttatttagtcagatgtatgataaattaagtgagaattcagtggccaaaggagtatttttggagtgccttgagccatatattttaagtgataaattggtgggaatcacaccccaagtaatgaaagacttgattgttcatttccaagataaaaaattaatggaaaatgtggaagcgctcattgtacatatggatatcaccagcctagatattcagcaggtagttctcatgtgttgggaaaatcgtttatatgatgctatgatctatgtctacaacagaggcatgaatgaatttattagtccaatggagaaacttttcagagtcattgctcctcctctgaatgcaggaaaaacactaacagatgaacaagttgttatgggcaataagctccttgtatatattagctgttgtctagcaggtcgtgcctatccccttggtgacatccctgaagatctggttcccttggttaaaaaccaggtttttgaatttctaattcgcctgcattcagcagaggcttctcctgaggaagaaatctatccttacattcggactttgctacattttgacacaagagaatttctaaatgtattggcactgacttttgaagattttaaaaatgacaagcaagctgtggaatatcaacagcgaattgtggatattttgttgaaagttatggtggagaattcagactttaccccctcacaagtaggatgtctctttaccttccttgctcggcagcttgcaaagcctgacaacaccttgtttgtaaacagaacactttttgatcaggtccttgaattcctttgtagtcctgacgatgactcccgacactctgaaagacagcaggtccttttagaattgctgcaggctggaggcatagttcaatttgaagagagtcgactcatccggatggcagaaaaagctgagttctatcaaatttgtgaatttatgtatgaaagagaacaccaatatgataaaattattgattgctacttacgtgaccctctgcgagaggaagaagtctttaattacattcacaatatcttatccattcccggacacagtgcagaggagaagcagtctgtatggcagaaagcaatggatcatattgaggaactcgtgtccctgaagccttgtaaagctgcggagctggttgccacccacttttctggacatattgaaacggtcattaaaaaacttcagaaccaggttttgcttttcaaatttttgaggagtcttcttgacccaagggaaggtattcatgtaaatcaagaattactgcaaatatctccttgtatcacagagcagttcattgagctgttgtgtcagttcaacccaacccaagttatagagactctgcaagtccttgagtgctaccgtctggaagaaactattcagattactcagaagtatcaacttcatgaagtcaccgcttatctattggaaaagaaaggagatattcatggtgccttcctaataatgttagagagactacaaagcaaacttcaagaggtaacacatcaaggtgaaaataccaaagaggatccctcattgaaggatgttgaagatactatggtggagaccattgctctttgccagagaaattcacataatttgaaccagcagcaacgtgaggcactttggtttccgttattggaggcaatgatggcccctcagaagctgtccagttcagccattcctcatctacactctgaagctctgaagtctttgaccatgcaagttttaaatagcatggcagcatttattgcccttccatcaatcttgcaaagaatcttacaggatccagtttatggaaaaggaaaacttggagaaatccagggacttatcttgggaatgttagatacctttaactatgaacaaaccctgctggaaacaacaaccagccttctaaaccaagatctccattggtcattgtgtaacctgagagcttcggtcaccagaggactgaatcccaaacaagattactgctctatatgtttgcagcagtacaagagacgccaagaaatggctgatgaaataattgtctttagctgtggccatttgtatcactcattctgcctacaaaacaaagaatgcactgtggaatttgagggccaaacaagatggacatgctacaaatgcagttcaagtaacaaagtaggaaaactcagtgaaaattcatctgaaattaaaaagggaaggataaccccatcacaggtaaaaatgtctccatcgtatcatcagtccaaaggggatcccactgctaaaaagggaacctcagaacctgttctggatccacagcaaatccaagcatttgatcagctttgccgtctctaccgaggaagctccaggctggctctcctcacggaactctcccagaatcgcagcagcgagagctataggccattcagtggctcgcagagtgctcctgctttcaacagcatcttccagaatgagaacttccagctgcagctcattcctccacctgtgactgaggattgatgactccatggagcctggcccaggagaaccagagatgatcccgaggcagctggggagaggccccgcctctggtgggcttggcctccaccacctcccacgcttctgagaagaggttccaaattgggcttctgtgcccagagcgtccacagcaccattcccagtgtagactcccagtcttctccacattgctgtcatggcgtcagttcaccagactcattgattttgttttgcttgttaagcaaaggaatgtcacatacctctgtccagctttttaggaaatacatttcgcctattgcgactttttccatttaccctgaagcctagaaagtaggtggaactcacacaaatggcattccagagtctgccatactccgtctcctccagctgctggataatacagaggaacttcaacttctacagggaacagtggttggccaggctgcagtataactgaagcatgccttggagagagcagacactgtgggggccagggccatctccctttaatgtgttcatgttaaaacctatttgagtgtaagacttgccctttctaacaataaatgctccgtgtttaa

SEQ ID NO: 198725 - DNA, 2712 bp, Homo sapiens
  Payload ID: 19216
  Gene Name: vacuole membrane protein 1
  Uniprot ID: Q96GC9
  ENST ID: ENST00000262291
  CDS Start-End: 311-1531
gacaagttccggatcaagaatcacaaagcgagcagtcattcttcctcttgccacacccacagggcccgcactaagagcctaactgaaatcccgcgaggatcaaccgagctcgccgaaaggagggaggaacgtatcccttctggaggctgtctcagggggcagagggaccggaccggaagtgacgtgagcgggttccggttgtctggagcccagcggcgggtgtgagagtccgtaaggagcagcttccaggatcctgagatccggagcagccggggtcggagcggctcctcaagagttactgatctatgaaatggcagagaatggaaaaaattgtgaccagagacgtgtagcaatgaacaaggaacatcataatggaaatttcacagacccctcttcagtgaatgaaaagaagaggagggagcgggaagaaaggcagaatattgtcctgtggagacagccgctcattaccttgcagtatttttctctggaaatccttgtaatcttgaaggaatggacctcaaaattatggcatcgtcaaagcattgtggtgtcttttttactgctgcttgctgtgcttatagctacgtattatgttgaaggagtgcatcaacagtatgtgcaacgtatagagaaacagtttcttttgtatgcctactggataggcttaggaattttgtcttctgttgggcttggaacagggctgcacacctttctgctttatctgggtccacatatagcctcagttacattagctgcttatgaatgcaattcagttaattttcccgaaccaccctatcctgatcagattatttgtccagatgaagagggcactgaaggaaccatttctttgtggagtatcatctcaaaagttaggattgaagcctgcatgtggggtatcggtacagcaatcggagagctgcctccatatttcatggccagagcagctcgcctctcaggtgctgaaccagatgatgaagagtatcaggaatttgaagagatgctggaacatgcagagtctgcacaagactttgcctcccgggccaaactggcagttcaaaaactagtacagaaagttggattttttggaattttggcctgtgcttcaattccaaatcctttatttgatctggctggaataacgtgtggacactttctggtacctttttggaccttctttggtgcaaccctaattggaaaagcaataataaaaatgcatatccagaaaatttttgttataataacattcagcaagcacatagtggagcaaatggtggctttcattggtgctgtccccggcataggtccatctctgcagaagccatttcaggagtacctggaggctcaacggcagaagcttcaccacaaaagcgaaatgggcacaccacagggagaaaactggttgtcctggatgtttgaaaagttggtcgttgtcatggtgtgttacttcatcctatctatcattaactccatggcacaaagttatgccaaacgaatccagcagcggttgaactcagaggagaaaactaaataagtagagaaagttttaaactgcagaaattggagtggatgggttctgccttaaattgggaggactccaagccgggaaggaaaattcccttttccaacctgtatcaatttttacaacttttttcctgaaagcagtttagtccatactttgcactgacatactttttccttctgtgctaaggtaaggtatccaccctcgatgcaatccaccttgtgttttcttagggtggaatgtgatgttcagcagcaaacttgcaacagactggccttctgtttgttactttcaaaaggcccacatgatacaattagagaattcccaccgcacaaaaaaagttcctaagtatgttaaatatgtcaagctttttaggcttgtcacaaatgattgctttgttttcctaagtcatcaaaatgtatataaattatctagattggataacagtcttgcatgtttatcatgttacaatttaatattccatcctgcccaacccttcctctcccatcctcaaaaaagggccattttatgatgcattgcacaccctctggggaaattgatctttaaattttgagacagtataaggaaaatctggttggtgtcttacaagtgagctgacaccattttttattctgtgtatttagaatgaagtcttgaaaaaaactttataaagacatctttaatcattccaaaattgtgtccgttttcttgagcgttttgattttttacttttagcttataccagctgaatggcagccttgcctaatccacctacaacaagaatttcttaagctttcttttatttgcatgagagagccactaccaaggcatgttttgttatgctgaaactgggctgctgcatactgctaaatggcacctctgggattggcctacctggggatttcttggtttgtgaaaacaggagaggagaaatatctcatacaagtgaaaggatactggagagagaaattacccatttctaaaaaaaaaccacactctgtcgtatctgtgttaatgttttctagcatgtactctggtttcaacagacacaaatttatatgttaacccagttttcttgccgttctgtaagtgttttattcttagtgtgatttttttccattgggatgtttttgattgaacttgttcattttgttttgcttgggaggaaaataaacaattttacttttttcctt

SEQ ID NO: 198726 - DNA, 606 bp, Homo sapiens
  Payload ID: 19216
  Gene Name: vacuole membrane protein 1
  ENST ID: ENST00000587259
  CDS Start-End: 330-606
tgttcctgtcacccaggctggagcgcaatggcacgatcttggctcactgcaacctccgcctcgggggtccaagcgattctcctgcctcagcctcccgagtagctgggattacagccacccaccaccacgccaggctaatttttgtatttttagtagagacggggtttcaccatgttgcgcaggctagtcttgaactcctgacctcactatctgcctgccttggcctcccaaagtgctgggattacaggcgtgagccactgcgcctggtctattatctgtcttttactataaccatcctaacagctcctcaagagttactgatctatgaaatggcagagaatggaaaaaattgtgaccagagacgtgtagcaatgaacaaggaacatcataatggaaatttcacagacccctcttcagtgaatgaaaagaagaggagggagcgggaagaaaggcagaatattgtcctgtggagacagccgctcattaccttgcagtatttttctctggaaatccttgtaatcttgaaggaatggacctcaaaattatggcatcgtcaaagcattgtggtgtcttttttactgctgcttgctgtgcttatagctacgt

SEQ ID NO: 198727 - DNA, 838 bp, Homo sapiens
  Payload ID: 19216
  Gene Name: vacuole membrane protein 1
  ENST ID: ENST00000592619
  CDS Start-End: 1-176
acccctcttcagtgaatgaaaagaagaggagggagcgggaagaaaggcagaatattgtcctgtggagacagccgctcattaccttgcagtatttttctctggaaatccttgtaatcttgaaggaatggacctcaaagactttgcctcccgggccaaactggcagttcaaaaactagtacagaaagttggattttttggaattttggcctgtgcttcaattccaaatcctttatttgatctggctggaataacgtgtggacactttctggtacctttttggaccttctttggtgcaaccctaattggaaaagcaataataaaaatgcatatccagaaaatttttgttataataacattcagcaagcacatagtggagcaaatggtggctttcattggtgctgtccccggcataggtccatctctgcagaagccatttcaggagtacctggaggctcaacggcagaagcttcaccacaaaagcgaaatgggcacaccacagggagaaaactggttgtcctggatgtttgaaaagttggtcgttgtcatggtgtgttacttcatcctatctatcattaactccatggcacaaagttatgccaaacgaatccagcagcggttgaactcagaggagaaaactaaataagtagagaaagttttaaactgcagaaattggagtggatgggttctgccttaaattgggaggactccaagccgggaaggaaaattcccttttccaacctgtatcaatttttacaacttttttcctgaaagcagtttagtccatactttgcactgacatactttttccttctgtgctaaggtaaggtatccaccctcg

SEQ ID NO: 198728 - DNA, 545 bp, Homo sapiens
  Payload ID: 19216
  Gene Name: vacuole membrane protein 1
  ENST ID: ENST00000585847
  CDS Start-End: 125-352
agcgggttccggttgtctggagcccagcggcgggtgtgagagtccgtaaggagcagcttccaggatcctgagatccggagcagccggggtcggagcggctcctcaagagttactgatctatgaaatggcagagaatggaaaaaattgtgaccagagacgtgtagcaatgaacaaggaacatcataatggaaatttcacagacccctcttcagtgaatgaaaagaagaggagggagcgggaagaaaggcagaatattgtcctgtggagacagccgctcattaccttgcagtatttttctctggaaatccttgtaatcttgaaggaatggacctcaaatatgtgcaacgtatagagaaacagtttcttttgtatgcctactggataggcttaggaattttgtcttctgttgggcttggaacagggctgcacacctttctgctttatctgggtccacatatagcctcagttacattagctgcttatgaatgcaattcagttaattttcccgaaccaccctatcctgatcagattatttgtccagatga

SEQ ID NO: 198729 - DNA, 558 bp, Homo sapiens
  Payload ID: 19216
  Gene Name: vacuole membrane protein 1
  ENST ID: ENST00000593168
  CDS Start-End: 128-352
gtgagcgggttccggttgtctggagcccagcggcgggtgtgagagtccgtaaggagcagcttccaggatcctgagatccggagcagccggggtcggagcggctcctcaagagttactgatctatgaaatggcagagaatggaaaaaattgtgaccagagacgtgtagcaatgaacaaggaacatcataatggaaatttcacagacccctcttcagtgaatgaaaagaagaggagggagcgggaagaaaggcagaatattgtcctgtggagacagccgctcattaccttgcagtatttttctctggaaatccttgtaatcttgaaggaatggacctcaaaggtccacatatagcctcagttacattagctgcttatgaatgcaattcagttaattttcccgaaccaccctatcctgatcagattatttgtccagatgaagagggcactgaaggaaccatttctttgtggagtatcatctcaaaagttaggattgaagcctgcatgtggggtatcggtacagcaatcggagagctgcctccatatttcatggccagagca

SEQ ID NO: 198730 - DNA, 580 bp, Homo sapiens
  Payload ID: 19216
  Gene Name: vacuole membrane protein 1
  ENST ID: ENST00000589823
  CDS Start-End: 80-580
gtaaggagcagcttccaggatcctgagatccggagcagccggggtcggagcggctcctcaagagttactgatctatgaaatggcagagaatggaaaaaattgtgaccagagacgtgtagcaatgaacaaggaacatcataatggaaatttcacagacccctcttcagtgaatgaaaagaagaggagggagcgggaagaaaggcagaatattgtcctgtggagacagccgctcattaccttgcagtatttttctctggaaatccttgtaatcttgaaggaatggacctcaaaattatggcatcgtcaaagcattgtggtgtcttttttactgctgcttgctgtgcttatagctacgtattatgttgaaggagtgcatcaacagtatgtgcaacgtatagagaaacagtttcttttgtatgcctactggataggcttaggaattttgtcttctgttgggcttggaacagggctgcacacctttctgctttatctgattatttgtccagatgaagagggcactgaaggaaccatttctttgtggagtatcatctcaaaagttaggattgaagcctgcatgtgg

SEQ ID NO: 198731 - DNA, 583 bp, Homo sapiens
  Payload ID: 19216
  Gene Name: vacuole membrane protein 1
  ENST ID: ENST00000587945
  CDS Start-End: 450-583
tgtctggagcccagcggcgggtgtgagagtccgtaaggagcagcttccaggatcctgagatccggagcagccggggtcggagcggattatggcatcgtcaaagcattgtggtgtcttttttactgctgcttgctgtgcttatagctacgtattatgttgaaggagtgcatcaacagtatgtgcaacgtatagagaaacagtttcttttgtatgcctactggataggcttaggaattttgtcttctgttgggcttggaacagggctgcacacctttctgctttatctgggtccacatatagcctcagttacattagctgcttatgaatgcaattcagttaattttcccgaaccaccctatcctgatcagattatttgtccagatgaagagggcactgaaggaaccatttctttgtggagtatcatctcaaaagttaggattgaagcctgcatgtggggtatcggtacagcaatcggagagctgcctccatatttcatggccagagcagctcgcctctcaggtgctgaaccagatgatgaagagtatcaggaatttgaagagatgctggaacatgcagagtctgc

SEQ ID NO: 198732 - DNA, 800 bp, Homo sapiens
  Payload ID: 19216
  Gene Name: vacuole membrane protein 1
  ENST ID: ENST00000591315
  CDS Start-End: 387-800
ctgagatccggagcagccggggtcggagcgggtaggtaaactaactcagggaattggggaccgaagcctgaggctgtcctcagagcttggcgtcttccggagctctcccacttaggcattgcggatctggggcactgtgattccgacttccagcagtgttttaggacgctgctgactggatgtctcaccctggatgtctcacgctggcggtagccaggttatttgggacaccttctcatggttggtcacccggacattgaacccagacaccgggctgttcgttctcctctccgcgtacttggaagccttgctaggcttctttagagaacctcttagtcccgggatgtccaggaccttggactcctcaagagttactgatctatgaaatggcagagaatggaaaaaattgtgaccagagacgtgtagcaatgaacaaggaacatcataatggaaatttcacagacccctcttcagtgaatgaaaagaagaggagggagcgggaagaaaggcagaatattgtcctgtggagacagccgctcattaccttgcagtatttttctctggaaatccttgtaatcttgaaggaatggacctcaaaattatggcatcgtcaaagcattgtggtgtcttttttactgctgcttgctgtgcttatagctacgtattatgttgaaggagtgcatcaacagtatgtgcaacgtatagagaaacagtttcttttgtatgcctactggataggcttaggaattttgtcttctgttgggcttggaacagggctgcacacctttctgctttatctg

SEQ ID NO: 198733 - DNA, 544 bp, Homo sapiens
  Payload ID: 19216
  Gene Name: vacuole membrane protein 1
  ENST ID: ENST00000586245
  CDS Start-End: 126-260
gagcgggttccggttgtctggagcccagcggcgggtgtgagagtccgtaaggagcagcttccaggatcctgagatccggagcagccggggtcggagcggctcctcaagagttactgatctatgaaatggcagagaatggaaaaaattgtgaccagagacgtgtagcaatgaacaaggaacatcataatggaaatttcacagattatggcatcgtcaaagcattgtggtgtcttttttactgctgcttgctgtgcttatagctacgtattatgttgaaggagtgcatcaacagtatgtgcaacgtatagagaaacagtttcttttgtatgcctactggataggcttaggaattttgtcttctgttgggcttggaacagggctgcacacctttctgctttatctgggtccacatatagcctcagttacattagctgcttatgaatgcaattcagttaattttcccgaaccaccctatcctgatcagattatttgtccagatgaagagggcactgaaggaaccatttctttgtggagtatcatctca

SEQ ID NO: 198734 - DNA, 341 bp, Homo sapiens
  Payload ID: 19216
  Gene Name: vacuole membrane protein 1
  ENST ID: ENST00000592106
  CDS Start-End: 108-341
gcttccaggatcctgagatccggagcagccggggtcggagcggtttgtaatgtattgctggattttattttgctgtattagctcctcaagagttactgatctatgaaatggcagagaatggaaaaaattgtgaccagagacgtgtagcaatgaacaaggaacatcataatggaaatttcacagacccctcttcagtgaatgaaaagaagaggagggagcgggaagaaaggcagaatattgtcctgtggagacagccgctcattaccttgcagtatttttctctggaaatccttgtaatcttgaaggaatggacctcaaaattatggcatcgtcaaagcatt

SEQ ID NO: 198735 - DNA, 791 bp, Homo sapiens
  Payload ID: 19216
  Gene Name: vacuole membrane protein 1
  ENST ID: ENST00000591877
  CDS Start-End: 1-678
ggtatcggtacagcaatcggagagctgcctccatatttcatggccagagcagctcgcctctcaggtgctgaaccagatgatgaagagtatcaggaatttgaagagatgctggaacatgcagagtctgcacaagactttgcctcccgggccaaactggcagttcaaaaactagtacagaaagttggattttttggaattttggcctgtgcttcaattccaaatcctttatttgatctggctggaataacgtgtggacactttctggtacctttttggaccttctttggtgcaaccctaattggaaaagcaataataaaaatgcatatccagaaaatttttgttataataacattcagcaagcacatagtggagcaaatggtggctttcattgggctggaggacaatggcgcactgcaacctccacctcccagtgctgtccccggcataggtccatctctgcagaagccatttcaggagtacctggaggctcaacggcagaagcttcaccacaaaagcgaaatgggcacaccacagggagaaaactggttgtcctggatgtttgaaaagttggtcgttgtcatggtgtgttacttcatcctatctatcattaactccatggcacaaagttatgccaaacgaatccagcagcggttgaactcagaggagaaaactaaataagtagagaaagttttaaactgcagaaattggagtggatgggttctgccttaaattgggaggactccaagccgggaaggaaaattcccttttccaacctgtatcaatttttacaa

SEQ ID NO: 198736 - DNA, 2866 bp, Homo sapiens
  Payload ID: 19217
  Gene Name: v-akt murine thymoma viral oncogene homolog 1
  Uniprot ID: P31749
  ENST ID: ENST00000349310
  CDS Start-End: 432-1874
ggcggcggcggcaggaccgagcgcggcaggcggctggcccagcgcacgcagcgcggcccgaagacgggagcaggcggccgagcaccgagcgctgggcaccgggcaccgagcggcggcggcacgcgaggcccggccccgagcagcgcccccgcccgccgcggcctccagcccggccccgcccagcgccggcccgcggggatgcggagcggcgggcgccggaggccgcggcccggctaggcccgcgctcgcgcccggacgcggcggcccggggcttagggaaggccgagccagcctgggtcaaagaagtcaaaggggctgcctggaggaggcagcctgtcagctggtgcatcagaggctgtggccaggccagctgggctcggggagcgccagcctgagaggagcgcgtgagcgtcgcgggagcctcgggcaccatgagcgacgtggctattgtgaaggagggttggctgcacaaacgaggggagtacatcaagacctggcggccacgctacttcctcctcaagaatgatggcaccttcattggctacaaggagcggccgcaggatgtggaccaacgtgaggctcccctcaacaacttctctgtggcgcagtgccagctgatgaagacggagcggccccggcccaacaccttcatcatccgctgcctgcagtggaccactgtcatcgaacgcaccttccatgtggagactcctgaggagcgggaggagtggacaaccgccatccagactgtggctgacggcctcaagaagcaggaggaggaggagatggacttccggtcgggctcacccagtgacaactcaggggctgaagagatggaggtgtccctggccaagcccaagcaccgcgtgaccatgaacgagtttgagtacctgaagctgctgggcaagggcactttcggcaaggtgatcctggtgaaggagaaggccacaggccgctactacgccatgaagatcctcaagaaggaagtcatcgtggccaaggacgaggtggcccacacactcaccgagaaccgcgtcctgcagaactccaggcaccccttcctcacagccctgaagtactctttccagacccacgaccgcctctgctttgtcatggagtacgccaacgggggcgagctgttcttccacctgtcccgggagcgtgtgttctccgaggaccgggcccgcttctatggcgctgagattgtgtcagccctggactacctgcactcggagaagaacgtggtgtaccgggacctcaagctggagaacctcatgctggacaaggacgggcacattaagatcacagacttcgggctgtgcaaggaggggatcaaggacggtgccaccatgaagaccttttgcggcacacctgagtacctggcccccgaggtgctggaggacaatgactacggccgtgcagtggactggtgggggctgggcgtggtcatgtacgagatgatgtgcggtcgcctgcccttctacaaccaggaccatgagaagctttttgagctcatcctcatggaggagatccgcttcccgcgcacgcttggtcccgaggccaagtccttgctttcagggctgctcaagaaggaccccaagcagaggcttggcgggggctccgaggacgccaaggagatcatgcagcatcgcttctttgccggtatcgtgtggcagcacgtgtacgagaagaagctcagcccacccttcaagccccaggtcacgtcggagactgacaccaggtattttgatgaggagttcacggcccagatgatcaccatcacaccacctgaccaagatgacagcatggagtgtgtggacagcgagcgcaggccccacttcccccagttctcctactcggccagcggcacggcctgaggcggcggtggactgcgctggacgatagcttggagggatggagaggcggcctcgtgccatgatctgtatttaatggtttttatttctcgggtgcatttgagagaagccacgctgtcctctcgagcccagatggaaagacgtttttgtgctgtgggcagcaccctcccccgcagcggggtagggaagaaaactatcctgcgggttttaatttatttcatccagtttgttctccgggtgtggcctcagccctcagaacaatccgattcacgtagggaaatgttaaggacttctgcagctatgcgcaatgtggcattggggggccgggcaggtcctgcccatgtgtcccctcactctgtcagccagccgccctgggctgtctgtcaccagctatctgtcatctctctggggccctgggcctcagttcaacctggtggcaccagatgcaacctcactatggtatgctggccagcaccctctcctgggggtggcaggcacacagcagccccccagcactaaggccgtgtctctgaggacgtcatcggaggctgggcccctgggatgggaccagggatgggggatgggccagggtttacccagtgggacagaggagcaaggtttaaatttgttattgtgtattatgttgttcaaatgcattttgggggtttttaatctttgtgacaggaaagccctcccccttccccttctgtgtcacagttcttggtgactgtcccaccgggagcctccccctcagatgatctctccacggtagcacttgaccttttcgacgcttaacctttccgctgtcgccccaggccctccctgactccctgtgggggtggccatccctgggcccctccacgcctcctggccagacgctgccgctgccgctgcaccacggcgtttttttacaacattcaactttagtatttttactattataatataatatggaaccttccctccaaattcttcaataaaagttgcttttcaaa

SEQ ID NO: 198737 - DNA, 2710 bp, Homo sapiens
  Payload ID: 19217
  Gene Name: v-akt murine thymoma viral oncogene homolog 1
  Uniprot ID: P31749
  ENST ID: ENST00000407796
  CDS Start-End: 276-1718
ggcggccgagcaccgagcgctgggcaccgggcaccgagcggcggcggcacgcgaggcccggccccgagcagcgcccccgcccgccgcggcctccagcccggccccgcccagcgccggcccgcggggatgcggagcggcgggcgccggaggccgcggcccggctaggcccgcgctcgcgcccggacgcggcggcccgaggctgtggccaggccagctgggctcggggagcgccagcctgagaggagcgcgtgagcgtcgcgggagcctcgggcaccatgagcgacgtggctattgtgaaggagggttggctgcacaaacgaggggagtacatcaagacctggcggccacgctacttcctcctcaagaatgatggcaccttcattggctacaaggagcggccgcaggatgtggaccaacgtgaggctcccctcaacaacttctctgtggcgcagtgccagctgatgaagacggagcggccccggcccaacaccttcatcatccgctgcctgcagtggaccactgtcatcgaacgcaccttccatgtggagactcctgaggagcgggaggagtggacaaccgccatccagactgtggctgacggcctcaagaagcaggaggaggaggagatggacttccggtcgggctcacccagtgacaactcaggggctgaagagatggaggtgtccctggccaagcccaagcaccgcgtgaccatgaacgagtttgagtacctgaagctgctgggcaagggcactttcggcaaggtgatcctggtgaaggagaaggccacaggccgctactacgccatgaagatcctcaagaaggaagtcatcgtggccaaggacgaggtggcccacacactcaccgagaaccgcgtcctgcagaactccaggcaccccttcctcacagccctgaagtactctttccagacccacgaccgcctctgctttgtcatggagtacgccaacgggggcgagctgttcttccacctgtcccgggagcgtgtgttctccgaggaccgggcccgcttctatggcgctgagattgtgtcagccctggactacctgcactcggagaagaacgtggtgtaccgggacctcaagctggagaacctcatgctggacaaggacgggcacattaagatcacagacttcgggctgtgcaaggaggggatcaaggacggtgccaccatgaagaccttttgcggcacacctgagtacctggcccccgaggtgctggaggacaatgactacggccgtgcagtggactggtgggggctgggcgtggtcatgtacgagatgatgtgcggtcgcctgcccttctacaaccaggaccatgagaagctttttgagctcatcctcatggaggagatccgcttcccgcgcacgcttggtcccgaggccaagtccttgctttcagggctgctcaagaaggaccccaagcagaggcttggcgggggctccgaggacgccaaggagatcatgcagcatcgcttctttgccggtatcgtgtggcagcacgtgtacgagaagaagctcagcccacccttcaagccccaggtcacgtcggagactgacaccaggtattttgatgaggagttcacggcccagatgatcaccatcacaccacctgaccaagatgacagcatggagtgtgtggacagcgagcgcaggccccacttcccccagttctcctactcggccagcggcacggcctgaggcggcggtggactgcgctggacgatagcttggagggatggagaggcggcctcgtgccatgatctgtatttaatggtttttatttctcgggtgcatttgagagaagccacgctgtcctctcgagcccagatggaaagacgtttttgtgctgtgggcagcaccctcccccgcagcggggtagggaagaaaactatcctgcgggttttaatttatttcatccagtttgttctccgggtgtggcctcagccctcagaacaatccgattcacgtagggaaatgttaaggacttctgcagctatgcgcaatgtggcattggggggccgggcaggtcctgcccatgtgtcccctcactctgtcagccagccgccctgggctgtctgtcaccagctatctgtcatctctctggggccctgggcctcagttcaacctggtggcaccagatgcaacctcactatggtatgctggccagcaccctctcctgggggtggcaggcacacagcagccccccagcactaaggccgtgtctctgaggacgtcatcggaggctgggcccctgggatgggaccagggatgggggatgggccagggtttacccagtgggacagaggagcaaggtttaaatttgttattgtgtattatgttgttcaaatgcattttgggggtttttaatctttgtgacaggaaagccctcccccttccccttctgtgtcacagttcttggtgactgtcccaccgggagcctccccctcagatgatctctccacggtagcacttgaccttttcgacgcttaacctttccgctgtcgccccaggccctccctgactccctgtgggggtggccatccctgggcccctccacgcctcctggccagacgctgccgctgccgctgcaccacggcgtttttttacaacattcaactttagtatttttactattataatataatatggaaccttccctccaaattcttcaataaaagttgcttttcaaa

SEQ ID NO: 198738 - DNA, 3913 bp, Homo sapiens
  Payload ID: 19217
  Gene Name: v-akt murine thymoma viral oncogene homolog 1
  Uniprot ID: P31749
  ENST ID: ENST00000402615
  CDS Start-End: 1482-2924
aagaatatgtgcttatggtaaaggcaggcggcaggtacggaggctgtgggaagtcggggtccctccgcccccacaggcagccctgtgctggcctggtgtatacgtttctgtgcagacgtacaccaccctgtgtgagcacagatgtatttttacacatggctctggacagctgtctgactctgtcagcagcaggccttggaggggctcaggcccgtgtgggggtggggggacatccagaggtctttgagtccagccctctgcctccaggccacgcccactcagtgtcgtcagagccccctgtgcctgaggcgtgcgcggctcggagccctgccctcggagtcctgcggtgccttcctcgagtctggcctgctttccatcctgctaagtacttggggcatttccctctttgggtaaggtgtggtcttccctgtcctggcattagacacaaggcagtgggccttcctgccattctaagtgtagcttaagacaatcagtgcaaagcaaccctttgtgggtgtccagcccttgcctcgggaggccagaaaggtggcctggggggagagcgtctaagctggctgtggaaagacccatgttgggatccattccacagaggtcgtcaggggtctctgcctggcctggaggtcccagagaggaccctcctcccctcaggaaggcccatctggaagggtagcagaggactgctcacaggaagagcatgcgaagtgctctttctggggatgcctgtagttggtgatgtgggaactgggttttgagggatgcctaggagttcatccatcagaggggaaatgaggaagccatgcaggatcaatggataaagtgtgctcaggtgagggttggctggtgggccgctgcagggcgggggcctgtccagtgctcccccacttacttgctgcctcccgactgctgtaattatgggtctgtaaccaccctggactgggtgctcctcactgacggacttgtctgaacctctctttgtctccagcgcccagcactgggcctggcaaaacctgagacgcccggtacatgttggccaaatgaatgaaccagattcagaccggcaggggcgctgtggtttaggaggggcctggggtttctcccaggaggtttttgggcttgcgctggagggctctggactcccgtttgcgccagtggcctgcatcctggtcctgtcttcctcatgtttgaatttctttgctttcctagtctggggagcagggaggagccctgtgccctgtcccaggatccatgggtaggaacaccatggacagggagagcaaacggggccatctgtcaccaggggcttagggaaggccgagccagcctgggtcaaagaagtcaaaggggctgcctggaggaggcagcctgtcagctggtgcatcagaggctgtggccaggccagctgggctcggggagcgccagcctgagaggagcgcgtgagcgtcgcgggagcctcgggcaccatgagcgacgtggctattgtgaaggagggttggctgcacaaacgaggggagtacatcaagacctggcggccacgctacttcctcctcaagaatgatggcaccttcattggctacaaggagcggccgcaggatgtggaccaacgtgaggctcccctcaacaacttctctgtggcgcagtgccagctgatgaagacggagcggccccggcccaacaccttcatcatccgctgcctgcagtggaccactgtcatcgaacgcaccttccatgtggagactcctgaggagcgggaggagtggacaaccgccatccagactgtggctgacggcctcaagaagcaggaggaggaggagatggacttccggtcgggctcacccagtgacaactcaggggctgaagagatggaggtgtccctggccaagcccaagcaccgcgtgaccatgaacgagtttgagtacctgaagctgctgggcaagggcactttcggcaaggtgatcctggtgaaggagaaggccacaggccgctactacgccatgaagatcctcaagaaggaagtcatcgtggccaaggacgaggtggcccacacactcaccgagaaccgcgtcctgcagaactccaggcaccccttcctcacagccctgaagtactctttccagacccacgaccgcctctgctttgtcatggagtacgccaacgggggcgagctgttcttccacctgtcccgggagcgtgtgttctccgaggaccgggcccgcttctatggcgctgagattgtgtcagccctggactacctgcactcggagaagaacgtggtgtaccgggacctcaagctggagaacctcatgctggacaaggacgggcacattaagatcacagacttcgggctgtgcaaggaggggatcaaggacggtgccaccatgaagaccttttgcggcacacctgagtacctggcccccgaggtgctggaggacaatgactacggccgtgcagtggactggtgggggctgggcgtggtcatgtacgagatgatgtgcggtcgcctgcccttctacaaccaggaccatgagaagctttttgagctcatcctcatggaggagatccgcttcccgcgcacgcttggtcccgaggccaagtccttgctttcagggctgctcaagaaggaccccaagcagaggcttggcgggggctccgaggacgccaaggagatcatgcagcatcgcttctttgccggtatcgtgtggcagcacgtgtacgagaagaagctcagcccacccttcaagccccaggtcacgtcggagactgacaccaggtattttgatgaggagttcacggcccagatgatcaccatcacaccacctgaccaagatgacagcatggagtgtgtggacagcgagcgcaggccccacttcccccagttctcctactcggccagcggcacggcctgaggcggcggtggactgcgctggacgatagcttggagggatggagaggcggcctcgtgccatgatctgtatttaatggtttttatttctcgggtgcatttgagagaagccacgctgtcctctcgagcccagatggaaagacgtttttgtgctgtgggcagcaccctcccccgcagcggggtagggaagaaaactatcctgcgggttttaatttatttcatccagtttgttctccgggtgtggcctcagccctcagaacaatccgattcacgtagggaaatgttaaggacttctgcagctatgcgcaatgtggcattggggggccgggcaggtcctgcccatgtgtcccctcactctgtcagccagccgccctgggctgtctgtcaccagctatctgtcatctctctggggccctgggcctcagttcaacctggtggcaccagatgcaacctcactatggtatgctggccagcaccctctcctgggggtggcaggcacacagcagccccccagcactaaggccgtgtctctgaggacgtcatcggaggctgggcccctgggatgggaccagggatgggggatgggccagggtttacccagtgggacagaggagcaaggtttaaatttgttattgtgtattatgttgttcaaatgcattttgggggtttttaatctttgtgacaggaaagccctcccccttccccttctgtgtcacagttcttggtgactgtcccaccgggagcctccccctcagatgatctctccacggtagcacttgaccttttcgacgcttaacctttccgctgtcgccccaggccctccctgactccctgtgggggtggccatccctgggcccctccacgcctcctggccagacgctgccgctgccgctgcaccacggcgtttttttacaacattcaactttagtatttttactattataatataatatggaaccttccctccaaattcttcaataaaagttgcttttc

SEQ ID NO: 198739 - DNA, 922 bp, Homo sapiens
  Payload ID: 19217
  Gene Name: v-akt murine thymoma viral oncogene homolog 1
  ENST ID: ENST00000554192
  CDS Start-End: 1-553
gcactcggagaagaacgtggtgtaccgggacctcaagctggagaacctcatgctggacaaggacgggcacattaagatcacagacttcgggctgtgcaaggaggggatcaaggacggtgccaccatgaagaccttttgcggcacacctgagtacctggcccccgaggaccatgagaagctttttgagctcatcctcatggaggagatccgcttcccgcgcacgcttggtcccgaggccaagtccttgctttcagggctgctcaagaaggaccccaagcagaggcttggcgggggctccgaggacgccaaggagatcatgcagcatcgcttctttgccggtatcgtgtggcagcacgtgtacgagaagaagctcagcccacccttcaagccccaggtcacgtcggagactgacaccaggtattttgatgaggagttcacggcccagatgatcaccatcacaccacctgaccaagatgacagcatggagtgtgtggacagcgagcgcaggccccacttcccccagttctcctactcggccagcggcacggcctgaggcggcggtggactgcgctggacgatagcttggagggatggagaggcggcctcgtgccatgatctgtatttaatggtttttatttctcgggtgcatttgagagaagccacgctgtcctctcgagcccagatggaaagacgtttttgtgctgtgggcagcaccctcccccgcagcggggtagggaagaaaactatcctgcgggttttaatttatttcatccagtttgttctccgggtgtggcctcagccctcagaacaatccgattcacgtagggaaatgttaaggacttctgcagctatgcgcaatgtggcattggggggccgggcaggtcctgcccatgtgtcccctcactctgtcagccagccgccc

SEQ ID NO: 198740 - DNA, 3066 bp, Homo sapiens
  Payload ID: 19217
  Gene Name: v-akt murine thymoma viral oncogene homolog 1
  Uniprot ID: P31749
  ENST ID: ENST00000555528
  CDS Start-End: 654-2096
atggataaagtgtgctcaggtgagggttggctggtgggccgctgcagggcgggggcctgtccagtgctcccccacttacttgctgcctcccgactgctgtaattatgggtctgtaaccaccctggactgggtgctcctcactgacggacttgtctgaacctctctttgtctccagcgcccagcactgggcctggcaaaacctgagacgcccggtacatgttggccaaatgaatgaaccagattcagaccggcaggggcgctgtggtttaggaggggcctggggtttctcccaggaggtttttgggcttgcgctggagggctctggactcccgtttgcgccagtggcctgcatcctggtcctgtcttcctcatgtttgaatttctttgctttcctagtctggggagcagggaggagccctgtgccctgtcccaggatccatgggtaggaacaccatggacagggagagcaaacggggccatctgtcaccaggggcttagggaaggccgagccagcctgggtcaaagaagtcaaaggggctgcctggaggaggcagcctgtcagctggtgcatcagaggctgtggccaggccagctgggctcggggagcgccagcctgagaggagcgcgtgagcgtcgcgggagcctcgggcaccatgagcgacgtggctattgtgaaggagggttggctgcacaaacgaggggagtacatcaagacctggcggccacgctacttcctcctcaagaatgatggcaccttcattggctacaaggagcggccgcaggatgtggaccaacgtgaggctcccctcaacaacttctctgtggcgcagtgccagctgatgaagacggagcggccccggcccaacaccttcatcatccgctgcctgcagtggaccactgtcatcgaacgcaccttccatgtggagactcctgaggagcgggaggagtggacaaccgccatccagactgtggctgacggcctcaagaagcaggaggaggaggagatggacttccggtcgggctcacccagtgacaactcaggggctgaagagatggaggtgtccctggccaagcccaagcaccgcgtgaccatgaacgagtttgagtacctgaagctgctgggcaagggcactttcggcaaggtgatcctggtgaaggagaaggccacaggccgctactacgccatgaagatcctcaagaaggaagtcatcgtggccaaggacgaggtggcccacacactcaccgagaaccgcgtcctgcagaactccaggcaccccttcctcacagccctgaagtactctttccagacccacgaccgcctctgctttgtcatggagtacgccaacgggggcgagctgttcttccacctgtcccgggagcgtgtgttctccgaggaccgggcccgcttctatggcgctgagattgtgtcagccctggactacctgcactcggagaagaacgtggtgtaccgggacctcaagctggagaacctcatgctggacaaggacgggcacattaagatcacagacttcgggctgtgcaaggaggggatcaaggacggtgccaccatgaagaccttttgcggcacacctgagtacctggcccccgaggtgctggaggacaatgactacggccgtgcagtggactggtgggggctgggcgtggtcatgtacgagatgatgtgcggtcgcctgcccttctacaaccaggaccatgagaagctttttgagctcatcctcatggaggagatccgcttcccgcgcacgcttggtcccgaggccaagtccttgctttcagggctgctcaagaaggaccccaagcagaggcttggcgggggctccgaggacgccaaggagatcatgcagcatcgcttctttgccggtatcgtgtggcagcacgtgtacgagaagaagctcagcccacccttcaagccccaggtcacgtcggagactgacaccaggtattttgatgaggagttcacggcccagatgatcaccatcacaccacctgaccaagatgacagcatggagtgtgtggacagcgagcgcaggccccacttcccccagttctcctactcggccagcggcacggcctgaggcggcggtggactgcgctggacgatagcttggagggatggagaggcggcctcgtgccatgatctgtatttaatggtttttatttctcgggtgcatttgagagaagccacgctgtcctctcgagcccagatggaaagacgtttttgtgctgtgggcagcaccctcccccgcagcggggtagggaagaaaactatcctgcgggttttaatttatttcatccagtttgttctccgggtgtggcctcagccctcagaacaatccgattcacgtagggaaatgttaaggacttctgcagctatgcgcaatgtggcattggggggccgggcaggtcctgcccatgtgtcccctcactctgtcagccagccgccctgggctgtctgtcaccagctatctgtcatctctctggggccctgggcctcagttcaacctggtggcaccagatgcaacctcactatggtatgctggccagcaccctctcctgggggtggcaggcacacagcagccccccagcactaaggccgtgtctctgaggacgtcatcggaggctgggcccctgggatgggaccagggatgggggatgggccagggtttacccagtgggacagaggagcaaggtttaaatttgttattgtgtattatgttgttcaaatgcattttgggggtttttaatctttgtgacaggaaagccctcccccttccccttctgtgtcacagttcttggtgactgtcccaccgggagcctccccctcagatgatctctccacggtagcacttgaccttttcgacgcttaacctttccgctgtcgccccaggccctccctgactccctgtgggggtggccatccctgggcccctccacgcctcctggccagacgctgccgctgccgctgcaccacggcgtttttttacaacattcaactttagtatttttactattataatataatatggaaccttccctccaaattct
